United States Patent Application Publication US 2007/0015145 A1 - sequence listing, part 3

SEQ ID NO: 5520 - protein, 148 aa, Rattus norvegicus
  ref <308>: DATABASE ACCESSION NUMBER: Refseq / NP_067494
  ref <309>: DATABASE ENTRY DATE: 2002-09-19
MAESDWDTVTVLRKKGPTAAQAKSKQAILAAQRRGEDVETSKKWAAGQNKQHSITKNTAKLDRETEELHHDRVTLEVGKVIQRGRQSKGLTQKDLATKINEKPQVIADYESGRAIPNNQVLGKIERAIGLKLRGKDIGKPIEKGPKAK

SEQ ID NO: 5521 - DNA, 607 bp, Homo sapiens
  misc_feature (1)..(607): n=a, c, g or t
  ref <308>: DATABASE ACCESSION NUMBER: EMBL / AB002283
  ref <309>: DATABASE ENTRY DATE: 1999-12-10
ggcacgagccggacggacgcttngtttttcgcccgccatggccgagagcgactgggacacggtgacggtgctgcgcaagaagggccctacggccgcccaggccaaatccaagcaggctatcttagcggcacagagacgaggagaagatgtggagacttccaagaaatgggctgctggccagaacaaacaacattctattaccaagaacacggccaagctggaccgggagacagaggagctgcaccatgacagggtgaccctggaggtgggcaaggtgatccagcaaggtcggcagagcaaggggcttacgcagaaggacctggccacgaaaatcaatgagaagccacaggtgatcgcggactatgagagcggacgggccatacccaataaccaggtgcttggcaaaatcgagcgggccattggcgagtgtccctccacccttcgccgggtccgctgaacagggaggctacccgctcccagctggggttggtgagagtgggactcgggggaagaagatggccctgggggtcccctgttctctgaattcgagctcggtacccggggatcctctagagtcgacctgcaggcatgcaacctgcgtancatg

SEQ ID NO: 5522 - protein, 140 aa, Homo sapiens
  misc_feature (1)..(140): Xaa=Unknown amino acid
MAESDWDTVTVLRKKGPTAAQAKSKQAILAAQRRGEDVETSKKWAAGQNKQHSITKNTAKLDRETEELHHDRVTLEVGKVIQQGRQSKGLTQKDLATKINEKPQVIADYESGRAIPNNQVLGKIERAIGECPSTLRRVRX

SEQ ID NO: 5523 - DNA, 569 bp, Rattus norvegicus
  ref <308>: DATABASE ACCESSION NUMBER: EMBL / AA891751
  ref <309>: DATABASE ENTRY DATE: 2000-03-03
aacggtttctgcaatccaaagatttattaaacaattatgtcccaccctgccccgatctcttccctcccactttctcctcagtctctcttgagtatccgtggctccctgttttccccaagacgcaatagcaaaacgagcattttcagcttcagaggtcgggcgaaggacgtggggtctgagaatgactttgcagacgatgagcacagcaccttcgaggacagcgagagcaggagagactccctgtttgtgccgcacagacctgaaaaaaaaacttgcatgaagcatggttttccagagagatgctatatattcttgtgttgtcaatggagaagggtggtttgagccatcagtatttggtttgcagggtaccaccactggatgctttgtctttctgtgaaggttgttgtatccttgcaaggctccagggatgggcctgacggagacagcgaaggaccttctcccattacatgacggacatcacggatctcttccttggatacaggatataaattgaagaaatattctccttttccaagtggcataacatacaaaatgtaggagaaaatttt

SEQ ID NO: 5524 - protein, 1951 aa, Rattus norvegicus
  ref <308>: DATABASE ACCESSION NUMBER: Refseq / NP_037251
  ref <309>: DATABASE ENTRY DATE: 2002-11-05
MAQALLVPPGPESFRLFTRESLAAIEKRAAEEKAKKPKKEQDIDDENKPKPNSDLEAGKNLPFIYGDIPPEMVSEPLEDLDPYYVSKKTFVVLNKGKAIFRFSATSALYILTPLNPVRKIAIKILVHSLFSMLIMCTILTNCVFMTLSNPPDWTKNVEYTFTGIYTFESLIKILARGFCLEDFTFLRDPWNWLDFSVIVMAYVTEFVDLGNVSALRTFRVLRALKTISVIPGLKTIVGALIQSVKKLSDVMILTVFCLSVFALIGLQLFMGNLRNKCSQWPPSDSAFETNTTSYFNGTMDSNGTFVNVTMSTFNWKDYIADDSHFYVLDGQKDPLLCGNGSDAGQCPEGYICVKAGRNPNYGYTSFDTFSWAFLSLFRLMTQDYWENLYQLTLRAAGKTYMIFFVLVIFLGSFYLVNLILAVVAMAYEEQNQATLEEAEQKEAEFQQMLEQLKKQQEEAQAVAAASAASRDFSGIGGLGELLESSSEASKLSSKSAKEWRNRRKKRRQREHLEGNHRADGDRFPKSESEDSVKRRSFLLSLDGNPLTGDKKLCSPHQSLLSIRGSLFSPRRNSKTSIFSFRGRAKDVGSENDFADDEHSTFEDSESRRDSLFVPHRPGERRNSNGTTTETEVRKRRLSSYQISMEMLEDSSGRQRSMSIASILTNTMEELEESRQKCPPCWYRFANVFLIWDCCDAWLKVKHLVNLIVMDPFVDLAITICIVLNTLFMAMEHYPMTQQFSSVLTVGNLVFTGIFTAEMVLKIIAMDPYYYFQEGWNIFDGIIVSLSLMELGLANVEGLSVLRSFRLLRVFKLAKSWPTLNMLIKIIGNSVGALGNLTLVLAIIVFIFAVVGMQLFGKSYKECVCKINVDCKLPRWHMNDFFHSFLIVFRVLCGEWIETMWDCMEVAGQTMCLIVFMLVMVIGNLVVLNLFLALLLSSFSSDNLAATDDDNEMNNLQIAVGRMQKGIDFVKNKIRECFRKAFFRKPKVIEIQEGNKIDSCMSNNTGIEISKELNYLKDGNGTTSGVGTGSSVEKYVIDENDYMSFINNPSLTVTVPIAVGESDFENLNTEEFSSESELEESKEKLNATSSSEGSTVDVAPPREGEQAEIEPEEDLKPEACFTEGCIKKFPFCQVSTEEGKGKIWWNLRKTCYSIVEHNWFETFIVFMILLSSGALAFEDIYIEQRKTIKTMLEYADKVFTYIFILEMLLKWVAYGFQTYFTNAWCWLDFLIVDVSLVSLVANALGYSELGAIKSLRTLRALRPLRALSRFEGMRVVVNALVGAIPSIMNVLLVCLIFWLIFSIMGVNLFAGKFYHCVNTTTGNMFEIKEVNNFSDCQALGKQARWKNVKVNFDNVGAGYLALLQVATFKGWMDIMYAAVDSRDVKLQPIYEENLYMYLYFVIFIIFGSFFTLNLFIGVIIDNFNQQKKKFGGQDIFMTEEQKKYYNAMKKLGSKKPQKPIPRPANKFQGMVFDFVTRQVFDISIMILICLNMVTMMVETDDQSKYMTLVLSRINLVFIVLFTGEFLLKLISLRYYYFTIGWNIFDFVVVILSIVGMFLAELIEKYFVSPTLFRVIRLARIGRILRLIKGAKGIRTLLFALMMSLPALFNIGLLLFLVMFIYAIFGMSNFAYVKKEAGIDDMFNFETFGNSMICLFQITTSAGWDGLLAPILNSAPPDCDPDAIHPGSSVKGDCGNPSVGIFFFVSYIIISFLVVVNMYIAVILENFSVATEESAEPLSEDDFEMFYEVWEKFDPDATQFIEFCKLSDFAAALDPPLLIAKPNKVQLIAMDLPMVSGDRIHCLDILFAFTKRVLGESGEMDALRIQMEDRFMASNPSKVSYEPITTTLKRKQEEVSAAIIQRNYRCYLLKQRLKNISSKYDKETIKGRIDLPIKGDMVIDKLNGNSTPEKTDGSSSTTSPPSYDSVTKPDKEKFEKDKPEKEIKGKEVRENQK

SEQ ID NO: 5525 - DNA, 7831 bp, Homo sapiens
ccagcaccccggggctgcgcactgcagctccccaggccacccaccacccttctggtctctgagcccaggatgcgaggatggccagaccatctctgtgcaccctggtgcctctgggccctgagtgcttgcgccccttcacccgggagtcactggcagccatagaacagcgggcggtggaggaggaggcccggctgcagcggaataagcagatggagattgaggagcccgaacggaagccacgaagtgacttggaggctggcaagaacctacccatgatctacggagaccccccgccggaggtcatcggcatccccctggaggacctggatccctactacagcaataagaagaccttcatcgtactcaacaagggcaaggccatcttccgcttctccgccacacctgctctctacctgctgagccccttcagcgtagtcaggcgcggggccatcaaggtgctcatccatgcgctgttcagcatgttcatcatgatcaccatcttgaccaactgcgtattcatgaccatgagtgacccgcctccctggtccaagaatgtggagtacaccttcacagggatctacacctttgagtccctcatcaagatactggcccgaggcttctgtgtcgacgacttcacattcctccgggacccctggaactggctggacttcagtgtcatcatgatggcgtacctgacagagtttgtggacttgggcaacatctcagccctgaggaccttccgggtgctgcgggccctcaaaaccatcacggtcatcccagggctgaagacgatcgtgggggccctgatccagtcggtgaaaaagctgtcggatgtgatgatcctcactgtcttctgcctgagcgtctttgcgctggtaggactgcagctcttcatgggaaacctgaggcagaagtgtgtgcgctggcccccgccgttcaacgacaccaacaccacgtggtacagcaatgacacgtggtacggcaatgacacatggtatggcaatgagatgtggtacggcaatgactcatggtatgccaacgacacgtggaacagccatgcaagctgggccaccaacgatacctttgattgggacgcctacatcagtgatgaagggaacttctacttcctggagggctccaacgatgccctgctctgtgggaacagcagtgatgctgggcactgccctgagggttatgagtgcatcaagaccgggcggaaccccaactatggctacaccagctatgacaccttcagctgggccttcttggctctcttccgcctcatgacacaggactattgggagaacctcttccagctgacccttcgagcagctggcaagacctacatgatcttcttcgtggtcatcatcttcctgggctctttctacctcatcaatctgatcctggccgtggtggccatggcatatgccgagcagaatgaggccaccctggccgaggataaggagaaagaggaggagtttcagcagatgcttgagaagttcaaaaagcaccaggaggagctggagaaggccaaggccgcccaagctctggaaggtggggaggcagatggggacccagcccatggcaaagactgcaatggcagcctggacacatcgcaaggggagaagggagccccgaggcagagcggcagcggagacagcggcatctccgacgccatggaagaactggaagaggcccaccaaaagtgcccaccatggtggtacaagtgcgcccacaaagtgctcatatggaactgctgcgccccgtggctgaagttcaagaacatcatccacctgatcgtcatggacccgttcgtggacctgggcatcaccatctgcatcgtgctcaacaccctcttcatggccatggaacattaccccatgacggagcactttgacaacgtgctcactgtgggcaacctggtcttcacaggcatcttcacagcagagatggttctgaagctgattgccatggacccctacgagtatttccagcagggttggaatatcttcgacagcatcatcgtcaccctcagcctggtagagctaggcctggccaacgtacagggactgtctgtgctacgctccttccgtctgctgcgggtcttcaagctggccaagtcgtggccaacgctgaacatgctcatcaagatcattggcaattcagtgggggcgctgggtaacctgacgctggtgctggctatcatcgtgttcatcttcgccgtggtgggcatgcagctgtttggcaagagctacaaggagtgcgtgtgcaagattgccttggactgcaacctgccgcgctggcacatgcatgatttcttccactccttcctcatcgtcttccgcatcctgtgcggggagtggatcgagaccatgtgggactgcatggaggtggccggccaagccatgtgcctcaccgtcttcctcatggtcatggtcatcggcaatcttgtggtcctgaacctgttcctggctctgctgctgagctccttcagcgccgacagtctggcagcctcggatgaggatggcgagatgaacaacctgcagattgccatcgggcgcatcaagttgggcatcggctttgccaaggccttcctcctggggctgctgcatggcaagatcctgagccccaaggacatcatgctcagcctcggggaggctgacggggccggggaggctggagaggcgggggagactgcccccgaggatgagaagaaggagccgcccgaggaggacctgaagaaggacaatcacatcctgaaccacatgggcctggctgacggccccccatccagcctcgagctggaccaccttaacttcatcaacaacccctacctgaccatacaggtgcccatcgcctccgaggagtccgacctggagatgcccaccgaggaggaaaccgacactttctcagagcctgaggatagcaagaagccgccgcagcctctctatgatgggaactcgtccgtctgcagcacagctgactacaagccccccgaggaggaccctgaggagcaggcagaggagaaccccgagggggagcagcctgaggagtgcttcactgaggcctgcgtgcagcgctggccctgcctctacgtggacatctcccagggccgtgggaagaagtggtggactctgcgcagggcctgcttcaagattgtcgagcacaactggttcgagaccttcattgtcttcatgatcctgctcagcagtggggctctggccttcgaggacatctacattgagcagcggcgagtcattcgcaccatcctagaatatgccgacaaggtcttcacctacatcttcatcatggagatgctgctcaaatgggtggcctacggctttaaggtgtacttcaccaacgcctggtgctggctcgacttcctcatcgtggatgtctccatcatcagcttggtggccaactggctgggctactcggagctgggacccatcaaatccctgcggacactgcgggccctgcgtcccctgagggcactgtcccgattcgagggcatgagggtggtggtgaacgccctcctaggcgccatcccctccatcatgaatgtgctgcttgtctgcctcatcttctggctgatcttcagcatcatgggtgtcaacctgtttgccggcaagttctactactgcatcaacaccaccacctctgagaggttcgacatctccgaggtcaacaacaagtctgagtgcgagagcctcatgcacacaggccaggtccgctggctcaatgtcaaggtcaactacgacaacgtgggtctgggctacctctccctcctgcaggtggccaccttcaagggttggatggacatcatgtatgcagccgtggactcccgggagaaggaggagcagccgcagtacgaggtgaacctctacatgtacctctactttgtcatcttcatcatctttggctccttcttcaccctcaacctcttcattggcgtcatcattgacaacttcaaccagcagaagaagaagttaggggggaaagacatctttatgacggaggaacagaagaaatactataacgccatgaagaagcttggctccaagaagcctcagaagccaattccccggccccagaacaagatccagggcatggtgtatgacctcgtgacgaagcaggccttcgacatcaccatcatgatcctcatctgcctcaacatggtcaccatgatggtggagacagacaaccagagccagctcaaggtggacatcctgtacaacatcaacatgatcttcatcatcatcttcacaggggagtgcgtgctcaagatgctcgccctgcgccagtactacttcaccgttggctggaacatctttgacttcgtggtcgtcatcctgtccattgtgggccttgccctctctgacctgatccagaagtacttcgtgtcacccacgctgttccgtgtgatccgcctggcgcggattgggcgtgtcctgcggctgatccgcggggccaagggcatccggacgctgctgttcgccctcatgatgtcgctgcctgccctcttcaacatcggcctcctcctcttcctggtcatgttcatctactccatcttcggcatgtccaactttgcctacgtcaagaaggagtcgggcatcgatgatatgttcaacttcgagaccttcggcaacagcatcatctgcctgttcgagatcaccacgtcggccggctgggacgggctcctcaaccccatcctcaacagcgggcccccagactgtgaccccaacctggagaacccgggcaccagtgtcaagggtgactgcggcaacccctccatcggcatctgcttcttctgcagctatatcatcatctccttcctcatcgtggtcaacatgtacatcgccatcatcctggagaacttcaatgtggccacagaggagagcagcgagccccttggtgaagatgactttgagatgttctacgagacatgggagaagttcgaccccgacgccacccagttcatcgcctacagccgcctctcagacttcgtggacaccctgcaggaaccgctgaggattgccaagcccaacaagatcaagctcatcacactggacttgcccatggtgccaggggacaagatccactgcctggacatcctctttgccctgaccaaagaggtcctgggtgactctggggaaatggacgccctcaagcagaccatggaggagaagttcatggcagccaacccctccaaggtgtcctacgagcccatcaccaccaccctcaagaggaagcacgaggaggtgtgcgccatcaagatccagagggcctaccgccggcacctgctacagcgctccatgaagcaggcatcctacatgtaccgccacagccacgacggcagcggggatgacgcccctgagaaggaggggctgcttgccaacaccatgagcaagatgtatggccacgagaatgggaacagcagctcgccaagcccggaggagaagggcgaggcaggggacgccggacccactatggggctgatgcccatcagcccctcagacactgcctggcctcccgcccctcccccagggcagactgtgcgcccaggtgtcaaggagtctcttgtctagcaggcagcatcggggtggcccactgagtctcggcatagtccccagagctcccccgtggtgcctgcacacagagtgagggaggagggctttgaatctgggactgtgcctggctccctgatgggggacaggatttggccacactggggctgacacccaggcccgagcgcctgcgttcccagaccatgggaaatgggaattgcgctcaggggctccatgctgggtctgaggcccctgcctccaagatttaacctgcaagttgctctgacctcctctgggccctgtcgcccctccttttggcctgggggaggtcagaacattcgaatctctgcccctcacttgaggaggagctggcctgcggtggagggatcagttgccccccatcaccagagtcttaagggtcactggcctctccccaggaagtggctcagacccctcagccccagcccagacaaagatgtcttaacctcagggagtgcagacacctaaccccagggcactgccagcccaccccctttgactctggggtgcagcttcacccaccaggccagctcaggaattccctagaaaagggaaatgtgactggttcagaaatagctcctcaaagcctcaaaacctgattggccactggatcctgctgctttgggctgggatggtgactcctgaaacctcttcctaggccacgtccaggtccgtagctcccctggctggcccctaggggaagagcagaaggaaggatgccacttgggaatgaattgtccttttctaggaagcacgggggagtgagacaggctgggtcctgccagctggatcgctgcacatggcctgagcatccagacctgagcgggagtcagggacctgctgctcagtaagaagattctcgccccttccctctctccctgcctcactcctccgtgagcaccaccagggctccaggagcctcatccagcctcagagatctcccttctcatctccccacgcccgtctctttctcacctttcccacctctctccccaaagtgatcctaagaatgtacagttgagctcaggttagatatttcgaccctggggcgtgcagcagggaaggcccaactggttcaggctcaaccttccaacttcctgtggcctgaagaagcacttctgctgcatcgctgttctgggcatggcagggccaggcctctgctggctcctggagagcagaggctgtgcccagaggaggaggggtgagagacctgctcaggcgtcgctggatttattcacttgtgtgtgtacctgtggctgtgtgtctgcttgtatgcatttataggcctgtgtgtatagctgtgtgtgtgttcaagtgcgtgactgtatgtgtgtgtgtgaaccactgtgtactggagcctgcattatgcacgtgtctgggtatctttgtatatatgtgtatatatgtgtgccctggactgtttcaaggtccacggagtacggctggtgtgtcatactgtgcaggcctgtccctgggagtgttcccgtgcctgggagagtggacctgtgctgtgagtgtgtggatgcgtgtgaacgcatgtggtaaggtgtgtactcagggcattctgttggcctaagtgcctcttctttttcttcttgtttctcatgaaaagtttgattaaaattcaggaagcagcaaaaccttcaaaacaagacatgtatgtgtgcttgagtgtgtgaacacgtgtgtgtgtgtgtgcacatctacatgccatgcctatgggccagagttgtctttattgtccaccatgctctctcacctgctcccagtcctgcctgaacagccctctctctcactcccctctcctccccttcctgtttctcgttgtcacacccatggcctcagccctgctccctgcctcctgcctatgtctcctctatggaaggaggcctccactccttccatctcttccttcagaagtttcgtctaatgggggcagtctccccttcctggcacattgcccctctgccttgccctcctgggccctgggctggcacagcccctggagcctcagaaatctgtttgattggatattctcctcggactgtgtgcaggttgcagaggaagagtagatgagccgggtccggcctctccctgcctgtggcccctcccctgcagacggatgcccattcctgcctggtccagtggggaacaggtcccacgccaggccagcaggcgggctcctttgtacagttcttacaataaaccctccttggtgcctctgg

SEQ ID NO: 5526 - protein, 1836 aa, Homo sapiens; identical to SEQ ID NO: 3249

SEQ ID NO: 5527 - DNA, 591 bp, Rattus norvegicus
  ref <308>: DATABASE ACCESSION NUMBER: EMBL / AA891760
  ref <309>: DATABASE ENTRY DATE: 2000-03-03
catgacagacaaggttgctctttattggttaaagtcccggctggcccgcagactcaacagtgcacacctgataggggttgagccagggaagctcgtccccactgggcagacaccaagggagatgacaggtgctgtggccaggtcaccacccaggagcagatgagccttttgtttgtttgttccctaaggacctaccaggccctacccacagtacttccaacaagcatccctcaggccctcactaaccccccaagtcatcatagcagagtaaagacacagaaaacagcactcagctaaaagaaaccaatgagccgtggggggtgggggatgtctcagcccatcacagacatctgtacctatctccctagagtcagacaccgcaggggtggaaggtgcatgcgacagggggtgggtagtggttcgcaaagcagatggtgaggccatgaacgtgcaggtggcccaaggtgatgctaggccaggtcctggcatcgagggccaaggctcccaaggatcctgactgggtaaggcacagagtttgggttttctcaggggcccagtcccagcctggccccgaagagcctctgcaagcgg

SEQ ID NO: 5528 - DNA, 591 bp, Rattus norvegicus; identical to SEQ ID NO: 5527
  ref <308>: DATABASE ACCESSION NUMBER: EMBL / AA891760
  ref <309>: DATABASE ENTRY DATE: 2000-03-03

SEQ ID NO: 5529 - DNA, 555 bp, Rattus norvegicus
  ref <308>: DATABASE ACCESSION NUMBER: EMBL / AA891774
  ref <309>: DATABASE ENTRY DATE: 2000-03-03
ccagggacctccgtagtcggtctccctatcccactcccaaacctcagagcaggaaatgggcttggctgagaagattcatgcttgatgaccaggggaggcgtgcagccccccaagaagaaggggaaaagaaaaacggggaggttgaaaagcagagaggtgcaccttcccttctgaggaagcaattctggtctgggaccagttgcaaggggttagtaagagaaacctaaggggtgcttacatttttattctggcaaatgaatctcttaaaaggctccctcctaggggtgcttacatttttattctggcaaatgaatctcttaaaaggctccctccttcgttcgggggaacagcacatgtacctgtgtcagcgtgagatgcaatgctacacaagaacgtggcattgggccaatcatgtggacccctgtgctgctcccaagggagaggttctgtttgggtgtgggataaatctaaacaagcatacactcgtgttatatgtggccttaagggtaggggagcaaaaggaatggacttctctgtagagcagctcaagaggga

SEQ ID NO: 5530 - DNA, 518 bp, Rattus norvegicus
  ref <308>: DATABASE ACCESSION NUMBER: EMBL / AA891785
  ref <309>: DATABASE ENTRY DATE: 2000-03-03
gaagagctttttagtagctaaatatggcaccacgtgactcagggcaatataaattacagtatgcaaaacacactgactggctgaggtaaagcgcaccgttcctgcctcgtgtccactgtgagggaaattgctcacatgctttaaaaaacatctccatcatatatatatatatgtaaaaaaataatcccctagaaaggccaccagagaggggggctacaacgcccaccctctaccatgtacggagcacccactggagctgggtagtgtagtgtccacccctactgcttgcccagagctctgtgtccaggcaaagatgctggcaatagggttggtactggtgggccggcccttctggtgttctcggtagtggcgggtgactgtcccgtgagcagcctcagcttcaatggtcttcccgtcagggcagaccagcacagatgtcatcaggccaagggagccaaatccttgagccaggatgtcagactgtacatctccgtcatagttcttgcaggcccacacaa

SEQ ID NO: 5531 - protein, 452 aa, Rattus norvegicus
  ref <308>: DATABASE ACCESSION NUMBER: SWISS-Prot / AAG43538
  ref <309>: DATABASE ENTRY DATE: 2002-10-01
MAGYLRAVSSLCRASGSARTWAPAALTVPSWPEQPRRHYAEKRIKVEKPVVEMDGDEMTRIIWQFIKEKLILPHVDVQLKYFDLGLPNRDQTNDQVTIDSALATQKYSVAVKCATITPDEARVEEFKLKKMWKSPNGTIRNILGGTVFREPIICKNIPRLVPGWTKPITIGRHAHGDQYKATDFVVDRAGTFKLVFTPKDGSSAKEWEVYNFPAGGVGMGMYNTDESISGFAHSCFQYSIQKKWPLYLSTKNTILKAYDGRFKDIFQEIFDKHYKTDFDRNKIWYEHRLIDDMVAQVLKSSGGFVWACKNYDGDVQSDILAQGFGSLGLMTSVLVCPDGKTIEAEAAHGTVTRHYREHQKGRPTSTNPIASIFAWTRGLEHRGKLDGNQDLIRFAQTLEKVCVQTVESGAMTKDLAGCIHGLSNVKLNEHFLNTTDFLDTIKSNLDRALGKQ

SEQ ID NO: 5532 - DNA, 1596 bp, Homo sapiens
  ref <308>: DATABASE ACCESSION NUMBER: EMBL / U52144
  ref <309>: DATABASE ENTRY DATE: 1999-06-30
gggaatgagaaaataactttatttcattgtggggagcgggccgatgtccagcctcagaacttctggaactgcttcttggtccggcagccttggtgaccttgagcacgttgaagcgcactgtcttgctcagaggccggcactcgcccactgtgacgatgtcaccgatctggacgtccagctaaagtattttgacctcgggctcccaaaccgtgaccagactgatgaccaggtcaccattgactctgcactggccacccagaagtacagtgtggctgtcaagtgtgccaccatcacccctgatgaggcccgtgtggaagagttcaagctgaagaagatgtggaaaagtcccaatggaactatccggaacatccatggggggactgtcttccgggagcccatcatctgcaaaaacatcccacgcctagtccctggctggaccaagcccatcaccattggcaggcacgcccatggcgaccagtacaaggccacagactttgtggcagaccgggccggcactttcaaaatggtcttcaccccaaaagatggcagtggtgtcaaggagtgggaagtgtacaacttccccgcaggcggcgtgggcatgggcatgtacaacaccgacgagtccatctcaggttttgcgcacagctgcttccagtatgccatccagaagaaatggccgctgtacatgagcaccaagaacaccatactgaaagcctacgatgggcgtttcaaggacatcttccaggagatctttgacaagcactataagaccgacttcgacaagaataagatctggtatgagcaccggctcattgatgacatggtggctcaggtcctcaagtcttcgggcggctttgtgtgggcctgcaagaactatgacggagatgtgcagtcagacatcctggcccagggctttggctcccttggcctgatgacgtccgtcctggtctgccctgatgggaagacgattgaggctgaggccgctcatgggaccgtcacccgccactatcgggagcaccagaagggccggcccaccagcaccaaccccatcgccagcatctttgcctggacacgtggcctggagcaccgggggaagctggatgggaaccaagacctcatcaggtttgcccagatgctggagaaggtgtgcgtggagacggtggagagtggagccatgaccaaggacctggcgggctgcattcacggcctcagcaatgtgaagctgaacgagcacttcctgaacaccacggacttcctcgacaccatcaagagcaacctggacagagccctgggcaggcagtagggggaggcgccacccatggctgcagtggaggggccagggctgagccggcgggtcctcctgagcgcggcagagggtgagcctcacagcccctctctggaggcctttctaggggatgtttttttataagccagatgtttttaaaagcatatgtgtgtttcccctcatggtgacgtgaggcaggagcagtgcgttttacctcagccagtcagtatgttttgcatactgtaatttatattgcccttggaacacatggtgccatatttagctactaaaaagctcttcgcaaaaaaaaa

SEQ ID NO: 5533 - protein, 452 aa, Homo sapiens
  ref <308>: DATABASE ACCESSION NUMBER: SWISS-Prot / P48735
  ref <309>: DATABASE ENTRY DATE: 2002-06-15
MAGYLRVVRSLCRASGSRPAWAPAALTAPTSQEQPRRHYADKRIKVAKPVVEMDGDEMTRIIWQFIKEKLILPHVDIQLKYFDLGLPNRDQTDDQVTIDSALATQKYSVAVKCATITPDEARVEEFKLKKMWKSPNGTIRNILGGTVFREPIICKNIPRLVPGWTKPITIGRHAHGDQYKATDFVADRAGTFKMVFTPKDGSGVKEWEVYNFPAGGVGMGMYNTDESISGFAHSCFQYAIQKKWPLYMSTKNTILKAYDGRFKDIFQEIFDKHYKTDFDKNKIWYEHRLIDDMVAQVLKSSGGFVWACKNYDGDVQSDILAQGFGSLGLMTSVLVCPDGKTIEAEAAHGTVTRHYREHQKGRPTSTNPIASIFAWTRGLEHRGKLDGNQDLIRFAQMLEKVCVETVESGAMTKDLAGCIHGLSNVKLNEHFLNTTDFLDTIKSNLDRALGRQ

SEQ ID NO: 5534 - DNA, 518 bp, Rattus norvegicus; identical to SEQ ID NO: 5530
  ref <308>: DATABASE ACCESSION NUMBER: EMBL / AA891785
  ref <309>: DATABASE ENTRY DATE: 2000-03-03

SEQ ID NO: 5535 - protein, 452 aa, Rattus norvegicus; identical to SEQ ID NO: 5531
  ref <308>: DATABASE ACCESSION NUMBER: SWISS-Prot / AAG43538
  ref <309>: DATABASE ENTRY DATE: 2002-10-01

SEQ ID NO: 5536 - DNA, 1596 bp, Homo sapiens; identical to SEQ ID NO: 5532
  ref <308>: DATABASE ACCESSION NUMBER: EMBL / U52144
  ref <309>: DATABASE ENTRY DATE: 1999-06-30

SEQ ID NO: 5537 - protein, 452 aa, Homo sapiens; identical to SEQ ID NO: 5533
  ref <308>: DATABASE ACCESSION NUMBER: SWISS-Prot / P48735
  ref <309>: DATABASE ENTRY DATE: 2002-06-15

SEQ ID NO: 5538 - DNA, 571 bp, Rattus norvegicus
  ref <308>: DATABASE ACCESSION NUMBER: EMBL / AA891796
  ref <309>: DATABASE ENTRY DATE: 2000-03-03
aagaaccatttctactcttcaggacagggacaaagatcgccctgtgcagaaagttgggaactgcacacaaaactgcagaagcaacatttcagctgaagctggggcctggtgggagggagggtcaggcaaggagagggagtcaactttagctgccactcgggtagtgtcttgtggtggtcacagacagtaggctgtctttgggaagtgtgaatacacaggaggtccattctctgcctacacccctggctgaggtgccatcaaatcaatgtcactcaagttcctggccagccaaactccagcagcaaagagtcccaaattgaggatcaagttcctccggaagtcgttccgatcggtggcgaagcggtagacgccgcgaagccagtctcccacgttgtctggaacctcggagttctcaccggccgagccggcggcgctcaccgtcacaccgctggaagccataacagcaccgagcacgtccgtaccggcagcgcgtcgcaccgagtcggcgcaggccgatcgcgcaacttccgaccccgcacttccgccgatcagagtaataagtgaacgagaa

SEQ ID NO: 5539 - DNA, 3316 bp, Homo sapiens
  ref <308>: DATABASE ACCESSION NUMBER: EMBL / AL137721
  ref <309>: DATABASE ENTRY DATE: 2000-02-18
cttggggtggggaccgggtgaggggcctgacggcagagtcggtccagaactgcccggacagcgacgcacagcgaggagccaaaatggaagagggtgcaagtcccctcctggggccccagacgccccctcctttcttgctgcctggagcaggggcagtgctgttagtggctactcctggtgtgaacagcccatcctggccaccttccacaggaaacctgacctgaaggacagaagaggaaggaagcaggctttgccacaaatgtcagtgcagaactctggctggccccaccaagaagacagccccaagccccaggatccaggtccaccagccaactcagacagtgactcaggccacctgccgggggaggaccctgaggatacccatgctcaggaattcctgtctctgcacctgcttagaacatggggttttgactttaaactcattcacatgagtattcattatctctcctagggggtctgtattgtcaaaccagactctaggggctttggccccaaggcgtgaagggggttaagaagggaaagcataagaagggaagctgttttggggtgtggggcctccccagcctccctcaaggaagaccacacatgcaggcatcagtcagctatccttgcactcagtgaggatctgcaaggaggaccctcccaaatggagggcatgcttagaagctgctctagattggagaagaggtggcaatgatgagggggaaagaaggagaaaggaaagaaaaacctagtttcactcctccccttcttccatgtctcctcagggtcctgcagttctgagcttgggttccctttgcctggacaccaaccaagcccccaactggactggacttcagaccctcctgcagcaactccctccgcaggacattgatgagcgctactgcctggcccttggggaggaggagcgggccgagctgcagctcttctgtgccaggcggaagcaggaagccctgggacagggggtagcccgcctggtacttcccaagcttgaaggacacacctgtgagaagtgtagggagttgctgaagccaggggagtacggagtgtttgcagcccgggcaggggaacagcgctgctggcaccagccttgctttgcctgccaggcctgtggccaggccctgataaacctcatctacttctaccatgatggacaactctactgcggccgtcatcatgcagagttgctgcgcccgcgctgcccggcttgtgaccagctgatcttctcctggcgctgcaccgaggcggagggacagcgctggcatgagaaccacttctgttgccaggactgcgccgggcctctgggcgggggacgttatgccctgcctgggggaagcccctgctgccccagctgcttcgagaaccgctactcggatgcaggctcgagctgggccggggcactggaagggcaggcattccttggagcgcccccaccgcaccccccagacccaagcctcggggcccgcagctctcaccgcgcatccctggccggagcgttccaagggccgcccgaacccaccccgcgccgcggtcggggttgcggcgccagactccctcccaggcgcgggaggcggacgccctctggtggaggcgggggaccctggcgaggactctcggcggcggcggcggcgcgcacggcccaggggctgggcggggcgggaggctgggcctcacccccactagctgcggtgtaggtccagctccgcggctctgagaccagcgtttccgacccggcccggaacaggggagactggactcgaccgaactgaaggaagggaccaaacctcggtgaactctgcaaccctctcccgaacactccttgctgctgccggcggttccagcctgcaaactcagagggggctgcctggatccagtccccagcaggagaaccgacctggggacaaagcggaggcacccaaagggcaggagcaatgccgcctggagactattcgtgatcccaaggacacccctttctccacctgctcctcctcctctgactcggaacctgaaggatttttcttaggcgagcgccttccccagtcctggaagacccccggaagcctccaagcagaggacagcaacgcctctaagacgcactgcaccatgtgctagtggcgcagctcagagaggggatgtgagtgggaggaaaggggtctgtaaagcgggagaacaaggctagcctccccctaacaatcctagactgagacgcagtcaggcgcacgcccgcaagaggcggcgaggtgacaagtttggagtgcgcccccttcagtactgcgcgttctaagacttttggcggagactttcttggcaaaacccattccccaaagctacgcttcccctgctgagatagcccctacccccacctccacaggctgggacagccccgtccccaccatcctcctcccaagccaattaaatgatcacagcacgcgtgacagttaccggctggagagccggaggtgggaccgggagcaggggaccgtagaaccgggccgcgctcctcccctcctagagttcgtggaggcgcagcagagggccgtccctcttccggatgtcggactaagcgaacagcgcccccactgccggccggtagcagccggaagtgccagaccggaggtgcgtcattcaccggcgacgccgatacggttcctccagcgaggcccatgcgaagctttccactatggcttccagcactgtcccggtgagcgctgctggctcggctaatgaaactcccgaaataccggacaacgtgggagattggcttcggggcgtctaccgctttgccactgataggaatgacttccggaggaacttgatactaaatttgggactctttgctgcgggagtttggctggccaggaacttgagtgacattgacctcatggcacctcagccaggggtgtagccaagtagttctaatgccacctgtcgtcttatcatctgattgcagacaaatggaatcctgtgctgaacccgaatcttccaaaaaacagcctacaatctgtgaccaccacaagatgtgccctgatggcagctgaagtttgattcagatgggcacttttcttccccttccctgcctagtttccttttgttccttgagtccacgcagaattccattctctggtcagcagacaggcttaagctaaagtattgcctctattctgtaaagttctgtacatagttcccaagcttctgcagggggtgatttttgctcttgtcctgagaaataacagtgctgttttaaaaaacatttgaaataaataccgcacacaaaggaaaaaaaaaaaaaaaaaaa

SEQ ID NO: 5540 - protein, 313 aa, Homo sapiens
  misc_feature (1)..(313): Xaa=Unknown amino acid
MSPQGPAVLSLGSLCLDTNQAPNWTGLQTLLQQLPPQDIDERYCLALGEEERAELQLFCARRKQEALGQGVARLVLPKLEGHTCEKCRELLKPGEYGVFAARAGEQRCWHQPCFACQACGQALINLIYFYHDGQLYCGRHHAELLRPRCPACDQLIFSWRCTEAEGQRWHENHFCCQDCAGPLGGGRYALPGGSPCCPSCFENRYSDAGSSWAGALEGQAFLGAPPPHPPDPSLGARSSHRASLAGAFQGPPEPTPRRGRGCGARLPPRRGRRTPSGGGGGPWRGLSAAAAARTAQGLGGAGGWASPPLAAVX

SEQ ID NO: 5541 - DNA, 620 bp, Rattus norvegicus
  ref <308>: DATABASE ACCESSION NUMBER: EMBL / AA891800
  ref <309>: DATABASE ENTRY DATE: 2000-03-03
aaaaagttttaacaatgatgtcggacaggaagttatcagacggtcatccacttgcttcacaagagcactaaaggaaaaggagtccccggggtcctcggaggtttaaagtctcagtgcagaagccccagagtccccatcagttgcggaggaagtgccacacttcttcttctacactgctttctttactcattgaaggtgttgggatcgattcaactagtgaccttgcttcctctgtagtgcagtggaaagggctatcacagatgtgcacgttcacacaactgatagctcccttgtcacacttcttcatcaccatctctttccaatgttcatgtgcagagttaataacttcgagggcaaaagccttgtttttgaattctccattaaaagcaaacttgttttctggttttccatctggtaccttatagagtctaaaccaattgacagtggcttctaggtaacctggtttgaacttcttaacatcatcaatatcatgaaatttttcagcctcaggatcattcacattgatagcaattattttccaatctgtttcactctgatcgataagtgccaaagtccccaggatcttcacatggaccacgtctccacgggaaagaaccttg

SEQ ID NO: 5542 - protein, 330 aa, Rattus norvegicus
  ref <308>: DATABASE ACCESSION NUMBER: SWISS-Prot / AAH11417
  ref <309>: DATABASE ENTRY DATE: 2003-02-01
MRALLPLLSVGRGWRVGAAARPPRRVMSLYRTEELGHPRSQDYRLFFKHVAGHYISPFHDIPLKADCKEEHDIPRKKARNDEYENLFNMVVEIPRWTNAKMEIATEEPLNPIKQDIKNGKLRYTPNIFPHKGYIWNYGALPQTWEDPHLRDKSTDCCGDNDPIDVCEIGSKVLSRGDVVHVKILGTLALIDQSETDWKIIAINVNDPEAEKFHDIDDVKKFKPGYLEATLNWFRLYKVPDGKPENKFAFNGEFKNKAFALDVINSAHERWKEMVMKKCDKGAISCVNVHICDSPFHCTMEEARSLVESVPTPSMNKESNVEEEVWHFLRN

SEQ ID NO: 5543 - DNA, 1214 bp, Homo sapiens
  ref <308>: DATABASE ACCESSION NUMBER: EMBL / AF217187
  ref <309>: DATABASE ENTRY DATE: 2000-12-05
ccgtcattgacgccatgagcgcgctgctgcggctgctgcgcacggttgccccagccgctgcgtgcctgcggttggggaccagtgcagggaccgggtcgcgccgtgctatggccctgtaccacactgaggagcgcggccagccctgctcgcagaattaccgcctcttctttaagaatgtaactggtcactacatttccccctttcatgatattcctctgaaggtgaactctaaagaggaaaatggcattcctatgaagaaagcacgaaatgatgaatatgagaatctgtttaatatgattgtagaaatacctcggtggacaaatgctaaaatggagattgccaccaaggagccaatgaatcccattaaacaatatgtaaaggatggaaagctacgctatgtggcgaatatcttcccttacaagggttatatatggaattatggtaccctccctcagacttgggaagatccccatgaaaaagataagagcacgaactgctttggagataatgatcctattgatgtttgcgaaataggctcaaagattctttcttgtggagaagttattcatgtgaagatccttggaattttggctcttattgatgaaggtgaaacagattggaaattaattgctatcaatgcgaatgatcctgaagcctcaaagtttcatgatattgatgatgttaagaagttcaaaccgggttacctggaagctactcttaattggtttagattatataaggtaccagatggaaaaccagaaaaccagtttgcttttaatggagaattcaaaaacaaggcttttgctcttgaagttattaaatccactcatcaatgttggaaagcattgcttatgaagaagtgtaatggaggagctataaattgcacaaacgtgcagatatctgatagccctttccgttgcactcaagaggaagcaagatcattagttgaatcggtatcatcttcaccaaataaagaaagtaatgaagaagagcaagtgtggcacttccttggcaagtgattgaaacatctgaaattctgctgtcaagattcccatctctaaggactccaagtgctagagacaagggggtctatgagcatttactgacttcctgttaaaacttcattttttcaaactttttgagctatgcaatatataaataaacagtaagaattttaaaaaaaaaaaaaaaaaaaaaaaaaaaaaaaaaaaaaa

SEQ ID NO: 5544 - protein, 334 aa, Homo sapiens [sequence omitted]

SEQ ID NO: 5545 - DNA, 620 bp, Rattus norvegicus; identical to SEQ ID NO: 5541
  ref <308>: DATABASE ACCESSION NUMBER: EMBL / AA891800
  ref <309>: DATABASE ENTRY DATE: 2000-03-03

SEQ ID NO: 5546 - protein, 330 aa, Rattus norvegicus; identical to SEQ ID NO: 5542
  ref <308>: DATABASE ACCESSION NUMBER: SWISS-Prot / AAH11417
  ref <309>: DATABASE ENTRY DATE: 2003-02-01

SEQ ID NO: 5547 - DNA, 1214 bp, Homo sapiens; identical to SEQ ID NO: 5543
  ref <308>: DATABASE ACCESSION NUMBER: EMBL / AF217187
  ref <309>: DATABASE ENTRY DATE: 2000-12-05

SEQ ID NO: 5548 - protein, 334 aa, Homo sapiens [sequence omitted]

SEQ ID NO: 5549 - DNA, 648 bp, Rattus norvegicus
  ref <308>: DATABASE ACCESSION NUMBER: EMBL / AA891802
  ref <309>: DATABASE ENTRY DATE: 2000-03-03
aactacatgtgcatacagaaaatattcaaagaaaaatgcaaaccacacaactgacatgtaaatcatttccaacaaccataaaaacacttcttgctctgctctttagaaaattatttttattgttttgtaaatgtctcactttgggcaaactgagggatgtggtgctcacaggaagtggggatgagacaggtggaaggagagggcggcctggcttagcctgtgcaaccccctctggcagcctcccctacacctactgaggctgaaccccctctcccatcctcagagacaacagacaaagaaccaggttaggacagcaagataacaagattctggacacaagccagtagatatggtgcccccccacccctaaataaagggcccacagtgacagtgccgaaaggtttatatgccagtccctagcatagctaagagacatactagtcttctccatgtttggttcctctaggctgaaggctcaactgctgtacatagtcataagtgtgtggccacactgagcatgatgagggaaggtttagccgttctcctgggtacccttagacacactatacccctaggcgggtctcacccaggctcagcccctaaccctatgtataccttggggtatacctctcagctgcacacacaaat

SEQ ID NO: 5550 - DNA, 551 bp, Rattus norvegicus
  ref <308>: DATABASE ACCESSION NUMBER: EMBL / AA891810
  ref <309>: DATABASE ENTRY DATE: 2000-03-03
aatacaaagctttggcattagcaattttatgaaaaaataaaatgtactaaaaataaacgcttgtgtggcatgattggtaaatgatgcacaaaaataggttcttttttccttcaaggcaatcagtcagaaagcagtgttttccttcttcaaaaccattctaccttgttactgcaatgttgatttcacccgttcgaggagtgagctccccatcttgaggaagaggcgatatcccagaagttctcagtggctcaaggccaagggaactgtcattggcaaggtcaccaagggctgatcttcggttaactgcctgggttctggtgagcctttccatatcaaacgctacattatcagtacatggcagatttggcacaattcctagggctttcaaaatattaagtttacacataggacaggtacagtgttcactgagccagggatccacacaggatttgtggaaaacatgcttgcaggggagaacccgaacaacatcattctgcttatagctctctatgcagactgcacagtgatcgaagtctgggtctgtttcctta

SEQ ID NO: 5551 - protein, 419 aa, Rattus norvegicus
  ref <308>: DATABASE ACCESSION NUMBER: Refseq / NP_067515
  ref <309>: DATABASE ENTRY DATE: 2002-01-07
MSGAARAGPARLAALALLTCSLWPTRADNASQEYYTALINVTVQEPGRGTPLTFRIDRGRYGLDSPKAEVRGQVLAPLPIHGVADHLGCDPQTRFFVPPNIKQWIALLQRGNCTFKEKISRAAFHNAVAVVIYNNKSKEEPVTMTHPGTGDIIAVMITELRGKDILSYLEKNISVQMTIAVGTRMPPKNFSRGSLVFVSISFIVLMIISSAWLIFYFIQKIRYTNARDRNQRRLGDAAKKAISKLTTRTVKKGDKETDPDFDHCAVCIESYKQNDVVRVLPCKHVFHKSCVDPWLSEHCTCPMCKLNILRALGIVPNLPCTDNVAFDMERLTRTQAVNRRAALGDLAGDSSLGLEPLRTSGISPLPQDGELTPRTGEINIAVTKEWFIIASFGLLSALTLCYMIIRATASLNANEVEWF

SEQ ID NO: 5552 - DNA, 1153 bp, Homo sapiens
  ref <308>: DATABASE ACCESSION NUMBER: EMBL / AF155650
  ref <309>: DATABASE ENTRY DATE: 2000-05-02
ggttcttgtcctcctaatatcaacagtggattgccttgctgcagaggggaactgcacgtttaagagaaaatatcacgggccgctttccacaatgcagttgctgtagtcatctacactaataaatccaaagaggagccagttaccatgactcatccaggcactggagatattattgctgtcatgataacagaattgaggggtaaggatattttgagttatctggagaaaaacatctctgtacaaatgacaatagctgttggaactcgaatgccaccgaagaacttcagccgtggctctctagtcttcgtgtcaatatcctttattgttttgatgattatttcttcagcatggctcatattctacttcattcagaagatcaggtacacaaatgcacgcgacaggaaccagcgtcgtctcggagatgcagccaagaaagccatcagtaaattgacaaccaggacagtaaagaagggtgacaaggaaactgacccagactttgatcattgtgcagtctgcatagagagctataagcagaatgatgtcgtccgaattctcccctgcaagcatgttttccacaaatcctgcgtggatccctggcttagtgaacattgtacctgtcctatgtgcaaacttaatatattgaaggccctgggaattgtgccgaatttgccatgtactgataacgtagcattcgatatggaaaggctcaccagaacccaagctgttaaccgaagatcagccctcggcgacctcgccggcgacaactcccttggccttgagccacttcgaacttcggggatctcacctcttcctcaggatggggagctcactccgagaacaggagaaatcaacattgcagtaacaaaagaatggtttattattgccagttttggcctcctcagtgccctcacactctgctacatgatcatcagagccacagctagcttgaatgctaatgaggtagaatggttttgaagaagaaaaaacctgctttctgactgattttgccttgaaggaaaaaagaacctatttttgtgcatcatttaccaatcatgccacacaagcatttatttttagtacattttattttttcataaaattgctaatgccaaagctttgtattaaaagaaataaataataaaataaaaaaaaa

SEQ ID NO: 5553 - protein, 276 aa, Homo sapiens
  ref <308>: DATABASE ACCESSION NUMBER: Refseq / NP_060904
  ref <309>: DATABASE ENTRY DATE: 2002-04-10
MTHPGTGDIIAVMITELRGKDILSYLEKNISVQMTIAVGTRMPPKNFSRGSLVFVSISFIVLMIISSAWLIFYFIQKIRYTNARDRNQRRLGDAAKKAISKLTTRTVKKGDKETDPDFDHCAVCIESYKQNDVVRILPCKHVFHKSCVDPWLSEHCTCPMCKLNILKALGIVPNLPCTDNVAFDMERLTRTQAVNRRSALGDLAGDNSLGLEPLRTSGISPLPQDGELTPRTGEINIAVTKEWFIIASFGLLSALTLCYMIIRATASLNANEVEWF

SEQ ID NO: 5554 - DNA, 551 bp, Rattus norvegicus; identical to SEQ ID NO: 5550
  ref <308>: DATABASE ACCESSION NUMBER: EMBL / AA891810
  ref <309>: DATABASE ENTRY DATE: 2000-03-03

SEQ ID NO: 5555 - protein, 419 aa, Rattus norvegicus; identical to SEQ ID NO: 5551
  ref <308>: DATABASE ACCESSION NUMBER: Refseq / NP_067515
  ref <309>: DATABASE ENTRY DATE: 2002-01-07

SEQ ID NO: 5556 - DNA, 1153 bp, Homo sapiens; identical to SEQ ID NO: 5552
  ref <308>: DATABASE ACCESSION NUMBER: EMBL / AF155650
  ref <309>: DATABASE ENTRY DATE: 2000-05-02

SEQ ID NO: 5557 - protein, 276 aa, Homo sapiens; identical to SEQ ID NO: 5553
  ref <308>: DATABASE ACCESSION NUMBER: Refseq / NP_060904
  ref <309>: DATABASE ENTRY DATE: 2002-04-10

SEQ ID NO: 5558 - DNA, 551 bp, Rattus norvegicus; identical to SEQ ID NO: 5550
  ref <308>: DATABASE ACCESSION NUMBER: EMBL / AA891810
  ref <309>: DATABASE ENTRY DATE: 2000-03-03

SEQ ID NO: 5559 - protein, 419 aa, Rattus norvegicus; identical to SEQ ID NO: 5551
  ref <308>: DATABASE ACCESSION NUMBER: Refseq / NP_067515
  ref <309>: DATABASE ENTRY DATE: 2002-01-07

SEQ ID NO: 5560 - DNA, 1153 bp, Homo sapiens; identical to SEQ ID NO: 5552
  ref <308>: DATABASE ACCESSION NUMBER: EMBL / AF155650
  ref <309>: DATABASE ENTRY DATE: 2000-05-02

SEQ ID NO: 5561 - protein, 276 aa, Homo sapiens; identical to SEQ ID NO: 5553
  ref <308>: DATABASE ACCESSION NUMBER: Refseq / NP_060904
  ref <309>: DATABASE ENTRY DATE: 2002-04-10

SEQ ID NO: 5562 - DNA, 551 bp, Rattus norvegicus; identical to SEQ ID NO: 5550
  ref <308>: DATABASE ACCESSION NUMBER: EMBL / AA891810
  ref <309>: DATABASE ENTRY DATE: 2000-03-03

SEQ ID NO: 5563 - protein, 419 aa, Rattus norvegicus; identical to SEQ ID NO: 5551
  ref <308>: DATABASE ACCESSION NUMBER: Refseq / NP_067515
  ref <309>: DATABASE ENTRY DATE: 2002-01-07

SEQ ID NO: 5564 - DNA, 1153 bp, Homo sapiens; identical to SEQ ID NO: 5552
  ref <308>: DATABASE ACCESSION NUMBER: EMBL / AF155650
  ref <309>: DATABASE ENTRY DATE: 2000-05-02

SEQ ID NO: 5565 - protein, 276 aa, Homo sapiens; identical to SEQ ID NO: 5553
  ref <308>: DATABASE ACCESSION NUMBER: Refseq / NP_060904
  ref <309>: DATABASE ENTRY DATE: 2002-04-10

SEQ ID NO: 5566 - DNA, 620 bp, Rattus norvegicus
  misc_feature (1)..(620): n=a, c, g or t
  ref <308>: DATABASE ACCESSION NUMBER: EMBL / AA891812
  ref <309>: DATABASE ENTRY DATE: 2000-03-03
agacaaagaaactgcttaaagacttttatttgtgagtaagacctgttacgacgaggaaaggacacacaggacctgtcctccaagtctgtccatatatgcagcgatattccgtgtgtaatacaaagattagactacaaaagtgagaagtcattgcatatgtgggataaaggaagggccagaaggaagacgaggaggagtccagatgaggggactcaggaccaggtgagagctcaggccaccgtggtgactagtgggactagcagtacagcaggctgtggggtcctgcttggtgccccattgggagatcacagggttctgtccacatccgagcacccgctctatgaggcccaacccagcaggggcgtggagggccccagcaggctccctctcctagtcaggctggcagtggcagctcctggaacaaggccccttaggattccacctgacactcggcttccccactcactaaagcagtttcaagcccttttccagggataaaagttaggtaaaaattcataagggatgaccaagaaggtcatgggctccatgaatgatgcaagacattagatggcacctccaaagccagcttcaaccatgagttaccatccctatcaanacca

SEQ ID NO: 5567 - DNA, 3936 bp, Homo sapiens
  ref <308>: DATABASE ACCESSION NUMBER: EMBL / X58141
  ref <309>: DATABASE ENTRY DATE: 1992-12-31
gggaccggcgctcagctggcggcgcgctcgccggccgaggtgggatcccgaggcctctccagtccgccgagggcgcaccaccggcccgtctcgcccgccgcgccggggaggtggagcacgagcgcacgtgttaggaacctagaaagattgtacaatgaatggtgattctcgtgctgcggtggtgacctcaccacccccgaccacagcccctcacaaggagaggtacttcgaccgagtagatgagaacaacccagagtacttgagggagaggaacatggcaccagaccttcgccaggacttcaacatgatggagcaaaagaagagggtgtccatgattctgcaaagccctgctttctgtgaagaattggaatcaatgatacaggagcaatttaagaaggggaagaaccccacaggcctattggcattacagcagattgcagattttatgaccacgaatgtaccaaatgtctacccagcagctccgcaaggagggatggctgccttaaacatgagtcttggtatggtgactcctgtgaacgatcttagaggatctgattctattgcgtatgacaaaggagagaagttattacggtgtaaattggcagcgttttatagactagcagatctctttgggtggtctcagcttatctacaatcatatcacaaccagagtgaactccgagcaggaacacttcctcattgtcccttttgggcttctttacagtgaagtgactgcatccagtttggttaagatcaatctacaaggagatatagtagatcgtggaagcactaatctgggagtgaatcaggccggcttcaccttacactctgcaatttatgctgcacgcccggacgtgaagtgcgtcgtgcacattcacaccccagcaggggctgcggtctctgcaatgaaatgtggcctcttgccaatctccccggaggcgctttcccttggagaagtggcttatcatgactaccatggcattctggttgatgaagaggaaaaagttttgattcagaaaaatctggggcctaaaagcaaggttcttattctccggaaccatgggctcgtgtcagttggagagagcgttgaggaggccttctattacatccataaccttgtggttgcctgtgagatccaggttcgaactctggccagtgcaggaggaccagacaacttagtcctgctgaatcctgagaagtacaaagccaagtcccgttccccagggtctccggtaggggaaggcactggatcgcctcccaagtggcagattggtgagcaggaatttgaagccctcatgcggatgctcgataatctgggctacagaactggctacccttatcgataccctgctctgagagagaagtctaaaaaatacagcgatgtggaggttcctgctagtgtcacaggttactcctttgctagtgacggtgattcgggcacttgctccccactcagacacagttttcagaagcagcagcgggagaagacaagatggctgaactctggccggggcgacgaagcttccgaggaagggcagaatggaagcagtcccaagtcgaagactaagtggactaaagaggatggacatagaacttccacctctgctgtccctaacctgtttgttccattgaacactaacccaaaagaggtccaggagatgaggaacaagatccgagagcagaatttacaggacattaagacggctggccctcagtcccaggttttgtgtggtgtagtgatggacaggagcctcgtccagggagagctggtgacggcctccaaggccatcattgaaaaggagtaccagccccacgtcattgtgagcaccacgggccccaaccccttcaccacactcacagaccgtgagctggaggagtaccgcagggaggtggagaggaagcagaagggctgtgaagagaatctggacgaggctagagaacagaaagaaaagagtcctccagaccagcctgcggtcccccacccgcctcccagcactcccatcaagctggaggaagaccttgtgccggagccgactactggagatgacagtgatgctgccacctttaagccaactctccccgatctgtcccctgatgaaccttcagaagcactcggcttcccaatgttagagaaggaggaggaagcccatagacccccaagccccactgaggcccctactgaggccagccccgagccagccccagacccagccccggtggctgaagaggctgccccctcagctgtcgaggagggggccgccgcggaccctggcagcgatgggtctccaggcaagtccccgtccaaaaagaagaagaagttccgtaccccgtcctttctgaagaagagcaagaagaagagtgactcctgaaagccctgcgctaacactgtcctgtccggagcgaccctggctctgccagcgtccccggccacgtctgtgctctgtccttgtgtaatggaatgcaaaaaagccaagccctccgcctagaggtcccctcacgtgaccagccccgtgtagccccgggctgacccagtgtgtgctcagcagccccaccccaccctgccccttgtcctctcagagcctcagcttctgggggagacatgctctccccacaggggggaggcactaagtcatggtcctggctggaaggtactgaaggcttctgcagctttggctgcacgtcaccctcctgagcctcacctttcctgccgtccctcctgttgtgaaatcaccacattctgtctctgcttggcttcccctccaccctaaagtctcaggtgacggactcagactcctggcttcatgtggcattctctctgctcagtgatctcacttaaatctatatacaaagccttggtcccgtgaaaacactcgtgtgcccaccagcggccttgaagaggcaggtctgggccagatgctgggcaggaaaccccagcggcagatgggcctgtgtgcacccaacgtgatgctatgcatgtctgaccgacgatccctcgaccagaatcagattcaggagctcagtttctttttcacttgggtctctggattcctgtcatagggaaggtatatcaggaggggaagaggcctttctagaattttctttgagcaggtttacaatttagcttacatttttcgactgtgaacgtgaataggctgctttttgctttcttctttccagaccccacagtagagcacttttcacttatttgggggaggcttcaggggactgttctcaccttaactcagccagaaagatgccctagttgtgatcaaaggtaactcgaggtggagggtagccctggggcccctcgacatcaccgtcattgatggagcctgaaccgtgtgctcctcggcagatgctgttgttgttacttccctccaagaggctggaaaagggctcagagctgctgagcaggaaccggagggtgacccatttcaggaggtgccggtaccagcctgactaggtacaggcaagcttgtgtgggcccaacaggcccttggtagagctggtgccagatgtgggctcagatcctgggcatgatgggccgagccacctcggatcccactgattggccagccgagcgagaaccaggctgctgcatggcactgaccgccgcttccagcttcctctgagccgcagggcctgctacgcgggcaagcgtgctgcctctcttctgtgtcgttttgttgccaaggcagaatgaaaagtccttaaccgtggactcttcctttatcccctcctttaccccacatatgcaatgacttttaattttcacttttgtagtttaatcctttgtattacaacatgaaatatagttgcatatatggacaccgacttgggaggacaggtcctgaatgtcctttctccagtgtaacatgttttactcacaaataaaattctttcagcaaaaaaaaaaaaaaaaaaaaaaaaaaaaaaa

SEQ ID NO: 5568 - protein, 737 aa, Homo sapiens
  ref <308>: DATABASE ACCESSION NUMBER: PIR / S18207
  ref <309>: DATABASE ENTRY DATE: 2000-07-21
MNGDSRAAVVTSPPPTTAPHKERYFDRVDENNPEYLRERNMAPDLRQDFNMMEQKKRVSMILQSPAFCEELESMIQEQFKKGKNPTGLLALQQIADFMTTNVPNVYPAAPQGGMAALNMSLGMVTPVNDLRGSDSIAYDKGEKLLRCKLAAFYRLADLFGWSQLIYNHITTRVNSEQEHFLIVPFGLLYSEVTASSLVKINLQGDIVDRGSTNLGVNQAGFTLHSAIYAARPDVKCVVHIHTPAGAAVSAMKCGLLPISPEALSLGEVAYHDYHGILVDEEEKVLIQKNLGPKSKVLILRNHGLVSVGESVEEAFYYIHNLVVACEIQVRTLASAGGPDNLVLLNPEKYKAKSRSPGSPVGEGTGSPPKWQIGEQEFEALMRMLDNLGYRTGYPYRYPALREKSKKYSDVEVPASVTGYSFASDGDSGTCSPLRHSFQKQQREKTRWLNSGRGDEASEEGQNGSSPKSKTKWTKEDGHRTSTSAVPNLFVPLNTNPKEVQEMRNKIREQNLQDIKTAGPQSQVLCGVVMDRSLVQGELVTASKAIIEKEYQPHVIVSTTGPNPFTTLTDRELEEYRREVERKQKGSEENLDEAREQKEKSPPDQPAVPHPPPSTPIKLEEDLVPEPTTGDDSDAATFKPTLPDLSPDEPSEALGFPMLEKEEEAHRPPSPTEAPTEASPEPAPDPAPVAEEAAPSAVEEGAAADPGSDGSPGKSPSKKKKKFRTPSFLKKSKKKSDS

SEQ ID NO: 5569 - DNA, 620 bp, Rattus norvegicus; identical to SEQ ID NO: 5566
  misc_feature (1)..(620): n=a, c, g or t
  ref <308>: DATABASE ACCESSION NUMBER: EMBL / AA891812
  ref <309>: DATABASE ENTRY DATE: 2000-03-03

SEQ ID NO: 5570 - DNA, 3936 bp, Homo sapiens; identical to SEQ ID NO: 5567
  ref <308>: DATABASE ACCESSION NUMBER: EMBL / X58141
  ref <309>: DATABASE ENTRY DATE: 1992-12-31

SEQ ID NO: 5571 - protein, 737 aa, Homo sapiens; identical to SEQ ID NO: 5568
  ref <308>: DATABASE ACCESSION NUMBER: PIR / S18207
  ref <309>: DATABASE ENTRY DATE: 2000-07-21

SEQ ID NO: 5572 - DNA, 620 bp, Rattus norvegicus; identical to SEQ ID NO: 5566
  misc_feature (1)..(620): n=a, c, g or t
  ref <308>: DATABASE ACCESSION NUMBER: EMBL / AA891812
  ref <309>: DATABASE ENTRY DATE: 2000-03-03

SEQ ID NO: 5573 - DNA, 3936 bp, Homo sapiens; identical to SEQ ID NO: 5567
  ref <308>: DATABASE ACCESSION NUMBER: EMBL / X58141
  ref <309>: DATABASE ENTRY DATE: 1992-12-31

SEQ ID NO: 5574 - protein, 737 aa, Homo sapiens; identical to SEQ ID NO: 5568
  ref <308>: DATABASE ACCESSION NUMBER: PIR / S18207
  ref <309>: DATABASE ENTRY DATE: 2000-07-21

SEQ ID NO: 5575 - DNA, 620 bp, Rattus norvegicus; identical to SEQ ID NO: 5566
  misc_feature (1)..(620): n=a, c, g or t
  ref <308>: DATABASE ACCESSION NUMBER: EMBL / AA891812
  ref <309>: DATABASE ENTRY DATE: 2000-03-03

SEQ ID NO: 5576 - DNA, 3936 bp, Homo sapiens; identical to SEQ ID NO: 5567
  ref <308>: DATABASE ACCESSION NUMBER: EMBL / X58141
  ref <309>: DATABASE ENTRY DATE: 1992-12-31

SEQ ID NO: 5577 - protein, 737 aa, Homo sapiens; identical to SEQ ID NO: 5568
  ref <308>: DATABASE ACCESSION NUMBER: PIR / S18207
  ref <309>: DATABASE ENTRY DATE: 2000-07-21

SEQ ID NO: 5578 - DNA, 546 bp, Rattus norvegicus
  ref <308>: DATABASE ACCESSION NUMBER: EMBL / AA891828
  ref <309>: DATABASE ENTRY DATE: 2000-03-03
cacttcaaaacctttatcagaggtgtttctgtcctggggaaggggtggccttggccttcagaactgatgttaccccttttccaggctggaggccaaggcgagactggggagaaggccttgggcttctaacagccttactccagatgggaagatcggggccactccaatggagataaaggtttagggctccagcttcccctcatggtagaggaaggagggttgtccttggggatgcttcaggggctggggaaacaggcaggcgcctctccatctggctacagggagctgggacagaggccaagaggggcccatctgtcgcttcctggtcttgccaacaactttgggcaggctggagcagagcaggcagcagcgccgggttctgctgaatcacttgccgcatgttctggaactgaggctggtcccgcaggaactctagggggttctcccctgctgcttctgtggccggttgttcgggcgcctggctttcctggacagaaccatgttcaggctcagggcttcctggaattcccgtgagcaagtactcca

SEQ ID NO: 5579 - protein, 1372 aa, Rattus norvegicus
  ref <308>: DATABASE ACCESSION NUMBER: SWISS-Prot / P02466
  ref <309>: DATABASE ENTRY DATE: 2001-10-16
MLSFVDTRTLLLLAVTSCLATCQSLQMGSVRKGPTGDRGPRGQRGPAGPRGRDGVDGPVGPPGPPGAPGPPGPPGPPGLTGNFAAQYSDKGVSAGPGPMGLMGPRGPPGAVGAPGPQGFQGPAGEPGEPGQTGPAGSRGPAGPPGKAGEDGHPGKPGRPGERGVVGPQGARGFPGTPGLPGFKGIRGHNGLDGLKGQPGAQGVKGEPGAPGENGTPGQAGARGLPGERGRVGAPGPAGARGSDGSVGPVGPAGPIGSAGPPGFPGAPGPKGELGPVGNPGPAGPAGPRGEAGLPGLSGPVGPPGNPGANGLTGAKGATGLPGVAGAPGLPGPRGIPGPVGAAGATGPRGLVGEPGPAGSKGETGNKGEPGSAGAQGPPGPSGEEGKRGSPGEPGSAGPAGPPGLRGSPGSRGLPGADGRAGVMGPPGNRGSTGPAGVRGPNGDAGRPGEPGLMGPRGLPGSPGNVGPAGKEGPVGLPGIDGRPGPIGPAGPRGEAGNIGFPGPKGPSGDPGKPGEKGHPGLAGARGAPGPDGNNGAQGPPGPQGVQGGKGEQGPAGPPGFQGLPGPSGTAGEVGKPGERGLPGEFGLPGPAGPRGERGPPGESGAAGPSGPIGIRGPSGAPGPDGNKGEAGAVGAPGSAGASGPGGLPGERGAAGIPGGKGEKGETGLRGEIGNPGRDGARGAPGAIGAPGPAGASGDRGEAGAAGPSGPAGPRGSPGERGEVGPAGPNGFAGPAGSAGQPGAKGEKGTKGPKGENGIVGPTGPVGAAGPSGPNGPPGPAGSRGDGGPPGMTGFPGAAGRTGPPGPSGITGPPGPPGAAGKEGIRGPRGDQGPVGRTGEIGASGPPGFAGEKGPSGEPGTTGPPGTAGPQGLLGAPGILGLPGSRGERGQPGIAGALGEPGPLGIAGPPGARGPPGAVGSPGVNGAPGEAGRDGNPGSDGPPGRDGQPGHKGERGYPGNIGPTGAAGAPGPHGSVGPAGKHGNRGEPGPAGSVGPVGAVGPRGPSGPQGIRGDKGEPGDKGARGLPGLKGHNGLQGLPGLAGLHGDQGAPGPVGPAGPRGPAGPSGPIGKDGRSGHPGPVGPAGVRGSQGSQGPAGPPGPPGPPGPPGVSGGGYDFGFEGGFYRADQPRSQPSLRPKDYEVDATLKSLNNQIETLLTPEGSRKNPARTCRDLRLSHPEWKSDYYWIDPNQGCTMDAIKVYCDFSTGETCIQAQPVNTPAKNAYSRAQANKHVWLGETINGGSQFEYNAEGVSSKEMATQLAFMRLLANRASQNITYHCKNSIAYLDEETGRLNKAVILQGSNDVELVAEGNSRFTYTVLVDGCSKKTNEWDKTVIEYKTNKPSRLPFLDIAPLDIGGTNQEFRVEVGPVCFK

SEQ ID NO: 5580 - DNA, 1719 bp, Homo sapiens
  ref <308>: DATABASE ACCESSION NUMBER: EMBL / D21235
  ref <309>: DATABASE ENTRY DATE: 2001-11-30
gggatcccggggccgccgcgtcgctcgggccccgccatggccgtcaccatcacgctcaaaacgctgcagcagcagaccttcaagatccgcatggagcctgacgagacggtgaaggtgctaaaggagaagatagaagctgagaagggtcgtgatgccttccccgtggctggacagaaactcatctatgccggcaagatcttgagtgacgatgtccctatcagggactatcgcatcgatgagaagaactttgtggtcgtcatggtgaccaagaccaaagccggccagggtacctcagcacccccagaggcctcacccacagctgccccagagtcctctacatccttcccgcctgcccccacctcaggcatgtcccatcccccacctgccgccagagaggacaagagcccatcagaggaatccgcccccacgacgtccccagagtctgtgtcaggctctgttccctcttcaggtagcagcgggcgagaggaagacgcggcctccacgctagtgacgggctctgagtatgagacgatgctgacggagatcatgtccatgggctatgagcgagagcgggtcgtggccgccctgagagccagctacaacaacccccaccgagccgtggagtatctgctcacgggaattcctgggagccccgagccggaacacggttctgtccaggagagccaggtatcggagcagccggccacggaagcagcaggagagaaccccctggagttcctgcgggaccagccccagttccagaacatgcggcaggtgattcagcagaaccctgcgctgctgcccgccctgctccagcagctgggccaggagaaccctcagcttttacagcaaatcagccggcaccaggagcagttcatccagatgctgaacgagccccctggggagctggcggacatctcagatgtggagggggaggtgggcgccataggagaggaggccccgcagatgaactacatccaggtgacgccgcaggagaaagaagctatagagaggttgaaggccctgggcttcccagagagcctggtcatccaggcctatttcgcgtgtgaaaaaaatgagaacttggctgccaacttcctcctgagtcagaactttgatgacgagtgatgccaggaagccaggccaccgaagcccccaccctacccttattccatgaaagttttataaaagaaaaaatatatatatattcatgtttatttaagaaatggaaaaaaaaatcaaaaatcttaaaaaaacaagcaaacagtccagcttcctgtcctcctaaagtggcccctgttcccatctcccgggccagacagctgtccccccgtcctcctccccagcccagcctgctcagagaagctggcaggactgggaggcgacagatgggcccctcttggcctctgtcccagctctctgcagccagacggaaaggcggctgcttgcctctccatcctccgaaaaacccctgaggacccccccccatcctcttctaggatgaggggaagctggagccccaactttgatcctccattggagtggcccaaatctttccatctagggcaagtcctgaaaggcccaaggccccctcccagtctggccttggcctccagcctggagaagggctaacatcagctcattgtcaaggccacccccaccccagaacagaaccgtgtctctgataaaggttttgaagtgaataaagttttaaaaact

SEQ ID NO: 5581 - protein, 363 aa, Homo sapiens
  ref <308>: DATABASE ACCESSION NUMBER: SWISS-Prot / P54725
  ref <309>: DATABASE ENTRY DATE: 2002-06-15
MAVTITLKTLQQQTFKIRMEPDETVKVLKEKIEAEKGRDAFPVAGQKLIYAGKILSDDVPIRDYRIDEKNFVVVMVTKTKAGQGTSAPPEASPTAAPESSTSFPPAPTSGMSHPPPAAREDKSPSEESAPTTSPESVSGSVPSSGSSGREEDAASTLVTGSEYETMLTEIMSMGYERERVVAALRASYNNPHRAVEYLLTGIPGSPEPEHGSVQESQVSEQPATEAAGENPLEFLRDQPQFQNMRQVIQQNPALLPALLQQLGQENPQLLQQISRHQEQFIQMLNEPPGELADISDVEGEVGAIGEEAPQMNYIQVTPQEKEAIERLKALGFPESLVIQAYFACEKNENLAANFLLSQNFDDE

SEQ ID NO: 5582 - DNA, 546 bp, Rattus norvegicus; identical to SEQ ID NO: 5578
  ref <308>: DATABASE ACCESSION NUMBER: EMBL / AA891828
  ref <309>: DATABASE ENTRY DATE: 2000-03-03

SEQ ID NO: 5583 - protein, 1372 aa, Rattus norvegicus; identical to SEQ ID NO: 5579
  ref <308>: DATABASE ACCESSION NUMBER: SWISS-Prot / P02466
  ref <309>: DATABASE ENTRY DATE: 2001-10-16

SEQ ID NO: 5584 - DNA, 1719 bp, Homo sapiens; identical to SEQ ID NO: 5580
  ref <308>: DATABASE ACCESSION NUMBER: EMBL / D21235
  ref <309>: DATABASE ENTRY DATE: 2001-11-30

SEQ ID NO: 5585 - protein, 363 aa, Homo sapiens; identical to SEQ ID NO: 5581
  ref <308>: DATABASE ACCESSION NUMBER: SWISS-Prot / P54725
  ref <309>: DATABASE ENTRY DATE: 2002-06-15

SEQ ID NO: 5586 - DNA, 686 bp, Rattus norvegicus
  misc_feature (1)..(686): n=a, c, g or t
  ref <308>: DATABASE ACCESSION NUMBER: EMBL / AA891829
  ref <309>: DATABASE ENTRY DATE: 2000-03-03
atattttataaatatatttacccccaaaatgtaacacctgccctaaatcaagcaaaactttaatatttaatattaaatattaaatatttaatattctgctgttccgtggctctgtccaatggctttctcacatcaagggaaacagtgaatggtcctgagctaaatgaaagtcaaggatgcttcaggtcttctcagtgactaggaaaagtcttaggacattttctgtgggaatcaagatccccaagtcaagctgcagctcagagacctgcaggctgatgatactcccagaaggctacctccccatcatcactacaagaggccaggagccctgcctccttggggttccaagccacacagttgacatcctgggaatgggcctgacgaagatgggctgtcaaagagaaggtgggctgctgtgggtctgagcctggatcttcctcaaacactcggatggcatcatctccacaagctgtagccagggcccctgtcagctgacaccaagcaacgtcgtagatggtcctggtatggaagcccgacaaagtgcaaacacatttccagctggggtcggagccactgcatgccaccccttgttcattgccaggtagatactggcgccagatgcgcacagttcggtcatcactgcaagatgccagacgctggncgctgggatcaaaggctatgctcca

SEQ ID NO: 5587 - protein, 241 aa, Rattus norvegicus; identical to SEQ ID NO: 3725
  ref <308>: DATABASE ACCESSION NUMBER: SWISS-Prot / P22288
  ref <309>: DATABASE ENTRY DATE: 2002-06-15

SEQ ID NO: 5588 - DNA, 1413 bp, Homo sapiens; identical to SEQ ID NO: 3726
  ref <308>: DATABASE ACCESSION NUMBER: EMBL / U63810
  ref <309>: DATABASE ENTRY DATE: 1998-07-02

SEQ ID NO: 5589 - protein, 339 aa, Homo sapiens; identical to SEQ ID NO: 3727
  ref <308>: DATABASE ACCESSION NUMBER: SWISS-Prot / O76071
  ref <309>: DATABASE ENTRY DATE: 2002-06-15

SEQ ID NO: 5590 - DNA, 686 bp, Rattus norvegicus; identical to SEQ ID NO: 5586
  misc_feature (1)..(686): n=a, c, g or t
  ref <308>: DATABASE ACCESSION NUMBER: EMBL / AA891829
  ref <309>: DATABASE ENTRY DATE: 2000-03-03

SEQ ID NO: 5591 - protein, 241 aa, Rattus norvegicus; identical to SEQ ID NO: 3725
  ref <308>: DATABASE ACCESSION NUMBER: SWISS-Prot / P22288
  ref <309>: DATABASE ENTRY DATE: 2002-06-15

SEQ ID NO: 5592 - DNA, 1413 bp, Homo sapiens; identical to SEQ ID NO: 3726
  ref <308>: DATABASE ACCESSION NUMBER: EMBL / U63810
  ref <309>: DATABASE ENTRY DATE: 1998-07-02

SEQ ID NO: 5593 - protein, 339 aa, Homo sapiens; identical to SEQ ID NO: 3727
  ref <308>: DATABASE ACCESSION NUMBER: SWISS-Prot / O76071
  ref <309>: DATABASE ENTRY DATE: 2002-06-15

SEQ ID NO: 5594 - DNA, 686 bp, Rattus norvegicus; identical to SEQ ID NO: 5586
  misc_feature (1)..(686): n=a, c, g or t
  ref <308>: DATABASE ACCESSION NUMBER: EMBL / AA891829
  ref <309>: DATABASE ENTRY DATE: 2000-03-03

SEQ ID NO: 5595 - protein, 241 aa, Rattus norvegicus; identical to SEQ ID NO: 3725
  ref <308>: DATABASE ACCESSION NUMBER: SWISS-Prot / P22288
  ref <309>: DATABASE ENTRY DATE: 2002-06-15

SEQ ID NO: 5596 - DNA, 1413 bp, Homo sapiens; identical to SEQ ID NO: 3726
  ref <308>: DATABASE ACCESSION NUMBER: EMBL / U63810
  ref <309>: DATABASE ENTRY DATE: 1998-07-02

SEQ ID NO: 5597 - protein, 339 aa, Homo sapiens; identical to SEQ ID NO: 3727
  ref <308>: DATABASE ACCESSION NUMBER: SWISS-Prot / O76071
  ref <309>: DATABASE ENTRY DATE: 2002-06-15

SEQ ID NO: 5598 - DNA, 686 bp, Rattus norvegicus; identical to SEQ ID NO: 5586
  misc_feature (1)..(686): n=a, c, g or t
  ref <308>: DATABASE ACCESSION NUMBER: EMBL / AA891829
  ref <309>: DATABASE ENTRY DATE: 2000-03-03

SEQ ID NO: 5599 - protein, 241 aa, Rattus norvegicus; identical to SEQ ID NO: 3725
  ref <308>: DATABASE ACCESSION NUMBER: SWISS-Prot / P22288
  ref <309>: DATABASE ENTRY DATE: 2002-06-15

SEQ ID NO: 5600 - DNA, 1413 bp, Homo sapiens; identical to SEQ ID NO: 3726
  ref <308>: DATABASE ACCESSION NUMBER: EMBL / U63810
  ref <309>: DATABASE ENTRY DATE: 1998-07-02

SEQ ID NO: 5601 - protein, 339 aa, Homo sapiens; identical to SEQ ID NO: 3727
  ref <308>: DATABASE ACCESSION NUMBER: SWISS-Prot / O76071
  ref <309>: DATABASE ENTRY DATE: 2002-06-15

SEQ ID NO: 5602 - DNA, 686 bp, Rattus norvegicus; identical to SEQ ID NO: 5586
  misc_feature (1)..(686): n=a, c, g or t
  ref <308>: DATABASE ACCESSION NUMBER: EMBL / AA891829
  ref <309>: DATABASE ENTRY DATE: 2000-03-03

SEQ ID NO: 5603 - protein, 241 aa, Rattus norvegicus; identical to SEQ ID NO: 3725
  ref <308>: DATABASE ACCESSION NUMBER: SWISS-Prot / P22288
  ref <309>: DATABASE ENTRY DATE: 2002-06-15

SEQ ID NO: 5604 - DNA, 1413 bp, Homo sapiens; identical to SEQ ID NO: 3726
  ref <308>: DATABASE ACCESSION NUMBER: EMBL / U63810
  ref <309>: DATABASE ENTRY DATE: 1998-07-02

SEQ ID NO: 5605 - protein, 339 aa, Homo sapiens; identical to SEQ ID NO: 3727
  ref <308>: DATABASE ACCESSION NUMBER: SWISS-Prot / O76071
  ref <309>: DATABASE ENTRY DATE: 2002-06-15

SEQ ID NO: 5606 - DNA, 686 bp, Rattus norvegicus; identical to SEQ ID NO: 5586
  misc_feature (1)..(686): n=a, c, g or t
  ref <308>: DATABASE ACCESSION NUMBER: EMBL / AA891829
  ref <309>: DATABASE ENTRY DATE: 2000-03-03

SEQ ID NO: 5607 - protein, 241 aa, Rattus norvegicus; identical to SEQ ID NO: 3725
  ref <308>: DATABASE ACCESSION NUMBER: SWISS-Prot / P22288
  ref <309>: DATABASE ENTRY DATE: 2002-06-15

SEQ ID NO: 5608 - DNA, 1413 bp, Homo sapiens; identical to SEQ ID NO: 3726
  ref <308>: DATABASE ACCESSION NUMBER: EMBL / U63810
  ref <309>: DATABASE ENTRY DATE: 1998-07-02

SEQ ID NO: 5609 - protein, 339 aa, Homo sapiens; identical to SEQ ID NO: 3727
  ref <308>: DATABASE ACCESSION NUMBER: SWISS-Prot / O76071
  ref <309>: DATABASE ENTRY DATE: 2002-06-15

SEQ ID NO: 5610 - DNA, 591 bp, Rattus norvegicus
  ref <308>: DATABASE ACCESSION NUMBER: EMBL / AA891842
  ref <309>: DATABASE ENTRY DATE: 2000-03-03
aacaaacacctaatatttattaataaattagtatacttgaaggcatttttctgatatcagttcctcaccactaagcccacccacacaaaggcagtgggcgtctagctctgcattagagtctgacaactgagcatcagaggacaggttgataaatgagagagcgtagttgcaaatttatcggacaggagttcttacagctgcagccatttttaacgaaagtggttggatgacaaaggaaacccagcaaggccttgagggcagactggacctatagactatgtgtattgagagagagagagagagagagagagagagagagagagagagagagagaggaataaaaaaaataagagaaatatcttttaaagcaaagctgggcataaagtggctttccaaggtgcagcaaaggtgttcctaaaagatgaagatcgagttctttggcggcccaggtgtcaagccactgaaacagcaagtcctggggacttaaggatttcattctccagcccagagcttagcagcattaacgggagcacaagttacaagcagtgtacggtgtccagacgagaaccatacagcgagcgatagagagtg

SEQ ID NO: 5611 - DNA, 1101 bp, Homo sapiens
  ref <308>: DATABASE ACCESSION NUMBER: EMBL / BC005192
  ref <309>: DATABASE ENTRY DATE: 2001-07-13
cttgagttctttctccttctctctctctcttttttttttaaataactcttctgggaagttggtttataagcctttgccaggtgtaactgttgtgaaatacccaccactaaagtttttttaagttccatattttctccattttgccttcttatgtattttcaagattattctgtgcactttaaatttacttaacttaccataaatgcagtgtgacttttcccacacactggattgtgaggctcttaacttcttaaaagtataatggcatcttgtgaatcctataagcagtctttatgtctcttaacattcacacctactttttaaaaacaaatattattactatttttattattgtttgtcctttataaattttcttaaagattaagaaaatttaagaccccattgagttactgtaatgcaattcaactttgagttatcttttaaatatgtcttgtatagttcatattcatggctgaaacttgaccacactattgctgattgtatggttttcacctggacaccgtgtagaatgcttgattacttgtactcttcttatgctaatatgctctgggctggagaaatgaaatcctcaagccatcaggatttgctatttaagtggcttgacaactgggccaccaaagaacttgaacttcaccttttaggatttgagctgttctggaacacattgctgcactttggaaagtcaaaatcaagtgccagtggcgccctttccatagagaatttgcccagctttgctttaaaagatgtcttgttttttatatacacataatcaataggtccaatctgctctcaaggccttggtcctggtgggattccttcaccaattactttaattaaaaatggctgcaactgtaagaacccttgtctgatatatttgcaactatgctcccatttacaaatgtaccttctaatgctcagttgccaggttccaatgcaaaggtggcgtggactccctttgtgtgggtggggtttgtgggtagtggtgaaggaccgatatcagaaaaatgccttcaagtgtactaatttattaataaacattaggtgtttgctaaaaaaaaaaaaaaaaaaaaaaaaaaaaaa

SEQ ID NO: 5612 - protein, 124 aa, Homo sapiens
  ref <308>: DATABASE ACCESSION NUMBER: SWISS-Prot / AAF64274
  ref <309>: DATABASE ENTRY DATE: 2002-10-01
MQFNFELSFKYVLYSSYSWLKLDHTIADCMVFTWTPCRMLDYLYSSYANMLWAGEMKSSSHQDLLFKWLDNWATKELELHLLGFELFWNTLLHFGKSKSSASGALSIENLPSFALKDVLFFIYT

SEQ ID NO: 5613 - DNA, 591 bp, Rattus norvegicus; identical to SEQ ID NO: 5610
  ref <308>: DATABASE ACCESSION NUMBER: EMBL / AA891842
  ref <309>: DATABASE ENTRY DATE: 2000-03-03

SEQ ID NO: 5614 - DNA, 1101 bp, Homo sapiens; identical to SEQ ID NO: 5611
  ref <308>: DATABASE ACCESSION NUMBER: EMBL / BC005192
  ref <309>: DATABASE ENTRY DATE: 2001-07-13

SEQ ID NO: 5615 - protein, 124 aa, Homo sapiens; identical to SEQ ID NO: 5612
  ref <308>: DATABASE ACCESSION NUMBER: SWISS-Prot / AAF64274
  ref <309>: DATABASE ENTRY DATE: 2002-10-01

SEQ ID NO: 5616 - DNA, 617 bp, Rattus norvegicus
  ref <308>: DATABASE ACCESSION NUMBER: EMBL / AA891848
  ref <309>: DATABASE ENTRY DATE: 2000-03-03
gatataaataagtttattgctggatttcctcattaacattatagaaatattttaaaatcactaaaagtcacaaattgagagcccaacaggtaaccatactttataaaaaagaaagtataaaagcggcttataaaattttctgaaaagtatatcagctgacagcaaagaaataggaaccagtcagtaaatggcacaaatacatcactgaagttctcagtcgtcacctacaagtcagtgtctgagctatgaagtagacctgttttataagttacacactgagtagtgttccgaactgtccttcctcacttccataagagaagccaaatcttttactgctatggggacaaagtactatccataaactggagaagaaggctcaccttcctctcccagtacctgaacaacagaacagtgtgcacagaaacggctttggcacttgaaccctcagacactgtcttaaacgttgttgcttgaatattgtagttttacctggtgctctgacctacattgttgtctccatgctctgtggatatcacacacacacacacacacacacacacacacagatataaacagccaaggcactcatacacataaaagtaacaataataattttt

SEQ ID NO: 5617 - protein, 526 aa, Rattus norvegicus
  ref <308>: DATABASE ACCESSION NUMBER: SWISS-Prot / P04762
  ref <309>: DATABASE ENTRY DATE: 2002-06-15
ADSRDPASDQMKQWKEQRAPQKPDVLTTGGGNPIGDKLNIMTAGPRGPLLVQDVVFTDEMAHFDRERIPERVVHAKGAGAFGYFEVTHDITRYSKAKVFEHIGKRTPIAVRFSTVAGESGSADTVRDPRGFAVKFYTEDGNWDLVGNNTPIFFIRDAMLFPSFIHSQKRNPQTHLKDPDMVWDFWSLCPESLHQVTFLFSDRGIPDGHRHMNGYGSHTFKLVNANGEAVYCKFHYKTDQGIKNLPVEEAGRLAQEDPDYGLRDLFNAIASGNYPSWTFYIQVMTFKEAETFPFNPFDLTKVWPHKDYPLIPVGKLVLNRNPANYFAEVEQMAFDPSNMPPGIEPSPDKMLQGRLFAYPDTHRHRLGPNYLQIPVNCPYRARVANYQRDGPMCMHDNQGGAPNYYPNSFSAPEQQGSALEHHSQCSADVKRFNSANEDNVTQVRTFYTKVLNEEERKRLCENIANHLKDAQLFIQRKAVKNFTDVHPDYGARVQALLDQYNSQKPKNAIHTYVQAGSHIAAKGKANL

SEQ ID NO: 5618 - DNA, 2264 bp, Homo sapiens
  ref <308>: DATABASE ACCESSION NUMBER: EMBL / X04076
  ref <309>: DATABASE ENTRY DATE: 1993-09-12
tttgcctgctgagggtggagacccacgagccgaggcctcctgcagtgttctgcacagcaaaccgcacgctatggctgacagccgggatcccgccagcgaccagatgcagcactggaaggagcagcgggccgcgcagaaagctgatgtcctgaccactggagctggtaacccagtaggagacaaacttaatgttattacagtagggccccgtgggccccttcttgttcaggatgtggttttcactgatgaaatggctcattttgaccgagagagaattcctgagagagttgtgcatgctaaaggagcaggggcctttggctactttgaggtcacacatgacattaccaaatactccaaggcaaaggtatttgagcatattggaaagaagactcccatcgcagttcggttctccactgttgctggagaatcgggttcagctgacacagttcgggaccctcgtgggtttgcagtgaaattttacacagaagatggtaactgggatctcgttggaaataacacccccattttcttcatcagggatcccatattgtttccatcttttatccacagccaaaagagaaatcctcagacacatctgaaggatccggacatggtctgggacttctggagcctacgtcctgagtctctgcatcaggtttctttcttgttcagtgatcgggggattccagatggacatcgccacatgaatggatatggatcacatactttcaagctggttaatgcaaatggggaggcagtttattgcaaattccattataagactgaccagggcatcaaaaacctttctgttgaagatgcggcgagactttcccaggaagatcctgactatggcatccgggatctttttaacgccattgccacaggaaagtacccctcctggactttttacatccaggtcatgacatttaatcaggcagaaacttttccatttaatccattcgatctcaccaaggtttggcctcacaaggactaccctctcatcccagttggtaaactggtcttaaaccggaatccagttaattactttgctgaggttgaacagatagccttcgacccaagcaacatgccacctggcattgaggccagtcctgacaaaatgcttcagggccgcctttttgcctatcctgacactcaccgccatcgcctgggacccaattatcttcatatacctgtgaactgtccctaccgtgctcgagtggccaactaccagcgtgatggcccgatgtgcatgcaggacaatcagggtggtgctccaaattactaccccaacagctttggtgctccggaacaacagccttctgccctggagcacagcatccaatattctggagaagtgcggagattcaacactgccaatgatgataacgttactcaggtgcgggcattctatgtgaacgtgctgaatgaggaacagaggaaacgtctgtgtgagaacattgccggccacctgaaggatgcacaaattttcatccagaagaaagcggtcaagaacttcactgaggtccaccctgactacgggagccacatccaggctcttctggacaagtacaatgctgagaagcctaagaatgcgattcacacctttgtgcagtccggatctcacttggcggcaagggagaaggcaaatctgtgaggccggggccctgcacctgtgcagcgaacgttagcgttcatccgtgtaacccgctcatcactggatgaagattctcctgtgctagatgtgcaaatgcaagctagtggcttcaaaatagagaatcccactttctatagcagattgtgtaacaattttaatgctatttccccaggggaaaatgaaggttaggatttaacagtcatttaaaaaaaaaatttgttttgacggatgattggattattcatttaaaatgattagaaggcaagtttctagcttagaaatatgattttatttgacaaaatttgttgaaattatgtatgtttacatatcacctcatggcctattatattaaaatatggctataaatatataaaaagaaaagataaagatgatctactcagaaatttttatttttctaaggttctcataggaaaagtacatttaatacagcagtgtcatcagaagataacttgagcaccgtcatggcttaatgtttattcctgataataattgatcaaattcatttttttcactggagttacattaatgttaattcagcactgatttcacaacagatcaatttgtaattgcttacatttttacaataaat

SEQ ID NO: 5619 - protein, 526 aa, Homo sapiens
  ref <308>: DATABASE ACCESSION NUMBER: SWISS-Prot / P04040
  ref <309>: DATABASE ENTRY DATE: 2002-06-15
ADSRDPASDQMQHWKEQRAAQKADVLTTGAGNPVGDKLNVITVGPRGPLLVQDVVFTDEMAHFDRERIPERVVHAKGAGAFGYFEVTHDITKYSKAKVFEHIGKKTPIAVRFSTVAGESGSADTVRDPRGFAVKFYTEDGNWDLVGNNTPIFFIRDPILFPSFIHSQKRNPQTHLKDPDMVWDFWSLRPESLHQVSFLFSDRGIPDGHRHMNGYGSHTFKLVNANGEAVYCKFHYKTDQGIKNLSVEDAARLSQEDPDYGIRDLFNAIATGKYPSWTFYIQVMTFNQAETFPFNPFDLTKVWPHKDYPLIPVGKLVLNRNPVNYFAEVEQIAFDPSNMPPGIEASPDKMLQGRLFAYPDTHRHRLGPNYLHIPVNCPYRARVANYQRDGPMCMQDNQGGAPNYYPNSFGAPEQQPSALEHSIQYSGEVRRFNTANDDNVTQVRAFYVNVLNEEQRKRLCENIAGHLKDAQIFIQKKAVKNFTEVHPDYGSHIQALLDKYNAEKPKNAIHTFVQSGSHLAAREKANL

SEQ ID NO: 5620 - DNA, 501 bp, Rattus norvegicus
  ref <308>: DATABASE ACCESSION NUMBER: EMBL / AA891857
  ref <309>: DATABASE ENTRY DATE: 2000-03-03
actcacagcacatgtttattgaagggatacatacagatgctgatgtagagctctctcagcagtcacacaatatcctgggtctccaccttcctgggaggctgagacaggaggatcgtattgaagaccaatgtgcccacagcaaaaccaccttctctcctgcggtcagggacagctagctagctgcctgatggcgagtctctgggctgttctgcaggaacacctggcacggcagaggcagcctcgtagtccgccatgcggcgctggaccagggcgggcatgaggtgcacgtaagcggccatgaggcggtggttagaatggatgagcttcccagcacagctgtgcaggcaggcctcctcctcagcgtccagagctcggtggtgcaggctgggcacacagcgctggaagcacagttctgtcatccgattgtagaccaacagaaagtctcgcaagtttctcagttgctgctgctggtgctccatcacgcccagggcgcatggcgtc

SEQ ID NO: 5621 - protein, 100 aa, Rattus norvegicus; identical to SEQ ID NO: 913
  ref <308>: DATABASE ACCESSION NUMBER: SWISS-Prot / Q9R1B1
  ref <309>: DATABASE ENTRY DATE: 2001-10-16

SEQ ID NO: 5622 - DNA, 421 bp, Homo sapiens; identical to SEQ ID NO: 914
  ref <308>: DATABASE ACCESSION NUMBER: EMBL / AI005112
  ref <309>: DATABASE ENTRY DATE: 2000-03-03

SEQ ID NO: 5623 - protein, 103 aa, Homo sapiens; identical to SEQ ID NO: 915
  ref <308>: DATABASE ACCESSION NUMBER: Refseq / NP_036324
  ref <309>: DATABASE ENTRY DATE: 2002-11-29

SEQ ID NO: 5624 - DNA, 570 bp, Rattus norvegicus
  ref <308>: DATABASE ACCESSION NUMBER: EMBL / AA891859
  ref <309>: DATABASE ENTRY DATE: 2000-03-03
aaggataatgctgtttattaaaaatatactcaggaagtcagggtattgatgcaattttacatacacacttggtagtctgaagttccattattccagcagtttatataaatgtttcagatcaaaagagaaagaaaacactttacagagaccagcagttgcttatcagtttggtcatgagtctgcttgtagtaaaaataaaactccctcttgcattgctgaagaatgtccttaatagagaacaagttctgtaagcactaagaaagttcttcttgcattaataactattcgtttgaacttcttagcatatgccaactttttgaccctgttaactgctgtgggttgtgccagggctattacctgtctaggcaactgagactttccagtgacgtgtcactaggtctctctcgccttactgtggatgccactactgcagcatcaaacctaacacctatgtaacacctttcaaaagaatcatataaaacaaaacagttcaagacaatatgctcattacaatggggaaaacaaaacgggtcagaaaactgaaagcgtaaaagaaatggaagccacttc

SEQ ID NO: 5625 - DNA, 490 bp, Homo sapiens
  ref <308>: DATABASE ACCESSION NUMBER: EMBL / AA781413
  ref <309>: DATABASE ENTRY DATE: 2000-03-03
ttaggataatgctgtttattaaaaatatagtcagggagaaggaagtcagtgcatttatgcaattttacatacacatctgtagtttgaggttccattattccaacagttcatataaatcactgtttcagataaaaggaaaaaaatgctttacacaggagatcagcaattggttataggtttggaaatatgagtcggcttgtagtaaaaataaaaccacctcttccattattaaagaatgtctccttcatgcagaacaagtctttagcattaagaacttttccttgcataagaattgttaacttgaagttcttggaaaacagccaatcctgttttctatatttataaatgctattttgtctggatttttttttttgaggtaacaaaggaagcatcttcagtgatttgtcactaggttatcctttaccgtgtatgtcaactactgcaatgtcaaacctaagacttatacaaaagcatttctcagagaatcata

SEQ ID NO: 5626 - DNA, 608 bp, Rattus norvegicus
  misc_feature (1)..(608): n=a, c, g or t
  ref <308>: DATABASE ACCESSION NUMBER: EMBL / AA891864
  ref <309>: DATABASE ENTRY DATE: 2000-03-03
gaaaccaaacaggcccaaggtccttttcgtcttgagtcagctgtctgaatgcttgtccctctcatacttcctgtgcaacgaaaaccaagacatttcatttcttcttggcaattaacaaaggtggaagaaagttcaaatagggtgtgttcttgatacctcagagtcggaaagggcttcgtcttgggcagaaggctcataatcgcctgtattctccgctaattcaacctctaactcgtcattgctttctgcactgtaatcaacttcttcaaggaaccgaggttcatcttcatccaaaacgtaagtagtggggctagttactttacagcttgattcaattaagtcattttcaaagtcaagcaggttggagggtagattgtactccaatggagaagtcagtcttttcaaacgcaataaaccaacacaaaattttgctcccatttcttccagttctcgagtcccaatctgtaaacccttgtatctaccctgatcgcagccacataaagtactctccatggtatagctcctttgaactccaatttcccgccacacaacaacccgagctgtggactctttggatttttccaccacanagctacagctgctcatgc

SEQ ID NO: 5627 - protein, 1160 aa, Rattus norvegicus
  ref <308>: DATABASE ACCESSION NUMBER: SWISS-Prot / AAG37102
  ref <309>: DATABASE ENTRY DATE: 2003-02-01
MTTKGSTGMEVLLSTLENTKDLQTVLNILSILIELVSSGGGRRASFLVAKGGSQILLQLLMNASKDSPPHEEVMVQTHSILAKIGPKDKKFGVKARVNGALTVTLNLVKQHFQNYRLVLPCLQLLRVYSTNSVNSVSLGKNGVVELMFKIIGPFSKKNSGLMKVALDTLAALLKSKTNVRRAVDRGYVQVLLTIYVDWHRHDNRHRNMLIRKGILRSLKSVTNIKLGRKAFIDANGMKILYNTSQECLAVRTLDPLVNTSSLIMRKCFPKNRLPLPTIKSSFHFQLPIIPVTGPVAQLYSLPPEVDDVVDESDDNDDIDLEVENELENEDDLDQSFKNDDIETDINKLRPQQVPGRTIEELKMYEHLFPELVDDFQDYELISKEPKPFVFEGKARGPIVVPTAGEEVPGNSGSVKKGVVMKERASPKGEEAKEDPKGHDRTLPQQLGGQSRVAPSAHSFNNDLVKALDRITLQNVPSQVASGLERRNEEGFGLPLTVLSCTKACPHVAKCGSTLFEGRTVHLGKLCCTGVETEDDEDTESHSSTEQAPSVEASDGPTLHDPDLYIEIVKNTKSVPEYSEVAYPDYSGHIPPPFKEPILERPYGVQRTKIAQDIERLIHQNDIIDRVVYDLDNPTYTTPEEGDTLKFNSKFESGNLRKVIQIRKSEYDLILNSDINSNHYHQWFYFEVSGMRPGVAYRFNIINCEKSNSQFNYGMQPLMYSVQEALNARPWWIRMGTDICYYKNHFSRSSVAAGGQKGKSYYTITFTVNFPHKDDVCYFAYHYPYTYSTLQMHLQKLESAHNPQQIYFRKDVLCETLSGNICPLVTITAMPESNYYEHICQFRTRPYIFLSARVHPGETNASWVMKGTLEYLMSNSPTAQSLRESYIFKIVPMLNPDGVINGNHRCSLSGEGLNRQWQSPNPELHPTIYHAKGLLQYLAAVKRLPLVYCDYHGHSRKKNVFMYGCSIKETVWHTHDNSASCDIVEGMGYRTLPKILSHIAPAFCMSSCSFVVEKSKESTARVVVWREIGVQRSYTMESTLCGCDQGRYKGLQIGTRELEEMGAQFCVGLLRLKRLTSSLEYNLPSNLLDFENDLIESSCKVTSPTTYVLDEDEPRFLEEVDYSAESNDELDVELAENTGDYEPSAQEEALSDSEVSRTHLI

SEQ ID NO: 5628 - DNA, 4218 bp, Homo sapiens
acgttgcccgggatgcggacaggttccgccgcctccagcgccccatcctgagccgattatctgcaattatgaaatgaagtaactcaagatgagcaagttaaaagtgataccagaaaaaagccttaccaataattctaggatcgtaggactcctggctcaactggagaagatcaatgctgagccttcagaatcagacactgcccgatatgttacatcaaaaattcttcatctggctcagagtcaagaaaaaacaaggagagaaatgacagccaaaggttctacaggaatggaaattctgctgtcaacattagagaacacaaaagatcttcaaactacacttaatatcttaagcattcttgttgagctggtgtcagctggtggaggtcgaagagtgagtttcttagtcaccaaaggtggttcacaaatattgttgcagttacttatgaatgccagcaaagaatctcccccacatgaggacttaatggtacagattcattctattcttgcaaagattggaccaaaagataaaaaatttggagtaaaggctagaattaatggggctctgaatataaccctgaatttggtcaagcagaatttgcagaatcatcgcttggttctaccttgccttcagcttttacgagtatattctgccaactctgtgaattcagtatccttagggaaaaatggagttgtggaactgatgtttaaaatcattggaccatttagtaagaagaattccagtcttataaaggttgctttagacactcttgctgcattgctaaaatcaaaaacaaatgccaggagagctgtagacagaggatatgtccaagtgcttttaacaatttatgtagattggcaccgccatgataaccggcatagaaacatgctcattcggaaaggaattttacagagtttaaaaagtgttacaaacatcaagttgggaagaaaagcatttattgatgccaatgggatgaaaattctgtataatacttcgcaattgcctgttattcctgtgactggtcctgtggctcagctctacagcttacctcctgaagtggatgacgtagtagatgaaagtgatgacaacgatgatattgatgtagaagctgaaaacgaaactgagaatgaagatgacctagatcaaaattttaagaatgatgatattgaaacagatattaacaaactaaaaccccagcaagaaccgggacgaacaatagaagatctaaaaatgtatgaacaccttttccctgagcttgttgatgattttcaggactatgatttaatctccaaagaaccaaagccttttgtatttgagggaaaagtacgtggtcctattgttgttcctacggcaggcgaggaaacatctgggaattctggcaatttaagaaaagttgtaatgaaggagaacatatcttctaaaggagatgaaggtgaaaagaagtctacctttatggatctagcaaaagaagatattaaagataatgatagaacattacaacagcagccaggtgatcaaaatagaactatttcatcagtccatggtttaaacaatgatattgtaaaggccttggaccgaattacattgcagaatattccttctcaaacagccccaggttttactgcagaaatgaagaaggactgcagtcttcctcttactgtccttacctgtgctaaagcatgtccacacatggctacttgtggaaatgttctgtttgagggaagaacagttcagctagggaagctttgctgcactggagttgaaactgaagatgatgaagatactgagtcaaattcatcggtagaacaagcatcggttgaagtacctgatggaccaacactccatgacccagacctctatattgagattgtgaaaaatacgaagtctgtcccagaatattcagaggtggcttatcccgattattttggtcacattccgcctccattcaaagagcctattttagaaaggccttatggtgtacaaaggacaaaaattgctcaagatattgaaaggctaatacatcagagtgatatcatagatcgtgtggtatatgacttggataacccaaattacaccattccagaagagggagatattttgaaatttaactccaaatttgagtctgggaatctgcgcaaagtaattcaaattagaaaaaatgaatatgatcttattctgaactcagacataaacagcaatcattatcatcagtggttttactttgaagtcagtggaatgcgaccaggtgttgcttacaggtttaacatcattaactgtgaaaagtccaacagtcagtttaattatggtatgcaaccactcatgtattcggttcaggaagcattaaatgccagaccatggtggattcgtatggggactgacatttgttactataaaaatcatttctcaagaagttcagttgctgcaggtgggcaaaagggaaaatcctactatacaattacatttactgtcaattttccacataaagatgatgtttgctactttgcttatcactatccatatacgtattcaactttacagatgcatcttcaaaaattggaatcagcacacaatcctcagcaaatctattttcggaaagatgtgttatgtgaaaccctgtctggaaacagctgccccttggtgactataacagcaatgccagagtctaattattatgaacatatctgccatttcagaaatcgcccttacgttttcttgtctgctcgggtacatcctggagaaactaatgcaagttgggttatgaaaggaacgttggaatatctcatgagcaataaccccactgctcagagcttacgagaatcttatatttttaaaattgtccctatgttaaatccagatggtgtcatcaatggaaatcatcgctgttctttaagtggagaggatttgaataggcagtggcaaagtccaagtccggatttacatcctacaatttaccatgctaaggggctgttgcaatacttggctgcagtgaagcgtttacccttggtttattgtgattatcatggccattcccgaaagaagaatgtatttatgtatggttgcagcatcaaagagacagtgtggcataccaatgataatgcaacttcatgtgatgttgtggaggatacgggatacaggacattgcctaagatactgagccatatcgccccagcattttgcatgagcagctgtagcttcgtagtggaaaaatctaaagaatccacagcacgtgttgtagtttggagggaaataggagtacaaagaagttataccatggagagtactttatgtggctgtgatcagggaaaatacaagggtttacagattggtacccgagaactggaagagatgggagcaaaattttgtgttggtcttttacgtttgaaaagactgacctctccattggagtataatctgccttccagcctgcttgactttgaaaatgatttaattgaatcaagctgcaaagtaactagccctaccacttatgtcttggatgaagatgaacctcgattccttgaagaagttgattacagtgcagaaagtaatgatgagttagatattgagttggctgaaaatgtaggagattatgaaccttctgctcaagaagaagtactttctgactctgaattatcaagaacatacctaccttgagcccgctgccatctcttgttaactgcaaagaataaatgaaatatcttggtttttatttcccaggaagcttgagagaaatgagtttatacagagctgactcaaaaagacaaaaagtaacttgggccagtttggtttcaagataataaatgtgttattaattaatgataaaattggcgcttgttttattttcgatattcaatgcactttatgtagcattgaatgatcaaatattggatttacctttaaaaaaaaaacctgagtatcattgcatgaatttttatctccctatggttatatcctgcatcaagtggataattttgaagtgtgttcagaatataaaattgaaattttagagttgttgaaaatcctgacttgttgaaaactaatatatatgtacatggatttctatagatgtgtttgtttagaagtgggtagatattgcagataagactgttcttcagaatcatgttaactattgggttgtgactgaagtagtccagggtttgccttgaaaccattacattctacatttaccaaattaaacaaataaaaactgtattaaatgttgc

SEQ ID NO: 5629 - protein, 1186 aa, Homo sapiens
MSKLKVIPEKSLTNNSRIVGLLAQLEKINAEPSESDTARYVTSKILHLAQSQEKTRREMTAKGSTGMEILLSTLENTKDLQTTLNILSILVELVSAGGGRRVSFLVTKGGSQILLQLLMNASKESPPHEDLMVQIHSILAKIGPKDKKFGVKARINGALNITLNLVKQNLQNHRLVLPCLQLLRVYSANSVNSVSLGKNGVVELMFKIIGPFSKKNSSLIKVALDTLAALLKSKTNARRAVDRGYVQVLLTIYVDWHRHDNRHRNMLIRKGILQSLKSVTNIKLGRKAFIDANGMKILYNTSQLPVIPVTGPVAQLYSLPPEVDDVVDESDDNDDIDVEAENETENEDDLDQNFKNDDIETDINKLKPQQEPGRTIEDLKMYEHLFPELVDDFQDYDLISKEPKPFVFEGKVRGPIVVPTAGEETSGNSGNLRKVVMKENISSKGDEGEKKSTFMDLAKEDIKDNDRTLQQQPGDQNRTISSVHGLNNDIVKALDRITLQNIPSQTAPGFTAEMKKDCSLPLTVLTCAKACPHMATCGNVLFEGRTVQLGKLCCTGVETEDDEDTESNSSVEQASVEVPDGPTLHDPDLYIEIVKNTKSVPEYSEVAYPDYFGHIPPPFKEPILERPYGVQRTKIAQDIERLIHQSDIIDRVVYDLDNPNYTIPEEGDILKFNSKFESGNLRKVIQIRKNEYDLILNSDINSNHYHQWFYFEVSGMRPGVAYRFNIINCEKSNSQFNYGMQPLMYSVQEALNARPWWIRMGTDICYYKNHFSRSSVAAGGQKGKSYYTITFTVNFPHKDDVCYFAYHYPYTYSTLQMHLQKLESAHNPQQIYFRKDVLCETLSGNSCPLVTITAMPESNYYEHICHFRNRPYVFLSARVHPGETNASWVMKGTLEYLMSNNPTAQSLRESYIFKIVPMLNPDGVINGNHRCSLSGEDLNRQWQSPSPDLHPTIYHAKGLLQYLAAVKRLPLVYCDYHGHSRKKNVFMYGCSIKETVWHTNDNATSCDVVEDTGYRTLPKILSHIAPAFCMSSCSFVVEKSKESTARVVVWREIGVQRSYTMESTLCGCDQGKYKGLQIGTRELEEMGAKFCVGLLRLKRLTSPLEYNLPSSLLDFENDLIESSCKVTSPTTYVLDEDEPRFLEEVDYSAESNDELDIELAENVGDYEPSAQEEVLSDSELSRTYLP

SEQ ID NO: 5630 - DNA, 614 bp, Rattus norvegicus
  ref <308>: DATABASE ACCESSION NUMBER: EMBL / AA891872
  ref <309>: DATABASE ENTRY DATE: 2000-03-03
gagaacatgatgaactcatttattactcaaatggttgcattccattcaagagcacttaatacagaccattcaagagcacttaattgattgaaattaaagagaccaattggcatgggacttttaaaaatacaacttattccttttaagttattacttaaactatctagatcttctacatattaaaatagaagtgagaaaatagatctttggaatctagagtctagagtgaaggctaaaaacctgatatggaattggcatgatcaatccagactacggctaaaatgcaagagaacaggtcaggagttgatcaaagtttcaaaatttgtcacatttggtggaaaaataaaacactaaatgcatgtgcctgtgatgatcaaacggcataatattcttcagaccaaaacatatcctgaaatcttgaacattcaacttctgagctcatttctagctcccgaaagggggttgcaaaatccaatgggattgcatctacagtgaggccgctctctcactgctgacaaaatactctgctttttggcaatggcaatgataaacaagtagatgatgagaactcccgatgctttttgagaatcaagggttgctgatcttgaaaatct

SEQ ID NO: 5631 - protein, 1086 aa, Rattus norvegicus
  ref <308>: DATABASE ACCESSION NUMBER: SWISS-Prot / Q61941
  ref <309>: DATABASE ENTRY DATE: 2001-10-16
MAHLLKTVVAGCSCPFLSNLGSSKVLPGKRDFVRMLRTHQALWCKSPVKPGIPYKQLTVGVPKEIFQNEKRVALSPAGVQALVKQGFNVVVESGAGEASKFPDDLYRAAGAQIQGMKEVLASDLVVKVRAPMVNPTLGAHEADFLKPSGTLISFIYPAQNPDLLNKLSERKTTVLAMDQVPRVTIAQGYDALSSMANISGYKAVVLAANHFGRFFTGQITAAGKVPPAKILIVGGGVAGLASAGAAKSMGAVVRGFDTRAAALEQFKSLGAEPLEVDLKESGEGQGGYAKEMSKEFIEAEMKLFAQQCKEVDILISTALIPGKKAPVLFSKEMIESMKEGSVVVDLAAEAGGNFETTKPGELYVHKGITHIGYTDLPSRMATQASTLYSNNITKLLKAISPDKDNFHFEVKDDFDFGTMSHVIRGTVVMKDGKVIFPAPTPKNIPEEAPVKPKTVAELEAEKAGTVSMYTKTLTTASVYSAGLTGMLGLGIVAPNVAFSQMVTTFGLAGIIGYHTVWGVTPALHSPLMSVTNAISGLTAVGGLALMGGHFYPSTTSQSLAALATFISSVNIAGGFLVTQRMLDMFKRPTDPPEYNYLYLLPGGTFVGGYLAALYGGYNIEEIMYLGSGLCCVGALGGLSTQGTARLGNALGMIGVAGGLAATLGGLKPDPQLLAQMSGAMAMGGTIGLTIAKRIQISDLPQLVAAFHSLVGLAAVLTCMAEYIVEYPHFAMDATSNFTKIVAYLGTYIGGVTFSGSLVAYGKLQGILKSAPLLLLGRHALNAGLLAASVGGIIPFMADPSFTTGITCLGSVSALSTLMGVTLTAAIGGADMPVVITVLNSYSGWALCAEGFLLNNNLLTIVGALIGSSGAILSYIMCVAMNRSLANVILGGYGTTSTAGGKPMEISGTHTEINLDNAVEMIREANSIVITPGYGLCAAKAQYPIADLVKMLTEQGKKVRFGIHPVAGRMPGQLNVLLAEAGVPYDIVLEMDEINSDFPDTDLVLVIGANDTVNSAAQEDPNSIIAGMPVLEVWKSKQVIVMKRSLGVGYAAVDNPIFYKPNTAMLLGDAKKTCDALQAKVRESYQK

SEQ ID NO: 5632 - DNA, 4232 bp, Homo sapiens
  ref <308>: DATABASE ACCESSION NUMBER: EMBL / U40490
  ref <309>: DATABASE ENTRY DATE: 1999-06-30
gcgccgcggggcccaagcccgggtctgccagcgcgagctcctctcgcggccctcagggcacagcccaaggctgtcagcctcccggcccagtgatttgccttcaaggaaactggggagtcagaaaattgggaactcatatcaacatggcaaacctattgaaaacagtggtgactggctgctcgtgtcctctacttagcaatttggggtcctgtaagggtctacgtgtgaagaaggattttttacgaacattttatactcaccaagaactgtggtgtaaagcgcctgtaaaaccaggaattccatataagcaactgactgttggagtccccaaagagatattccaaaatgagaagcgagtggcattgtctcctgctggtgttcagaacttggtcaagcagggttttaatgttgtcgtggaatcgggtgcgggcgaagcttccaagttctcagatgatcactatagagtggcaggtgcccaaatccaaggggcaaaggaagtgctggcttctgatttggtggtcaaagtgcgagcccctatggttaatccaacattaggtgttcatgaagctgaccttttaaagacatcaggaacgctgattagttttatttacccagcccaaaatccagagttgctaaataaactttcccaaagaaaaactacagttctggcaatggaccaggttccaagagtcacaattgctcagggatatgatgcgctaagctccatggccaacattgcgggttataaggctgttgtcctagcagcaaatcattttggacgtttttttactggtcagatcacagctgctggaaaagttcctccagctaagattctgatagttggtggtggtgttgctgggcttgcttctgcaggcgccgaaaagtcgatgggtgcaattgttcgaggatttgacacaagagctgccagtttggaacagttcaagtctcttggtgctgagcccttggaggtggacttgaaggaatctggtgagggacaaggaggatatgcaaaagagatgtccaaagagttcattgaagctgaaatgaaactctttgctcaacaatgcaaggaggtagacatccttatcagcacagcacttattccaggtaaaaaagctccagttttatttaataaagaaatgattgagtcaatgaaggaaggttcagttgttgtggatttagctgctgaggctggtggaaactttgaaaccactaagccaggagaactctacattcataagggaattactcacataggctacacagacctgcccagccgaatggccactcaggccagcaccctatattccaacaacatcaccaaactcctgaaggccatcagcccggacaaagataatttttattttgatgtgaaagatgactttgactttggtacgatgggtcatgtcattagaggaactgtagtgatgaaagatggtaaagtgattttcccagctcccacaccgaaaaatattcctcaaggtgccccagtaaaacagaagacagtggctgagctggaagctgaaaaagcagctaccattacacccttcaggaagacaatgtcaacggcttctgcatatacagcaggtctcacagggatactgggtttgggcattgcggctcccaatctagccttttctcagatggtgaccacttttggcttggctggcattgtggggtatcataccgtctggggagtgacccctgctctccactcaccactgatgtctgtgacaaatgcaatctcagggctgactgcagttggtgggttggcactgatgggaggacatttgtatccttccacaacttctcagggccttgctgctcttgctgcattcatatcctctgtcaacattgcaggtggctttctggtgactcagagaatgctggacatgttcaagcgtcccactgaccccccagaatacaactacctgtacctgctccctgccggcacctttgttggtggatatttagctgccctctacagtggttataacattgaacagatcatgtacctaggctcgggtttgtgctgtgtcggtgccttggctggcctctccacccagggaacagcacgtcttggcaatgcactgggcatgattggggttgctggaggactggcagccaccctcggagtcctaaaaccgggcccagaattactagctcagatgtctggagcgatggctttgggtggtaccattggattgacaattgccaaacgcatccagatttctgatttacctcaattagttgctgcttcacacagtttagtgggtttggcagctgtacttacttgcatagctgagtacattatagaatatccacattttgctccggatgcagcagcaaatctcaccaagattgtggcctacctcggcacttacattggtggcgtcacctttagtgggtctctcattgcctatggaaaattgcagggtctcctgaaatctgcccctctcctactgcctggaaggcacttactcaatgcaggcttactggctgctagtgtgggcgggataatcccattcatggtggacccaagctttactactggcatcacctgtctgggttcagtgtctgctctctctgctgtcatgggtgtgactttgacagctgctattgggggtgctgacatgcccgtcgttatcactgtgctgaacagctactcaggctgggccctgtgtgcagagggcttcctgctcaacaacaatctgctgaccatcgtgggtgcactcataggctcgtctggtgctcccctgtcatacatcatgtgtgtggcaatgaatcgctccctggctaatgtgattcttggaggctatggcaccacttcaacagctggtggaaaacccatggaaatttctggcacacatacggaaatcaaccttgacaatgcaattgacatgattcgagaagctaatagcattatttttacaccaggctatggtctctgtgcagccaaagctcaataccccattgctgatttggtaaagatgctcactgagcaaggcaaaaaagtcaggtttggaattcacccagttgcaggccgaatgcctggtcagcttaatgtgctgctggctgaggctggtgtgccatatgacattgtgttggaaatggatgagatcaaccatgattttccagatactgatttggtccttgtaattggagctaatgacactgttaattcagcagctcaagaagatcccaactctattattgcaggcatgccagtccttgaggtctggaaatcaaagcaggtgattgttatgaagaggtctttgggtgttggctatgctgcagtggacaatccaatcttctacaaacctaacacggccatgcttctaggtgatgccaagaaaacatgtgacgcgctccaggcgaaagttagagaatcctatcagaagtaaatattaaggatcaagctgttagctaatatgccacctctgcagttttgggaacaggcaaataaagtatcagtatacatggtgatgtacatctgtagcaaagctcttggagcaaaatgaagactgaagaaagcaaagcaaaaactgtatagagagatttttcaaaagcagtaatccctcaattttaaaaaaggattgaaaattctaaatgtctttctgtgcatattttttgtgttaggaatcaaaagtattttataaaaggagaaagaacagcctcattttagatgtagtcctgttggattttttatgcctcctcagtaaccagaaatgttttaaaaaactaagtgtttaggatttcaagacaacattatacatggctctgaaatatctgacacaatgtaaacattgcaggcacctgcattttatgttttttttttcaacaaatgtgactaatttgaaacttttatgaacttctgagctgtccccttgcaattcaaccgcagtttgaattaatcatatcaaatcagttttaattttttaaattgtacttcagagtctatatttcaagggcacattttctcactactattttaatacattaaaggactaaataatctttcagagatgctggaaacaaatcacttgctttatatgtttcattagaataccaatgaaacatacaacttgaaaattagtaatagtattttggaagatcccatttctaattggagatctctttaatttcgatcaacttataatgtgtagtactatattaagtgcacttgagtgggattcaacatttgactaataaaatgagttcatcatgttggc

SEQ ID NO: 5633 - protein, 1086 aa, Homo sapiens
  misc_feature (1)..(1086): Xaa=Unknown amino acid
  ref <308>: DATABASE ACCESSION NUMBER: SWISS-Prot / Q13423
  ref <309>: DATABASE ENTRY DATE: 2002-06-15
MANLLKTVVTGCSCPLLSNLGSCKGLRVKKDFLRTFYTHQELWCKAPVKPGIPYKQLTVGVPKEIFQNEKRVALSPAGVQNLVKQGFNVVVESGAGEASKFSDDHYRVAGAQIQGAKEVLASDLVVKVRAPMVNPTLGVHEADLLKTSGTLISFIYPAQNPELLNKLSQRKTTVLTMDQVPRVTIAQGYDALSSMANIAGYKAVVLAANHFGRFFTGQITAAGKVPPAKILIVGGGVAGLASAGAAKSMGAIVRGFDTRAAALEQFKSLGAEPLEVDLKESGEGQGGYAKEMSKEFIEAEMKLFAQQCKEVDILISTALIPGKKAPVLFNKEMIESMKEGSVVVDLAAEAGGNFETTKPGELYIHKGITHIGYTDLPSRMATQASXLYSNNITKLLKAISPDKDNFYFDVKDDFDFGTMGHVIRGTVVMKDGKVIFPAPTPKNIPQGAPVKQKTVAELEAEKAATITPFRKTMSTASAYTAGLTGILGLGIAAPNLAFSQMVTTFGLAGIVGYHTVWGVTPALHSPLMSVTNAISGLTAVGGLALMGGHLYPSTTSQGLAALAAFISSVNIAGGFLVTQRMLDMFKRPTDPPEYNYLYLLPAGTFVGGYLAALYSGYNIEQIMYLGSGLCCVGALAGLSTQGTARLGNALGMIGVAGGLAATLGVLKPGPELLAQMSGAMALGGTIGLTIAKRIQISDLPQLVAAFHSLVGLAAVLTCIAEYIIEYPHFATDAAANLTKIVAYLGTYIGGVTFSGSLIAYGKLQGLLKSAPLLLPGRHLLNAGLLAASVGGIIPFMVDPSFTTGITCLGAVSALSAVMGVTLTPAIGGADMPVVITVLNSYSGWALCAEGFLLNNNLLTIVGALIGSSGAILSYIMCVAMNRSLANVILGGYGTTSTAGGKPMEISGTHTEINLDNAIDMIREANSIIITPGYGLCAAKAQYPIADLVKMLTEQGKKVRFGIHPVAGRMPGQLNVLLAEAGVPYDIVLEMDEINHDFPDTDLVLVIGANDTVNSAAQEDPNSIIAGMPVLEVWKSKQVIVMKRSLGVGYAAVDNPIFYKPNTAMLLGDAKKTCDALQAKVRESYQK

SEQ ID NO: 5634 - DNA, 548 bp, Rattus norvegicus
  ref <308>: DATABASE ACCESSION NUMBER: EMBL / AA891877
  ref <309>: DATABASE ENTRY DATE: 2000-03-03
gcacccctaaccaaacgttatattctgggctttacagataacacaaacaactgtgatgtggcaattatgcttttaatggagatataaaacttatcaatgcaaaagaaagttttatataacattagcaatagtgattaacttaaaattatgttttaataatgtgaaatacagtgtgttagacctcaaaaaagaaaccacaaagttccccgcaacctaaaatgttggaaaggctccttaaaattgtttttacctaccaacgatttaatactcagtggcatctggggggacgtaagaaaatatggagctcttttcagctatgatttggagctttagtaaagctctatggtaatgtcactgtgggaagaaccataaaattctcccaaaagtacttccaatagcataggcaactcagaggcttaatattaatagttcaaagcttagaaagcagctgctatcctgaagaattgtaaaagatcaatcctgctactctttctaaaatacagacataacccaaggatgtcagttctgtgaagtttcagggaaacact

SEQ ID NO: 5635 - DNA, 3436 bp, Homo sapiens
  ref <308>: DATABASE ACCESSION NUMBER: EMBL / X77548
  ref <309>: DATABASE ENTRY DATE: 1994-04-06
caatcgcgaccctcagtccacccaaggtctcctcggatcgcctggagaggcactcggacctggagcagtgaggagaatgaataccttccaagaccagagtggcagctccagtaatagagaaccccttttgaggtgtagtgatgcacggagggacttggagcttgctattggtggagttctccgggctgaacagcaaattaaagataacttgcgagaggtcaaagctcagattcacagttgcataagccgtcacctggaatgtcttagaagccgtgaggtatggctgtatgaacaggtggaccttatttatcagcttaaagaggagacacttcaacagcaggctcagcagctctactcgttattgggccagttcaattgtcttactcatcaactggagtgtacccaaaacaaagatctagccaatcaagtctctgtgtgcctggagagactgggcagtttgacccttaagcctgaagattcaactgtcctgctctttgaagctgacacaattactctgcgccagaccatcaccacatttgggtctctcaaaaccattcaaattcctgagcacttgatggctcatgctagttcagcaaatattgggcccttcctggagaagagaggctgtatctccatgccagagcagaagtcagcatccggtattgtagctgtccctttcagcgaatggctccttggaagcaaacctgccagtggttatcaagctccttacatacccagcaccgacccccaggactggcttacccaaaagcagaccttggagaacagtcagacttcttccagagcctgcaatttcttcaataatgtcgggggaaacctaaagggcttagaaaactggctcctcaagagtgaaaaatcaagttatcaaaagtgtaacagccattccactactagttctttctccattgaaatggaaaaggttggagatcaagagcttcctgatcaagatgagatggacctatcagattggctagtgactccccaggaatcccataagctgcggaacgctgagaatggcagtcgtgaaaccagtgagaagtttaagctcttattccagtcctataatgtgaatgattggcttgtcaagactgactcctgtaccaactgtcagggaaaccagcccaaaggtgtggagattgaaaacctggccaatctgaagtgcctgaatgaccacttggaggccaagaaaccattgtccacccccagcatggttacagaggattggcttgtccagaaccatcaggacccatgtaaggtagaggaggtgtgcagagccaatgagccctgcacaagctttgcagagtgtgtgtgtgatgagaattgtgagaaggaggctctgtataagtggcttctgaagaaagaaggaaaggataaaaatgggatgcctgtggaacccaaacctgagcctgagaagcataaagattccctgaatatgtggctctgtcctagaaaagaagtaatagaacaaactaaagcaccaaaggcaatgactccttctagaattgctgattccttccaagtcataaagaacagccccttgtcggagtggcttatcaggcccccatacaaagaaggaagtcccaaggaagtgcctggtactgaagacagagctggcaaacagaagtttaaaagccccatgaatacttcctggtgttcctttaacacagctgactgggtcctgccaggaaagaagatgggcaacctcagccagttatcttctggagaagacaagtggctgcttcgaaagaaggcccaggaagtattacttaattcacctctacaggaggaacataacttccccccagaccattatggcctccctgcagtttgtgatctctttgcctgtatgcagcttaaagttgataaagagaagtggttatatcgaactcctctacagatgtgaaggaatggacaagagttgagcagcctttctgctgattatcacacatcatgagctgagtgactgcagcttgccaaatctttgtgtttctgggtctgaccaattagcttagttcttctcctgcctaattttgaactagtaaagcaaagtgagtcatcagattatgagttactgtttaaaagaaaaatgctgtttattcatgctgaggtgattcagttccctccttcttacagaagtattttaattcaccccacactagaaatgcagcatctttgtggacgtctttttcacaagcctccaaggctccttagattgggtcgttactaaaagtacattaaaacactcttgtttatcgaagtatattgatgtattctaaagctagtaaacttccctaacgtttaattgccctacagatgcttctcttgctgtgggttttcttttgttagtggtctgaaataattattttcctgttctattaatacatagtgtattttgcacaaaaaaattaacctggtcaatagtgattaccaaaatatatattaataatcttggcaatttttgacattaattatgaaacattttagcccacgttagttctacattattcttcacttaaactcagctactgcaaattttgtctttctgtaaatgttattaaaatatccagtgagctctttagaaggactcagtattatttcaagactatttttgaggtaattctagccttttaaaatattctacagacctacggggcttaaaagaaccccagtaccgactaagcaaataggcaaaagacatgttggaaatgtagtatagtacttgaaacagtcactatcatagggataattggtgcatcctgtgtaaatggaagctgagcttgacacctggtgcttttaagtagggataaagtcatcctctcactgcaagcacagcatacctgtacctccaaaagtgacgttttagtgaacaggccgttttcaacacttgtgccttggggtgttcattgaagctttgtgaaaactactgatgttttctcagtctccttaaagttacgtccatgctttaaaatgtctgtgtaggagagaagtggggtttataatgttttctctaagatatctttgctgctttccagactttgaaactattaagctttccaactgcctcttaccggaaatacttctgggggaacttcatggtcccaaaatgtcattgccatacagcttcaccagagttctttgaaccacagctgaaaagagctttgtattattttttaattccctccccagatatcatttaggagtattatataaaggtggtgggcaaaaacaatgtaaggagcctttccagttatcttgagttgcagctctgtagtttcttgaggccaaacacactgtatttgtcaaaatataatttcccttaatcactatgttaatgagtatgtaaaacattcttttgcattgatgaattttgtatctgcttcccttaaagcataacagccataaaaaaaaaaaaaaaaaa

SEQ ID NO: 5636 - protein, 614 aa, Homo sapiens
  ref <308>: DATABASE ACCESSION NUMBER: SWISS-Prot / Q13772
  ref <309>: DATABASE ENTRY DATE: 2001-10-16
MNTFQDQSGSSSNREPLLRCSDARRDLELAIGGVLRAEQQIKDNLREVKAQIHSCISRHLECLRSREVWLYEQVDLIYQLKEETLQQQAQQLYSLLGQFNCLTHQLECTQNKDLANQVSVCLERLGSLTLKPEDSTVLLFEADTITLRQTITTFGSLKTIQIPEHLMAHASSANIGPFLEKRGCISMPEQKSASGIVAVPFSEWLLGSKPASGYQAPYIPSTDPQDWLTQKQTLENSQTSSRACNFFNNVGGNLKGLENWLLKSEKSSYQKCNSHSTTSSFSIEMEKVGDQELPDQDEMDLSDWLVTPQESHKLRKPENGSRETSEKFKLLFQSYNVNDWLVKTDSCTNCQGNQPKGVEIENLGNLKCLNDHLEAKKPLSTPSMVTEDWLVQNHQDPCKVEEVCRANEPCTSFAECVCDENCEKEALYKWLLKKEGKDKNGMPVEPKPEPEKHKDSLNMWLCPRKEVIEQTKAPKAMTPSRIADSFQVIKNSPLSEWLIRPPYKEGSPKEVPGTEDRAGKQKFKSPMNTSWCSFNTADWVLPGKKMGNLSQLSSGEDKWLLRKKAQEVLLNSPLQEEHNFPPDHYGLPAVCDLFACMQLKVDKEKWLYRTPLQM

SEQ ID NO: 5637 - DNA, 452 bp, Rattus norvegicus
  ref <308>: DATABASE ACCESSION NUMBER: EMBL / AA891880
  ref <309>: DATABASE ENTRY DATE: 2000-03-03
agacaggactgcagtttattgacaccatgacatgacacctgttgtcactggaggagggggtgagtgaaagtggtctccgtggatatcactggggaccccattcgccttttagctagaggtcatggatttagagtgcagatataattctacacactggagtcattaccactcatgccattcctaaacccatcttccatttggtccagctatgaaggcctgggtccctcctctttttgaagggcagagggagcacagggccatccatgtcttaggaacaagaagggctgctggcaatggtggtatatgcctttaatcccagaactcactgtcttaggcaatcagatctctgagttccaggacagccagggctacatagagaaaccatatttgaaaaacaaaatcaaaatagaaagaaagagacaggaaggaaggaagagggggcactggggatg

SEQ ID NO: 5638 - protein, 321 aa, Rattus norvegicus
  ref <308>: DATABASE ACCESSION NUMBER: SWISS-Prot / Q9JHY2
  ref <309>: DATABASE ENTRY DATE: 2002-06-15
MGDLPLNINIQEPRWDQSTFLGRARHFFTVTDPRNLLLSGKQLEASRNIVQNYRAGVVTPGLTEDQLWRAKYVYDSAFHPDTGEKVVLIGRMSAQVPMNMTITGCMLTFYRKTPTVVFWQWVNQSFNAIVNYSNRSGDAPITVQQLGTAYVSATTGAVATALGLKSLTKHLPPLVGRFVPFAAVAAANCINIPLMRQRELQVGIPVTDEAGQRLGHSVTAAKQGIFQVVVSRIGMAIPAMAIPPVIMNTLEKKDFLKRRPWLGAPLQVGLVGFCLVFATPLCCALFPQRSSIHVTRLEPELRAQIQAQKPSIDVVYYNKGL

SEQ ID NO: 5639 - DNA, 2735 bp, Homo sapiens
  ref <308>: DATABASE ACCESSION NUMBER: EMBL / BC000124
  ref <309>: DATABASE ENTRY DATE: 2001-07-13
ggagggcccggcggcgacagcggaggcagagaggaaggcggttctgagagcttcagagagcgatggaaagcaaaatgggtgaattgcctttagacatcaacatccaggaacctcgctgggaccaaagtactttcctgggcagagcccggcactttttcactgttactgatcctcgaaatctgctgctgtccggggcacagctggaagcttctcggaacatcgtgcagaactacagggccggcgtggtgaccccagggatcaccgaggaccagctgtggagggccaagtatgtgtatgactccgccttccatccggacacaggggagaaggtggtcctgattggccgcatgtcagcccaggtgcccatgaacatgaccatcactggctgcatgctcacattctacaggaagaccccaaccgtggtgttctggcagtgggtgaatcagtccttcaatgccattgttaactactccaaccgcagtggtgacactcccatcactgtgaggcagctggggacagcctatgtgagtgccaccactggagctgtggccacggccctgggactcaaatccctcaccaagcacctgccccccttggtcggcagatttgtgccctttgcagcagtggcagctgccaactgcatcaacatccccctgatgaggcagagagagctgcaggtgggcatcccggtggctgatgaggcaggtcagaggcttggctactcggtgactgcagccaagcagggaatcttccaggtggtgatttcaagaatctgcatggcgattcctgccatggccatcccaccactgatcatggacactctggagaagaaagacttcctgaagcgccgcccctggctgggggcacccctgcaggtgggactggtgggcttctgcctggtatttgcaacccccctgtgctgtgccctattcccccagaagagctccatacacataagcaacctggaaccagagctgagagctcagatccatgagcaaaaccccagcgttgaagtggtctactacaacaaggggctttgaggagggtcagcctctgtcccctccctcacttccttgggctgctgctttagtggagtcatgtcacccctaccacttggctatctgcctagcactgggcaggggccttggtgggcagatggcaattgagggtagcaacctattagggtgggggagggacctccataaggcttttcctcccttctctggtttcaaagatcagagcacataacccctcctgtgcttgagtgtccatgcatatacatacatgatacacatgtgtatgtgtacattgggtcctgaaagctagaagcaggcatgctagcctagtatgttctgacatctggcttcccttctcagcctcatgtccacctgcctgccagccaggctacaggtgtgacttccttctctaaactgttacaccagccaagttatttttgatggcacctcatcccttctagaaataggaggagccccaggatctcaggacagagacttatagacactagtaggacaaagcgggctgaatccttcaggtttctgatacctagctccccaagctgactgggctggcagaggagaacatgttgagacaagggaggcaggggacttatgcatccctcagtgccatcccttgtatcctggaatagctccatttcccctcctcctctctaccagacaaaggagtgcctgtgtcctgtactgccctcgctgtctcccccaccaccctacttgacagcgtgggcatcttcaggcacagccttgggagttcctggtgtgctctgacatcatgacctcaaatctaaatcctccaatcccaactccctttcccaaacaaaaagccacagaggcagagcaagcattcccctttaagagcttccactgcaccccctcccaagggacacagcggtaggaatggtgcttaaactccacaggtatcagagagggtgtaactaggacatcctcaagggcagctaggccccgaatgtacaatgttaagacagggaattttgtgttccattgacttttttttttttttttaatggagtttcactattttgcccaggctggagtgcgatggtgcgatcttggctcactgcaacctctgcctcctgggttcaagtgattctcttgcctcagtctcccgagtagtggaaattacaggtgtgtgctaccacatcttgctagttttgtatttttagcagagatgggggtttcaccatgttggccaggctagtctcgaactcctgacctcaggtgatccacctgccttggcctcccaaagcactgggattacaagcatgagccactgtgcccagcctgttccactgacatttcttagacattcagcaaaacccccaccttaacctcttttctttcttgagggttggtcctgtccccacctccaccctcccaccccctggaagaggaagggcccgggcatcagtggctagtccaaataaaatatgggcttggggatggaatgggtggtggtaagttcacagagtgtagttagatcccaactcccatgacctctggcttcagtggtgggtggggcagggcagatgaaagggcttcagtgggaacctctgagagcattttcctgttccccctatcaaccgcccccagtgataacatctgtgaagccagccattactcaataaactgcaaacttgtctaaaaaaaaaaaaaaaaaaaaaaaaaaaaaaaaaaaaaaaa

SEQ ID NO: 5640 - protein, 321 aa, Homo sapiens
  ref <308>: DATABASE ACCESSION NUMBER: SWISS-Prot / Q9BWM7
  ref <309>: DATABASE ENTRY DATE: 2002-06-15
MGELPLDINIQEPRWDQSTFLGRARHFFTVTDPRNLLLSGAQLEASRNIVQNYRAGVVTPGITEDQLWRAKYVYDSAFHPDTGEKVVLIGRMSAQVPMNMTITGCMLTFYRKTPTVVFWQWVNQSFNAIVNYSNRSGDTPITVRQLGTAYVSATTGAVATALGLKSLTKHLPPLVGRFVPFAAVAAANCINIPLMRQRELQVGIPVADEAGQRLGYSVTAAKQGIFQVVISRICMAIPAMAIPPLIMDTLEKKDFLKRRPWLGAPLQVGLVGFCLVFATPLCCALFPQKSSIHISNLEPELRAQIHEQNPSVEVVYYNKGL

SEQ ID NO: 5641 - DNA, 452 bp, Rattus norvegicus; identical to SEQ ID NO: 5637
  ref <308>: DATABASE ACCESSION NUMBER: EMBL / AA891880
  ref <309>: DATABASE ENTRY DATE: 2000-03-03

SEQ ID NO: 5642 - protein, 321 aa, Rattus norvegicus; identical to SEQ ID NO: 5638
  ref <308>: DATABASE ACCESSION NUMBER: SWISS-Prot / Q9JHY2
  ref <309>: DATABASE ENTRY DATE: 2002-06-15

SEQ ID NO: 5643 - DNA, 2735 bp, Homo sapiens; identical to SEQ ID NO: 5639
  ref <308>: DATABASE ACCESSION NUMBER: EMBL / BC000124
  ref <309>: DATABASE ENTRY DATE: 2001-07-13

SEQ ID NO: 5644 - protein, 321 aa, Homo sapiens; identical to SEQ ID NO: 5640
  ref <308>: DATABASE ACCESSION NUMBER: SWISS-Prot / Q9BWM7
  ref <309>: DATABASE ENTRY DATE: 2002-06-15

SEQ ID NO: 5645 - DNA, 497 bp, Rattus norvegicus
  ref <308>: DATABASE ACCESSION NUMBER: EMBL / AA891891
  ref <309>: DATABASE ENTRY DATE: 2000-03-03
aaaaatcaaagaatagaaaaactttacataaaaatatgtcaattttagtgtccacattgttgtccacacagaaaattgaaacatgatatctttttgtcaaactgtagcatatggccacagtggtagccaggccaattcatctggttcaccattacggggatggacacacatacctgtgcctgtggatgacagaactttaaaacgcacatttgcgggtcactcgaacggccccacggtggctccttaatgcagatacagtcaatattgctaatgtgtaaattagtacaggctatggaccagtgttcataaatattctttagcaacaggcttcacaatttaaataattttaactattctgatgattccgatcctcatgagctgcagaccccatgtgctactctggaatatctcccagagtcaacagccccaccacagcagcaggaggcagacccggatagacagcttgtccttggcgaggtgtccgtcaactcagaatc

SEQ ID NO: 5646 - DNA, 383 bp, Rattus norvegicus
  ref <308>: DATABASE ACCESSION NUMBER: EMBL / AA891911
  ref <309>: DATABASE ENTRY DATE: 2000-03-03
ggagttaaaaggtgtttaatgaggggaagaatattgaacatatacttgtcttattccccacccccattcagatgaatcctgagccatggaaagattagccattcaatgagactttgggtaatgttgagtggctcgagaactcttgaggatgaggatgagagacaactttttaggtggtgcaaggatggaggattaagactggaggtcacagcatgtgtagcacaaggcaatgggactcataagcaggatggtaagcagcctcagcatctggtgatcagatcttcaggcttggctatgggcaatattacttctgctttgtcttctgctggtatggtgatggagtggcagttggggggcagggctcatgaacaacaggctggcat

SEQ ID NO: 5647 - protein, 152 aa, Rattus norvegicus
  ref <308>: DATABASE ACCESSION NUMBER: SWISS-Prot / Q63532
  ref <309>: DATABASE ENTRY DATE: 2002-06-15
MSSQQQKQPCTVPPQLHQHEVKQPCQPPPQEPCAPKTKEPCHPIPEPCNPKVPEPCQPKVPEPCQPKVPEPCQPKVPEPCQPKVPEPCQPKVPEPCQPKVPEPCHPKAPEPCHPVVPEPCQPVAPEPCQPVVPEPCPPTVTPSPYQQKTKQK

SEQ ID NO: 5648 - DNA, 270 bp, Homo sapiens
  ref <308>: DATABASE ACCESSION NUMBER: Refseq / NM_005987
  ref <309>: DATABASE ENTRY DATE: 2000-11-01
atgaattctcagcagcagaagcagccttgcaccccaccccctcagcctcagcagcagcaggtgaaacaaccttgccagcctccaccccaggaaccatgcatccccaaaaccaaggagccctgccaacccaaggtgcctgagccctgccaccccaaagtgcctgagccctgccagcccaagattccagagccctgccagcccaaggtgcctgagccctgcccttcaacggtcactccagcaccagcccagcagaagaccaagcagaagtaa

SEQ ID NO: 5649 - DNA, 576 bp, Rattus norvegicus
  ref <308>: DATABASE ACCESSION NUMBER: EMBL / AA891914
  ref <309>: DATABASE ENTRY DATE: 2000-03-03
aaagaacatcccattcaacactggctttattactgggcgggggcaacagatccttggcagtggttgggctgaaagctatgagggttggaaggcctggggctcagctttcaccaggcagagcgggcacactagcaagtgcagcaactaggcgtgtatatatgtcaactccacgtagaaacacagcctcgtgcagtcgttcgttatggtcatgtagtaacacgggtgtgcggttcatgggcgagaagcccagagctgggatccccaccgctcggatataacggctgtcagtggcagcaggaaagatctccggctccagagtgaggttcatttccttgcaggccccgctgaaagctgcccaccaggggtccgtatcatcagtgggtgtcattcgaggctctgtaaacttctgagcaaactcaaaggtgaccccctctcccgcttcctggcaccagctctgcagctgcttctcgaaggccttcatgtctacatctggcgccactcggaagtcaaaacaggcactcatggtaccaggtaccacattataggccacaccaccttcgggcttagtcagattca

SEQ ID NO: 5650 - DNA, 1403 bp, Homo sapiens
  ref <308>: DATABASE ACCESSION NUMBER: EMBL / D16307
  ref <309>: DATABASE ENTRY DATE: 1999-01-21
gggcgctgagaggcgagcgtgagcccagcgacaggagactcaccacgcgcagcgccatgaccagcaagggtcccgaggaggagcacccatcggtgacgctcttccgccagtacctgcgtatccgcactgtccagcccaagcctgactatggagctgctgtggctttctttgaggagacagcccgccagctgggcctgggctgtcagaaagtagaggtggcacctggctatgtggtgaccgtgttgacctggccaggcaccaaccctacactctcctccatcttgctcaactcccacacggatgtggtgcctgtcttcaaggaacattggagtcacgacccctttgaggccttcaaggattctgagggctacatctatgccaggggtgcccaggacatgaagtgcgtcagcatccagtacctggaagctgtgaggaggctgaaggtggagggccaccggttccccagaaccatccacatgacctttgtgcctgatgaggaggttgggggtcaccaaggcatggagctgttcgtgcagcggcctgagttccacgccctgagggcaggctttgccctggatgagggcatagccaatcccactgatgccttcactgtcttttatagtgagcggagtccctggtgggtgcgggttaccagcactgggaggccaggccatgcctcacgcttcatggaggacacagcagcagagaagctgcacaaggttgtaaactccatcctggcattccgggagaaggaatggcagaggctgcagtcaaacccccacctgaaagaggggtccgtgacctccgtgaacctgactaagctagagggtggcgtggcctataacgtgatacctgccaccatgagcgccagctttgacttccgtgtggcaccggatgtggacttcaaggcttttgaggagcagctgcagagctggtgccaggcagctggcgagggggtcaccctagagtttgctcagaagtggatgcacccccaagtgacacctactgatgactcaaacccttggtgggcagcttttagccgggtctgcaaggatatgaacctcactctggagcctgagatcatgcctgctgccactgacaaccgctatatccgcgcggtgggggtcccagctctaggcttctcacccatgaaccgcacacctgtgctgctgcacgaccacgatgaacggctgcatgaggctgtgttcctccgtggggtggacatatatacacgcctgctgcctgcccttgccagtgtgcctgccctgcccagtgacagctgagccctggaactcctaaacctttgcccctggggcttccatcccaaccagtgccaaggacctcctcttcccccttccaaataataaagtctatggacagggctgtctctgaagtactaacac

SEQ ID NO: 5651 - protein, 408 aa, Homo sapiens
  ref <308>: DATABASE ACCESSION NUMBER: SWISS-Prot / Q03154
  ref <309>: DATABASE ENTRY DATE: 2002-06-15
MTSKGPEEEHPSVTLFRQYLRIRTVQPKPDYGAAVAFFEETARQLGLGCQKVEVAPGYVVTVLTWPGTNPTLSSILLNSHTDVVPVFKEHWSHDPFEAFKDSEGYIYARGAQDMKCVSIQYLEAVRRLKVEGHRFPRTIHMTFVPDEEVGGHQGMELFVQRPEFHALRAGFALDEGIANPTDAFTVFYSERSPWWVRVTSTGRPGHASRFMEDTAAEKLHKVVNSILAFREKEWQRLQSNPHLKEGSVTSVNLTKLEGGVAYNVIPATMSASFDFRVAPDVDFKAFEEQLQSWCQAAGEGVTLEFAQKWMHPQVTPTDDSNPWWAAFSRVCKDMNLTLEPEIMPAATDNRYIRAVGVPALGFSPMNRTPVLLHDHDERLHEAVFLRGVDIYTRLLPALASVPALPSDS

SEQ ID NO: 5652 - DNA, 550 bp, Rattus norvegicus
  ref <308>: DATABASE ACCESSION NUMBER: EMBL / AA891943
  ref <309>: DATABASE ENTRY DATE: 2000-03-03
gaaagaatgcactttttagtagatatgagtgtgagactcttgtctcgttattgctggtgtgcttctcggtctctggcagcagtgtaattatctgcgcatgcctgacctgcagtcaggcggtagaggggccaagcatctccgctccgggcagcagtactggttgtgcgtctttgactccacattagcgtgctccttcagtgttgccttcctcctgccttctgtttattccacgcatctcagcagaggaaacagcagcgctgctcctaaattcactctaagccactgacaggaagaatttgggctgtgctataaagtttccaatatgtctcgacattgttctccagctggtggtgatacttggggatacgatggcatctttactaatggggacaatgtatgcatgaattataaaccagagacgggagagatggccaagtggttaagagtgcttcttgcagcagatccaagttcaggtcccagggcccacatcaaaatcacctgtaattctagttgcaggggatcagataccctcttctggttccgtgtgtgc

SEQ ID NO: 5653 - DNA, 605 bp, Rattus norvegicus
  ref <308>: DATABASE ACCESSION NUMBER: EMBL / AA891944
  ref <309>: DATABASE ENTRY DATE: 2000-03-03
cctataataactgtgatgatttattccatcatagagattaagatcacatgtatgttacatacaatacagaataatgtgtatgatgactatataatacccctgtacatatatttctgtatctgtacatacaaccagcaaagagaaaatctacatctgtgacctaagacacagaattcacaccctgcttctccagccaggctaacagtgagatcacagtcagtttcctgagtgctggggccaggttagagtccctgtaaccaacacatacaaccttagaagagctttaagaaaacacgcttgctttctcacagtcaacctactggagcgggatctgtgctataaacgtgacctcaagaattatttctgaatacccatgtacatcataaggatgggaaacaaagcctctgatttcattgcagacctttcctgtgagtccatggaaccacgttaacaaaagaacgagcaggcagaaggggagtcttagcagaacttggttcacccccaatcccactgccgtgagacttctcagttcaacctatccttacccacaccatataaagtaaacccaccttttacatttaagtgatgctttttcataaagtacc

SEQ ID NO: 5654 - protein, 395 aa, Rattus norvegicus
  ref <308>: DATABASE ACCESSION NUMBER: SWISS-Prot / AAH05419
  ref <309>: DATABASE ENTRY DATE: 2002-10-01
MEEAVESPEVKEFEYFSDAVFIPKDGNTLSVGVIKRIETAVKEGEIVKVVSIVKEIIQNVSRNKIKIAVTGDSGNGMSSFINALRLVGHEEKDSAPTGVVRTTQKPTCYFSSHFPYVELWDLPGLGATAQSVESYLEEMQISTYDLIIIVASEQFSSNHVKLAITMQRMRKRFYVVWTKLDRDLSTSTFPEPQLLQSIQKNIRDSLQKEKVKEHPMFLVSVFKPESHDFPKLRETLQKDLPVIKYHGLVETLYQVCEKTVNERVEFIKKSIDEDNLHTDFGISDPGNAIEIRKAFQKTFGLDDISLHLVSLEMKNKHFNTSMESQETQRYQQDDWVLARLYRTGTRVGSIGFDYMKCCFSSHHSRCKQQKDILDETAAKAKEVLLKILRLSIPHP

SEQ ID NO: 5655 - DNA, 542 bp, Rattus norvegicus
  ref <308>: DATABASE ACCESSION NUMBER: EMBL / AA891950
  ref <309>: DATABASE ENTRY DATE: 2000-03-03
ccaaacggttccaaatactcaactgagaactttatttatacgttattaaaaaggaccggcttcttctgttggacaacagagcccaaaactcctttcccccaagtccactactcacagcttgactgaacatttacccaaggcggatcactgtcactgctattcattcaaaacagacagaaatcctgagtgtgggttctgagaagacagttgtgcctgtcttgatggtgacaatttacatccatggactctgctttgctactgagtttctgaaggccaaggctcaggaggactgccttagcaacaaatggttattcctctagtctgaagacatgaaggtggccgaggctccggagagtgcctttgtgcttatcatccatgatgccaacatgtcccgtgcttccgttaccacgctcagcaggacctcagtggcttggcatagattggctccagcacatgatgagtaagaagcaggaagaggcctccaagaaagacagcactgagaaaagccagcaggacatagcggccgatgaaaaaggcatcca

SEQ ID NO: 5656 - DNA, 746 bp, Homo sapiens
  misc_feature (1)..(746): n=a, c, g or t
  ref <308>: DATABASE ACCESSION NUMBER: EMBL / BI870835
  ref <309>: DATABASE ENTRY DATE: 2001-10-15
gtggaagttaagattgtggatgactttttcattggccgctatgtcctgctggctttccttagtgccatcttccttggaggcctcttcttggttttaatccattatgttctggagccgatctatgccaaaccactgcactcctactgaccactcttcaggaatacgaaaacctgttctctccttcattgtgatgacattgatgagcaggaaggcactattcagagccttgttttgacagccctcatgccttaaggttagaggagtatctgtccatcactaagacaaatctctggagtcctggcttccagaaacaggattgccaaattgtccctgtggggctagattcttaccagcttaagaaggatattgctatcttcttagtacccgtaccttaggatttccaactgttttgaaagggaaatagtaacagtgatctgcttagagtggattttcactcaagtccttagtaagtggattttggggaaaaaagcacctgggcttctggttctttttgataatatataaaattattcattatgaggttgcagttgtttgcaaaggagaggcactcaaatttgaaaggttattttaatgtgataatttggaagacttactcagatgttggtcattgaccactctgtgcatatatttctgcagagctctgtgaaggcaatgagtgtcacttccctctgctcttattaaagcaattaaatnatagcttaaaaaaaaaaaaaaaaaagaagggg

SEQ ID NO: 5657 - DNA, 343 bp, Rattus norvegicus
  ref <308>: DATABASE ACCESSION NUMBER: EMBL / AA891969
  ref <309>: DATABASE ENTRY DATE: 2000-03-03
ccatcagcattaatgaatgagaatattttattttaaatggaacatgaagaattaaaatacagcctgaaggtttcaattttgtactgtgaacatcaagacagcaattacccctaagaaaaaaattcacagaaacatgttgaactaactgaacagaaaccagagtgggtatttaagtcattacatttctcatcattgtgaaaacagatgtcctctaacaactccagtctacagacagcacacttcatcataacactacatttaaaacactacaaacgtttacaaagaacatttggatttcacaattgcctatagaatatctttcaatattaaaacaccatgatgc

SEQ ID NO: 5658 - protein, 141 aa, Rattus norvegicus
  ref <308>: DATABASE ACCESSION NUMBER: SWISS-Prot / AAH05436
  ref <309>: DATABASE ENTRY DATE: 2001-06-01
MAGEEMNEDYPVEIHESLTALESSLGAVDDMLKTMMAVSRNELLQKLDPLEQAKVDLVSAYTLNSMFWVYLATQGVNPKEHPVKQELERIRVYMNRVKEITDKKKAAKLDRGAASRFVKNALWEPKAKSTPKVANKGKSKH

SEQ ID NO: 5659 - DNA, 872 bp, Homo sapiens
  ref <308>: DATABASE ACCESSION NUMBER: EMBL / BE886831
  ref <309>: DATABASE ENTRY DATE: 2000-10-23
gtatttttctaagtcagccataatggcaggtgaagaaattaatgaagactatccagtagaaattcacgagtatttgtcagcgtttgagaattccattggtgctgtggatgagatgctgaagaccatgatgtctgtttctagaaatgagttgttgcagaagttggatccacttgaacaagcaaaagtggatttggtttctgcatacacattaaattcaatgttttgggtttatttggcaacccaaggagttaatcctaaggaacatccagtaaaacaggaattggaaagaatcagagtatatatgaacagagtcaaggaaataacagacaagaaaaaggctggcaagctggacagaggtgcagcttcaagatttgtaaaaaatgccctctgggaaccaaaatcgaaaaatgcatcaaaagttgccaataaaggaaaaagtaaaagttaactttttggttttgatgtacacatattcaaaaagtacatcttcccccccccccgcaaaataattctgtggcaggccaaggtttaaatgtgtttcttattaatatgtaaattcccagtaaatatgtaagctaaataactttcctctccaaagatcattatctttattgattaggcactgaggattttaacccttggtgctgtctcctttctccttcatttagcatctcttggtgagactcttattgctctatatagggtccggcttgccaggtaccctttattaggcggtgggaaatttcagctgcaggtctttggacctttgggcgtctttcaaggatatggccttgaggattggctccgcgggggacgattgggggcccgttgccatttttttaaggggggaggtacgcacgttcggggaaaaa

SEQ ID NO: 5660 - protein, 141 aa, Homo sapiens
  ref <308>: DATABASE ACCESSION NUMBER: Refseq / NP_006324
  ref <309>: DATABASE ENTRY DATE: 2002-05-30
MAGEEINEDYPVEIHEYLSAFENSIGAVDEMLKTMMSVSRNELLQKLDPLEQAKVDLVSAYTLNSMFWVYLATQGVNPKEHPVKQELERIRVYMNRVKEITDKKKAGKLDRGAASRFVKNALWEPKSKNASKVANKGKSKS

SEQ ID NO: 5661 - DNA, 305 bp, Rattus norvegicus
  ref <308>: DATABASE ACCESSION NUMBER: EMBL / AA891978
  ref <309>: DATABASE ENTRY DATE: 2000-03-03
cagatcctctgaaatggagctatagaccgttgtgagctgctttgtaggtactagaaattgaacccaggtcctctggaagaacagccagccattgctcttaaccaccaagccatctctccaggcccaaattctggtttttgatcatggctgtattactgactccttccaagctaatctcttgtggcagacctgcagcacagcacatatcagccaggtaaggggtctgacttgggttttacagacaagcacaggttagatgagtcatcttacacattacatgtctgtcctgtgagaggttcaagtgt

SEQ ID NO: 5662 - DNA, 1250 bp, Homo sapiens
  ref <308>: DATABASE ACCESSION NUMBER: EMBL / AK000494
  ref <309>: DATABASE ENTRY DATE: 2000-02-22
gtttccggtgcaggtggggaaaatggcggtgtctacagtgttctcgacttcgtcgctgatgcttgctctgtcaaggcacagcctattgtctcctttgctcagtgtgacatcattcagacgcttctacagaggtgacagcccaacagattcccaaaaggacatgattgaaatccctttgcctccatggcaggagagaactgatgaatccatagaaaccaaaagagcccgcctgctctatgagagcagaaagaggggaatgttggaaaactgcattcttcttagtctttttgctaaagaacatctgcagcacatgacagaaaagcagctgaacctctatgaccgcctgattaacgagcctagtaatgactgggatatttactactgggccacagaagctaaaccagccccagaaatatttgaaaatgaagtcatggccctgctgagagactttgctaaaaacaaaaacaaagagcagagactgcgtgccccagatcttgagtacctctttgaaaagccacgttgagctgtgctccacggcctggcatgggggttcagtctgtggatggtaactacttatgatggacgttagccttgcttccggcttcttagatgcccagctgccctaccccagaccactggtcctgcctcaagtgatggacataaccctctcctaggacatacatgtaaatgcacaatgtgactcattctcatacttttttgttcagctctgagcctcaaaagtgatttgtcagcagcgctggcatgcaggctttgcctggctgctatctctagaggcaagtctgccacgagagggcactgcaggcgaagcagttgtgcttgctcattgcctcagcccaagtgtactcaaagaaaagaggcagccggctgtgcgtgctgtacggaaagcctcccgccctccctgcagctccccgccctcagtggcccagggctttgttgaagtggaactccccacttccaacctggtatggctccttctgcgaagggaagctaatcccagcctcctgagctgaatccttcaaaggcacagcaggcagaatgagggccacaggcaggagtggtgtgggcacactgcttaggagtcaacatcttcatcattgggctttctttaaaacgtgcactttgtaatttgaaagagaattattaaagcatactgaaaaaaggaaatttacaatttcccagccctcacaaaaaaaaaaaaaaaaaaaaaaaaaaaaaaaaaaaaaaaaaaa

SEQ ID NO: 5663 - protein, 167 aa, Homo sapiens
  misc_feature (1)..(167): Xaa=Unknown amino acid
MAVSTVFSTSSLMLALSRHSLLSPLLSVTSFRRFYRGDSPTDSQKDMIEIPLPPWQERTDESIETKRARLLYESRKRGMLENCILLSLFAKEHLQHMTEKQLNLYDRLINEPSNDWDIYYWATEAKPAPEIFENEVMALLRDFAKNKNKEQRLRAPDLEYLFEKPRX

SEQ ID NO: 5664 - DNA, 363 bp, Rattus norvegicus
  ref <308>: DATABASE ACCESSION NUMBER: EMBL / AA892012
  ref <309>: DATABASE ENTRY DATE: 2000-03-03
aagtacactgtcttcagacacaccagaagagggcatcagatctcagtacagatgattccgagccaccgtgtggttgctgggatttgaactcaggacctctggaagagcagtcagtgcttttaaccgctgagccatctctccagccctctactgaaattcttgaaggagttccactcaccagaaagctggctccgaccctcaaggctccagtcccggaaatggtctgcacagttacaaaccggccgcttttcaacacttcgctgttctcgcccagggccagttctgcagaagccttacaaaaatcagccagtcccccgatgggtaggtattctttgtccaaatttttcccagcaatctgggcct

SEQ ID NO: 5665 - protein, 430 aa, Rattus norvegicus
  ref <308>: DATABASE ACCESSION NUMBER: SWISS-Prot / P00507
  ref <309>: DATABASE ENTRY DATE: 1999-07-15
MALLHSGRVLSGMAAAFHPGLAAAASARASSWWTHVEMGPPDPILGVTEAFKRDTNSKKMNLGVGAYRDDNGKPYVLPSVRKAEAQIAGKNLDKEYLPIGGLADFCKASAELALGENSEVLKSGRFVTVQTISGTGALRVGASFLQRFFKFSRDVFLPKPSWGNHTPIFRDAGMQLQGYRYYDPKTCGFDFSGALEDISKIPEQSVLLLHACAHNPTGVDPRPEQWKEMAAVVKKKNLFAFFDMAYQGFASGDGDKDAWAVRHFIEQGINVCLCQSYAKNMGLYGERVGAFTVVCKDAEEAKRVESQLKILIRPLYSNPPLNGARIAATILTSPDLRKQWLQEVKGMADRIISMRTQLVSNLKKEGSSHNWQHITDQIGMFCFTGLKPEQVERLTKEFSVYMTKDGRISVAGVTSGNVGYLAHAIHQVTK

SEQ ID NO: 5666 - DNA, 2339 bp, Homo sapiens
  ref <308>: DATABASE ACCESSION NUMBER: EMBL / M22632
  ref <309>: DATABASE ENTRY DATE: 2000-03-04
ggtccaccatggccctgctgcactccggccgcgtcctccccgggatcgccgccgccttccacccgggcctcgccgccgcggcctctgccagagccagctcctggtggacccatgtggaaatgggacctccagatcccattctgggagtcactgaagcctttaagagggacaccaatagcaaaaagatgaatctgggagttggtgcctaccgggatgataatggaaagccttacgttctgcctagcgtccgcaaggcagaggcccagattgccgcaaaaaatttggacaaggaatacctgcccattgggggactggctgaattttgcaaggcatctgcagaactagccctgggtgagaacagcgaagtcttgaagagtggccggtttgtcactgtgcagaccatttctggaactggagccttaaggatcggagccagttttctgcaaagattttttaagttcagccgagatgtctttctgcccaaaccaacctggggaaaccacacacccatcttcagggatgctggcatgcagctacaaggttatcggtattatgaccccaagacttgcggttttgacttcacaggcgctgtggaggatatttcaaaaataccagagcagagtgttcttcttctgcatgcctgcgcccacaatcccacgggagtggacccgcgtccggaacagtggaaggaaatagcaacagtggtgaagaaaaggaatctctttgcgttctttgacatggcctaccaaggctttgccagtggtgatggtgataaggatgcctgggctgtgcgccacttcatcgaacagggcattaatgtttgcctctgccaatcatatgccaagaacatgggcttatatggtgagcgtgtaggagccttcactatggtctgcaaagatgcggatgaagccaaaagggtagagtcacagttgaagatcttgatccgtcccatgtattccaaccctcccctcaatggggcccggattgctgctgccattctgaacaccccagatttgcgaaaacaatggctgcaagaagtgaaaggcatggctgaccgcatcattggcatgcggactcaactggtctccaacctcaagaaggagggttccacccacaattggcaacacatcaccgaccaaattggcatgttctgtttcacagggctaaagcctgaacaggtggagcggctgatcaaggagttctccatctacatgacaaaagatggccgcatctctgtggcaggggtcacctccagcaacgtgggctaccttgcccatgccattcaccaggtcaccaagtaatgtccctgggtcgaggaaacagagacaacctttctgtcttcagcctctgctattgagagcttcacacagacaatgagagagggtggatggtggtgagtggatcatttctttcagccacagtgtgtaacactcagcatttgaatgtttctcagaaaagaacatgtagtgacacagggcagaggcatccatggctggcgtctggaatattaaaccaaactctccccggtccttttttctccaacttttctcaaagagtttacatgtgcaagaaagtcatcgcaccaaaaaacctgtcaattatgccattgcaatatttcagaagctttaactgaagtgtcaggttcctcgtgagaaacaagcacaccttagaggctttgagagaaggccagctagttctgtcatgagtagtcggcctcgtgtctgtcctcccatcttggaacaaccttatcaacaggccgcactgcagaaatgatgttttatgaaaaccatgagctgctgccactccagcaagggaaataatgcagtttcctgtcttatttaagaaaaagagaaggctctcttttctcccttgtcattgccgttcttttccttacacgcaaaacatttttaactattgcagtttcatcccattctactgcttgattgaccatcaactccatcctatcgagattatttaagaatgaagaacataatttttctgctgatgccgtaccctcacccttttcagcaaagaatagtggagagtaggaaactgtactttatctcggcatcctcttgaatgatagtgcaagtttctccagttgggatgttgtctctgcccggttggacctcctccctttgttgaatgtggtgtgcagcctctcatctcacactgtgagtccagcggcgcagggtggtaccaggaaagaggatattctaggcttgcgtgctgctagctgggttcaggcttcacccactggaaagaaccaccatctgctctaaccatgtagacttattgcggcctggttttctctgttacaataaaattactgtagaccc

SEQ ID NO: 5667 - protein, 430 aa, Homo sapiens
  ref <308>: DATABASE ACCESSION NUMBER: SWISS-Prot / P00505
  ref <309>: DATABASE ENTRY DATE: 2002-06-15
MALLHSGRVLPGIAAAFHPGLAAAASARASSWWTHVEMGPPDPILGVTEAFKRDTNSKKMNLGVGAYRDDNGKPYVLPSVRKAEAQIAAKNLDKEYLPIGGLAEFCKASAELALGENSEVLKSGRFVTVQTISGTGALRIGASFLQRFFKFSRDVFLPKPTWGNHTPIFRDAGMQLQGYRYYDPKTCGFDFTGAVEDISKIPEQSVLLLHACAHNPTGVDPRPEQWKEIATVVKKRNLFAFFDMAYQGFASGDGDKDAWAVRHFIEQGINVCLCQSYAKNMGLYGERVGAFTMVCKDADEAKRVESQLKILIRPMYSNPPLNGARIAAAILNTPDLRKQWLQEVKGMADRIIGMRTQLVSNLKKEGSTHNWQHITDQIGMFCFTGLKPEQVERLIKEFSIYMTKDGRISVAGVTSSNVGYLAHAIHQVTK

SEQ ID NO: 5668 - DNA, 363 bp, Rattus norvegicus; identical to SEQ ID NO: 5664
  ref <308>: DATABASE ACCESSION NUMBER: EMBL / AA892012
  ref <309>: DATABASE ENTRY DATE: 2000-03-03

SEQ ID NO: 5669 - protein, 430 aa, Rattus norvegicus; identical to SEQ ID NO: 5665
  ref <308>: DATABASE ACCESSION NUMBER: SWISS-Prot / P00507
  ref <309>: DATABASE ENTRY DATE: 1999-07-15

SEQ ID NO: 5670 - DNA, 2339 bp, Homo sapiens; identical to SEQ ID NO: 5666
  ref <308>: DATABASE ACCESSION NUMBER: EMBL / M22632
  ref <309>: DATABASE ENTRY DATE: 2000-03-04

SEQ ID NO: 5671 - protein, 430 aa, Homo sapiens; identical to SEQ ID NO: 5667
  ref <308>: DATABASE ACCESSION NUMBER: SWISS-Prot / P00505
  ref <309>: DATABASE ENTRY DATE: 2002-06-15

SEQ ID NO: 5672 - DNA, 531 bp, Rattus norvegicus
  ref <308>: DATABASE ACCESSION NUMBER: EMBL / AA892049
  ref <309>: DATABASE ENTRY DATE: 2000-03-03
gaagtagcgatctctaggtaacacaggatcagcggcgcagacagagcttctgattattcccaaaatgtattgcaaccacagcaaacaaacaacaataacaaagcccaaaccacacaagagcaaatttaatctgcttgcacttttatgttcctttttattgtgggtatgtatgtgtctcaggctccagtggcagtgtctgcctagcatgaagttctgagcttgacattcagaactacataagccaggaatggtgggtggcacacagtggtaatcctggcattctgatgaggcaggagggtcaagattttaaggttgtggcctgtagtagttaagaacttgttctttcacatgacccaagttaaatccccagcacctttggagaggaaggaggatctcacaactgcctgcaactctagttccaggagatccagcggctctagcaaccaagggatcttgcaccaccaccattagcctccttcacaaaacatgtagtggccctgaaaaggacctttaaggatgatccggatgttt

SEQ ID NO: 5673 - DNA, 404 bp, Rattus norvegicus
  ref <308>: DATABASE ACCESSION NUMBER: EMBL / AA892094
  ref <309>: DATABASE ENTRY DATE: 2000-03-03
actgtaagaatataaacgttttaagaggatctttgttatcatttatacaaattcacaaacagtacaattaattgataaaggtctctgggtttctccatggtctctcatgttgctgtggaggactctaaaaaaataaacaaacaaaatatccaacaaaaatatacatcctactcaaaagccatttgttttaaagccacagtcccaaccccccaccaaaataaagtcatctattcctccatttagaaacaaaagtttttcaaactcacacgttcctcccatttcatgaacagaacacagataagacatgaagttcagtctcctccctttcacatagcctcgggctctctgcagactctgagctcctagacagggctggaagcctcactgtaaccttctggtgggaa

SEQ ID NO: 5674 - DNA, 404 bp, Rattus norvegicus; identical to SEQ ID NO: 5673
  ref <308>: DATABASE ACCESSION NUMBER: EMBL / AA892094
  ref <309>: DATABASE ENTRY DATE: 2000-03-03

SEQ ID NO: 5675 - DNA, 476 bp, Rattus norvegicus
  ref <308>: DATABASE ACCESSION NUMBER: EMBL / AA892120
  ref <309>: DATABASE ENTRY DATE: 2000-03-03
ccaagttcagcagtcgtttattgtgctccaagagcttccaatcccggttcttgcagcctcccttccaaaggcaagcccgagacagagccaggttcacttggcctgggtcctgtaattcttggcaggtctatagtccttatgggagaaccagttggggtgaagttcaggcagcaggtctgggcatacatctgcccatagtccaagtttgcagtgctctcttcacaagatgaagcgtctacagacagctctaaggcactagagatctacaagagttctggggtcgagttactaaccatcggaaccatgatggggtcctgggtgacccctcaggcccctgctcagaaatgcagtgagctcttgcacctgggctagaaacagcaagtagtgcttgagtgtatgctgcagcgttagcaagccaggaactgtagccactgcaaagagtgacaaggaggttctggggacaatttttttttgag

SEQ ID NO: 5676 - DNA, 528 bp, Rattus norvegicus
  ref <308>: DATABASE ACCESSION NUMBER: EMBL / AA892127
  ref <309>: DATABASE ENTRY DATE: 1999-01-28
aatgtaaacaaggaatttattcaactgattaccagacaacgaaatgctaaggagtacaacaggcatttataacttaaataatttatcaccgacttcagtgaagtcaaattcttcaactgtatcagagttcaatatcggaaacaaaaaggataattacaaaatatctgggtcaaggaatcttctccgctgtaaacacttgagaagcttgtttcctggcagctctctcctctggggacaggataccctccactgctactatctggtactgcttatgcttcagatttcccacacatttccggagctgcctgagactaccagcctccatgtcttgctttaacagcttctgcatttctcgagaaggacatccaggatcaaatattagcaaacataatgttcgtttttttctctcttcaatcccaacaactgttcgactgtgaccctgatgctggagatagacaggaggtttggatgtacacacgacctttggcgccccttccgtctctgaggaaatatagttcagtatccact

SEQ ID NO: 5677 - DNA, 442 bp, Rattus norvegicus
  ref <308>: DATABASE ACCESSION NUMBER: EMBL / AA892137
  ref <309>: DATABASE ENTRY DATE: 1999-01-28
aatgcacgaacttaaaaccttaaaaagacatccttttttttctttactttataagtcatcacaatagatcagggaccacagtagctttataaatcatgaagatgcatgtgcagtcacaatcccagcttttgtaacacgttttaagaggatagtacacctggtaacacgtctacatttacacacacatttactttgactaccctctggggttgatgaaagctcaatcatagacctcaaattttgcttttgataactagatgtgtataaaccataaagaagaatttacaaagtttttttcaatagccttttagttcaaatcaaagatatcttgtggatgtattttttttcctcattctttaactagattcttgtattggcagtcataatttactctttcaaatcatcttcaaaagcttaacacgagaaagttcttctccaatgt

SEQ ID NO: 5678 - DNA, 1676 bp, Homo sapiens
  ref <308>: DATABASE ACCESSION NUMBER: EMBL / AL109701
  ref <309>: DATABASE ENTRY DATE: 1999-11-29
cctagaggttgagcggtttgcacaatgtcggaaatggctgagttgtccgagctgtatgaagagagcagtgacctgcagatggatgtgatgcctggcgagggtgaccttccgcagatggaggtaggcagcgggagccgggagctatccctgcgtccctcccgcagcggggcccaacagctcgaggaggaaggcccaatggaggaggaggaggcccagccaatggcggcgccagaggggaaacggagccttgctaacgggcccaacgctggggagcagccaggccaggtggcgggcgcagacttcgagagcgaggacgagggcgaggaatttgatgactgggaggacgactacgactatcccgaagaggagcagctcagtggtgccggctacagagtatcagccgctcttgaagaagccgacaagatgtttctgagaacaagagaaccagccctggatggcgggtttcagatgcattatgagaagaccccgtttgatcagttagcttttatcgaagagcttttttcactgatggttgtcaatcgtctgaccgaagaactcggctgtgatgagattattgatagagagtagttagatgctgttaaaagaggaggaaactacttgaggagggacccaactttccgctatcttttgggttcattccaaatagttttgtgccattgaaaaacttgaccttcaaaaaaatttgtttttcagaatagaacacaataggacagtgactgcacagttgtgaaaaaggaagagaatcattaaagaaaaagaaaaaagattttaagaccgttgaaatcaattatcaagaacgtcctaaaacacctatggctttgactttgttattgatccagattattttccttgcattggggaaaatatctttcatatttgtttgctgtaaagatggttttgcaagaataagtcatgaccaagacaaactgccaatacaaaagcccactgatactaattatataatgagaaaaaaatgtatccaactaggacacatatcttttgagttatttggactgaaagcttaagaaaacttggaaaattctattttgtgatctagtcaagccacagttatcaaaggctacattttcagtgtaagataaatggatgagtaaactcaaatatgtatcacgtgtgctttgtatcttaagatgtgtttccaagagcatctgaaattttgtttgtacatgtatcttgatcatttataaagccactgtgatctataaatcaagaaaatccattgtcataaccatttttaaaagtcaaaaattaagacatccttaattaaaaagtttcaaatctagacactaaatgtgtgtgaatgtacaaagaaaacaaaccattgcttatgctgttatatactagagaaattttgttttgcttgctgttttaacttgacagatgaaggactttagttgaacttcatattgtaagaactgttaataaaagttgtcaagtaaaaagcgctatatctaaaaagactttatgaacagttattctatcaacttttaaaggttttaaacctgcccagaaattaccttggtatctgaagtttccctctgtctcctcctctaattaagcttgttatttgtcatgcaccagcattggagataataaaatttcttgttctgtgtaaaaaaaaaaaaaaaaaaaaaaaa

SEQ ID NO: 5679 - protein, 188 aa, Homo sapiens
  misc_feature (1)..(188): Xaa=Unknown amino acid
MSEMAELSELYEESSDLQMDVMPGEGDLPQMEVGSGSRELSLRPSRSGAQQLEEEGPMEEEEAQPMAAPEGKRSLANGPNAGEQPGQVAGADFESEDEGEEFDDWEDDYDYPEEEQLSGAGYRVSAALEEADKMFLRTREPALDGGFQMHYEKTPFDQLAFIEELFSLMVVNRLTEELGCDEIIDREX

SEQ ID NO: 5680 - DNA, 486 bp, Rattus norvegicus
  ref <308>: DATABASE ACCESSION NUMBER: EMBL / AA892149
  ref <309>: DATABASE ENTRY DATE: 1999-01-28
gaagacatttccagtaagtgtttgaagccttggcttagtacccatccgtcctagtcaccagagttctcgagcacaatcccattgcctgcaatggtatttatcaaaactaaaaatgctagaacactgcctgtgccaacactgcacccagtcgtccatatcaaatactccatcagctggaagaccaaaggcaaatgctgcacacagagtccaaacaacattcttcacagaagaaaacagtgagacaaatttctacaacatgtcacctgccaattcctcaatattattactgcaattatctctaggatagtaaaattaggctccacaacctgtggttgctcgactttttaaaaaaaaacctaagttctaaaaggtataaacaggtatacacagagacttgtttataaacttttgatatttgatatctgtatgtcatgatgacgacatggagacaggacacatggcacgaagtccatagtgggtatgcgc

SEQ ID NO: 5681 - DNA, 386 bp, Rattus norvegicus
  ref <308>: DATABASE ACCESSION NUMBER: EMBL / AA892154
  ref <309>: DATABASE ENTRY DATE: 1999-01-28
gaggtataaaaatctgtatttatattacaatgacataatgacacagcacagccccatctgttagacaggtgggatggggtcccattccagtctgcagctcaggtctcataactcacccactgcactggcaccaggccccttgtgtagccccagactctggcacggaacctgccctagaacagcaagctcaaccacctgcaggttagaaatacagaggcagacctagggcccatatggagacaaaacctccgtgtcctctcctgctagacaagctgggtctgcagcaggatggtgggtctggtacatctggaccacctcctacgaaagaggcccaagcctgagcctggagttgcagactctgttatggagcacacgtggctcacatg

SEQ ID NO: 5682 - protein, 228 aa, Rattus norvegicus
  ref <308>: DATABASE ACCESSION NUMBER: Refseq / NP_037292
  ref <309>: DATABASE ENTRY DATE: 2002-11-14
MERVKMINVQPMLEAAEFLERRERECEHGYASSFPSMPSPRLQHSKPPRRLSRAQKHSSGSSNTSTANRSTHNELEKNRRAHLRLCLERLKVLIPLGPDCTRHTTLGLLNKAKAHIKKLEEAERKSQHQLENLEREQRFLKRRLEQLQGPQEMERIRMDSIGSTISSDRSDSEREEIEVDVESTEFSHGEVDNISTTSISDIDDHSSLQSIGSDEGYSSASVKLSFTS

SEQ ID NO: 5683 - DNA, 3773 bp, Homo sapiens
  ref <308>: DATABASE ACCESSION NUMBER: Refseq / NM_006454
  ref <309>: DATABASE ENTRY DATE: 2002-11-14
ccgtcccggggcggacgggcgcgggcgggaggatggagctgaactccctgctgatcctgctggaggcggccgagtacctggagcgcagggatcgagaggccgagcacggctacgcctcggtgctgcccttcgacggcgacttcgccagggagaaaacaaaggcggccggcctggtgcgcaaggccccgaacaacaggtcttcacacaacgagctagaaaagcacagacgagccaaactcaggctgtaccttgagcagctcaagcaactggtgcccctgggccccgacagcacccgccacaccacgctgagcctcctgaagcgggccaaggtgcacatcaagaaactggaggagcaggaccgccgggcactgagcatcaaggagcagctgcagcaggagcatcgtttcctgaagcggcgcctggagcagctgtcggtgcagagcgtggagcgcgtgcgcacagatagcacgggctctgctgtctccacggacgactcagagcaagaagtggacatagagggcatggagtttggccctggtgagctggacagtgttggcagcagcagtgacgcggacgaccactacagcctgcagagtggcaccggcggcgacagtggcttcgggccccactgccggcggctgggccgccccgccctctcgtaggcccgtgccctctgctccttggcctgcctgcccgccagccacgcgtgtcagccctccagttctccttcagttgacgccagcctctccacaggcccactgctgtgccattctggaagctccagctgctgctgggctgcctggcactgcccgcttgccggtcagggcctgccgagctgcctgccccttccagctgggcagagtcccctgcaaggaggcagggcccagcttccacatccggagccctggtcagcatagccgcccacggtctgttctcagattcctaatcattccagaagtattaaacgtcattgctgcaaacctcggcaggtgccgtgtgaggggcttaatgaccaccacagggagctcagaccccaaccctggatcccaggagaaaggagtggaccgaggaaggaaggaaggcaaggctgtctgtccatccgtccgtctgtccacctacctgtcagtccacataggctcctggcgtggacaaggggtctgtgaagggcgggaactgggtgagcacctggggcaggtgggtggttaaggtccttcccacttcgcaggtgtcagaacctagggctgggctctcggggccaggcaggccagcccagcccacgccgagctgggcagcgtctgctctggtaggactgtcagacgcacacgcgcacgcacctagacacacccactcatgtacatgctcacacatgcagacacacctgggcgtcccgaggtcacatgttctggggatgatggccttcaggggtcatctggcaaacagcccctgggctgtgcctggatccccctctagctcctgctcacccacgcccacccagtagtcctgcctgtctgcacaggagaggggcttctcttcctggctggggctggggtgaactggaggctggttaagttgcagccgctgggtcctcgggggcttactcatctcccttttttaaacaaaaagcaaaaaagtaaaatgctgcactgcccagcagcccggttagggctcctggagccaccttaggaaagggcttctcatgagctctgctgcggcagcttcagctggcagagaggctttcccagaaaaaaaaaaaaaaccatttttaaaaagaagaaagcctaaagactctcggcctagggacgtccgtgtgtgccgcctctgtttcctgtaccagatttttgtattctattttcctagctgttgttgcgtccttgtttgctgaggggtgggagccacccagcgtctcagggacctgtccctccgtcacgtcgtcaaagtgtgccttgtgtcttgtgtcaggccttgcccttcccaccagcatgtccctcgtggctcagggtgccccaggcctgcccagctagtgctgtcctcccatctcctgtgggcagcccctcccggcagccagggcttcctggaggcgatgcagccaggcccctgtgggtggcacggaggggctgtgacctggtccccagtgttgccctccccagtggctggcaggggcctgcttgctcactagagagatggattctcacctgtcacctgactcgagccccctgcttcctggcctaggcgagggttccaggtttcagacactggcagccaatgaagactgtgctcgctgggtggtgcaggcctggcaccaggaggcttgcacccgcctttccttcctgacgtcctctgtccttggggctggcccatagcagtgcctgccgtgcctctggtacatctgtagccaattcccatatcatggggaaaattcgtgtctattttcagtcgtacgcatagacgccccaggatggggggcccactgtggcggaagggggtccctggaaacaactctggcacagaacctgccctgcaggctgtagggggcatggtgcctggagctgaggggcatccgaacgcgttgcgggtggttgtgaggaggcctgtctgcatctccttccggccccactggggtccaggggtgcccagaaaggagcttcccctgcctgcctgagtctgtccccccaggcttcatttcaaacaccgtggcacctccgagcaaggcgggccgtgtgtaaaagcttgcttccccagccagcactgcagggccctgaggtggtcgtgtccctgccctcaattcttgaagcaccagctccctgccccaccctccagtgcctgaggcagctaggggcttctgctctcatctctgaccagcagaatccacccggtgaccagtggtggcccctcagcccaccctcccggcagctcagcctgtggctcttgaggccgtggttcccacgtggactgggaggcagtctcagccacccggggtgctgttcagctgcccctccctgccatcagcaggtgggtgaggggttgcccactgggtgggggcccgtgctaggagtcaccacatgctccaacctcccactgctccctgtcaggggcccaggctgccatcactggaggctgcagggaccaagaggccatcaccgtgtctatagagagcagacagaagcagaacagagcccggggctcctgagcctctgcgtgtgccctcccagcccacaccagtgctctcggccactgagcacccagactcaggcttgggttccccagccttattggaaggcagctcccgcataccaggataacccccgcaaaccacatagcagacccccgccatcctcgcagagtgggagaggctgcagcaaggctttgcctctgcagaccccatcttagtggcacggtgcttgggcctgtgtccccgggtggtggaaccctgtaccggtctgtggccctagggtccctgctctgtctgccccggcccgtgctgtccgctgggtgaggcaggctcccccgtgccctgcctccctctgtcagggaacctgggaccccctccccactgcctgcacagaggaccctgaccctcggccagcagggtggccccaggtccatgttgggcactagggcaggttccgtgccagagtcgggggccacacgagggcctggtgccggtgaggggggcgtgcgctagagggggaaaggggcccccggccacctgtccaccgtgtgggccgtgctgtgtccttatgtcattgtaatataaatacagatttttatatctc

SEQ ID NO: 5684 - protein, 209 aa, Homo sapiens
  ref <308>: DATABASE ACCESSION NUMBER: SWISS-Prot / Q14582
  ref <309>: DATABASE ENTRY DATE: 2002-06-15
MELNSLLILLEAAEYLERRDREAEHGYASVLPFDGDFAREKTKAAGLVRKAPNNRSSHNELEKHRRAKLRLYLEQLKQLVPLGPDSTRHTTLSLLKRAKVHIKKLEEQDRRALSIKEQLQQEHRFLKRRLEQLSVQSVERVRTDSTGSAVSTDDSEQEVDIEGMEFGPGELDSVGSSSDADDHYSLQSGTGGDSGFGPHCRRLGRPALS

SEQ ID NO: 5685 - DNA, 386 bp, Rattus norvegicus; identical to SEQ ID NO: 5681
  ref <308>: DATABASE ACCESSION NUMBER: EMBL / AA892154
  ref <309>: DATABASE ENTRY DATE: 1999-01-28

SEQ ID NO: 5686 - protein, 228 aa, Rattus norvegicus; identical to SEQ ID NO: 5682
  ref <308>: DATABASE ACCESSION NUMBER: Refseq / NP_037292
  ref <309>: DATABASE ENTRY DATE: 2002-11-14

SEQ ID NO: 5687 - DNA, 3773 bp, Homo sapiens; identical to SEQ ID NO: 5683
  ref <308>: DATABASE ACCESSION NUMBER: Refseq / NM_006454
  ref <309>: DATABASE ENTRY DATE: 2002-11-14

SEQ ID NO: 5688 - protein, 209 aa, Homo sapiens; identical to SEQ ID NO: 5684
  ref <308>: DATABASE ACCESSION NUMBER: SWISS-Prot / Q14582
  ref <309>: DATABASE ENTRY DATE: 2002-06-15

SEQ ID NO: 5689 - DNA, 461 bp, Rattus norvegicus
  ref <308>: DATABASE ACCESSION NUMBER: EMBL / AA892179
  ref <309>: DATABASE ENTRY DATE: 2000-03-03
acaaagaataatcactttattaattgagcacgattcagactggtctaaggacacaaagcatccggccaactcataagagtagctgaagtgatgagagtttttgtggccataggtccgggcagccatcacctgcaacatccactcccagaagcactggaggccgggcgaggacacctcagactcaggaggccgggaactctgtagaacaggtgttccaggcctgagtgccaccaaccagcttggctggacgaatgctgtgagaacaggctggcatcacaaaggtaccacctgaagggtgggcagagggcctcggggaggagctacgtactcctcctctcggagcagccgcagaagaatgtttttcttattcttgggccagctgtacacgtgagtgttctgcagccaggtcggcacgtgctccttcttggcatttgggaagagcacagggatgaacctgaaat

SEQ ID NO: 5690 - DNA, 2381 bp, Homo sapiens
  ref <308>: DATABASE ACCESSION NUMBER: EMBL / AL050289
  ref <309>: DATABASE ENTRY DATE: 2000-02-18
ttttgagcagaggcttcctaggctccgtagaaatttgcatacagcttccacttcctgcttcagagcctgttcttctacttacctgggcccggagaaggtggagggagacgagaagccgccgagagccgactaccctccgggcccagtctgtctgtccgtggtggatctaagaaactagaatgaaccgaagcattcctgtggaggttgatgaatcagaaccatacccaagtcagttgctgaaaccaatcccagaatattccccggaagaggaatcagaaccacctgctccaaatataaggaacatggcacccaacagcttgtctgcacccacaatgcttcacaattcctccggagacttttctcaagctcactcaaccctgaaacttgcaaatcaccagcggcctgtatcccggcaggtcacctgcctgcgcactcaagttctggaggacagtgaagacagtttctgcaggagacacccaggcctgggcaaagctttcccttctgggtgctctgcagtcagcgagcctgcgtctgagtctgtggttggagccctccctgcagagcatcagttttcatttatggaaaaacgtaatcaatggctggtatctcagctttcagcggcttctcctgacactggccatgactcagacaaatcagaccaaagtttacctaatgcctcagcagactccttgggcggtagccaggagatggtgcaacggccccagcctcacaggaaccgagcaggcctggatctgccaaccatagacacgggatatgattcccagccccaggatgtcctgggcatcaggcagctggaaaggcccctgcccctcacctccgtgtgttacccccaggacctccccagacctctcaggtccagggagttccctcagtttgaacctcagaggtatccagcatgtgcacagatgctgcctcccaatctttccccacatgctccatggaactatcattaccattgtcctggaagtcccgatcaccaggtgccatatggccatgactaccctcgagcagcctaccagcaagtgatccagccggctctgcctgggcagcccctgcctggagccagtgtgagaggcctgcaccctgtgcagaaggttatcctgaattatcccagcccctgggaccaagaagagaggcccgcacagagagactgctcctttccggggcttccaaggcaccaggaccagccacatcaccagccacctaatagagctggtgctcctggggagtccttggagtgccctgcagagctgagaccacaggttccccagcctccgtccccagctgctgtgcctagaccccctagcaaccctccagccagaggaactctaaaaacaagcaatttgccagaagaattgcggaaagtctttatcacttattcgatggacacagctatggaggtggtgaaattcgtgaactttttgttggtaaatggcttccaaactgcaattgacatatttgaggatagaatccgaggcattgatatcattaaatggatggagcgctaccttagggataagaccgtgatgataatcgtagcaatcagccccaaatacaaacaggacgtggaaggcgctgagtcgcagctggacgaggatgagcatggcttacatactaagtacattcatcgaatgatgcagattgagttcataaaacaaggaagcatgaatttcagattcatccctgtgctcttcccaaatgctaagaaggagcatgtgcccacctggcttcagaacactcatgtctacagctggcccaagaataaaaaaaacatcctgctgcggctgctgagagaggaagagtatgtggctcctccacgggggcctctgcccacccttcaggtggttcccttgtgacaccgttcatccccagatcactgaggccaggccatgtttggggccttgttctgacagcattctggctgaggctggtcggtagcactcctggctggtttttttctgttcctccccgagaggccctctggcccccaggaaacctgttgtgcagagctcttccccggagacctccacacaccctggctttgaagtggagtctgtgactgctctgcattctctgcttttaaaaaaaccattgcaggtgccagtgtcccatatgttcctcctgacagtttgatgtgtccattctgggcctctcagtgcttagcaagtagataatgtaagggatgtggcagcaaatggaaatgactacaaacactctcctatcaatcacttcaggctacttttatgagttagccagatgcttgtgtatcctcagaccaaactgattcatgtacaaataataaaatgtttactcttttgtaaaaaaaaaaaaaaaaaaaaaaagaaaaaaaaaaaaaaaaa

SEQ ID NO: 5691 - protein, 574 aa, Homo sapiens
  ref <308>: DATABASE ACCESSION NUMBER: SWISS-Prot / O43734
  ref <309>: DATABASE ENTRY DATE: 2002-06-15
MPPQLQETRMNRSIPVEVDESEPYPSQLLKPIPEYSPEEESEPPAPNIRNMAPNSLSAPTMLHNSSGDFSQAHSTLKLANHQRPVSRQVTCLRTQVLEDSEDSFCRRHPGLGKAFPSGCSAVSEPASESVVGALPAEHQFSFMEKRNQWLVSQLSAASPDTGHDSDKSDQSLPNASADSLGGSQEMVQRPQPHRNRAGLDLPTIDTGYDSQPQDVLGIRQLERPLPLTSVCYPQDLPRPLRSREFPQFEPQRYPACAQMLPPNLSPHAPWNYHYHCPGSPDHQVPYGHDYPRAAYQQVIQPALPGQPLPGASVRGLHPVQKVILNYPSPWDQEERPAQRDCSFPGLPRHQDQPHHQPPNRAGAPGESLECPAELRPQVPQPPSPAAVPRPPSNPPARGTLKTSNLPEELRKVFITYSMDTAMEVVKFVNFLLVNGFQTAIDIFEDRIRGIDIIKWMERYLRDKTVMIIVAISPKYKQDVEGAESQLDEDEHGLHTKYIHRMMQIEFIKQGSMNFRFIPVLFPNAKKEHVPTWLQNTHVYSWPKNKKNILLRLLREEEYVAPPRGPLPTLQVVPL

SEQ ID NO: 5692 - DNA, 587 bp, Rattus norvegicus
  ref <308>: DATABASE ACCESSION NUMBER: EMBL / AA892248
  ref <309>: DATABASE ENTRY DATE: 1999-01-28
agggtttgctgaaaatggcggtatataggctgaattatcgagaaggggtaaggtagaacggggtttatcgattatagaacaggctcctctaaatggatataaagtaccgccaagtcctttgagttttaagctgtagctagtagttctctggcaaataattttgtaggtttaattattaaggtttagggctaagcatagtggggtatctaatcccagtttgggtcttagctatcgtgcattatataaatgattagaattactttcgttattgggcttaagtcctaacaatgaattttcacatataacttggattttaattctattatgacatttatagttggcacgttttacgccgaaaataattagtttgggttaatcgtatgaccgcggtggctggcacgaaatttaccaaccctgacaggtatagcttagtcaaactttcgttcagtgcctaatatttatcactgctgagtcccgtgggggtgtggctaagcaaggcgtcttgagctatattatgtgcttgatgccctctccttaagttttacgcaaatgtttaagggattttacaccggtttatggatgtttgc

SEQ ID NO: 5693 - DNA, 587 bp, Rattus norvegicus; identical to SEQ ID NO: 5692
  ref <308>: DATABASE ACCESSION NUMBER: EMBL / AA892248
  ref <309>: DATABASE ENTRY DATE: 1999-01-28

SEQ ID NO: 5694 - DNA, 625 bp, Rattus norvegicus
  ref <308>: DATABASE ACCESSION NUMBER: EMBL / AA892259
  ref <309>: DATABASE ENTRY DATE: 1999-01-28
gaaaaagcaacttgttttaataaaagatgagaacaatactttttaagtgaatacaaaaataaatatttggattacagagttgggcacacttgtactctgtgaggcaggtggggggcgtggcgtgtgacaaggggccagtgaacaggtcgtcctggctttggaagagatgttcctgctttggctgagtggggagaagcagaccccaggattctgttttcatgagtcacatactatggtgaccctgactgtggaacaggacccacacccagcaccattcaccatgaatgtcaccaacgtccttaacttttcaggttgtaaggtgtggcctatcactcgtagctgcaccggactgtcttccacaccctcctgcttctccccacttctcagaacaacagtcaacaggttaaggcgttccctgcccttccccagggaatgctgagcacattagaggctcctctaactgcactgagcctgtaacccaggttggttacagagtagaacaaatagaaaaggtctctcctgtcctcacacaaaaggagataatgatgttccctgtccccacatctgcttggcctctgtacctgctgtgtactgatgcaaactaaacccttgacagggactccta

SEQ ID NO: 5695 - protein, 328 aa, Rattus norvegicus; identical to SEQ ID NO: 3665
  ref <308>: DATABASE ACCESSION NUMBER: Refseq / NP_036723
  ref <309>: DATABASE ENTRY DATE: 2002-11-05

SEQ ID NO: 5696 - DNA, 1538 bp, Homo sapiens
  ref <308>: DATABASE ACCESSION NUMBER: EMBL / M91196
  ref <309>: DATABASE ENTRY DATE: 1999-07-05
atggatgggggaaccgggcggcgagacggcggcaggacggcggcaggatgtgtgaccggaatggtggtcggcggcttcgacagtggctgatcgagcagattgacagtagcatgtatccaggactgatttgggagaatgaggagaagagcatgttccggatcccttggaaacacgctggcaagcaagattataatcaggaagtggatgcctccatttttaaggcctgggcagtttttaaagggaagtttaaagaaggggacaaagctgaaccagccacttggaagacgaggttacgctgtgctttgaataagagcccagattttgaggaagtgacggaccggtcccaactggacatttccgagccatacaaagtttaccgaattgttcctgaggaagagcaaaaatgcaaactaggcgtggcaactgctggctgcgtgaatgaagttacagagatggagtgcggtcgctctgaaatcgacgagctgatcaaggagccttctgtggacgattacatggggatgatcaaaaggagcccttccccgccggaggcctgtcggagtcagctccttccagactggtgggcgcagcagcccagcacaggcgtgccgctggtgacggggtacaccacctacgacgcgcaccattcagcattctcccagatggtgatcagcttctactatgggggcaagctggtgggccaggccaccaccacctgccccgagggctgccgcctgtccctgagccagcctgggctgcccggcaccaagctgtatgggcccgagggcctggagctggtgcgcttcccgccggccgacgccatccccagcgagcgacagaggcaggtgacgcggaagctgttcgggcacctggagcgcggggtgctgctgcacagcagccggcagggcgtgttcgtcaagcggctgtgccagggccgcgtgttctgcagcggcaacgccgtggtgtgcaaaggcaggcccaacaagctggagcgtgatgaggtggtccaggtcttcgacaccagccagttcttccgagagctgcagcagttctataacagccagggccggcttcctgacggcagggtggtgctgtgctttggggaagagtttccggatatggcccccttgcgctccaaactcattctcgtgcagattgagcagctgtatgtccggcaactggcagaagaggctgggaagagctgtggagccggctctgtgatgcaggcccccgaggagccgccgccagaccaggtcttccggatgtttccagatatttgtgcctcacaccagagatcatttttcagagaaaaccaacagatcaccgtctaagtgcgtcgcttgggcgccccaccccgtctgcgtcctgcatccatctccctgttacagtggcccgcatcatgattaaagaatgtggatccctctgtctggggtgggatgccttactttgcacttaatttaataagggcattctcggaggagtagacgtttaatacgaagtggcgcatagccctgccgagatgtcggtgatggcctgatgcg

SEQ ID NO: 5697 - protein, 426 aa, Homo sapiens
  ref <308>: DATABASE ACCESSION NUMBER: SWISS-Prot / Q02556
  ref <309>: DATABASE ENTRY DATE: 2002-06-15
MCDRNGGRRLRQWLIEQIDSSMYPGLIWENEEKSMFRIPWKHAGKQDYNQEVDASIFKAWAVFKGKFKEGDKAEPATWKTRLRCALNKSPDFEEVTDRSQLDISEPYKVYRIVPEEEQKCKLGVATAGCVNEVTEMECGRSEIDELIKEPSVDDYMGMIKRSPSPPEACRSQLLPDWWAQQPSTGVPLVTGYTTYDAHHSAFSQMVISFYYGGKLVGQATTTCPEGCRLSLSQPGLPGTKLYGPEGLELVRFPPADAIPSERQRQVTRKLFGHLERGVLLHSSRQGVFVKRLCQGRVFCSGNAVVCKGRPNKLERDEVVQVFDTSQFFRELQQFYNSQGRLPDGRVVLCFGEEFPDMAPLRSKLILVQIEQLYVRQLAEEAGKSCGAGSVMQAPEEPPPDQVFRMFPDICASHQRSFFRENQQITV

SEQ ID NO: 5698 - DNA, 554 bp, Rattus norvegicus
  ref <308>: DATABASE ACCESSION NUMBER: EMBL / AA892260
  ref <309>: DATABASE ENTRY DATE: 1999-01-28
aaggcaaacagtgccgcctagaatctttattcaaaagggaatcagcattggacaaggcccacaattcaacagcaaaatgcacttttcctggaagtgccgatcttcagctcctccctatggtcacctgcctgagaacttgctgtcagttccctatcttcatagacgcttccctgcctgccccatctgaccagacccaactctggagaggggagggctggagacatagcctcctggcatagcaggctctgctaccctctctggtgcccctggcagcattcaagcctcctgaggagggtggggatggggcttcagaacagaggggagggaaacctgggctggcagaagacaccctccaggcaccccagcactattagcccagagtcccaggggcctggctctattggtcttgccccccacatgccctccccaaagggtcagtagatcttctgccgactgggtacgatggcctctttgatgaaggagaagacaaccaggatgcctaagcgcttgcctcgcttgcctttggtgaagtaattggagaccacgtcatcgcc

SEQ ID NO: 5699 - DNA, 554 bp, Rattus norvegicus; identical to SEQ ID NO: 5698
  ref <308>: DATABASE ACCESSION NUMBER: EMBL / AA892260
  ref <309>: DATABASE ENTRY DATE: 1999-01-28

SEQ ID NO: 5700 - DNA, 433 bp, Rattus norvegicus
  ref <308>: DATABASE ACCESSION NUMBER: EMBL / AA892268
  ref <309>: DATABASE ENTRY DATE: 1999-01-28
gaataccagcatataaaacgagtcctttaatttttcaagtgttttaaaaaacaaatttatacttaagccagccttgaagataagcataaaaattaccaatttaaaccaaaaaccaaaccaaaagaccccaaacccacaacatcggaagcactggctctgtgcacagctccacccaggcgtgcatgggggaacacagcagtagagaggggtcactgtctggaactgcgtcatctccttaccgggagagcgaaaaataaataggatcaccactgccttctacgcatctgcccagccttcttccagctcacaggaaagctgagaggcgatgagctgggagctgcttccctcaaacacgagcaaggccacagtcactcaacgagcattcccatgcagggtgtatgcattttcacttttaccttttaatttcttttac

SEQ ID NO: 5701 - DNA, 3068 bp, Homo sapiens
  ref <308>: DATABASE ACCESSION NUMBER: EMBL / S59184
  ref <309>: DATABASE ENTRY DATE: 2000-03-04
aacggtatcgataagcttgatatcgaattccgcacccccggctcggggctgtgagcggctcggggccgggggtgggcggcggtgcggcgggcggccgacgctcctcttcggcggcggcggcggcggcggcccatgcgtggggcggcgcggctggggcggccgggccggagttgcctcccggggcccgcgctgagggccgccgccgcgcccgccctgctgcttgctcgttgcgctgttgccgctgctgccggcctgcgtgccgccgcccgtccgcggcccccggagctgcagtcggcttccgcggggcccagcgtgagtctctacctgagcgaggacgaggtgcgccggctgatcggtcttgatgcagaactttattatgtgagaaatgaccttattagtcactacgctctatcctttaatctgttagtacccagtgagacaaatttcctgcacttcacctggcatgcgaagtccaaggttgaatataagctgggattccaagtggacaatgttttggcaatggatatgccccaggtcaacatttctgttcagggggaagttccacgcactttatcagtgtttcgggtagagctttcctgtactggcaaagtagattctgaagttatgatactaatgcagctcaacttgacagtaaattcttcaaaaaattttaccgtcttaaattttaaacgaaggaaaatgtgctacaaaaaacttgaagaagtaaaaacttcagccttggacaaaaacactagcagaactatttatgatcctgtacatgcagctccaaccacttctacgcgtgtgttttatattagtgtaggggtttgttgtgcagtaatatttctcgtagcaataatattagctgttttgcaccttcataatatgaaaaggattgaactggatgacagcattagtgccagcagtagttcccaagggctgtctcagccatccacccagacgactcagtatctgagagcagacacgcccaacaatgcaactcctatcaccagttatcctaccttgcggatagagaagaacgacttgagaagtgtcactcttttggaggccaaaggcaaggtgaaggatatagcaatatccagagagaggataactctaaaagatgtactccaagaaggtacttttgggcgtattttccatgggattttaatagatgaaaaagatccaaataaagaaaaacaagcatttgtcaaaacagttaaagatcaagcttctgaaattcaggtgacaatgatgctcactgaaagttgtaagctgcgaggtcttcatcacagaaatcttcttcctattactcatgtgtgtatagaagaaggagaaaagcccatggtgatattgccttacatgaattgggggaatcttaaattgtttttacgacagtgcaagttagtagaggccaataatccacaggcaatttctcagcaagacctggtacacatggctattcagattgcctgtggaatgagctacctggccagaagggaagtcatccacaaagacctggctgccaggaactgtgtcattgatgacacacttcaagttaagatcacagacaatgccctctccagagacttgttccccatggactatcactgtctgggggacaatgaaaacaggccagttcgttggatggctcttgaaagtctggttaataacgagttctctagcgctagtgatgtgtgggcctttggagtgaacagcttgtgggaactcatgactctgggccagactccctacacgttggacattgaccccttcgagatggcggcatacctgaaagatggttaccgaatagcccagccaatcacctgtcctgatgaattatttgctgtgatggcctgttgctgggccttagatccagaggagaggcccaggtttcagcagctggtacagtgcctaacagagtttcatgcagccctgggggcctacgtctgactcctctccaatcccacaccatcaggaagaaggtgcctgtcggggctcacttgaagcctgtcagggatgctttgtatatctaacacaacgccaacagaagcacatttgtcttccagaacaccgtgccttagaaatgctttagaatctgaactttttaagacagacttaataatgtggcatattttctagatatcacttttattaggttgaactgaaagggtttttgtaaattttttggccaaaattttttaaaacatacttactttggactaggggtacattcttacaaaataaataaacagtttttaaaattgtttagacacagatatttggaattagctatcttagggccaactgctttttatttttttacttcatcaaggtgatgtaagtgactttgtttagacacagatatttggaattagcctatcttagtgccaactgctttttatttttttccttcatcaaggtgatgtaagtgactcacctttaaagtttttttagtgttattttttatcactactctgggaaatggtttgtcttcaagatgcaatacttttcttagataaggaaaaacagcataaaaagatacctggtctgccttgtacaagaaaaccgaatattagaggaagaaaatttaaagaaaagctagagaaaaaaaaaattttttaaaaaatacttattagaagcaaactgcccttgcatggaaaactgtttatttttttcagtgaaaaaggaattctgctttcgtgtttttgggaaagcaggaactgagttcattacatctttaatttggcagaaattagcctttctgtgaaccagatgtggtttggggcagatctgtagtaaacaatggtgattttatttatttttactctctggaaaaggagataatacaattccagaaagtgaactcatatttctaaggtaagatcccttttatgcacctagaatatgctatgcacagagcgggtgcttgagttgttgtcgttttttgtttgttttttaaatgtaaactggtaaattttgtgcttatcttcaaggctggcttaagtataaaattgttttttaaacacttgaaaaattaaaggatttgttttatattaaaaaaaaaa

SEQ ID NO: 5702 - protein, 604 aa, Homo sapiens
  ref <308>: DATABASE ACCESSION NUMBER: SWISS-Prot / P34925
  ref <309>: DATABASE ENTRY DATE: 2002-06-15
MRGAARLGRPGRSCLPGPALRAAAAPALLLARCAVAAAAGLRAAARPRPPELQSASAGPSVSLYLSEDEVRRLIGLDAELYYVRNDLISHYALSFNLLVPSETNFLHFTWHAKSKVEYKLGFQVDNVLAMDMPQVNISVQGEVPRTLSVFRVELSCTGKVDSEVMILMQLNLTVNSSKNFTVLNFKRRKMCYKKLEEVKTSALDKNTSRTIYDPVHAAPTTSTRVFYISVGVCCAVIFLVAIILAVLHLHNMKRIELDDSISASSSSQGLSQPSTQTTQYLRADTPNNATPITSYPTLRIEKNDLRSVTLLEAKGKVKDIAISRERITLKDVLQEGTFGRIFHGILIDEKDPNKEKQAFVKTVKDQASEIQVTMMLTESCKLRGLHHRNLLPITHVCIEEGEKPMVILPYMNWGNLKLFLRQCKLVEANNPQAISQQDLVHMAIQIACGMSYLARREVIHKDLAARNCVIDDTLQVKITDNALSRDLFPMDYHCLGDNENRPVRWMALESLVNNEFSSASDVWAFGVTLWELMTLGQTPYVDIDPFEMAAYLKDGYRIAQPINCPDELFAVMACCWALDPEERPKFQQLVQCLTEFHAALGAYV

SEQ ID NO: 5703 - DNA, 584 bp, Rattus norvegicus
  ref <308>: DATABASE ACCESSION NUMBER: EMBL / AA892270
  ref <309>: DATABASE ENTRY DATE: 1999-01-28
aaacaagaatttatttgtagaaagcattaaaatcttctcaacagtctccagtcactttcaacaaactcttccctgtatttccctgactagttaacagtgttcaactatattacattacctgtcagcctcatgtgcacaactaagacagagaaagtgcttggagcactaaatggggaaaagaaaggccaacaggcacgctcaaagctgcagcagtggtgccacattcctgagcaccgtttctctcaccttcagggtcagaggtgcttctcaagtctctttaaaagacaggagatgaggaaacaatctgaggaccttgcactttatcagagtccctagactagaagatgaaatgaataagaggaggagaaagcagggctgggaagcagaggcgggagagatggagacagaaaggctgtgcctggaggagataaagtctctggaacttgctatgagttcaggggataaaaagcagcagccatcatctgagaggtggactagagaagagacaatctgggattttataccttccaagaggtggcactaggttctacagtggcaggcactgagttaccgccaagtttaag

SEQ ID NO: 5704 - DNA, 584 bp, Rattus norvegicus; identical to SEQ ID NO: 5703
  ref <308>: DATABASE ACCESSION NUMBER: EMBL / AA892270
  ref <309>: DATABASE ENTRY DATE: 1999-01-28

SEQ ID NO: 5705 - DNA, 665 bp, Rattus norvegicus
  ref <308>: DATABASE ACCESSION NUMBER: EMBL / AA892271
  ref <309>: DATABASE ENTRY DATE: 1999-01-28
agagtagataaaagtacttttattataaacttcaggatctaagaagtaatgttacatgactaagataaatctgagatgacttcttatcaagcatgtgtgccttgcagggtggcactgtgccctccggcaagagaaagacagtcccaccttccttgagggatggggtcagccaggtgatacgcgactgccgagtcccactagctacagtgagtgcctgggtccctctgcgtctgtggccctggtgctgcgctgaactcaggccaagaagtctcttcaatgctaaagattaaaccagaacctcagcatcagtcttggtcttaaatttaagtgatacctaataataaatgataaagctttatcatttatttcagtgatttacactgagtaaggattatgacccaattggttctgtaagccaaaggatgacagattcctacatgcagagacccacagagaagctgatgacagtccaacacccaagaacactactccagggttctagatggcatgtatgccatcagaggtgtcccttatcagacttatcagaagcacgtgggatggctggctatacctgtaagagctcaaatagacctcgccgggtcacgctgaccaccttcctgcttctaagaccaatgactgcagcctgtactctgccctggcaatca

SEQ ID NO: 5706 - DNA, 529 bp, Rattus norvegicus
  misc_feature (1)..(529): n=a, c, g or t
  ref <308>: DATABASE ACCESSION NUMBER: EMBL / AA892273
  ref <309>: DATABASE ENTRY DATE: 1999-01-28
caaacattcaagaacagttcatttctatgtgatgtaaactcttccataaagtaagacaagaggcaacagtcccccgctcagaggtacgcagaccaaaaggaccattcaggaccatcttagaaacctctttagaaatcttactaaaaacaaaggcactcatatacaagaatgttcatagcagcattgtgtataagaacagaaacctgcaaacagcccaaatgttattcagcaggtgagtggctacctaagttgttttgtctgcttggtggagtattatacagatggaaatgaacaagttatagcaatcacaacgtacaggagtcttacaaacaatggttaagtgcaaaaaagcaaacctcaaggaacagagtacaacatttttgtaaagctaaaagtacaagcaatacannataatacattcctaaaggatatatacacacatgggcaatattattataacaagtgattaatgagcataaaattaaagacagtggctacctctaggaagaggctgggcaaggggacaaaa

SEQ ID NO: 5707 - DNA, 572 bp, Rattus norvegicus
  ref <308>: DATABASE ACCESSION NUMBER: EMBL / AA892284
  ref <309>: DATABASE ENTRY DATE: 1999-01-28
ggaaattttagtcaaaaatcaagcaactaggaaaaatcaaggcaatttattgtaaatgacagttgatttgaataaggcacattcaacatcatcaatatggaaacaaatgcaaaaaagcagttatggtgacttgaaaagtctgacaagccgttaaatttgtgaatacatcaaggcaggattcttggggctaagaaatccttgatagagaatgtaagcgtgttgctggacatcgttttgctgcatttctctcgtgttcacatctgtctgccatacccagcatctgtgctcacagtgctccggccttaaacgagaatgtgaaccaaaggccttgagacaaagctgtcccctccatcagccagcactgttagggtgggccgacaggaagggcactgatcctcactaccctcccccaagcctccgaacttccagataaaatttgttcaaattagttcagggataagaactctctagaacttctctgatgatctctgagaactacctaaaagaaccctaagaaccctaaattttacctgaaagggaaagcgagactcaagtctaaagacagtttctat

SEQ ID NO: 5708 - DNA, 640 bp, Rattus norvegicus
  ref <308>: DATABASE ACCESSION NUMBER: EMBL / AA892297
  ref <309>: DATABASE ENTRY DATE: 1999-01-28
ccaagtacaattttttaataaagataattacaaaagatggaaaaatcagctcagaaaggccaattgtttctttaatagatccgtttttttttttgacataataacacatcaatttaaatacaatcacataaagcatggtggaaaaaaatttgcttcataattagaaaaactcacaataaaacttgccaaggaaaaccaaaaacaagccattttgaaaataaatacagtccatgccaaaacagtataaaatgaagccaaacttcctcaaacagcgaaggtttcttatcccagaatcgtctcacttttcgaggttcctaaggttggggagtcaaattcaagggttgttgagttgttctgatttggctcctttggtgtctgttttctcaccactattgtccttggatttgtcttcttccttaacatctgtcctcttgtcctccgcctccttcttgtcttcctcaatcctggcttttttggctcccttcttatgatcagcgacattcctacgacctccttcaccttcatcctcagaatctgagaactcttcatcacaagctatccgcttgtctgatgctcgaatagaaattctcttgtcagggtcttctccatcctcatcaccactgtcttcaagaacagcatc

SEQ ID NO: 5709 - protein, 174 aa, Rattus norvegicus
  ref <308>: DATABASE ACCESSION NUMBER: SWISS-Prot / AAK11183
  ref <309>: DATABASE ENTRY DATE: 2001-06-01
YETAVALDCEIPNELPYNDYFEYFGPDFKLHISPSNMTNQNTPEYMEKIKQRLFENLRMLPHAPGVQMQAIPEDAVHEDSGDEDGEDPDKRISIRASDKRIACDEEFSDSEDEGEGGRRNVADHKKGAKKARIEEDKKEAEDKKTDVKEEDKSKDNSGEKTDTKGAKSEQLNNP

SEQ ID NO: 5710 - DNA, 1985 bp, Homo sapiens
  ref <308>: DATABASE ACCESSION NUMBER: EMBL / U31814
  ref <309>: DATABASE ENTRY DATE: 1999-07-01
cgccgagctttcggcacctctgccgggtggtaccgagccttcccggcgccccctcctctcctcccaccggcctgcccttccccgcgggactatcgcccccacgtttccctcagcccttttctctcccggccgagccgcggcggcagcagcagcagcagcagcagcaggaggaggagcccggtggcggcggtggccggggagcccatggcgtacagtcaaggaggcggcaaaaaaaaagtctgctactactacgacggtgatattggaaattattattatggacagggtcatcccatgaagcctcatagaatccgcatgacccataacttgctgttaaattatggcttatacagaaaaatggaaatatataggccccataaagccactgccgaagaaatgacaaaatatcacagtgatgagtatatcaaatttctacggtcaataagaccagataacatgtctgagtatagtaagcagatgcatatatttaatgttggagaagattgtccagcgtttgatggactctttgagttttgtcagctctcaactggcggttcagttgctggagctgtgaagttaaaccgacaacagactgatatggctgttaattgggctggaggattacatcatgctaagaaatacgaagcatcaggattctgttacgttaatgatattgtgcttgccatccttgaattactaaagtatcatcagagagtcttatatattgatatagatattcatcatggtgatggtgttgaagaagctttttatacaacagatcgtgtaatgacggtatcattccataaatatggggaatactttcctggcacaggagacttgagggatattggtgctggaaaaggcaaatactatgctgtcaattttccaatgtgtgatggtatagatgatgagtcatatgggcagatatttaagcctattatctcaaaggtgatggagatgtatcaacctagtgctgtggtattacagtgtggtgcagactcattatctggtgatagactgggttgtttcaatctaacagtcaaaggtcatgctaaatgtgtagaagttgtaaaaacttttaacttaccattactgatgcttggaggaggtggctacacaatccgtaatgttgctcgatgttggacatatgagactgcagttgcccttgattgtgagattcccaatgagttgccatataatgattactttgagtattttggaccagacttcaaactgcatattagtccttcaaacatgacaaaccagaacactccagaatatatggaaaagataaaacagcgtttgtttgaaaatttgcgcatgttacctcatgcacctggtgtccagatgcaagctattccagaagatgctgttcatgaagacagtggagatgaagatggagaagatccagacaagagaatttctattcgagcatcagacaagcggatagcttgtgatgaagaattctcagattctgaggatgaaggagaaggaggtcgaagaaatgtggctgatcataagaaaggagcaaagaaagctagaattgaagaagataagaaagaaacagaggacaaaaaaacagacgttaaggaagaagataaatccaaggacaacagtggtgaaaaaacagataccaaaggaaccaaatcagaacagctcagcaacccctgaatttgacagtctcaccaatttcagaaaatcattaaaaagaaaatattgaaaggaaaatgttttctttttgaagacttctggcttcattttatactactttggcatggactgtatttattttcaaatgggactttttcgtttttgtttttctgggcaagttttattgtgagattttctaattatgaagcaaaatttcttttctccaccatgctttatgtgatagtatttaaaattgatgtgagttattatgtcaaaaaaactgatctattaaagaagtaattggcctttctgagctgaaaaaaaaaaaaaaaaag

SEQ ID NO: 5711 - protein, 488 aa, Homo sapiens
  ref <308>: DATABASE ACCESSION NUMBER: SWISS-Prot / Q92769
  ref <309>: DATABASE ENTRY DATE: 2002-06-15
MAYSQGGGKKKVCYYYDGDIGNYYYGQGHPMKPHRIRMTHNLLLNYGLYRKMEIYRPHKATAEEMTKYHSDEYIKFLRSIRPDNMSEYSKQMHIFNVGEDCPAFDGLFEFCQLSTGGSVAGAVKLNRQQTDMAVNWAGGLHHAKKYEASGFCYVNDIVLAILELLKYHQRVLYIDIDIHHGDGVEEAFYTTDRVMTVSFHKYGEYFPGTGDLRDIGAGKGKYYAVNFPMCDGIDDESYGQIFKPIISKVMEMYQPSAVVLQCGADSLSGDRLGCFNLTVKGHAKCVEVVKTFNLPLLMLGGGGYTIRNVARCWTYETAVALDCEIPNELPYNDYFEYFGPDFKLHISPSNMTNQNTPEYMEKIKQRLFENLRMLPHAPGVQMQAIPEDAVHEDSGDEDGEDPDKRISIRASDKRIACDEEFSDSEDEGEGGRRNVADHKKGAKKARIEEDKKETEDKKTDVKEEDKSKDNSGEKTDTKGTKSEQLSNP

SEQ ID NO: 5712 - DNA, 601 bp, Rattus norvegicus
  ref <308>: DATABASE ACCESSION NUMBER: EMBL / AA892298
  ref <309>: DATABASE ENTRY DATE: 1999-01-28
cagtcttagtggcacaggctttaatcccagcacttgggaggaggaggcaaaggcaggcagatatatgtgagttcaagcccatcctgatttatgttgtgagttccaggtcagctggggctccatagtgagaccctgttttccgaacactgtatatttcatgtccaagtgtggctgcttgccataggtgatgaagaactgagatccgttggtgtttgggccattattagccatagatacaacacctcgaacattgtgcttcagatattcactgtattcatcctcaaacttcttgccccagatactgctgcctcctcttccagtacctgttggatctcctgtttgaaccatgaagcccttgatatttctatggaacacacagccattgtagtaattactggcacacagagccaagaaattctcacaggttttgggtgttctctcacagaagacttctatcttgatatctcccacatctgtatgcagtgtcacagacattctccttcttgatgcttctagggagcactatttactttttcaaagctcctcgctcagcaccgctgctgcggtaacaaaaatgtctcattcacaggtgccggcatgc

SEQ ID NO: 5713 - protein, 163 aa, Rattus norvegicus; identical to SEQ ID NO: 4784
  ref <308>: DATABASE ACCESSION NUMBER: SWISS-Prot / CSRTA
  ref <309>: DATABASE ENTRY DATE: 2002-06-15

SEQ ID NO: 5714 - DNA, 1137 bp, Homo sapiens
  ref <308>: DATABASE ACCESSION NUMBER: EMBL / AF251049
  ref <309>: DATABASE ENTRY DATE: 2001-04-16
ggggaggaaggaggtgaggcggtaaggggcgttctctctcttgggtcccgcgcccaacttccgctggcccaaagaaactataattttgaaccaacagacctctgctggcatctgcgattgcatttttcctgttttaacaacggctgtgctagacgaagtggtgaagcccaaagacttatttttgagctcgctgtaagactgagaaatcacgtagtccttcctgaaaccactaagaggaaaaatgtctgtgacactgcatacagatgtaggtgatattaaaattgaagtcttctgtgagaggacacccaaaacatgtgagatggagtctcgctgtgtcccccaggctggagtacaatggcgcgatctcggctcactgcaacctccgcctcctgggttcaagcaagtcttctgcctcagcctcccgagaactggaagaggaggcaacagtatttggggcaagaagtttgaggatgaatacagtgaatatcttaagcacaatgttagaggtgttgtatctatggctaataatggcccgaacaccaatggatctcagttcttcatcacctatggcaaacagccacatttggacatgaaatacaccgtatttggaaaggtaatagatggtctggaaactctagatgagttggagaagttgccagtaaatgagaagacataccgacctcttaatgatgtacacattaaggacataactattcatgccaacccatttgctcagtagctatgatagacctggacaaataacttgacaaattgctggaacacacttattgtggtttacccggttttaattatgtcagagattgcatcatccttctgcttgtttacaactatgatcttctatgaaatggtggtaccaaggggcgcccaacagcttttatccccattcttagagcatattctttattataatgattatccaacatatttctttaattttaatacaaaaaatacatcatttaatttttgttacatatgaacattcatttttaaatgctcagcctcaagtgcaggcatttttgagtggcctgattacatattcctcccacagcaagtccgtatcctggaagtgttattttataataaaatttaaaaagttttaaggaaaaaaaaaaaaaa

SEQ ID NO: 5715 - protein, 48 aa, Homo sapiens
  ref <308>: DATABASE ACCESSION NUMBER: PIR / S64705
  ref <309>: DATABASE ENTRY DATE: 2000-07-21
CLVCGDRASGYHYNALTCEGCKGFFRRSVTKSAVYCCKFGRACEMDMY

SEQ ID NO: 5716 - DNA, 665 bp, Rattus norvegicus
  ref <308>: DATABASE ACCESSION NUMBER: EMBL / AA892299
  ref <309>: DATABASE ENTRY DATE: 1999-01-28
ttgcggccgaaaaacttttttttttatttttttttttttttttttaaaggcaaaaaagttaactttattgactgttgatcttaccatgaaacacctataagaaataattacaaaataacaccgcttttcttttcttttttttaacatactttcagttatcatcccgacatgacgatcctttcacagaaaggactgtttgcagcttactgagatacaaagctcaaatgcagatgcagaagaggcagggaggcacatcccccagcaacgggcgtgctagcgagcgagcgtgagcgacagctttctacttccctctttttgtttttgatgacgatttcccaatacaaaaatgtcaggtcttcagagtggatctccacctatgtctgtgtgactctaccgtgggtcagaaactagaaactgttccctggctgtctttgtctttgaaaatctgtaagactgttcctgccggcctggaggagggcagctgaggagtggcagcctgggcagagccctgaagcctgggttctggagcagagaggaaaaggtacaacctattcgattaagcaacttcaccactttgcatctgcaagagacgctgagggctgcggggcgcacagctccacaatcagagcttgggagggcacgccccttaacagggtctgggccct

SEQ ID NO: 5717 - DNA, 605 bp, Rattus norvegicus
  ref <308>: DATABASE ACCESSION NUMBER: EMBL / AA892300
  ref <309>: DATABASE ENTRY DATE: 2000-03-03
acccacatcagtccagtttattcttcatacaaatattttacagttttatttttaaatcatttacacatatgcatacaaagaaaaataaatttcaggatggaactttgggaccatggcagtttaaaaaaaaattctgatcattagctactgaagacaaggtaagaggcttagcagtcatttgtgggagtctgcgcgtcgccccacacagaaaacagtggagacgtctccaaccactccctcagtatcacttcatcttcaccttgtagaggtaatgaatacagggggaggggattttcaatgatagcccctataaatgtttcaagaaggcttatggtaacactgaaccctggggaatttggcaagaatgcaacttctgaaccagtttgctacaagagtttgttcagttcctacttccaaggctcccaataagaagagaggattgcaggactgaccacaccacgactgtcccacctgactctgggctcagtccacaactgaacatccctccctcacaggccatggagcctgcgtgacaagccctggccctgaggacactacagtaaccacattagcatcactgcttcagtgtccacccacagaggatc

SEQ ID NO: 5718 - DNA, 3048 bp, Homo sapiens
  ref <308>: DATABASE ACCESSION NUMBER: EMBL / U19721
  ref <309>: DATABASE ENTRY DATE: 1999-06-30
agctggcggtcaccatggcaatgcgggagctggtggaggccgaatgcgggggtgccaacccgctcatgaagctcgccgggcacttcacccaggacaaggcccttcggcaggagggattgaggcctggcccctggccccccggagcaccggcctctgaggcagcctccaagcctttgggagtagcttctgaagatgagttggtggctgaattcctgcaggaccagaatgcaccccttgtgtcccgtgcccctcagaccttcaagatggatgacctcctggctgagatgcagcagattgagcagtcaaacttccgccaggctccccagagagcccctggtgtggcagacttggccttgtctgagaactgggcccaggagtttcttgcagctggagatgctgtggatgtaactcaggattataatgagactgactggtcccaagaattcatctctgaagttacagaccccttgtctgtgtcccctgcccgctgggctgaggaatatttggagcaatcagaggagaagctgtggctgggagaacctgagggaacagccaccgatcgctggtatgatgaatatcatcctgaggaggatctgcagcacacggccagtgactttgtggccaaagtggatgaccccaaattggctaattctgagggtacatcagatgcctgggttgaccagttcacaagaccagtaaacacatctgcccttgatatggagtttgaacgagccaagtcagctatagagtctgatgtcgatttctgggacaagttgcaggcagagttggaggagatggcaaaacgggatgctgaggcccacccctggctttctgactatgatgaccttacgtcagctacctatgataaggggtaccagtttgaggaggagaaccccttgcgtgatcaccctcagccttttgaagaagggctgcggcgccttcaggagggggacctgccaaatgctgtgctgctttttgaggcagctgtgcagcaggatcctaagcacatggaagcttggcagtatctgggtaccacccaggcagagaatgaacaagaactattagccatcagtgcattgcggaggtgtctggagctaaagccagataaccagacagcactgatggcgctggctgtgagcttcaccaacgagtccctgcagcgacaggcctgtgaaatcctacgagactggctgcggtacacaccagcctatgcccatctggtgacacctgctgaagaaggggctggtggggcaggactgggccccagcaagcgtatcctgggatctctcttgtctgactccctgtttcttgaagtgaaagagctcttcctggcagctgtgcggctggaccctacctccattgaccctgatgtgcagtgtggcttgggagtccttttcaacctgagtggggagtatgacaaggccgtggactgcttcacagctgccctcagcgttcgtcccaatgactatttgctgtggaataagctaggcgccaccctggccaatggaaaccagagtgaagaagcagtagctgcgtaccgccgggccctcgagctccagcctggctatatccggtcccgctataacctgggcatcagctgcatcaacctcggggctcaccgggaggctgtggagcactttctggaggccctgaacatgcagaggaaaagccggggcccccggggtgaaggaggtgccatgtcggagaacatctggagcaccctgcgtttggcattgtctatgttaggccagagcgatgcctatggggcagccgacgcgcgggatctgtccaccctcctaactatgtttggcctgccccagtgacagtgggacgggctgccctgtgagtgtccacctggagggatcccgcttttggatgtgattccctctccccaaatgggcctaccaaggggcgggcttgatgaccataagcggtacggcctttcaggagctgcctcaacgtaggggtgggtagtctgtgttctagttcctacataattgtaggaaaatgagctgtgtcatctctgagtcccttggtaattcaagggctgtacatccagctacagatctctctgctcatcatgccctttcttggtgctgctttttgggtaggaccccacgatttagggtaactgttatcatcagctgccatttctgataggtctaccacatctgtaatgtcatgtcctttcccccacttttactgggaattgatagtccagcttccttgggcagtgtaagtaggaggttcatctcctgtgcgcctctaatgtctgtctggatgggatgtgttaggagttggcctgttgggttgaattgttgatttggctgagcagagctgagttttggtaggagtgctcatggttctgtcattcttggacctctcctggctgagctctgattccctgtgagcacgatgctgatgcaatagtcctgtgtcatcactgcagcggtcctcaggagctgccagggccaattgctacagagtgtctgggtgtgtggcataggaggaaggtttgcttgtgaaatgaggctgggtgggagcggggagggactagatcagaagagatcaagggctctattcaggaacgttggtgggaggacagagcaagtgggaagggggtatggtgagtgcggcaatccctcatcctcttagaagcacctgtgaatgggaattgagccaactgttatagaaaattggttcagaaagtgcaatcttgccagatttctagcaaataggttcagtgttaccataagcctttgctgtacttcttgaaatgtttctaggggagagcattggaaaatccccttcccccatctagatcgaaggaagatgagggagcagcttggattcttctcagttgtcccctgcatggggagatacactaacccccagaaatgactgctaagcctcttgccttgtctttagtagctaatgatcagagagattttttttttaaactaccatggtcccaggattccatcctgaaatttatttttctttgtatgaatatgtgtaaatgatttaaaaataaaactgtaaaatatt

SEQ ID NO: 5719 - protein, 602 aa, Homo sapiens
  ref <308>: DATABASE ACCESSION NUMBER: SWISS-Prot / P50542
  ref <309>: DATABASE ENTRY DATE: 2001-10-16
MAMRELVEAECGGANPLMKLAGHFTQDKALRQEGLRPGPWPPGAPASEAASKPLGVASEDELVAEFLQDQNAPLVSRAPQTFKMDDLLAEMQQIEQSNFRQAPQRAPGVADLALSENWAQEFLAAGDAVDVTQDYNETDWSQEFISEVTDPLSVSPARWAEEYLEQSEEKLWLGEPEGTATDRWYDEYHPEEDLQHTASDFVAKVDDPKLANSEGTSDAWVDQFTRPVNTSALDMEFERAKSAIESDVDFWDKLQAELEEMAKRDAEAHPWLSDYDDLTSATYDKGYQFEEENPLRDHPQPFEEGLRRLQEGDLPNAVLLFEAAVQQDPKHMEAWQYLGTTQAENEQELLAISALRRCLELKPDNQTALMALAVSFTNESLQRQACETLRDWLRYTPAYAHLVTPAEEGAGGAGLGPSKRILGSLLSDSLFLEVKELFLAAVRLDPTSIDPDVQCGLGVLFNLSGEYDKAVDCFTAALSVRPNDYLLWNKLGATLANGNQSEEAVAAYRRALELQPGYIRSRYNLGISCINLGAHREAVEHFLEALNMQRKSRGPRGEGGAMSENIWSTLRLALSMLGQSDAYGAADARDLSTLLTMFGLPQ

SEQ ID NO: 5720 - DNA, 541 bp, Rattus norvegicus
  ref <308>: DATABASE ACCESSION NUMBER: EMBL / AA892318
  ref <309>: DATABASE ENTRY DATE: 1999-01-28
gaacaagatcatttaatagtgaccctctgctgtccacttcggtgcctaggccacccactgcacccaagaggatgctgggccgtaggaaaggccgctggacatcagtctccaaactaccaacagcagttcacagagctgggatggcagtgccctccctcagggaagcaggcctgctcgcatctggaaggccaggccgtcccctcgggtggcttgctgaggaaagaaacaggttggaagcatgagaaactaagtgtagacacaatgagggcagagcataggcagagtggtaccaccaaccttgttgatctctctgtgtcgttctttggttacgatctcctctaaaacctcaccgtctcccttgatgagccttgtacggccggtctctgggtccaccacctttcgaataacgctctgtcgagcgtcccactcctcctttgtcatgggcttcatggcctggatacgagacttctgctcgtctgtcaggactgggccatcattgtcctccccagctgatctgtgccactgatccagagaggggccg

SEQ ID NO: 5721 - protein, 229 aa, Rattus norvegicus
  ref <308>: DATABASE ACCESSION NUMBER: SWISS-Prot / BAA94743
  ref <309>: DATABASE ENTRY DATE: 2002-10-01
MAHVGSRKRSRSRSRSRSGRRGSEKRSKRSSKDASRNCSASRSQGHKAGSASGVEERSKHKAQRTSRSSSTSSSSSSSSSASSSSSSDGRKKRAKHKEKKRKKKKKKRKKKLKKRVKEKAVAVHQAEALPGPSLDQWHRSAGEDNDGPVLTDEQKSRIQAMKPMTKEEWDARQSVIRKVVDPETGRTRLIKGDGEVLEEIVTKERHREINKQATRGDGLAFQMRTGLLP

SEQ ID NO: 5722 - DNA, 952 bp, Homo sapiens
  ref <308>: DATABASE ACCESSION NUMBER: EMBL / AB035384
  ref <309>: DATABASE ENTRY DATE: 2000-04-19
gtcctctcgagaaggcgcggggcgggctgtccggcccgcagggcggtcgagcccgcggcgccatggctcacgtcggctcccgcaagcgctcgaggagtcgcagccggtcccggggacgggggtcggaaaagagaaagaagaagagcaggaaagacacctcgaggaactgctcggcctccacatcccaagagagaagcaagcagaaggcccggaggagaacaagatccagctcctcctcctcttcttccagttcttctagctcctcttcttcctcctcgtcctcctcctcttcctccagtgatggccggaagaagcgggggaagtacaaggacaagaggaggaagaagaagaagaagaggaagaagctgaagaagaagggcaaggagaaggcggaagcacagcaggtggaggctctgccgggcccctcgctggaccagtggcaccgatcagctggggaggaagaggatggcccagtcctgacggatgagcagaagtcccgaatccaggccatgaagcccatgaccaaggaggagtgggatgcccggcagagcatcatccgcaaggtggtggaccctgagacggggcgcaccaggcttattaagggagatggcgaggtcctagaggaaatcgtaaccaaagaacgacacagagagatcaacaagcaagccacccgaggggactgcctggccttccagatgcgagctgggttgcttccctgagggcccccgctggccaaggcctgtggacgacgctggcggcccagcctgggcaggtttcagggtgccagtgggaagcctgatgggtgctggtggcctttcccccgtggattggtctctggcccagcccagtctcttctcaggggcagggggtggaggttggggtcaccggcctgcttggcacccccatctgaaagagcagcacttctcagctattaaaggccccctggatagac

SEQ ID NO: 5723 - protein, 219 aa, Homo sapiens
  misc_feature (1)..(219): Xaa=Unknown amino acid
MAHVGSRKRSRSRSRSRGRGSEKRKKKSRKDTSRNCSASTSQERSKQKARRRTRSSSSSSSSSSSSSSSSSSSSSSSSSDGRKKRGKYKDKRRKKKKKRKKLKKKGKEKAEAQQVEALPGPSLDQWHRSAGEEEDGPVLTDEQKSRIQAMKPMTKEEWDARQSIIRKVVDPETGRTRLIKGDGEVLEEIVTKERHREINKQATRGDCLAFQMRAGLLPX

SEQ ID NO: 5724 - DNA, 541 bp, Rattus norvegicus; identical to SEQ ID NO: 5720
  ref <308>: DATABASE ACCESSION NUMBER: EMBL / AA892318
  ref <309>: DATABASE ENTRY DATE: 1999-01-28

SEQ ID NO: 5725 - protein, 229 aa, Rattus norvegicus; identical to SEQ ID NO: 5721
  ref <308>: DATABASE ACCESSION NUMBER: SWISS-Prot / BAA94743
  ref <309>: DATABASE ENTRY DATE: 2002-10-01

SEQ ID NO: 5726 - DNA, 952 bp, Homo sapiens; identical to SEQ ID NO: 5722
  ref <308>: DATABASE ACCESSION NUMBER: EMBL / AB035384
  ref <309>: DATABASE ENTRY DATE: 2000-04-19

SEQ ID NO: 5727 - protein, 218 aa, Homo sapiens
  ref <308>: DATABASE ACCESSION NUMBER: Refseq / NP_057722
  ref <309>: DATABASE ENTRY DATE: 2002-09-25
MAHVGSRKRSRSRSRSRGRGSEKRKKKSRKDTSRNCSASTSQERSKQKARRRTRSSSSSSSSSSSSSSSSSSSSSSSSSDGRKKRGKYKDKRRKKKKKRKKLKKKGKEKAEAQQVEALPGPSLDQWHRSAGEEEDGPVLTDEQKSRIQAMKPMTKEEWDARQSIIRKVVDPETGRTRLIKGDGEVLEEIVTKERHREINKQATRGDCLAFQMRAGLLP

SEQ ID NO: 5728 - DNA, 541 bp, Rattus norvegicus; identical to SEQ ID NO: 5720
  ref <308>: DATABASE ACCESSION NUMBER: EMBL / AA892318
  ref <309>: DATABASE ENTRY DATE: 1999-01-28

SEQ ID NO: 5729 - protein, 229 aa, Rattus norvegicus; identical to SEQ ID NO: 5721
  ref <308>: DATABASE ACCESSION NUMBER: SWISS-Prot / BAA94743
  ref <309>: DATABASE ENTRY DATE: 2002-10-01

SEQ ID NO: 5730 - DNA, 952 bp, Homo sapiens; identical to SEQ ID NO: 5722
  ref <308>: DATABASE ACCESSION NUMBER: EMBL / AB035384
  ref <309>: DATABASE ENTRY DATE: 2000-04-19

SEQ ID NO: 5731 - protein, 219 aa, Homo sapiens; identical to SEQ ID NO: 5723
  misc_feature (1)..(219): Xaa=Unknown amino acid

SEQ ID NO: 5732 - DNA, 541 bp, Rattus norvegicus; identical to SEQ ID NO: 5720
  ref <308>: DATABASE ACCESSION NUMBER: EMBL / AA892318
  ref <309>: DATABASE ENTRY DATE: 1999-01-28

SEQ ID NO: 5733 - protein, 229 aa, Rattus norvegicus; identical to SEQ ID NO: 5721
  ref <308>: DATABASE ACCESSION NUMBER: SWISS-Prot / BAA94743
  ref <309>: DATABASE ENTRY DATE: 2002-10-01

SEQ ID NO: 5734 - DNA, 952 bp, Homo sapiens; identical to SEQ ID NO: 5722
  ref <308>: DATABASE ACCESSION NUMBER: EMBL / AB035384
  ref <309>: DATABASE ENTRY DATE: 2000-04-19

SEQ ID NO: 5735 - protein, 218 aa, Homo sapiens; identical to SEQ ID NO: 5727
  ref <308>: DATABASE ACCESSION NUMBER: Refseq / NP_057722
  ref <309>: DATABASE ENTRY DATE: 2002-09-25

SEQ ID NO: 5736 - DNA, 593 bp, Rattus norvegicus
  ref <308>: DATABASE ACCESSION NUMBER: EMBL / AA892319
  ref <309>: DATABASE ENTRY DATE: 1999-01-28
caggagggttggaaacataaaaacagtacattttccttgcagaaaattactccatttacataaccatttggtacaaacatcatttattaaactgcattttaggcaattcctaacagagtgacaggtgacactttgatttttcacactggagctattatgatttgcacacaaaataccaaagctgttgaagttgccaaatttctcttagtaattaaaaagtacaaaagaaaaaactgactacagacagattaagtaagtcacagagcgagtgaatccagctgttctttctgcaataagcaaacggccttgcctttctagaaagtgcaaacagtctctagcactctatcacagctgcagtcccccagaggccaccctgtaggtagcccccttcctgctgctttctccttttctctttctcaaaccatgagtagcactgagggtgcctcaccacttgaatttccgtgactgagcaaatcctggagtgtaggcatcagttatctgtacttggaaatgcaacactatgccatccacgggatgttgtttgtacttctatttttaaagctacccttactcgcccattttggttctgaaaa

SEQ ID NO: 5737 - DNA, 2213 bp, Homo sapiens
  ref <308>: DATABASE ACCESSION NUMBER: EMBL / AK000396
  ref <309>: DATABASE ENTRY DATE: 2000-02-22
gttggcctactggagccgcgctgccaaccctcccgcccgcccgcgctcctgtccgccgtgtctagcagcggggcccagcatggtcatggcggatggcccgaggcacttgcagcgcgggccggtccgggtggggttctacgacatcgagggcacgctgggcaagggcaacttcgctgtggtgaagctggggcggcaccggatcaccaagacggaggtggcaataaaaataatcgataagtctcagctggatgcagtgaaccttgagaaaatctaccgagaagtacaaataatgaaaatgttagaccaccctcacataatcaaactttatcaggtaatggagaccaaaagtatgttgtaccttgtgacagaatatgccaaaaatggagaaatttttgactatcttgctaatcatggccggttaaatgagtctgaagccaggcgaaaattctggcaaatcctgtctgctgttgattattgtcatggtcggaagattgtgcaccgtgacctcaaagctgaaaatctcctgctggataacaacatgaatatcaaaatagcagatttcggttttggaaatttctttaaaagtggtgaactgctggcaacatggtgtggcagccccccttatgcagccccagaagtctttgaagggcagcagtatgaaggaccacagctggacatctggagtatgggagttgttctttatgtccttgtctgtggagctctgccctttgatggaccgactcttccaattttgaggcagagggttctggaaggaagattccggattccgtatttcatgtcagaagattgcgagcaccttatccgaaggatgttggtcctagacccatccaaacggctaaccatagcccaaatcaaggagcataaatggatgctcatagaagttcctgtccagagacctgttctctatccacaagagcaagaaaatgagccatccatcggggagtttaatgagcaggttctgcgactgatgcacagccttggaatagatcagcagaaagccattgagtctttgcagaacaagagctataaccactttgctgccatttatttcttgttggtggagcgcctgaaatcacatcggagcagtttcccagtggagcagagacttgatggccgccagcgtcggcctagcaccattgctgagcaaacagttgccaaggcacagactgtggggctcccagtgaccatgcattcaccgaacatgaggctgctgcgatctgccctcctcccccaggcatccaacgtggaggccttttcatttccagcatctggctgtcaggcggaagctgcattcatggaagaagagtgtgtggacactccaaaggtcaatggctgtctgcttgaccctgtgcctcctgtcctggtgcggaagggatgccagtcactgcccagcaacatgatggagacctccattgacgaagggctggagacagaaggagaggccgaggaagaccccgctcatgcctttgaggcatttcagtccacacgcagcgggcagagacggcacactctgtcagaagtgaccaatcaactggtcgtgatgcctggggcagggaaaattttctccatgaatgacagcccctcccttgacagtgtggactctgagtatgatatggggtctgttcagagggacctgaactttctggaagacaacccttcccttaaggacatcatgttagccaatcagccttcaccaaaatctctgaaggggaaagaagtggagagaaaggtttgcttcacttcggggactgcagtttgagaaataaaaggggatacagagatatctgcactttgtagaaagggccaagattatttgcttatatctgaagggaggtgggtggttttgctggatgtttggtctgaaagaggtacttttgataaagttaatctaattgtagttatattttctgtgtgcttttttttaattactaagaaaaaaattggtgagttcagtagctttggtattatgagtgcaaatcataatagctccaatgtgaaaaaaaaaatcaaaagtataacttgtcacttaatgttagaaaattgcctaaaatgcagtgtaataaataatctctgtaccaaatagtaatttaaatggggtaattttctgcaaggaaaatgtactgtttttatgtttccaaccctcttgaattaaaataaaaacaacttcttttctaaaaaaaaaaaaaaaaaaa

SEQ ID NO: 5738 - DNA, 618 bp, Rattus norvegicus
  ref <308>: DATABASE ACCESSION NUMBER: EMBL / AA892325
  ref <309>: DATABASE ENTRY DATE: 1999-01-28
aaaaaaataaaatggattgacagttaccacattatctgcatgctagcgagatttcccaagcccgtgagaaacaccatttcttgatcgataataaaatcacttcctcaacaatgtacagacaggaaacctttccatccaagtttaaggtctttatccctgctctcacctcacaagctagtaggatgtatgtgccacaagctgagctccttacagaagaacgtctgagaagacaataaacaaggtgttactaaaagatgatgatttgttaaaatcataaagcaaccatcttttggcctgcaaaaattttacattagattcaccatcactggggatgtgctctcctgatagtgatattctgaataatcacaaacacacggtattttccctgcatgctttctggagccaaaccctgtttgacatcacattcagtttacaggatgtgacctgaaattcccgttctaaacaggacagttagggagtgttaccagtgacaaagaatgaaagttatatgacattgattattagaaattatatttgttcttatccacccccggtctccttaatatgttcaaatttcttcttgcaggaaacatgagcttagtagaacccagatacatc

SEQ ID NO: 5739 - protein, 338 aa, Rattus norvegicus
  ref <308>: DATABASE ACCESSION NUMBER: SWISS-Prot / BAB25375
  ref <309>: DATABASE ENTRY DATE: 2003-02-01
MAPNTITLIGLAINLVTTLVLIFYCPTVTEEAPYWTYLLCALGLFIYQSLDAIDGKQARRTNSCSPLGELFDHGCDSLSTVFMAIGASIAVRLGTHPDGLFFCSFVGMFMFYCAHWQTYVSGVLRFGRVDVTEIQVALVIVFMLSTFGGATMWDYTIPILEIKLKIVPVLGVVGGLIFSCSNYFHVILHGGVGKNGSTIAGTSVLSPGLHIGLIIILAIMIYKKSATNMFEKHPCLYTLMFGCVFAKVAQKLVIAHMTKSELYLQDTVFIGPGLLFLDQYFNNFIDEYVVLWIAMVISSFDMMIYFTSLCLQISRHLHLNIFKTSCQQAPEQVYKHID

SEQ ID NO: 5740 - DNA, 508 bp, Rattus norvegicus
  ref <308>: DATABASE ACCESSION NUMBER: EMBL / AA892353
  ref <309>: DATABASE ENTRY DATE: 2000-03-03
gaagggaggtgttggcatttatttctggagcagggcctcagcactggacacaattatgcatgaagtcaacacacagacttgtatagtaagtaggatagtctcggaggtggctgacatgcgcagatgtcacgaagtccactccgcgcactgagacctggtgagccaggcgttcctccaccatccgttccacatccctggctgagaccaccttatcagctctagagtagaggtagagctcgggccagcaggagcctgaatcctgcagcctgtcgtagaagtgggtgtggaagagggccgtgaatggagcaaacaggaagtggaacaggaccaccaccagcgcaaatgctgccaggagcaacaggcgaagcacggcaggtctgcgctccaggatggttgccagggccctcagggcccctatcaggtcgctatccccagggccactgtcaaagatggtgcccaccacatgcaaatggcggaagcgctgatgggtctgaatgagctccagcac

SEQ ID NO: 5741 - protein, 261 aa, Rattus norvegicus
  ref <308>: DATABASE ACCESSION NUMBER: SWISS-Prot / BAB24300
  ref <309>: DATABASE ENTRY DATE: 2001-06-01
MNPDGKNRQGGKEAGKQQPVVILLGWGGCRDKNLAKYSAIYHKRGCIVIRYTAPWHMVFFSESLGIPSLRVIAQKLLELLFDYEIEREPLLFHVFSNAGVMLYRYVLELLQTHQRFRHLHVVGTIFDSGPGDSNLIGALRALATILERRPAVLRLLLLAAFALVVILFHFLLAPFTALFHTHFYDRLQDSGSCWPELYLYSRADKVVSARDVERMVEARLAHQVMVRGVDFVSSAHVSHLRDYPTYYTSLCVDFMHNCVQC

SEQ ID NO: 5742 - DNA, 508 bp, Rattus norvegicus; identical to SEQ ID NO: 5740
  ref <308>: DATABASE ACCESSION NUMBER: EMBL / AA892353
  ref <309>: DATABASE ENTRY DATE: 2000-03-03

SEQ ID NO: 5743 - protein, 261 aa, Rattus norvegicus; identical to SEQ ID NO: 5741
  ref <308>: DATABASE ACCESSION NUMBER: SWISS-Prot / BAB24300
  ref <309>: DATABASE ENTRY DATE: 2001-06-01

SEQ ID NO: 5744 - DNA, 622 bp, Rattus norvegicus
  ref <308>: DATABASE ACCESSION NUMBER: EMBL / AA892364
  ref <309>: DATABASE ENTRY DATE: 2000-03-03
gaacattttatttctccaagaaacactcaaaagagtttagtttgtgggaaataacattaaccccagaattgtgtattttcttcccacatatcctgctttgaattaggaaatgatattgtgatccatttcactacaaggaaaatattacaaaatatttacaggaaaatattaaaaataacacaaacacaaaagtcaagatgaaataaactttcttcctccagaattctctaccctagtgctcatggcacatgagtcaaaacaagtaactaagacctcgctgatagaattcccaaaatggagaggggaagaggggaggagacggtggtgtcagggaatggggctagcagcagtgcttcacagcctggtctattacacctgacagtgcacttcgctcttctctctaagtttaacgagagcctcttgttccacaaaccagtcctctgaggagaagcctgcactggcaggacaatctgtcacagcagcccttccatctctttcataaacgcttcatagacatcgtccttagtctgtaccgacacaggaactgaaggcccagatctgggggctgctttggccacaggcacagcagagtcctcctctgaccttctttggggaacggcag

SEQ ID NO: 5745 - protein, 389 aa, Rattus norvegicus
  ref <308>: DATABASE ACCESSION NUMBER: Refseq / NP_068360
  ref <309>: DATABASE ENTRY DATE: 2002-09-19
MYGRKVGFALDLPPRRRDEDMLYSPELAQRGHDDDMSSTSEDDGYPEDMDQDKHDDSTEDSDTDRSDAESDGDEFGHREDSERDNTEEKKSGLSVRFADMPGKSRKKKKNMKELTPLQAMMLRMAGQEIPEEGREVEEFSEEEDADDSDDSEAEKQSQKQHKDDAHSDSTAAASSQQQAPPQSAPASQIQAPPMPGPPPLGPPPAPPLRPPGPPTGLPPGPPPGAPPFLRPPGMPGIRGPLPRLLPPGPPPGRPPGPPPGPPPGLPPGPPPRGPPPRLPPPAPPGIPPPRPGMMRPPLVPPLGPAPPGLFPPAPLPNPGVLSAPPSLIQRPKADDASAATIEKKATATISAKPQITNPKAEVTRFVPTALRVRRENKGATAVPQKKVRG

SEQ ID NO: 5746 - DNA, 2654 bp, Homo sapiens
  ref <308>: DATABASE ACCESSION NUMBER: EMBL / AB029309
  ref <309>: DATABASE ENTRY DATE: 1999-12-18
ggcacgaggagagacccagttgacggcctttacgaagtgaaagaggccgggaatcgccccctacccgcttctcgtagtcctgggagcacagcagaagtgtttttctttttttaatgaacaagtaaaccatacaaattgtcaacatgggacggagatctacatcatccaccaagagtggaaaatttatgaaccccacagaccaagcccgaaaggaagcccggaagagagaattaaagaagaacaaaaaacagcgcatgatggttcgagctgcagttttaaagatgaaggatccaaaacagataatccgagacatggagaaattggatgaaatggagtttaacccagtgcaacagccacaattaaatgagaaagtactgaaagacaagcgtaaaaagctgcgtgaaacctttgaacgtattctacgactctatgaaaaagagaatccagatatttacaaagaattgagaaagctagaagtagaatatgaacagaagagggctcaacttagccaatattttgatgctgtcaagaatgctcagcatgtggaagtggagagtattcctttgccagatatgccacatgctccttccaacattttgatccaggacattccacttcctggtgcccagccaccctctatcctaaagaaaacctcagcctatggacctccaactcgggcagtttctatccttcctcttcttggacatggtgttccacgtttgccccctggcagaaaacctcctggccctccccctggtccacctcctcctcaagtcgtgcagatgtatggccgtaaagtgggttttgccctagatcttccccctcgtaggcgagatgaagacatgttatatagtcctgaacttgcccagcgaggtcatgatgatgatgtttctagcaccagtgaagatgatggctatcctgaggacatggatcaagataagcatgatgacagtactgatgacagtgacaccgacaaatcagatggagaaagtgacggggatgaatttgtgcaccgtgataatggtgagagagacaacaatgaagaaaagaagtcaggtctgagtgtacggtttgcagatatgcctggaaaatcaaggaagaaaaagaagaacatgaaggaactgactcctcttcaagccatgatgcttcgtatggcaggtcaagaaatccctgaggagggacgggaagtagaggaattttcagaggacgatgatgaagatgattctgatgactctgaagcagaaaagcaatcacaaaagcagcataaagaggaatcccattctgatggcacatccactgcttcttcacagcagcaggctccgccgcagtctgttcctccttctcagatacaagcacctcccatgccaggaccaccacctcttggaccaccacctgctccaccattacggcctcctgggccacctacaggccttcctcctggtccacctccaggagctcctccattcctgagaccacctggaatgccaggactccgagggcccttaccccgacttttacctccaggaccaccaccaggccgaccccctggccctcccccaggtccacctccaggtctgcctcctggtccccctcctcgtggacccccaccaaggctacctccccctgcacctccaggtattcctccacctcgtcctggcatgatgcgcccacctttggtgcctccccttggacctgccccccctgggctgttcccaccagctcccttgccaaaccctggggttttaagtgccccacccaacttgattcagcgacccaaggcggatgatacaagtgcagccaccattgagaagaaagccacagcaaccatcagtgccaagccacagatcactaatcccaaggcagagattactcgatttgtgcccactgcactgagagtacgtcgggagaataaaggggctactgctgctccccaaagaaagtcagaggatgattctgctgtgcctcttgccaaagcagcacccaaatctggtccttctgttcctgtctcagtacaaactaaggatgatgtctatgaggctttcatgaaagagatggaagggctactgtgacagcttttgatgccagaaaaggcttctgttcacaacagtggcccatggagaaagaggctcttattaaacttagatgaaagagctgcttccattgtcagggtattttctaatttcagttcaaggaatatcctaaaatttagccttgttcagaatttactgcacataaaaaagggtatttcatccagaatagatcagttattgaagcagtgctgctaacatccattccctttcataccaccattttcaccctgtttcttcccctcctccagttctttggaaatttgtgatcgggggatcttagttgcttatttgttttgactcttgtgtgctgtgggcactggagtagagatttctggagaaaaaaaaacagtttatttcatcttgccttttgtgtttgagttatttttaatattttcctgtaaatattttgtaatattttacttgtaatgaaatggatcacaatgtcatttcctaatacaaggcaggatatgtgggaagaatatgtacaattatttgattaaaattatttcccactgacctaaactttcagtgatttgtgggaaaaataaataaatgttctacacc

SEQ ID NO: 5747 - protein, 641 aa, Homo sapiens
  ref <308>: DATABASE ACCESSION NUMBER: Refseq / NP_057396
  ref <309>: DATABASE ENTRY DATE: 2002-08-27
MGRRSTSSTKSGKFMNPTDQARKEARKRELKKNKKQRMMVRAAVLKMKDPKQIIRDMEKLDEMEFNPVQQPQLNEKVLKDKRKKLRETFERILRLYEKENPDIYKELRKLEVEYEQKRAQLSQYFDAVKNAQHVEVESIPLPDMPHAPSNILIQDIPLPGAQPPSILKKTSAYGPPTRAVSILPLLGHGVPRLPPGRKPPGPPPGPPPPQVVQMYGRKVGFALDLPPRRRDEDMLYSPELAQRGHDDDVSSTSEDDGYPEDMDQDKHDDSTDDSDTDKSDGESDGDEFVHRDNGERDNNEEKKSGLSVRFADMPGKSRKKKKNMKELTPLQAMMLRMAGQEIPEEGREVEEFSEDDDEDDSDDSEAEKQSQKQHKEESHSDGTSTASSQQQAPPQSVPPSQIQAPPMPGPPPLGPPPAPPLRPPGPPTGLPPGPPPGAPPFLRPPGMPGLRGPLPRLLPPGPPPGRPPGPPPGPPPGLPPGPPPRGPPPRLPPPAPPGIPPPRPGMMRPPLVPPLGPAPPGLFPPAPLPNPGVLSAPPNLIQRPKADDTSAATIEKKATATISAKPQITNPKAEITRFVPTALRVRRENKGATAAPQRKSEDDSAVPLAKAAPKSGPSVPVSVQTKDDVYEAFMKEMEGLL

SEQ ID NO: 5748 - DNA, 719 bp, Rattus norvegicus
  misc_feature (1)..(719): n=a, c, g or t
  ref <308>: DATABASE ACCESSION NUMBER: EMBL / AA892373
  ref <309>: DATABASE ENTRY DATE: 2000-03-03
atacatttaataggataatatcacataaaataataagataggcacaaactaagaaggaaagagtcaggataaagtgtcattgccatttttgtttgcaggatagagtcagaaaatggaacaaactgagatgactagggaaacattctaaacccaccccaacctagctaaagttacataatgttaggactcaagtgccaaattagatattacccacttaatctacgagtgaaaaagagactccaaaatttatcctatttagtataacaacttttacatgaaatatatagcaatttgtatctcagaaagcaatacggcaactcttaggcgtttcctttatgcagtgactagaaaatcttggtacagctaggcagctctgcgacaccagtaagctgctcagggctagcatagaacagcttgatagagagctaacctctcaggtttcagaaggcagcaataattctattttggcttttattctaaatgcttactgtagttaaggcgacaactgaagcacattaagtgaaggtagttagaatttagtgacaatcattagtctcttgccacctacacagaactgtataatgcttttgtggaatggaagtgttgattaactggaattttacacactcacacacaaacttaanaagtaacgatcaaaggcaatcatcctacaggtactatgctgatgtactacaatccacatatgccacagaactgaa

SEQ ID NO: 5749 - protein, 300 aa, Rattus norvegicus
  ref <308>: DATABASE ACCESSION NUMBER: SWISS-Prot / Q9JI92
  ref <309>: DATABASE ENTRY DATE: 2002-06-15
MSLYPSLEDLKVDKVIQAQTASSANPASQAFFLNVVDSAAFPPGGNLYPKLYPELSQYMGLSLSEAEICENMPVVSGAPTQGQLVARPSSVNYMVAPVTGNDAGIRRAEIKQGIREVILCKDQDGKIGLRLKSVDNGIFVQLVQANSPASLVGLRFGDQVLQINGENCAGWSSDKAHKVLKQAFGEKITMTIRDRPFERTVTMHKDSSGHVGFIFKSGKITSIVKDSSAARNGLLTDHHICEINGQNVIGLKDAQIADILSTAGTVVTITIMPAFIFEHIIKRMAPSIMKSLMDHTIPEV

SEQ ID NO: 5750 - DNA, 1971 bp, Homo sapiens
  ref <308>: DATABASE ACCESSION NUMBER: EMBL / U83463
  ref <309>: DATABASE ENTRY DATE: 1997-04-03
gtgggctagaagaatcctgcaaaaatgtctctctatccatctctcgaagacttgaaggtagacaaagtaattcaggctcaaactgctttttctgcaaaccctgccaatccagcaattttgtcagaagcttctgctcctatccctcacgatggaaatctctatcccagactgtatccagagctctctcaatacatggggctgagtttaagtgaagaagaaatacgtgcaaatgtggccgtggtttctggtgcaccacttcaggggcagttggtagcaagaccttccagtataaactatatggtggctcctgtaactggtaatgatgttggaattcgtagagcagaaattaagcaagggattcgtgaagtcattttgtgtaaggatcaagatggaaaaattggactcaggcttaaatcaatagataatggtatatttgtccagctagtccaggctaattctccagcctcattggttggtctgagatttggggaccaagtacttcagatcaatggtgaaaactgtgcaggatggagctctgataaagcgcacaaggtgctcaaacaggcttttggagagaagattaccatgaccattcgtgacaggccctttgaacggacgattaccatgcataaggatagcactggacatgttggttttatctttaaaaatggaaaaataacatccatagtgaaagatagctctgcagccagaaatggtcttctcacggaacataacatctgtgaaatcaatggacagaatgtcattggattgaaggactctcaaattgcagacatactgtcaacatctgggactgtagttactattacaatcatgcctgcttttatctttgaacatattattaagcggatggcaccaagcattatgaaaagcctaatggaccacaccattcctgaggtttaaaattcacggcaccatggaaatgtagctgaacgtctccagtttccttctttggcaacttctgtattatgcacgtgaagccttcccggagccagcgagcatatgctgcatgaggacctttctatcttacattatggctgggaatcttactctttcatctgataccttgttcagatttcaaaatagttgtagccttatcctggttttacagatgtgaaactttcaagagatttactgactttcctagaatagtttctctactggaaacctgatgcttttataagccattgtgattaggatgactgttacaggcttagctttgtgtgaaaaccagtcacctttctcctaggtaatgagtagtgctgttcatattactttagttctatagcatacttgcatctttaacatgctatcatagtacatttagaatgattgcctttgattttttttttaaattctgtgtgtgtgtgtgtaaaatgccaattaagaacactggtttcattccatgtaagcattaaacagtgtatgtaggtttcaagagattgtgatgattcttaaattttaactaccttcacttaatatgcttgaactgtcgccttaactatgttaagcatctagactaaaagccaaaatataattattgctgcctttctaaaaacccaaaatgtagttctctattaacctgaaatgtacactagcccagaacagtttaatggtacttactgagctatagcatagctgcttagttgtttttgagattttttagtcaacacataatggaaacttctttcttctaaaagttgccagtgccacttttaagaagtgaatcactatatgtgatgtaaaagttattacactaaacaggataaacttttgactccccttttgttcatttgtggattaagtggtataatacttaattttggcatttgactcttaagattatgtaacctagctactttgggatggtcttagaatatttttctgataacttgttccttttcctgactcctccttgcaaacaaaatgatagttgacactttatcctgattt

SEQ ID NO: 5751 - protein, 298 aa, Homo sapiens
  ref <308>: DATABASE ACCESSION NUMBER: SWISS-Prot / O00560
  ref <309>: DATABASE ENTRY DATE: 2002-06-15
MSLYPSLEDLKVDKVIQAQTAFSANPANPAILSEASAPIPHDGNLYPRLYPELSQYMGLSLNEEEIRANVAVVSGAPLQGQLVARPSSINYMVAPVTGNDVGIRRAEIKQGIREVILCKDQDGKIGLRLKSIDNGIFVQLVQANSPASLVGLRFGDQVLQINGENCAGWSSDKAHKVLKQAFGEKITMTIRDRPFERTITMHKDSTGHVGFIFKNGKITSIVKDSSAARNGLLTEHNICEINGQNVIGLKDSQIADILSTSGTVVTITIMPAFIFEHIIKRMAPSIMKSLMDHTIPEV

SEQ ID NO: 5752 - DNA, 624 bp, Rattus norvegicus
  misc_feature (1)..(624): n=a, c, g or t
  ref <308>: DATABASE ACCESSION NUMBER: EMBL / AA892376
  ref <309>: DATABASE ENTRY DATE: 2000-03-03
gttttccttttggtttaatcaaagactggtgaataaacataaataccgcacaatgaccagatcattcttcatactgtgcacacacagaccaatgaacagtaatcgcaaagaaacttgcagtcagcagtgaaatgcactcagcttttctttcccttgtttaaaaaaaaaaggaaccgaaagccacaaatttagaatctcgtcagcacatattctgctgtgacaaatgattcaaacataaatagtggatgtaaagaaactatatgctaacatatgtataacctttgttaatgaaaaaccaaacaaacagaagcagccgtaatgattaagatacattcagttactgataactagttgtacccagaagggccttatcaaaagggaatcgtgctgcagagaaaagctatatatacatacacaatgagaaataaactgcaagatcaacgcatgcatgtttaatactggaaaaaaatcacagccctccagaatttctccacatttgttataaaagccctctgcactcaactaaaattaaaatgatcttaaaagtataatacttcttttcagccacagaaactgcaatggaaataaatgttcagagtcattttcaaaacanaaacaaaaatc

SEQ ID NO: 5753 - protein, 223 aa, Rattus norvegicus
  ref <308>: DATABASE ACCESSION NUMBER: Refseq / NP_075361
  ref <309>: DATABASE ENTRY DATE: 2002-01-08
MAQETNHSQAPMLCSTGCGFYGNPRTNGMCSVCYKEHLQRQNSSNGRISPPAASVSSLSESLPVQCADGSVPDAQSALDSTSSSMQPGPVSNQSLLSESVAPSQVDSTSVDKAVSETEDLQGPRAEGLVPLECDPPSSVSDTTQQPSEEQSKSLEKPKQKKNRCFMCRKKVGLTGFECRCGNVYCGVHRYSDVHNCSYNYKADAAEKIRKENPVVVGEKIQKI

SEQ ID NO: 5754 - DNA, 1613 bp, Homo sapiens
  ref <308>: DATABASE ACCESSION NUMBER: EMBL / AF061739
  ref <309>: DATABASE ENTRY DATE: 1999-03-12
cggcacgagcgcggtcgcgtcataggccgaacaaccaaacagaaaagtttaataaacagcggacggaggggccggcggtggcggacggaggcaagcaggggttcggcggcattacctgtacccattcaccggcggctaccggcggcggcgcgcagcgtgtcaggcggagagacccgccgccagatcaaaagacactgacttagctgcttaccagaaggggaacttgggtgtgcaactgaggaacatggctcaagaaactaatcacagccaagtgcctatgctttgttccactggctgtggattttatggaaaccctcgtacaaatggcatgtgttcagtatgctataaagaacatcttcaaagacagaatagtagtaatggtagaataagcccacctgttcaatgcacagatggcagtgtgccagaagcccagtcagcattagactctacatcttcatctatgcagcccagccctgtatcaaatcagtcacttttatcagaatctgtagcatcttctcaattggacagtacatctgtggacaaagcagtacctgaaacagaagatgtgcaggcttcagtatcagacacagcacagcagccatctgaagagcaaagcaagtctcttgataaccgaaacaaaaaaagaatcgctgtttcatgtgcaggaagaaagtgggacttactgggtttgaatgccggtgtggaaatgtttactgtggtgtacaccgttactcagatgtacacaattgctcttacaattacaaagccgatgctgctgagaaaatcagaaaagaaaatccagtagttgttggtgaaaagatccaaaagatttgaactcctgctggaatacaaaattcttgagcatctgcaaactaaaaattgacttgaggttttttttttcctagtcattgggaatgtagagcagtgtatcttgcatgtcatcggaagaatagatttttgttttggttttgttttgaaaatgactctgaacatttatttccattgcaatttctgtggctgaggagacttaaactttacaagtattatccttttaagatcattttaattttagttgagtgcagagggcttttataacaaacgtgcagaaattttggagggctgtgatttttccagtattaaacatgcatgcattaatcttgcagtttattttctcattgtgtatgtatatatcgcttttctctgcagcacgatttctcttttgataatgccctttagggcacaactagttatcagtaactgaatgtatcttaatcattatggctgcttctgttttttcattaacaaaggttattcatatgttagcatatagtttctttgcacccactatttatgtctgaatcatttgtcacaagagagtgtgtgcctgatgagattgtaagtttgtgtgtttaaacttttttttgagcgagggaagaaaaagctgtatgcatttcattgctgtctacaggtttctttcagattatgttcatgggtttgtgtgtatacaatatgaagaatgatctgaagtaattgtgctgtatttatgtttattcaccagtctttgattaaataaaaaggaaaaccagaaaaaaaaaaaaaaaaaaaaaaaaaaa

SEQ ID NO: 5755 - protein, 124 aa, Homo sapiens
MQPSPVSNQSLLSESVASSQLDSTSVDKAVPETEDVQASVSDTAQQPSEEQSKSLEKPKQKKNRCFMCRKKVGLTGFECRCGNVYCGVHRYSDVHNCSYNYKADAAEKIRKENPVVVGEKIQKI

SEQ ID NO: 5756 - DNA, 589 bp, Rattus norvegicus
  ref <308>: DATABASE ACCESSION NUMBER: EMBL / AA892378
  ref <309>: DATABASE ENTRY DATE: 2000-03-03
gcgaagccacggcccaactttatttacactcattgcaaagcatgactgagggtaaaggacaggtaccaggggatggggggctgggggtcatggagactgtgcgggtgcacggtagggttgcaggagaaaaggaaggcggtggtgaggatggacagcccctctttcagtgtcccccaggctcccaggcgtccgggggcacagagcaggtgaggctgccttcaggatttggacttggacacagccagtccaatgagtccagccaggcccgccacacccagggccatgccaccaacaatggccatgcctaccagtccatctttcttcatggccttgtcaatcaggcgttccagctccttggcctggctgttctggggctcagtctgtaacagtccccgcacatacttcagagccttttcatattccttgagccggtagttgcccacggccaggtacaagacataatcccgctgctcctctttgctacctttgggcagcagctcctccagcatcacgatgcctctacggatgtcgtcattgtatttgcttcgaaccaggcaccaggcgtattcaaactgcgtgctcttggaca

SEQ ID NO: 5757 - protein, 152 aa, Rattus norvegicus
  ref <308>: DATABASE ACCESSION NUMBER: Refseq / NP_079838
  ref <309>: DATABASE ENTRY DATE: 2002-01-07
MEAVLNELVSVEDLKNFERKFQSEQAAGSVSKSTQFEYAWCLVRSKYNEDIRRGIVLLEELLPKGSKEEQRDYVFYLAVGNYRLKEYEKALKYVRGLLQTEPQNNQAKELERLIDKAMKKDGLVGMAIVGGMALGVAGLAGLIGLAVSKSKS

SEQ ID NO: 5758 - DNA, 735 bp, Homo sapiens
  ref <308>: DATABASE ACCESSION NUMBER: Refseq / NM_016068
  ref <309>: DATABASE ENTRY DATE: 2002-11-07
agtggttctccgcccctgccactgggccatggagactgtggcacagtagactgtagtgtgaggctcgcgggggcagtggccatggaggccgtgctgaacgagctggtgtctgtggaggacctgctgaagtttgaaaagaaatttcagtctgagaaggcagcaggctcggtgtccaagagcacgcagtttgagtacgcctggtgcctggtgcggacaaggtacaatgatgacatccgtaaaggcatcgtgctgctcgaggagctgctgcccaaagggagcaaggaggaacagcgggattacgtcttctacctggccgtggggaactaccggctcaaggaatacgagaaggccttaaagtacgtccgcgggttgctgcagacagagccccagaacaaccaggccaaggaactggagcggctcattgacaaggccatgaagaaagatggactcgtgggcatggccatcgtgggaggcatggccctgggtgtggcgggactggccggactcatcggacttgctgtgtccaagtccaaatcctgaaggagacgcgggagcccacggagaacgctccaggagggcctgtccatcctcgctgtcctttccctgttctccccctgccccccgtctctatcctctgtggccttcagctaatttctgctcccctgagattcgtccttcagccccatcatgtgctttgggatgagtgtaaataaaacggggctgtggcttgggaaa

SEQ ID NO: 5759 - protein, 152 aa, Homo sapiens
  ref <308>: DATABASE ACCESSION NUMBER: SWISS-Prot / AAD34130
  ref <309>: DATABASE ENTRY DATE: 2001-12-01
MEAVLNELVSVEDLLKFEKKFQSEKAAGSVSKSTQFEYAWCLVRTRYNDDIRKGIVLLEELLPKGSKEEQRDYVFYLAVGNYRLKEYEKALKYVRGLLQTEPQNNQAKELERLIDKAMKKDGLVGMAIVGGMALGVAGLAGLIGLAVSKSKS

SEQ ID NO: 5760 - DNA, 589 bp, Rattus norvegicus; identical to SEQ ID NO: 5756
  ref <308>: DATABASE ACCESSION NUMBER: EMBL / AA892378
  ref <309>: DATABASE ENTRY DATE: 2000-03-03

SEQ ID NO: 5761 - DNA, 735 bp, Homo sapiens; identical to SEQ ID NO: 5758
  ref <308>: DATABASE ACCESSION NUMBER: Refseq / NM_016068
  ref <309>: DATABASE ENTRY DATE: 2002-11-07

SEQ ID NO: 5762 - DNA, 589 bp, Rattus norvegicus; identical to SEQ ID NO: 5756
  ref <308>: DATABASE ACCESSION NUMBER: EMBL / AA892378
  ref <309>: DATABASE ENTRY DATE: 2000-03-03

SEQ ID NO: 5763 - protein, 152 aa, Rattus norvegicus; identical to SEQ ID NO: 5757
  ref <308>: DATABASE ACCESSION NUMBER: Refseq / NP_079838
  ref <309>: DATABASE ENTRY DATE: 2002-01-07

SEQ ID NO: 5764 - DNA, 735 bp, Homo sapiens; identical to SEQ ID NO: 5758
  ref <308>: DATABASE ACCESSION NUMBER: Refseq / NM_016068
  ref <309>: DATABASE ENTRY DATE: 2002-11-07

SEQ ID NO: 5765 - protein, 152 aa, Homo sapiens; identical to SEQ ID NO: 5759
  ref <308>: DATABASE ACCESSION NUMBER: SWISS-Prot / AAD34130
  ref <309>: DATABASE ENTRY DATE: 2001-12-01

SEQ ID NO: 5766 - DNA, 589 bp, Rattus norvegicus; identical to SEQ ID NO: 5756
  ref <308>: DATABASE ACCESSION NUMBER: EMBL / AA892378
  ref <309>: DATABASE ENTRY DATE: 2000-03-03

SEQ ID NO: 5767 - DNA, 735 bp, Homo sapiens; identical to SEQ ID NO: 5758
  ref <308>: DATABASE ACCESSION NUMBER: Refseq / NM_016068
  ref <309>: DATABASE ENTRY DATE: 2002-11-07

SEQ ID NO: 5768 - DNA, 649 bp, Rattus norvegicus
  ref <308>: DATABASE ACCESSION NUMBER: EMBL / AA892388
  ref <309>: DATABASE ENTRY DATE: 2000-03-03
agataaacaagaagtttaataataaaaatgagaaaaaaaacaacacagtgagctggcaagaggctggcagacacagtctgacatgagacagcctgactccttatggattcttgtaaagtcacaggattggtccctcactctagagagtctttactctgatagggtaggcttgtcttcctggtatggctgctacaccagttggttctgtactctgtcaccttgtgaggaaagctgcctaaatctgacctttaacctgtggtaaaaacaacaacaacaacaacaaccacgatattccttgagatccatttcctcagtccacacccattcccagcttctgaggttagcagacagatgaaagccagttttctggagaactaagagcttgaggaatgctggaggctccccaccaggagatagccacaactcccagggtctcctgaaagttctgagtcctgcagactcctctctcttgcaaagtgctcaggaacacaaaatgtctggatcctggtgacaagcaggtgccggatcagttaggaggtactgctcctcctccgggggtgaagggctttcctcctggcaatgttctcctccgtgtcactctcgcagttcctcaggtcctcacttgtcctcaagtgcaccttcttcatca

SEQ ID NO: 5769 - protein, 126 aa, Rattus norvegicus; identical to SEQ ID NO: 4776
  ref <308>: DATABASE ACCESSION NUMBER: SWISS-Prot / P27274
  ref <309>: DATABASE ENTRY DATE: 2000-05-30

SEQ ID NO: 5770 - DNA, 1742 bp, Homo sapiens; identical to SEQ ID NO: 4777
  ref <308>: DATABASE ACCESSION NUMBER: EMBL / AF052941
  ref <309>: DATABASE ENTRY DATE: 2000-01-21

SEQ ID NO: 5771 - protein, 370 aa, Homo sapiens
  ref <308>: DATABASE ACCESSION NUMBER: Refseq / NP_055141
  ref <309>: DATABASE ENTRY DATE: 2002-02-10
MFQASMRSPNMEPFKQQKVEDFYDIGEELGSGQFAIVKKCREKSTGLEYAAKFIKKRQSRASRRGVSREEIEREVSILRQVLHHNVITLHDVYENRTDVVLILELVSGGELFDFLAQKESLSEEEATSFIKQILDGVNYLHTKKIAHFDLKPENIMLLDKNIPIPHIKLIDFGLAHEIEDGVEFKNIFGTPEFVAPEIVNYEPLGLEADMWSIGVITYILLSGASPFLGDTKQETLANITAVSYDFDEEFFSQTSELAKDFIRKLLVKETRKRLTIQEALRHPWITPVDNQQAMVRRESVVNLENFRKQYVRRRWKLSFSIVSLCNHLTRSLMKKVHLRPDEDLRNCESDTEEDIARRKALHPRRRSSTS

SEQ ID NO: 5772 - DNA, 609 bp, Rattus norvegicus
  ref <308>: DATABASE ACCESSION NUMBER: EMBL / AA892394
  ref <309>: DATABASE ENTRY DATE: 2000-03-03
caaacagtttaatagcaaataaacaaaggaaggtaccacacttggcagatacaaaatgactttttgtccgtgtgtctgtgcaattaaaacagatttaggttccccattgggacaaaagggaaaacacacaaaaagggagagtccttttaaacacacactcccttgctccaaacttttaacaacttttccttttttaatccactacacaaactgtgattaggtaagaaaagcgacaagggctcttcttgccctttttttttttttaaaaaccattaaagcaaaatccataattttctacagagtacaacacaagttcacacacaaaagacatcttttataaatcaaacaggaaaaaaggaaagctcaaacaaggtcaagaagaaagcatctctacggctgaatcacgactttgagttgattgaatcccgttgctgctgcagaacagactgtgcgtttggtcatagtggcaattttttctcttcacattgtgaaatcactttacattgttttctagtagaaaaggcaaaaaactgtacaaaacccctagtgttaaatacaacgtttgtaccaataaaaaactcacacaggtttgtctccaaaatgtaaagt

SEQ ID NO: 5773 - DNA, 1884 bp, Homo sapiens
  ref <308>: DATABASE ACCESSION NUMBER: EMBL / AK057016
  ref <309>: DATABASE ENTRY DATE: 2002-08-06
tcttctgagttctcaactgcggagagcacctgaaccccctttcctttttgaccgcaggctgcactttgggccccagccagccctttttctttttctttttcttttgtggttcttccctggagcgactctggggagtcctggatatcccgcctgccccttcccctcagccgcatgcttgttccaacagtctccacagcaaaatgtgatgctttgatttttttgttgttgtttttgtttttgtattgtttttgtgtttttgttttgaattttttcctttcctactaagattatgcccagaaaaaagttttgcatgtttcctgctgtttctttacaccttcgtatatatcaccttcacctctctgttttctatagtttgtgcaaaaactgatcgatttaaaagggtttcaaagaagctgttttaaattgttgtagggttgattatttttttcaagattgtattgtttaattttgaagtggcaactttctcctctattgcccttagagcgtttgcctgtgcacttagactgtcacttcgtgtggcctccaggtcttaccggggcttccgggaggctggctgctttgctcagagagggtgggaagggggcctggagagacacgagaagcagaggtagagcctagaaggtggcagcaggtgggtaagaggcttatttagcacattaggggcagtgagcacctggaggaaggagggcgctcccaatcacccgtaggaggccatctgcacaccaagcggcaattcacctgctggcgcttttcctaggtgacaagcacaatactacagtcttcacactgtttacagccctgggcaccagccacccggcactggctcttcatcacagctctgctcttgcttagctagtggggtgggggaaagggcagggatttgtttttttaattgggtggagagccaaacagctactgtccctgggtgccaagcaagccagttttttggttccctgagggaaactgaccctcctctcttgtggcaccatccagcctcagggtcttggagacttgagtaagaatgtgagtggagggggagaggtgaggagaggagcacagggtggatctgtggagggaagaggttacagggggaggagctgatgatagatcccacccagacttaagctgctggtgggtgggtgagctgggaagtaggactgtccagggaagggtggagagatgtagctaggggctggggagggggaggtggaagcgctattgagcatcctccacaccaaggttgatgaaggaagggatcccagcagggtttctgctctggggctggcaggttgcctggtattatgcccaaggccgctctgcctgggggaaagggcagccaggcagaggcccagtgtctggtaggctgctgaatttcctggaaggggtgattggatggaaagaggccagaaaccccagcctgagagactgctgtgcaccccacagtctgactgcacagagccgcctctgttggcaggaggcactgaggctccccttcctgtgtattgagaagcagtgtttgccaatatattttgctttcaattccaagaggagctctgggaaaacctgtggataaaaccatgccaatgttggacgttgtttccttttccttttctctctctgattgttttaattgttctgtggtggttttaatggatttgagaccctggagcggcagctgcctttctgatttccagctgctttttgtgaataatttaaaaagaaaaaaaaaaaagaaactttacattttggagacaaacctgtgtgagttttttattggtacaaacgttgtatttaacactaggggttttgtacagttttttgccttttctactagaaaacaatgtaaagtgatttcacaatgtg

SEQ ID NO: 5774 - DNA, 609 bp, Rattus norvegicus; identical to SEQ ID NO: 5772
  ref <308>: DATABASE ACCESSION NUMBER: EMBL / AA892394
  ref <309>: DATABASE ENTRY DATE: 2000-03-03

SEQ ID NO: 5775 - DNA, 1884 bp, Homo sapiens; identical to SEQ ID NO: 5773
  ref <308>: DATABASE ACCESSION NUMBER: EMBL / AK057016
  ref <309>: DATABASE ENTRY DATE: 2002-08-06

SEQ ID NO: 5776 - DNA, 393 bp, Rattus norvegicus
  ref <308>: DATABASE ACCESSION NUMBER: EMBL / AA892400
  ref <309>: DATABASE ENTRY DATE: 2000-03-03
aaggatggaaactgtttatttatgggtaaagaatagctgagagaacacttgaatttgatgaagctgtgccactttgcaggtcgggttggtttatcatcaaaaggtccaaaataaaagttacttcacagaaaggaggaggaagcaataagttaatgcataataagcgcttttacaagcatactttataggaaggagattcataattatagccaatatattctagacagtaactttgactatttcacaagaacataaaattactgagtatggaatgggtgcagacacgaccatgacgaagaaggcatatgttgtgtacctgccatgatcacagctcctaagctttgaactacattttgctgtgggacacaagaacataagattttctctaggagt

SEQ ID NO: 5777 - DNA, 393 bp, Rattus norvegicus; identical to SEQ ID NO: 5776
  ref <308>: DATABASE ACCESSION NUMBER: EMBL / AA892400
  ref <309>: DATABASE ENTRY DATE: 2000-03-03

SEQ ID NO: 5778 - DNA, 448 bp, Rattus norvegicus
  ref <308>: DATABASE ACCESSION NUMBER: EMBL / AA892414
  ref <309>: DATABASE ENTRY DATE: 2000-03-03
caataacatctacaaaaaatagttttctctaacaattaggaaacaaatgtgaaaggcaggatggttcacattatagactcaggtagagacttgtacttcatatagatgagaaataccaggtctacaatttgtttaattgactttggattttattacaaaagaaaatacgattgcaattataaatgtcataaaaattgtaactgtattgagaagttacaccaaagtatcaaatattatataaatggacaataaatttaaattttaatttaagcttaacatagtaaacactggaagacaccttacccctacaatgccaaatatcttaaaggaatacaagaaaagctacagtacagaaacaatgaatgtgcaaaaaatatgattagagaccacagagctggggtttacactctaactacatacagttaaaaatttaaaataatctttacat

SEQ ID NO: 5779 - protein, 1241 aa, Rattus norvegicus
  ref <308>: DATABASE ACCESSION NUMBER: SWISS-Prot / AAF14345
  ref <309>: DATABASE ENTRY DATE: 2003-02-01
MEADGAGEQMRPLLTRGPDEEAVVDLGKTSSTVNTKFEKEELESHRAVYVGVHVPFSKESRRRHRHRGHKHHHRRRKDKDSDKEDGRESPSYDTPSQRVQFILGTEDDDEEHIPHDLFTEMDELCYRDGEEYEWKETARWLKFEEDVEDGGDRWSKPYVATLSLHSLFELRSCILNGTVMLDMRASTLDEIADMVLDNMIASGQLDDSIRENVREALLKRHHHQNEKRFTSRIPLVRSFADIGKGLSASRHSLRTGLSASNLSLRGESPLSLLLSHLLPSSRAGTPAGSRCTTPVPTPQNSPPSSPSLSRLTSRSSQQTQPQAPEVLVSPDRDDIPRVVIHPPEEDIEALKGQEQKNEENTDFTPGILASPQSAPGNLDSSKSGEVKGNGSGGSRENSTVDFSKVDMNFMRKIPTGAEASNVLVGEVDFLERPIIAFVRLAPAVLLSGLTEVPVPTRFLFLLLGPAGKAPQYHEIGRSIATLMTDEIFHDVAYKAKDRNDLLSGIDEFLDQVTVLPPGEWDPSIRIEPPKSVPSQEKRKIPAFPNGSAPVSADPPKEADHHAGPELQRTGRLFGGLILDIKRKAPFFLSDFKDALSLQCLASILFLYCACMSPVITFGGLLGEATEGRISAIESLFGASLTGIAYSLFAGQPLTILGSTGPVLVFEKILFKFCRDYHLSYLSLRTSIGLWTSFLCIVLVATDASSLVCYITRFTEEAFAALICIIFIYEALEKLFHLGEIYAFNMHNNLDALTSYTCVCAEPSNPSNETVELWERKNVTAASISWANLTVSECKTFHGMFVGSACGPHGPYVPDVLFWCVVLFFTTFFLSSFLKQFKTKRYFPTKVRSTISDFAVFLTIVIMVAIDYLVGIPSPKLHVPEKFEPTDPSRGWIISPLGDNPWWTLLIAAVPALLCTILIFMDQQITAVIINRKEHKLKKGAGYHLDLLMVAVMLGVCSIMGLPWFVAATVLSISHVNSLKVESECSAPGEQPKFLGIREQRVTGLMIFILMGLSVFMTSVLKFIPMPVLYGVFLYMGVSSLKGIQFFDRIKLFGMPAKHQPDLIYLRYVPLWKVHVFTVVQLTCLVLLWVIKASAAAVVFPMMVLALVFVRKLMDLCFTKRELSWLDDLMPESKKKKEDDKKKKEKEEAERMLQGDGDTVHLPFERGSLLQIPVKTLKYSIDPSVVNISDEMAKTAQWKALSMNTENAKVTRPNMSPEKPVSVTINFEDEPSKKYMDAETSL

SEQ ID NO: 5780 - DNA, 7785 bp, Homo sapiens
  ref <308>: DATABASE ACCESSION NUMBER: EMBL / AF047033
  ref <309>: DATABASE ENTRY DATE: 2000-03-03
ctcactgtccctggaatcttcaagggagttactgcattacatcatcagaaacaaggcatttctatattactatggaaagatttcgtctggagaagaagttacctggtcctgatgaagaagctgttgtggatcttggcaaaactagctcaactgtgaacaccaagtttgaaaaagaagaactagaaagtcatagagctgtatatattggtgttcacgtcccgtttagtaaagagagtcgtcggcgtcataggcatcgcggacacaaacatcaccaccggaggagaaaagataaagaatcagataaagaagatggacgggaatctccttcttatgatacaccatcccagagagttcagtttatccttggtactgaagatgatgatgaagaacatattccccatgatctcttcacggaaatggatgaactgtgttacagagatggagaagaatatgaatggaaagaaactgctagatggctgaaatttgaagaggatgttgaagatggcggtgaccgatggagtaaaccttatgtggcaactctctctttgcacagtctttttgaactaaggagttgcatcctcaatggaacagtcatgctggatatgagagcaagcactctagatgaaatagcagatatggtattagacaacatgatagcttctggccaattagacgagtccatacgagagaatgtcagagaagctcttctgaagagacatcatcatcagaatgagaaaagattcaccagtcggattcctcttgttcgatcttttgcagatataggcaagaaacattctgaccctcacttgcttgaaaggaatggggaaggcctttcagcctcccgccactctttgcgaacaggtctgtctgcctcaaacctttccttgagaggagaatcacctttatctcttcttctcggtcatcttcttccttcttcaagagctggaacccctgcaggctcaaggtgtacaaccccagtacccacccctcaaaacagtcctccttctagccctagcatcagccgcctgacctccagaagttcccaaaagagtcagcgtcaggccccagaactactggtttcacctgccagtgatgatattcccacagtagtaattcatccgcctgaggaagacttagaagcagcgctgaaaggcgaggagcagaagaatgaggaaaatgttgacttaactccaggtattttggcctctccccagtctgctcctggaaacttggacaatagtaaaagtggagaaattaaaggtaatggaagtggtggaagcagagaaaatagtactgttgacttcagcaaggttgatatgaatttcatgagaaaaattcctacgggtgctgaggcatccaacgtcctggtgggcgaagtagactttttggaaaggccaataattgcatttgtgagactggctcctgctgtcctccttacagggttgactgaggtccctgttccaaccaggtttttgtttttgttattgggtccagcgggcaaggcaccacagtaccatgaaattggacgatcaatagccactctcatgacagatgagattttccatgatgtagcttataaagcaaaagacagaaatgacctcttatctggaattgatgaatttttagatcaagtaactgtcctacctccaggagagtgggatccttctatacgcatagaaccaccaaaaagtgtcccttctcaggaaaagagaaagattcctgtgtttcacaatggatctacccccacactgggtgagactcctaaagaggccgctcatcatgctgggcctgagctacagaggactggacggctttttggtggtttgatacttgacatcaaaaggaaagcaccttttttcttgagtgacttcaaggatgcattaagcctgcagtgcctggcctcgattcttttcctatactgtgcctgtatgtctcctgtaatcacttttggagggctgcttggagaagctacagaaggcagaataagtgcaatagagtctctttttggagcatcattaactgggattgcctattcattgtttgctgggcaacctctaacaatattggggagcacaggtccagttctagtgtttgaaaaaattttatataaattctgcagagattatcaactttcttatctgtctttaagaaccagtattggtctgtggacttcttttttgtgcattgttttggttgcaacagatgcaagcagccttgtgtgttatattactcgatttacagaagaggcttttgcagcccttatttgcatcatattcatctacgaggctttggagaagctctttgatttaggagaaacatatgcatttaatatgcacaacaacttagataaactgaccagctactcatgtgtatgtactgaacctccaaatcccagcaatgaaactctagcacaatggaagaaagataatataacagcacacaatatttcctggagaaatcttactgtttctgaatgtaaaaaacttcgtggtgtattcttggggtcagcttgtggtcatcatggaccttatattccagatgtgctcttttggtgtgtcatcttgtttttcacaacattttttctgtcttcattcctcaagcaatttaagaccaagcgttactttcctaccaaggtgcgatcgacaatcagtgattttgctgtatttctcacaatagtaataatggttacaattgactaccttgtaggagttccatctcctaaacttcatgttcctgaaaaatttgagcctactcatccagagagagggtggatcataagcccactgggagataatccttggtggaccttattaatagctgctattcctgctttgctttgtaccattctcatctttatggatcaacaaatcacagctgtaattataaacagaaaggaacacaaattgaagaaaggagctggctatcaccttgatttgctcatggttggcgttatgttgggagtttgctctgtcatgggacttccatggtttgtggctgcaacagtgttgtcaataagtcatgtcaacagcttaaaagttgaatctgaatgttctgctccaggggaacaacccaagtttttgggaattcgtgaacagcgggttacagggctaatgatttttattctaatgggcctctctgtgttcatgacttcagtcctaaagtttattccaatgcctgttctgtatggtgttttcctttatatgggagtttcctcattaaaaggaatccagttatttgaccgtataaaattatttggaatgcctgctaagcatcagcctgatttgatatacctccgttatgtgccgctctggaaggtccatattttcacagtcattcagcttacttgtttggtccttttatgggtgataaaagtttcagctgctgcagtggtttttcccatgatggttcttgcattagtgtttgtgcgcaaactcatggacctgtgtttcacgaagagagaacttagttggcttgatgatcttatgccagaaagtaagaaaaagaaagaagatgacaaaaagaaaaaagagaaagaggaagctgaacggatgcttcaagacgatgatgatactgtgcaccttccatttgaagggggaagtctcttgcaaattccagtcaaggccctaaaatatagtcctgataaacctgtgagtgtgaaaataagttttgaagatgaaccaagaaagaaatacgtggatgctgaaacttcattatagaattgaaccaagaggcattatacatatagatatatacatatgtaatgtgtgcgtatcatgtcactatatataagaatattgtatgtcatgctgtttatgtgtgactaccgggtttttaaaagtagtgtctggagtttgtaatgagcaccgtggagactatgtatttaatgaaatgctctctttgaagtgaggtacatggttcttaactattcaaatatttattctgttagaaaaaaaaaattttctgttttgcaatagaaggatgtggagaaatgctttcagtctacttttcttaaatctctgttcatcagtggcaattcgtaaaaaccttaagtgatactttgtttatatgtttataatttttaggtgtttcctgaaattttcacatattatttcacttttgttagtgctttatgggaagaatagggagtctataccagtgctgtgggaaaaatggtaacatttcagggcttctctatttgtgtttcatttctgtagatgtccatcgtgtttcactaactggcgttttcttagccatagagatgactgtagaacaatagaaactttaataatgatagtttttaacttttatgtttaaattttttttaaatcttaaaaccttcatatctaggtatccattgtgacagacaagtaaaattgcaggtgatttgataattaagcacccataccatttataacttctgaatttaaaaagttatacaatgccagtttgcaatagttgattttgatgcctttgtagaatattttttctgaatccttatgctcttttaaagccaatgattcccactctgttctctgccttgtctctctttgtcttaaaatgctttagtttccatcaggttcaagttcttgactattattctcttataagtagtaggcgtaaataatcaggagttagaattctctcagaagggtctatgatcagtattactttattaagaattacctttcattttctctttatgttattctttcacttttgtagattacatttaatagcttgttacctgtgattttattttaaaatatttattttgatatgatgcttaaatattatataaacatttggaaaagtaacaaatagagtaaattgttaatgtaaatagttggtgcttactttcatttatgtttattatcttaaagcaattgatagattttacatctttgatataaagcactgccatatttatattttaaaaggaaattagacattttatatgtagctcagattaatgacatttttattttgtgtattagtttttgcttttctgagctttttaaagtctaacaaatctttttagtcatcttttatatacttttagttccacatgaaataaatgttgttaagcctgtaggactggatgaatggggttgtgaaactgatttgacaagagaataatttacaaaaatcaaatgagtattgagaagccacagaaatatcaaaaatggtgacatcactattaggatgaaaattttatgaaattccaatgctccctttaaccatataattaaattacaaaggtatacataattaatctaataaaggatcatgaggaatgccaaaagctgaaattttagcaagtctggtgttttaaattcattataaactatttattaactaatgtaatgtcctcctctaagaccatattgtaagagtcttgttaaaatgatggattcaacttctgcctcggatgagaggttggaaatgtagctgcttttctttagaaaatatgtagctgtcatcatttggtactgcctaaaaagagttagactctattggcaattgatagagtattacccacggtgcttattattgtttatgagcttccattgtaatgattcctttttatttgtagcagcataattatttccaaagaccccagtatttgctgctatttttaaaactcccctgatgtacctgaacaagaggatttcctcacatcatttccttgtgtctggacatcaggggtaacaactgtacttactttacaggaagaaattttaaaactgaaaactacctgggatcatagtgtttctgtgattttatttaattgtgtatagtaattatccagtgccagaaaaaccgtcacttgcaaaatactttgcactcaaaatgtttttacaatgcttctaaatgttactggtttctgctttcttttgactacttgactgacaaaatgatctgactactccatttaagagcaaaggtaactcatgtttaagtaattaactgcttgttttaagtgattatatttcttccactgtttttgaaaaataatcaaagatagcattcattgagagacagtgacagatataatttactacatatattgatttttaaataaagttgccttaaataagtgtatgtaagcagtagtagttgctatgtactgatttacctcaaggtgcaaaataattaaacctgtacatattccatttacaaaataaattcagccctgcactttctttagatgccttgatttccagaatggagcttagtgctactgaataccctggccacagagccacctcaggatattcttttctccaccctagtttatttatttatagatatctgtttacaaagtctgtagtaaatcctgatgctgaccatctgaaatgtactttttttctgaatgctgtttcaatctaaaatagcagcttttgagaaaacaatgatgtaaattccttatgataaaaggatgattctatatattctttaatgatattaaatatgccgaagccaagcacacagtctttctaaagtgtgtgtatgtttgtgtgaatgtgaatgatactgatcttatatctgttaaaagttgttttaaaaagctgtggcatcccattgttcatatttgccaagtcttctgtaaagatgtctaggacgaaatattttatgtgctaatgcatgtatttgtaaaccagatttgtttaccactcaaaattaacttgttttcttcatccaaaaaagtttatgtcttccacgtacttaaattttctgtgtgggtataatatagctttctaatttttttctttcacaaaggcaggttcaaaattctgttgaaagaaaaatgctttctgaaactgaggtataacaccagagcttgctgtttaaaggattatatgatgtacatcagttctataaatgtgctcagcagtttaacatgtgaatcctgttttaaagtgctcagatttcaactgtgtaagccattgatataacgctgtaattaaaaatgtttatatgaaataacttaatgttttaaatttatttatgtagatcacatcatttttatcagtatgcagtgcaaatatgtgaaatgtcttttggtttattccaacaattatttattttagaaagtaagtttaaagactttaaggacattcaaagtttaaaatagtgttcaaattgcaaaatttggcaatcttcatataaattggtttcttttctaacttttcaaaaactaacattaaatgtcaattataggaaaacatagttggaaatgtaatcatcccaaagatcatttttaaaatgaaatttaattagcacatattgaacatttgacttaattgttaaaccccagttttgttttgtttttttaatcagatttttgcacactgattagtttttgtgttgtggcttttgttgctttattattcaaggtttttttttttctttccccatgggggagattgtcttccaatgtttaactacgtttaaataaataaaaattgaattttattgttcatttatataaaatctgataccttgatgtaatttcacaatacagttccaatttttatggcttttataattacaatgatattttcttctataataaaatccaaagtaaacatttaaattgtagaactgatatttttcatttatatgaagtataagcctctactgggtctatattgtgaatcatcctgcctttcaaatttgtttcataattgttagatgaaaactatttttttggagatgttactgaagttgattgagcaataaaagtctacttaattaaaaaaaaaaaaaaaaaaaaaaaaaaaa

SEQ ID NO: 5781 - protein, 1214 aa, Homo sapiens
  ref <308>: DATABASE ACCESSION NUMBER: SWISS-Prot / AAD38322
  ref <309>: DATABASE ENTRY DATE: 2003-02-01
MERFRLEKKLPGPDEEAVVDLGKTSSTVNTKFEKEELESHRAVYIGVHVPFSKESRRRHRHRGHKHHHRRRKDKESDKEDGRESPSYDTPSQRVQFILGTEDDDEEHIPHDLFTEMDELCYRDGEEYEWKETARWLKFEEDVEDGGDRWSKPYVATLSLHSLFELRSCILNGTVMLDMRASTLDEIADMVLDNMIASGQLDESIRENVREALLKRHHHQNEKRFTSRIPLVRSFADIGKKHSDPHLLERNGEGLSASRHSLRTGLSASNLSLRGESPLSLLLGHLLPSSRAGTPAGSRCTTPVPTPQNSPPSSPSISRLTSRSSQKSQRQAPELLVSPASDDIPTVVIHPPEEDLEAALKGEEQKNEENVDLTPGILASPQSAPGNLDNSKSGEIKGNGSGGSRENSTVDFSKVDMNFMRKIPTGAEASNVLVGEVDFLERPIIAFVRLAPAVLLTGLTEVPVPTRFLFLLLGPAGKAPQYHEIGRSIATLMTDEIFHDVAYKAKDRNDLLSGIDEFLDQVTVLPPGEWDPSIRIEPPKSVPSQEKRKIPVFHNGSTPTLGETPKEAAHHAGPELQRTGRLFGGLILDIKRKAPFFLSDFKDALSLQCLASILFLYCACMSPVITFGGLLGEATEGRISAIESLFGASLTGIAYSLFAGQPLTILGSTGPVLVFEKILYKFCRDYQLSYLSLRTSIGLWTSFLCIVLVATDASSLVCYITRFTEEAFAALICIIFIYEALEKLFDLGETYAFNMHNNLDKLTSYSCVCTEPPNPSNETLAQWKKDNITAHNISWRNLTVSECKKLRGVFLGSACGHHGPYIPDVLFWCVILFFTTFFLSSFLKQFKTKRYFPTKVRSTISDFAVFLTIVIMVTIDYLVGVPSPKLHVPEKFEPTHPERGWIISPLGDNPWWTLLIAAIPALLCTILIFMDQQITAVIINRKEHKLKKGAGYHLDLLMVGVMLGVCSVMGLPWFVAATVLSISHVNSLKVESECSAPGEQPKFLGIREQRVTGLMIFILMGLSVFMTSVLKFIPMPVLYGVFLYMGVSSLKGIQLFDRIKLFGMPAKHQPDLIYLRYVPLWKVHIFTVIQLTCLVLLWVIKVSAAAVVFPMMVLALVFVRKLMDLCFTKRELSWLDDLMPESKKKKEDDKKKKEKEEAERMLQDDDDTVHLPFEGGSLLQIPVKALKYSPDKPVSVKISFEDEPRKKYVDAETSL

SEQ ID NO: 5782 - DNA, 482 bp, Rattus norvegicus
  misc_feature (1)..(482): n=a, c, g or t
  ref <308>: DATABASE ACCESSION NUMBER: EMBL / AA892417
  ref <309>: DATABASE ENTRY DATE: 2000-03-03
ccattaaaaaaccaaaaacatcactttattatgaatccaagaacactgtataaaaaacctccagtcgtagaaatgaacagacagcacgtttatatacagacactgtacatgtgggccctgccctttaagctaaactccacagactatacacatgggcactgcccttacagctatactccaaaaccaggctgctatagtcctcctgctggcacagcttcagggaatgctgccccagggaaggggaggatgcagtcagtgccgggctacaaaactctctggcagcccagcaggtggaaatcttgcagagatgctgggtcagcccaagctgtctctcttgtacctggcttccccgcaggaagctgtctcaagcttttcctttggtcagttcatctgcaaattatggcttccttggggaaggacatttttnacaagttcagtgtccaactgcatggnctcaggctctttcagcgcatctcccagtg

SEQ ID NO: 5783 - protein, 205 aa, Rattus norvegicus
  ref <308>: DATABASE ACCESSION NUMBER: SWISS-Prot / P97553
  ref <309>: DATABASE ENTRY DATE: 1997-11-01
MEFLWAPLLGLCCSLAAVDRHIVFWNSSNPKFREEDYTVHVQLNDYLDIICPHYEDDSVADAAMERYSLYMVEHQEYVTCEPQSKDQVRVKCNQPSAKHGPEKLSEKFQRFTPFTLGKEFKEGHSYYYISKPIYHQETQCLKLKVTVNGKITHSPHAHVNPQEKRLQADDPEVQVLHSIGHSAAPRLFPLVWAVLLLPLLLLQTQ

SEQ ID NO: 5784 - DNA, 1480 bp, Homo sapiens
  ref <308>: DATABASE ACCESSION NUMBER: EMBL / M57730
  ref <309>: DATABASE ENTRY DATE: 2000-03-04
gcggagaaagccagtgggaacccagacccataggagacccgcgtccccgctcggcctggccaggccccgcgctatggagttcctctgggcccctctcttgggtctgtgctgcagtctggccgctgctgatcgccacaccgtcttctggaacagttcaaatcccaagttccggaatgaggactacaccatacatgtgcagctgaatgactacgtggacatcatctgtccgcactatgaagatcactctgtggcagacgctgccatggagcagtacatactgtacctggtggagcatgaggagtaccagctgtgccagccccagtccaaggaccaagtccgctggcagtgcaaccggcccagtgccaagcatggcccggagaagctgtctgagaagttccagcgcttcacacctttcaccctgggcaaggagttcaaagaaggacacagctactactacatctccaaacccatccaccagcatgaagaccgctgcttgaggttgaaggtgactgtcagtggcaaaatcactcacagtcctcaggcccatgtcaatccacaggagaagagacttgcagcagatgacccagaggtgcgggttctacatagcatcggtcacagtgctgccccacgcctcttcccacttgcctggactgtgctgctccttccacttctgctgctgcaaaccccgtgaaggtgtatgccacacctggccttaaagagggacaggctgaagagagggacaggcactccaaacctgtcttggggccactttcagagcccccagccctgggaaccactcccaccacaggcataagctatcacctagcagcctcaaaacgggtcagtattaaggttttcaaccggaaggaggccaaccagcccgacagtgccatccccaccttcacctcggagggacggagaaagaagtggagacagtcctttcccaccattcctgcctttaagccaaagaaacaagctgtgcaggcatggtcccttaaggcacagtgggagctgagctggaaggggccacgtggatgggcaaagcttgtcaaagatgccccctccaggagagagccaggatgcccagatgaactgactgaaggaaaagcaagaaacagtttcttgcttggaagccaggtacaggagaggcagcatgcttgggctgacccagcatctcccagcaagacctcatctgtggagctgccacagagaagtttgtagccaggtactgcattctctcccatcctggggcagcactccccagagctgtgccagcaggggggctgtgccaacctgttcttagagtgtagctgtaagggcagtgcccatgtgtacattctgcctagagtgtagcctaaagggcagggcccacgtgtatagtatctgtatataagttgctgtgtgtctgtcctgatttctacaactggagtttttttatacaatgttctttgtctcaaaataaagcaatgtgttttttcgg

SEQ ID NO: 5785 - protein, 205 aa, Homo sapiens
  ref <308>: DATABASE ACCESSION NUMBER: SWISS-Prot / P20827
  ref <309>: DATABASE ENTRY DATE: 2002-06-15
MEFLWAPLLGLCCSLAAADRHTVFWNSSNPKFRNEDYTIHVQLNDYVDIICPHYEDHSVADAAMEQYILYLVEHEEYQLCQPQSKDQVRWQCNRPSAKHGPEKLSEKFQRFTPFTLGKEFKEGHSYYYISKPIHQHEDRCLRLKVTVSGKITHSPQAHVNPQEKRLAADDPEVRVLHSIGHSAAPRLFPLAWTVLLLPLLLLQTP

SEQ ID NO: 5786 - DNA, 498 bp, Rattus norvegicus
  misc_feature (1)..(498): n=a, c, g or t
  ref <308>: DATABASE ACCESSION NUMBER: EMBL / AA892425
  ref <309>: DATABASE ENTRY DATE: 2000-03-03
gaactctaacaatgtgataggtgccacacaaaacattagacacagtatctgcccggtgggcgtacaatctaatctaaggacacagatcattttttgaatgttgccatgagctttctgttcatgagaatgaggtattaagcgcaccgttcagtgcaggaaaggacccacacaatcactgacctttcaggacggtttgcctacataagtacaaccaactgctcatgtttcttattcttgggaattatggatagtgtttttcgttcattttatgatgagcacaacaatctataaggacagaatcactaaacccacaaatctgacaaaaccagggttcaaaactggcctctagtccaaaataaaattgttgtatgttcagaaaatcagctaaagtaggacctagagaaagtgtcaggagccatttttgttcagagtcnccctactgtccanacagtctctctcctcaaagcagctttcaaagtgccctttatctcaagtctt

SEQ ID NO: 5787 - DNA, 333 bp, Homo sapiens
  ref <308>: DATABASE ACCESSION NUMBER: EMBL / AA411025
  ref <309>: DATABASE ENTRY DATE: 2000-03-03
tgttgttgaacgtttattgagctctaacaatgtgacaggtgccacacaaaacattagacacagtacctgcccagtggcgttacaatctaatctaaggacatgaatctttttttttttttaaagacagagtctcactctgtcacccaggctggagtgcagtggcaaatcttggctcactgcaacctccactccccgggttcaagcaattctcctgcctcagcctcccgagcagctgagattacaggcgtctgcaccacgcccggctaattttttgtattttttagtagagatggggtttcactatgttggccaggctcgtcttgaactcctgac

SEQ ID NO: 5788 - DNA, 446 bp, Rattus norvegicus
  ref <308>: DATABASE ACCESSION NUMBER: EMBL / AA892465
  ref <309>: DATABASE ENTRY DATE: 2000-03-03
acataaaagctgtcaaaattctgactcacatcaaaaatgcaaaataatggaatatacttttaaacgtaggcgcaggtctagcagcaaggggactgagagcgcagtgaacgttatggagggctgcacacagacagagccgccacctcaatcctgcagactgaacaggaactgcacattctctgaggagagcgcgagccgggtcacttgaagtaggagtagaagccattgcttcccgggctgctgcccaagctgagctcctggaacagggacagtgggtcgctgcccttcttggcctgctcgggcggaggcctgggcttgggcggggcccgtagcgcactggcataggacatggcgggcttgctccctgccgggctctgctggctgctgctgttggcagactccgcgatctgcttgttgggcatgaggggtgggaactggccgaggtg

SEQ ID NO: 5789 - DNA, 6274 bp, Homo sapiens
  ref <308>: DATABASE ACCESSION NUMBER: EMBL / D29677
  ref <309>: DATABASE ENTRY DATE: 2001-10-10
gaaagtaatgacaggatttggatgaagtaatggatcactaatgaactacagtgctggtgagatgtgtaagaaattataaagagctctgatgggctatttgggtgatacccagtgcagtgaactgcaggatttttgtccctgagtcatggaagacagaagagctgaaaagtcatgtgaacaagcatgtgaatcacttaagaggcaggactatgaaatggccctcaagcactgcacagaggcccttctttctcttggccagtactccatggcagacttcacagggccttgtccattggaaatagaacgcatcacaatcgagagtcttctctacagaattgcctcatttttgcaactgaaaaattatgtgcaagctgatgaagattgtagacatgtgctgggagaaggactggccaagggagaagatgcctttcgggcagtgctttgctgcatgcagctgaaagggaagctccaacctgtatccaccattcttgccaagtcactcacaggagagtccctgaatgggatggtaacaaaggatttgacaagactaaaaacacttctctcagaaacagagacagcaactagtaacgccctctctggatatcacgtggaagacttagatgaggggtcttgtaatggttggcatttccgcccaccacctaggggaatcacaagcagcgaggaatatactttgtgtaaaagatttttagaacaaggaatctgtaggtatggtgcccagtgtacttcagcacattcccaggaagaactagcagaatggcagaaaagatatgcttcacggctgataaaattgaaacagcaaaatgagaataaacagctctcaggcagttacatggaaaccttgatagaaaagtggatgaattcattgtctcctgagaaagtgcttagtgaatgtatagaaggagtaaaggtagagcacaatcctgacctgtcagttactgtcagcaccaaaaaatcccaccagacatggacctttgctctcacttgtaagcctgcaagaatgctgtatcgtgtagcattgctttatgatgctcatcgtcctcattttagtatcattgcaatatctgccggagatagtactacccaggtatcacaagaagtcccagaaaactgtcaagaatggataggaggaaagatggcccaaaatggattagatcattacgtgtataaagtcgggatagcatttaacacagaaatatttggaacttttcgccaaaccatagttttcgactttggattggaaccagtactcatgcaaagagtaatgattgatgcagcttctacagaagatctcgaatacctgatgcatgcaaaacagcagctagtaaccacagctaaacgttgggattcttcctctaagactattatagattttgaacctaatgaaactactgatttggagaagagccttcttatcagataccaaattcccctctctgctgaccagctatttactcagtccgttttagacaaatcattgaccaagagcaactatcagtcacggttacatgaccttctttatattgaggagatagcccagtataaagaaatcagcaagttcaaccttaaagtgcaattgcagattctggcaagcttcatgctcactggtgtttctggaggtgcaaagtatgctcagaatggacaactttttggtcgctttaagcttactgaaacactttctgaagatactttggctggacgactggtgatgaccaaagtcaatgctgtttatttattaccagtccctaaacagaagttagtacagacccagggaaccaaagagaaggtttatgaagctactattgaagaaaaaacaaaggaatatatatttttaaggctatctagggaatgctgtgaagaacttaatcttcggcctgactgtgacacacaggttgaacttcagtttcaattaaatcgattacccctctgtgaaatgcactatgcactagacaggatcaaggacaatggggttttgtttccagacatcagtatgactcccaccataccatggagtcctaacagacaatgggatgaacagttggatcctcgactaaatgcaaaacagaaagaggctgttctggccattaccactccacttgcaatccagctgccgcctgtgcttatcatcggaccctatgggacaggcaaaacgttcactctagctcaggctgtcaaacatattctgcagcaacaggagactaggattctcatttgcacccattctaatagtgctgctgatctctacataaaggattatttacatccatatgtagaagcaggcaatccccaggcaagacctctcagggtatatttcagaaatcgctgggtaaagactgtccacccagttgtgcatcagtactgtttgatctcaagcgcacattccacctttcagatgccccagaaagaagatattcttaaacatcgagtggtggttgttaccttgaatacttcccagtacctctgtcagttggaccttgaacctgggttttttacacacattctattagatgaagctgcccaggccatggagtgtgaaaccattatgcctctagcattagcaactcaaaacactcggattgtcttggctggtgatcacatgcagctcagtccttttgtttacagcgagtttgccagggagagaaaccttcacgtttcattacttgaccgactctatgagcattaccctgctgagttcccatgtaggattctcctgtgtgagaactaccgctcccatgaagctatcatcaattatacctctgagcttttctatgagggcaaactgatggccagtgggaagcagccagcacacaaagatttctacccactaactttctttacagcacgaggagaagatgtacaagaaaaaaatagcacagctttttataataatgcagaggtgtttgaagtggtggaacgtgtagaagagttaagaaggaagtggccagtagcgtgggggaagttagatgatggcagtattggtgtggtgactccatatgctgatcaagtgtttagaatacgtgctgaacttcgaaaaaagagattatctgatgttaatgtagaaagggtgctaaatgttcaaggaaagcaattcagagttttgtttcttagcacagtacgtacaagacatacttgtaaacataaacagacaccaattaaaaagaaagagcaacttctggaagattccacagaggacttagattatggttttttatctaactacaagcttctcaatactgccatcacaagagcacaatccctggttgctgtggtgggtgatcccattgctctgtgctctattggaagatgcaggaaattttgggaacggtttattgccctgtgtcatgaaaacagtagcctacatggaatcacttttgaacagatcaaagcccagttagaggctttagaactaaagaagacatatgtgttgaatccgctggcacctgaatttatcccccgggctctaagactgcagcattcaggaagtaccaacaaacagcagcaatcaccacccaaggggaaaagtcttcatcatacccagaatgatcacttccagaatgatggaattgttcagcccaatccttctgtacttattggcaatcctattagagcatatactcctccaccccctcttggacctcacccaaatttgggaaaatctccaagccctgttcaaagaatagatcctcacactgggacaagtattctttatgtacctgctgtctatggagggaatgtagttatgtcggtgcctttacctgtaccatggacaggataccagggtaggtttgcagttgatcctcgaattattacacatcaggcagcaatggcctataacatgaacctattacagacacatggacgaggatctcctattccttatggccttggacatcacccacctgtcaccataggccagccacaaaatcagcatcaggagaaggatcaacatgagcaaaatcgaaatggtaaaagtgatacaaataattccggacctgaaattaataagattcgaacaccagagaaaaagccaacagaaccaaaacaggttgatttggaatcaaatccacagaacagaagtcctgaatcacgtcctagtgttgtttatcccagtaccaaatttcctcgcaaagataatctcaacccaagacacataaatcttccccttcctgctccccacgcacagtatgcaatccctaatcgccactttcatccccttccccagctaccaagaccaccctttccaattccacagcagcacaccttgttaaatcagcagcagaataatttgcctgaacaaccaaatcagataccacctcagccaaatcaggtagtccagcagcaaagtcagttgaatcagcagcctcagcagccacctcctcagctttctcctgcatatcaggcgggacccaacaatgctttttttaatagtgcagttgctcatcggccacagtctcctcctgcagaagctgtaattccggagcagcagccccctcccatgctgcaagaaggccacagtcctctgagagccattgcacaacccggccccattcttccttcacatctgaatagcttcattgatgagaacccctcgggattacctataggggaggctttagatcgtatacatgggagtgtcgctctggaaacattaaggcagcagcaggcacggttccagcagtggagcgagcatcatgcctttctcagtcagggcagcgttccatacccacaccatcaccatcctcacctccagcatcttcctcagccgcccctgggattacatcagccgccagtgagggcagactggaagctcaccagcagtgccgaagatgaagtggagaccacatactcaaggtttcaagacttaatcagagaactgtctcatcgtgatcaaagtgaaacacgggaactagctgaaatgccaccacctcaatcaagacttttgcaatatagacaagtacagagtagaagcccaccagcagtcccatctcccccatccagtacagaccacagtagccacttttctaactttaatgataacagcagagacattgaagtagccagcaacccagcatttccacagcgcctcccaccccagatattcaactcacctttctcgttgccatctgaacaccttgcccctcctcccttgaaatacctggcacctgatggagcatggacttttgctaacttgcaacagaatcacctaatggggccaggttttccctatggcctacctccattgcctcacaggccaccgcagaacccttttgtacaaatacagaatcatcaacatgctattggtcaagagccatttcacccattgtcatctcgaacagtatcttcttcttcgctccctagcttagaagagtatgagcccagaggacctggtcggcccttgtaccaaagaagaatctcatctagctcagttcaaccttgttctgaagaagtaagcactcctcaagacagtctggctcagtgtaaagagcttcaggaccacagtaaccaatcttctttcaacttttcatccccggagtcctgggtaaacaccacctcatctactccttatcagaacattccgtgcaatggatccagcaggacagctcagcccagagagttgatagcgccacccaagactgtcaaaccccctgaggatcaactgaagtcggagaacctcgaggtgtccagttccttcaactacagtgtgctgcagcatcttggccagtttccaccccttatgcctaacaagcagatcgcggagtcggccaatagcagtagcccccagagctctgcggggggcaagcccgccatgtcctatgccagcgctctgcgggcccctccaaagcccaggccccctcctgagcaggccaagaagagtagcgaccctctgtctctcttccaggaactgagcctagggagctcatctggcagcaatggcttttactcatattttaaataatcacttttttttccctcaagggagaatgttttaatttctgtttgtatcagtagaattaaggtagttggacttcatctatagatgcacagttccctttgttttaatattaaatatgttctcacttaattgctttgctgctagacttgcaactaatttttttaaagtatattccattattttgcatttttgatgtgtcaaaactttgacagcttttatgtagaataaaaaaatttttaaatttgtgtattgttacatatgtttgcatcaagctagcagccaagaggttaattgtgcaactat

SEQ ID NO: 5790 - protein, 1942 aa, Homo sapiens
  ref <308>: DATABASE ACCESSION NUMBER: SWISS-Prot / P42694
  ref <309>: DATABASE ENTRY DATE: 2002-06-15
MEDRRAEKSCEQACESLKRQDYEMALKHCTEALLSLGQYSMADFTGPCPLEIERITIESLLYRIASFLQLKNYVQADEDCRHVLGEGLAKGEDAFRAVLCCMQLKGKLQPVSTILAKSLTGESLNGMVTKDLTRLKTLLSETETATSNALSGYHVEDLDEGSCNGWHFRPPPRGITSSEEYTLCKRFLEQGICRYGAQCTSAHSQEELAEWQKRYASRLIKLKQQNENKQLSGSYMETLIEKWMNSLSPEKVLSECIEGVKVEHNPDLSVTVSTKKSHQTWTFALTCKPARMLYRVALLYDAHRPHFSIIAISAGDSTTQVSQEVPENCQEWIGGKMAQNGLDHYVYKVGIAFNTEIFGTFRQTIVFDFGLEPVLMQRVMIDAASTEDLEYLMHAKQQLVTTAKRWDSSSKTIIDFEPNETTDLEKSLLIRYQIPLSADQLFTQSVLDKSLTKSNYQSRLHDLLYIEEIAQYKEISKFNLKVQLQILASFMLTGVSGGAKYAQNGQLFGRFKLTETLSEDTLAGRLVMTKVNAVYLLPVPKQKLVQTQGTKEKVYEATIEEKTKEYIFLRLSRECCEELNLRPDCDTQVELQFQLNRLPLCEMHYALDRIKDNGVLFPDISMTPTIPWSPNRQWDEQLDPRLNAKQKEAVLAITTPLAIQLPPVLIIGPYGTGKTFTLAQAVKHILQQQETRILICTHSNSAADLYIKDYLHPYVEAGNPQARPLRVYFRNRWVKTVHPVVHQYCLISSAHSTFQMPQKEDILKHRVVVVTLNTSQYLCQLDLEPGFFTHILLDEAAQAMECETIMPLALATQNTRIVLAGDHMQLSPFVYSEFARERNLHVSLLDRLYEHYPAEFPCRILLCENYRSHEAIINYTSELFYEGKLMASGKQPAHKDFYPLTFFTARGEDVQEKNSTAFYNNAEVFEVVERVEELRRKWPVAWGKLDDGSIGVVTPYADQVFRIRAELRKKRLSDVNVERVLNVQGKQFRVLFLSTVRTRHTCKHKQTPIKKKEQLLEDSTEDLDYGFLSNYKLLNTAITRAQSLVAVVGDPIALCSIGRCRKFWERFIALCHENSSLHGITFEQIKAQLEALELKKTYVLNPLAPEFIPRALRLQHSGSTNKQQQSPPKGKSLHHTQNDHFQNDGIVQPNPSVLIGNPIRAYTPPPPLGPHPNLGKSPSPVQRIDPHTGTSILYVPAVYGGNVVMSVPLPVPWTGYQGRFAVDPRIITHQAAMAYNMNLLQTHGRGSPIPYGLGHHPPVTIGQPQNQHQEKDQHEQNRNGKSDTNNSGPEINKIRTPEKKPTEPKQVDLESNPQNRSPESRPSVVYPSTKFPRKDNLNPRHINLPLPAPHAQYAIPNRHFHPLPQLPRPPFPIPQQHTLLNQQQNNLPEQPNQIPPQPNQVVQQQSQLNQQPQQPPPQLSPAYQAGPNNAFFNSAVAHRPQSPPAEAVIPEQQPPPMLQEGHSPLRAIAQPGPILPSHLNSFIDENPSGLPIGEALDRIHGSVALETLRQQQARFQQWSEHHAFLSQGSVPYPHHHHPHLQHLPQPPLGLHQPPVRADWKLTSSAEDEVETTYSRFQDLIRELSHRDQSETRELAEMPPPQSRLLQYRQVQSRSPPAVPSPPSSTDHSSHFSNFNDNSRDIEVASNPAFPQRLPPQIFNSPFSLPSEHLAPPPLKYLAPDGAWTFANLQQNHLMGPGFPYGLPPLPHRPPQNPFVQIQNHQHAIGQEPFHPLSSRTVSSSSLPSLEEYEPRGPGRPLYQRRISSSSVQPCSEEVSTPQDSLAQCKELQDHSNQSSFNFSSPESWVNTTSSTPYQNIPCNGSSRTAQPRELIAPPKTVKPPEDQLKSENLEVSSSFNYSVLQHLGQFPPLMPNKQIAESANSSSPQSSAGGKPAMSYASALRAPPKPRPPPEQAKKSSDPLSLFQELSLGSSSGSNGFYSYFK

SEQ ID NO: 5791 - DNA, 596 bp, Rattus norvegicus
  ref <308>: DATABASE ACCESSION NUMBER: EMBL / AA892496
  ref <309>: DATABASE ENTRY DATE: 2000-03-03
gatagacagagtatttaatacacagaatggttttccttccattacactgtcataaattacaaagtattctcacttcacaaaataaaaccatttccagattattactgacagtatcaagaagtacagaagccacaacaaacacatctgtacagtcgggagggacggtgacagcagagagtaagccgaactgagtcccggatgccacgattcttcctgcagggcctgggggggctgacagacaatcatctctgcagtctctcccaccttagcagggcagttctcttctgggcactctaagaaagtcttgtcagtgcgtaggttgtcttagacaatcaaaggaaagacactgtgactggctttaaaaatctaaatgtacagtttttgctgttttaaatatttcacctatgttacaaaatatagagatcttggtgtggaaatctcatgctaagataaatataaccaacaggtgtgtctctagtaataaaatcatgttaaattatcttcagagcaacctttatgaagggaaaacatttgattaaaaacaaccttatttattcataacttaataataggtttataaaatgaaagtaaggaac

SEQ ID NO: 5792 - DNA, 3004 bp, Homo sapiens
  ref <308>: DATABASE ACCESSION NUMBER: EMBL / AK026415
  ref <309>: DATABASE ENTRY DATE: 2000-09-29
gtgtgtttgagtgtgaaatgtgctaataaggaggagagacctctcctttgcaatgtgctgcggcaggagaaagcaggctgccggcccctgcctccctgaatcctcagtggctgactggataccgcttctgggggttgctgtgcacatgaatgtttgctattgttccaggcgcacgtcggccttaagaaatagcacaaaacaggcccatccttattcagaagccgggccccctccatcactcaaactgggcctttcaggtcacatgccggaggctgctgcagacaggacccagctgcctcaaatctgccgcctaacataagctgcggttcgaaaatcctgacagcacagggcttcctgggctctgcagagcaaactggaaagagctgggatccaggcactatgttctctgaagaactgtggctggaaaatgagaaaaagtgtgctgtggttcggaagtctaagcagggcaggaaacgccaagaactgctggccgtagccttcggggtgaaggtgggtgtcaaaggcggctttctttggccccctctcaaactctttgcctgttcacagatctcctccctggttcgaagggctgccctcacacgcaacgacaaccacttcaattatgagaagacacacaactttaaggtccacacgttccgaggcccacactggtgtgaatattgtgccaatttcatgtgggggctcatcgcccaaggggtccggtgctcagactgtggattgaacgtacacaaacagtgttccaagcacgttcccaatgactgccaacctgatctcaagaggatcaagaaagtgtactgttgtgacctcacaacacttgtgaaggctcacaacactcagagacccatggtggtagacatatgcattcgggaaattgaagcaagaggattaaaatcggaaggcctttacagagtctctgggttcactgaacacattgaagatgtcaaaatggcatttgacagagatggtgaaaaggccgatatatctgccaatgtctatccagacataaacatcatcactggagcccttaaactgtatttcagagacttacccatccctgtcatcacatatgatacctattccaaatttatagatgcagcaaaaatctccaatgcagatgagaggctggaagccgtccatgaagtgctgatgctgctgcctcctgcccactatgaaaccctccggtacctaatgatccacctcaaaaaggttactatgaatgaaaaagacaatttcatgaacgcagaaaatctggggatcgtgtttgggcccactctgatgaggccccctgaggacagcaccctgaccaccctgcatgatatgcggtaccaaaagctgattgtgcagattttaatagaaaacgaagacgttttattctaatccatcagggaaatgagctgaatggccccagcaccatccaagttgacacagctaaaggaataaaaacatttcttaccacttgatttgttttccaagcaagtgctagaatttgctggactgcagaggatcgctgagtggggtactgtgtctcatagacatgcgccacctccacgtgagaacaagggtgaaggtgagggaagcccctcaccttgggtcttttgctgtgcctcctatgtatgtctggtttgctggaagagtgattaatacatctttaatttattaaaaaacaatgtagacctttaaacttcagtcttattggtaataaaagggaacttaattcatacaggtacttgatacagttatacattttccacttacaaaaagaagacaattctgttaaatgaaacctgtatcgtaaaatgtatttttattttacccacgagaatgttgttatttttagcaaatagaactcaatgcagtgcattggttattaccctgtgtaccttgtccctcattttgctgtgacaccctgaaaaagctgaccacaaatgcagtattatcttgacatacctctgtcctcctcagtgctttttaatgaaatttcacctgccccttgtgttcctgctttggatagtttttgctcttaagcattggcattcttctattgtatggtatgtatttatagcaattgtaggatggtctgaaatgtccacacactttctatgcatacaaattttgtgaattcccaaagtatgctttggaattggtcatagtcttttcgtatcatgagtgtgtatcccagaagatacagaatgcggtcattttacctgaaattatttgagaacactggatgtatctggtctgtgtaaaaagttagcacttttaccctcttttcttcctggccaagccctctgaattcatctgttaatatcaaattgtatttttgccacatttctgtattggtgaaaagcgaatctgcagaataactgccaacgtttttcattcttgttttacaaacctattttttaaagtgagaataaggttggtttttaccaaatatttgttcctccttgacaaaagtagctctgtgtggataatatgattttattactacagttccagtcacttggttatatttatcttagcatgagcctttcacaccaagatttctatattttgtaacataggtgaaatatttaaaacatcaaaaactgtaaatctagatttttaaaaaatccaactgcaatgtcttttcctttgattgagatgatttgtgtaaactctccagtcttgctttggagtgagcagaagagaatgactattttacgtggagcatcattgtgtgactgttgacctggacagtcccaagggctatgcagatggactccattggcacagggaggtttgacctcttccctgctattatccctcctcccaactgtacagatttgtttgtcgtagtttatgtacttcttgatactgtcaaaaaattatctggaaatggttttattttgtgaagtgaacaatactttgtaatttatgatagtgtaaatggaaggcaaagcatcacatgtattaaattcttcctgtctttaaaaaaaaaaaa

SEQ ID NO: 5793 - protein, 468 aa, Homo sapiens
  ref <308>: DATABASE ACCESSION NUMBER: SWISS-Prot / P52757
  ref <309>: DATABASE ENTRY DATE: 2002-06-15
MAASSNSSLSGSSVSSDAEEYQPPIWKSYLYQLQQEAPRPKRIICPREVENRPKYYGREFHGIISREQADELLGGVEGAYILRESQRQPGCYTLALRFGNQTLNYRLFHDGKHFVGEKRFESIHDLVTDGLITLYIETKAAEYISKMTTNPIYEHIGYATLLREKVSRRLSRSKNEPRKTNVTHEEHTAVEKISSLVRRAALTHNDNHFNYEKTHNFKVHTFRGPHWCEYCANFMWGLIAQGVRCSDCGLNVHKQCSKHVPNDCQPDLKRIKKVYCCDLTTLVKAHNTQRPMVVDICIREIEARGLKSEGLYRVSGFTEHIEDVKMAFDRDGEKADISANVYPDINIITGALKLYFRDLPIPVITYDTYSKFIDAAKISNADERLEAVHEVLMLLPPAHYETLRYLMIHLKKVTMNEKDNFMNAENLGIVFGPTLMRPPEDSTLTTLHDMRYQKLIVQILIENEDVLF

SEQ ID NO: 5794 - DNA, 590 bp, Rattus norvegicus
  ref <308>: DATABASE ACCESSION NUMBER: EMBL / AA892500
  ref <309>: DATABASE ENTRY DATE: 2000-03-03
accctaaaaacactgtcagctttatttaaccttgatatacatttgtacaagcaatttaaaaagactattccacaacgactcagtgggttttacctggtttgaagataatgcagttacaaatgagaggtagaaacaccgtagtaaagacctaaaaatacaaacatcctatacataaacgttcaaattaactgctagaatttcatacagataaataatgtaaaaattacattactttgttcaccaagtaaatgaaaaccattttctctgttaactttaatcagcacactaaagtaagtgtggtgccaaagagcttctgtgcagctatcagagcgcaggtcattatgtcaaagttttgaagtaaaaagattaaaaccggtgaatggtttattcaagtattaaagcaggtaagtaaaagaaaccaaataatatacaacatagaaaccattcttggggagatgttgatctgccatgaccagctatttgtgaactcagggttaacactgagaagtacacattagtctggagagagctgcccatttttctaagggaaaacaaacctcatttcttactattttatgtagaaactccac

SEQ ID NO: 5795 - protein, 1037 aa, Rattus norvegicus
  ref <308>: DATABASE ACCESSION NUMBER: SWISS-Prot / BAA77341
  ref <309>: DATABASE ENTRY DATE: 2003-02-01
MEVVGDFEYCKRDLVGHGAFAVVFRGRHRQKTDWEVAIKSINKKNLSKSQILLGKEIKILKELQHENIVALYDVQELPNSVFLVMEYCNGGDLADYLQAKGTLSEDTIRVFLHQIAAAMRILHSKGIIHRDLKPQNILLSYANRRKSNVSGIRIKIADFGFARYLHSNTMAATLCGSPMYMAPEVIMSQHYDAKADLWSIGTVIYQCLVGKPPFQANSPQDLRMFYEKNRSLMPSIPRETSPYLANLLLGLLQRNQKDRMDFEAFFSHPFLEQVPVKKSCPVPVPVYSGPVPGSSCSSSPSCRFASPPSLPDMQHIQEENLSSPPLGPPNYLQVSKDSASNSSKNSSCDTDDFVLVPHNISSDHSYDMPMGTTARRASNEFFMCGGQCQPTVSPHSETAPIPVPTQVRNYQRIEQNLISTASSGTNPHGSPRSAVVRRSNTSPMGFLRVGSCSPVPGDTVQTGGRRLSTGSSRPYSPSPLVGTIPEQFSQCCCGHPQGHEARSRHSSGSPVPQTQAPQSLLLGARLQSAPTLTDIYQNKQKLRKQHSDPVCPSHAGAGYSYSPQPSRPGSLGTSPTKHTGSSPRNSDWFFKTPLPTIIGSPTKTTAPFKIPKTQASSNLLALVTRHGPAESQSKDGNDPRECSHCLSVQGSERHRSEQQQSKAVFGRSVSTGKLSEQQVKAPLGGHQGSTDSLNTERPMDVAPAGACGVMLALPAGTAASARAVLFTVGSPPHSATAPTCTHMVLRTRTTSVGSSSSGGSLCSASGRVCVGSPPGPGLGSSPPGAEGAPSLRYVPYGASPPSLEGLITFEAPELPEETLMEREHTDTLRHLNMMLMFTECVLDLTAVRGGNPELCTSAVSLYQIQESVVVDQISQLSKDWGRVEQLVLYMKAAQLLAASLHLAKAQVKSGKLSPSMAVKQVVKNLNERYKFCITMCKKLTEKLNRFFSDKQRFIDEINSVTAEKLIYNCAVEMVQSAALDEMFQQTEDIVYRYHKAAVLLEGLSKILQDPTDVENVHKYKCSIERRLSALCCSTATV

SEQ ID NO: 5796 - DNA, 5808 bp, Homo sapiens
  ref <308>: DATABASE ACCESSION NUMBER: EMBL / AB014523
  ref <309>: DATABASE ENTRY DATE: 1998-07-15
gcgcgcgcgagggcgttgggcgccgccgcgaggcggggaagcgcggggccgcggcggtgcgggttctagggcggcggccgtcgccgtcgcagcagcgccccgagcggggagggccgaggaggcccgacgagctggggatggagagtaccgggcccctcactgcctcagagcgcgtgtgcggctctgggcgcgcacagtgacggtgacggcacccctggcccggcagcgccgaggccgcttcgccagacagccagcggccggcggcaggccgggccatgagcggcaggggccgggccgggcctcgctgaccctggctccgcgcggcagcttccccagtttccgctccggtctctcggcatgagagtccgcccgggcccggggctgcggctgccccagacccgccgcacgctggcgcgctccgggcccgcggagccgcggtgctgatacctgcgccgcactgcgccgcccgcccgtccgctgtgtgccccgggggcgcggccatggaggtggtgggtgacttcgagtacagcaagagggatctcgtgggacacggggccttcgccgtggtcttccgggggcggcaccgccagaaaactgattgggaggtagctattaaaagtattaataaaaagaacttgtcaaaatcacaaatactgcttggaaaggaaattaaaatcttaaaggaacttcagcatgaaaatattgtagcactctatgatgttcaggaattacccaactctgtctttttggtgatggagtattgcaatggtggagacctcgcagattatttgcaagcgaaagggactctcagtgaagacacgatcagagtgtttctgcatcagattgctgctgccatgcgaatcctgcacagcaaaggaatcatccacagagatctcaaaccacagaacatcttgctgtcctatgccaatcgcagaaaatcaagtgtcagtggtattcgcatcaaaatagcggattttggttttgctcgttacctacatagtaacatgatggctgcaacactgtgtggatccccgatgtacatggctcctgaggttattatgtctcaacattatgatgctaaggctgacttgtggagcataggaacagtgatataccaatgcctagttggaaaaccaccttttcaggccaatagtcctcaagacttaaggatgttttatgaaaaaaacaggagcttaatgcctagtattcccagagaaacatcaccttatttggctaatctccttttgggtttgcttcagagaaaccaaaaagatagaatggactttgaagcgttttttagccatccttttcttgagcaaggtccagtaaaaaaatcttgcccagttccagtgcccatgtattctggttctgtctctggaagctcctgtggcagctctccatcttgtcgttttgcttctccaccatcccttccagatatgcagcatattcaggaagaaaacttatcttccccaccattgggtcctcccaactatctacaagtttccaaagattctgccagtactagtagcaagaactcttcttgtgacacggatgactttgttttggtgccacacaacatctcgtcagaccactcatgtgatatgccaatggggactgctggcagacgtgcttcaaatgaattcttggtgtgtggagggcagtgtcagcctactgtgtcacctcacagcgaaacagcaccaattccagttcctactcaaataaggaattatcagcgcatagagcagaatcttacatctactgccagctcaggcacaaatgtacatggttctccaagatctgcagtggtacgaaggtccaacaccagccccatgggcttcctccggccgggatcatgctccccagtaccagcagacacagcacagacagttggacgaaggctctccactgggtcttctaggccttactcaccttcccctttggttggtaccattcctgagcaattcagtcagtgctgctgtgggcatcctcagggccatgactccaggagtagaaactcctcaggttctccagtgccacaagctcagtccccacagtctctcttatcgggtgctagactgcagagcgcccccaccctcactgacatctatcagaacaagcagaagctcagaaaacagcactctgaccccgtgtgcccatcccatactggggctgggtacagctactcgcctcagcccagtcggcctggcagccttggaacttctcccaccaagcacttggggtcctctccacggagttctgactggttctttaaaactcctttgccaacaatcattggctctcctactaagaccacagctcctttcaaaatccctaaaactcaagcatcttccaacctgttagccttggttactcgtcatgggcctgctgaagaacagtcgaaagatgggaatgagccacgggaatgtgcccattgcctcttagtgcaaggaagtgagaggcagcgggccgagcagcagagcaaggcagtgtttggcagatctgtcagtaccgggaagttatcagatcaacaaggaaagactcctatatgtcgacatcagggcagcacagacagtttaaatacagaacgaccaatggatatagctccggcaggagcctgtggtggtgttctggcacctcctgcaggtacagcagcaagttccaaggctgtcctcttcactgtagggtctcctccacacagtgcggcagcccccacttgtacccacatgttccttcgaacaagaacaacctcagtggggcccagcaactccgggggctctctttgtgccatgagtggccgcgtgtgcgtggggtccccgcctggcccaggcttcggctcttcccctccaggagcagaggcagctcccagcctgagatacgtgccttacggtgcttcaccccccagcctagaggggctcatcacctttgaagcccctgaactgccggaggagacgctgatggagcgggaacacacagacaccttacgccatctgaatgtgatgctgatgttcactgagtgtgtgctggacctgacagccatgaggggaggaaaccctgagctgtgcacatctgctgtgtccttgtaccagatccaggagagtgtggtggtggaccagatcagtcagctgagcaaagactgggggcgggtggagcagctggtgttgtacatgaaagcagcacagctgcttgcggcttctctgcatcttgccaaagcccagatcaagtccgggaaactgagcccatccacagctgtgaaacaagttgtcaagaatctgaacgaacgatataaattctgcatcaccatgcgcaagaaacttacagaaaagctgaatcgattcttctctgacaaacagaggtttattgatgaaatcaacagtgtgactgcagagaaactcatctataattgtgctgtagaaatggttcagtctgcagccctggatgagatgtttcagcagaccgaagatattgtttatcgctatcataaggcagcccttcttttggaaggcctaagtaggattctacaggaccctgcagatattgaaaatgtgcataaatataaatgtagtattgagagaagactgtcggcgctctgccatagcaccgcaaccgtgtgagcagcaggctcatcccgtggaccggtggtgggaacgtgaggtgatgcctttgggattacagcttgagttctgtcaccccatccccaggaaactgtagcttcttaactggtgactaccaaagaacaagcagtgatttgaaaaaggaaaaacaatccaaaaactacatatttgtaggaaatctgccttattggagaaaatcaccctttccctttttctttgtagaagcaggagcaagagtgtttggctcccagtttggacttggtgaataaatgtaccttagaactaggataatcggtacagttattcttaaagataattaaaaatgaaacaaagtgagtgctcgtcactgggttcatcagagcagtgtgtgaaattccatgtgtttgctgaggtgtaaaggtaaatgtattcacccctcatccaggcagtttgatatttggagtaagtttgtttaaatctgagcatgcatctttaaacagctcaggaagaaatagcttaagaagaagtgaaacatggatcttggaagaaattttgaaatcttcaatttgatcctaatatggatacatgttaatcttccaaaatctttcatattgcactaatttattaaaacaactgtgtattggattttgtaatttaactaaggcacaatggacttgtttaaaatattttacttgattgtatacatagaccctttccagaattcacatgtaatctccagtgaacttttaagtggttaaaacttgtattcatgtgaacctttgcacatttttttttttttacttctttatctacacctacagattttctcagtaatgtttttgttagcttttggttccattttttattgtgcatgcagaatgtacattgatgcctgtgaccttaggtttattaaaggctaggtttatttgggcagtattagaaacaaaatcatggatcaagagatactcttgataatttgaatagggccaaaacaaagttggtgacctaaaggcttgttagtgatgtggagttcctacatgcagtgagtggaaaatgaagttcgttttctcttaggaaaatgggcagctgtcttctgcctaatgtgtatttttcatgttaattctgacagttcaccaaatagctagtcatggagaatgcaggcagttaacttaatatccctccaggaatggttcctacgttgtgtattatttggtttcttttacttacctgcttgaatacttgaataaaccattcaccaattttaatccttttattttaatccttttacataaaataatctgaactctttgacaaattgcacagagctctttggcattaatctaattttaatgtactgataaaaacaaacatggttgtcctttactttgacaaagtaatgtaatttttaccttatttatctgtatgaaattccagtagttaatttgaacatttatttatatgacgtttgtatttttaggtctttaatacagtgtttctacctctcatttgtaactgcatgcattattcttgaaactaggtaaaactcactgaattgttgtgtaatagcctttttattattgcctgtacaaatgtatattaaggtaaaataaaactgacaaagtgtttctagggtgtagctgggtacatattaagtggcttgttgagccaggtacttccttagtgagtttagagacttggccatgaatatcctttgtcctgccccaggatttagatcttggctactgtcatgcaggcttccaggaacatagactgttttacctccacaaccctatttgttattagtgatactttattttatataatattttttattcacagtgaaatttcattcatgttctttcagttatcacctgtgttatctcagttgtaggtttattctatcctctcctcttcctctcccatttcttttttaacacaggatgaaacaggttcagagaggggaagtgattggcctaaagtcaggaactaggcaagtggtcaagccatgctttgtgactttcaagttaattcttcttgttcttgtatattaaaggtcttggggtagatggtgtgtgtgaaacagtgaagtctcaacagcagaaaagaacaaaatgtaaattcatgaataatggttctggttatacttccattatcaaggctaattaagagattttgccttgagtatagcaataataaacaaatgctttatgtttccctg

SEQ ID NO: 5797 - protein, 1036 aa, Homo sapiens
MEVVGDFEYSKRDLVGHGAFAVVFRGRHRQKTDWEVAIKSINKKNLSKSQILLGKEIKILKELQHENIVALYDVQELPNSVFLVMEYCNGGDLADYLQAKGTLSEDTIRVFLHQIAAAMRILHSKGIIHRDLKPQNILLSYANRRKSSVSGIRIKIADFGFARYLHSNMMAATLCGSPMYMAPEVIMSQHYDAKADLWSIGTVIYQCLVGKPPFQANSPQDLRMFYEKNRSLMPSIPRETSPYLANLLLGLLQRNQKDRMDFEAFFSHPFLEQGPVKKSCPVPVPMYSGSVSGSSCGSSPSCRFASPPSLPDMQHIQEENLSSPPLGPPNYLQVSKDSASTSSKNSSCDTDDFVLVPHNISSDHSCDMPVGTAGRRASNEFLVCGGQCQPTVSPHSETAPIPVPTQIRNYQRIEQNLTSTASSGTNVHGSPRSAVVRRSNTSPMGFLRPGSCSPVPADTAQTVGRRLSTGSSRPYSPSPLVGTIPEQFSQCCCGHPQGHDSRSRNSSGSPVPQAQSPQSLLSGARLQSAPTLTDIYQNKQKLRKQHSDPVCPSHTGAGYSYSPQPSRPGSLGTSPTKHLGSSPRSSDWFFKTPLPTIIGSPTKTTAPFKIPKTQASSNLLALVTRHGPAEEQSKDGNEPRECAHCLLVQGSERQRAEQQSKAVFGRSVSTGKLSDQQGKTPICRHQGSTDSLNTERPMDIAPAGACGGVLAPPAGTAASSKAVLFTVGSPPHSAAAPTCTHMFLRTRTTSVGPSNSGGSLCAMSGRVCVGSPPGPGFGSSPPGAEAAPSLRYVPYGASPPSLEGLITFEAPELPEETLMEREHTDTLRHLNVMLMFTECVLDLTAMRGGNPELCTSAVSLYQIQESVVVDQISQLSKDWGRVEQLVLYMKAAQLLAASLHLAKAQIKSGKLSPSTAVKQVVKNLNERYKFCITMCKKLTEKLNRFFSDKQRFIDEINSVTAEKLIYNCAVEMVQSAALDEMFQQTEDIVYRYHKAALLLEGLSRILQDPADIENVHKYKCSIERRLSALCHSTATV

SEQ ID NO: 5798 - DNA, 590 bp, Rattus norvegicus; identical to SEQ ID NO: 5794
  ref <308>: DATABASE ACCESSION NUMBER: EMBL / AA892500
  ref <309>: DATABASE ENTRY DATE: 2000-03-03

SEQ ID NO: 5799 - protein, 1037 aa, Rattus norvegicus; identical to SEQ ID NO: 5795
  ref <308>: DATABASE ACCESSION NUMBER: SWISS-Prot / BAA77341
  ref <309>: DATABASE ENTRY DATE: 2003-02-01

SEQ ID NO: 5800 - DNA, 5808 bp, Homo sapiens; identical to SEQ ID NO: 5796
  ref <308>: DATABASE ACCESSION NUMBER: EMBL / AB014523
  ref <309>: DATABASE ENTRY DATE: 1998-07-15

SEQ ID NO: 5801 - protein, 1036 aa, Homo sapiens; identical to SEQ ID NO: 5797

SEQ ID NO: 5802 - DNA, 562 bp, Rattus norvegicus
  ref <308>: DATABASE ACCESSION NUMBER: EMBL / AA892505
  ref <309>: DATABASE ENTRY DATE: 2000-03-03
cgagagcaggagaggatttattaggggctcagtcatcatgtggaagcccaagagcattgagcagaggaagctgtggcgggaacagggcttgtcatggtagggccttgccagagcctgacactgattccgtgacctggtgcacccagtgcagatacgggggattcccctgctccacgggcagtgcgatcacctcggcaacttcataagggtgcacagatcggacaaactctgtcagagcagggaccagggagctttgtgttttaatcatcatcagcacctcactatcttcctcgatctttcctttccattcatagatggatgtgatctgcgggatgaggttgacgcaggctgccaggcgcttctctaccactgccctggcaatctccttggcgactttttcgttcggacaagtgacaaaggctgcagagactgatcctggaacgtagccggagcccgaggccggcgacggctgggacggagggcttccagaagccatggacagcagagctcggggtagcaataaaaggcgggaagccaccggcagtaaggcaggcatgcaaag

SEQ ID NO: 5803 - protein, 134 aa, Rattus norvegicus
  ref <308>: DATABASE ACCESSION NUMBER: SWISS-Prot / BAB23217
  ref <309>: DATABASE ENTRY DATE: 2002-06-01
MASGSPPSQPPPASGSGYVPGSVSAAFVTCPNEKVAKEIARAVVEKRLAACVNLIPQITSIYEWKGKIEEDSEVLMMIKTQSSLVPALTEFVRSVHPYEVAEVIALPVEQGNPPYLHWVHQVTESVSNSGTALP

SEQ ID NO: 5804 - DNA, 624 bp, Homo sapiens
  ref <308>: DATABASE ACCESSION NUMBER: EMBL / AF230924
  ref <309>: DATABASE ENTRY DATE: 2000-03-30
cgcctcctgctctcaggcctctctgctcctgtcttttgtttggatgccggcgctgctgcctgtggcctcccgccttttgttgctaccccgagtcttgctgaccatggcctctggaagccctccgacccagccctcgccggcctcggattccggctctggctacgttccgggctcggtctctgcagcctttgttacttgccccaacgagaaggtcgccaaggagatcgccagggccgtggtggagaagcgcctagcagcctgcgtcaacctcatccctcagattacatccatctatgagtggaaagggaagatcgaggaagacagtgaggtgctgatgatgattaaaacccaaagttccttggtcccagctttgacagattttgttcgttctgtgcacccttacgaagtggccgaggtaattgcattgcctgtggaacaggggaactttccgtacctgcagtgggtgcgccaggtcacagagtcagtttctgactctatcacagtcctgccatgatgagccctgttcctgctcatcatgaagatccccgcgatacttcaacgccttctgacttccaggtgatgactgggcccccaataaatcccgtctttgggtcaaaaaaaaaa

SEQ ID NO: 5805 - protein, 137 aa, Homo sapiens
  misc_feature (1)..(137): Xaa=Unknown amino acid
MASGSPPTQPSPASDSGSGYVPGSVSAAFVTCPNEKVAKEIARAVVEKRLAACVNLIPQITSIYEWKGKIEEDSEVLMMIKTQSSLVPALTDFVRSVHPYEVAEVIALPVEQGNFPYLQWVRQVTESVSDSITVLPX

SEQ ID NO: 5806 - DNA, 541 bp, Rattus norvegicus
  ref <308>: DATABASE ACCESSION NUMBER: EMBL / AA892507
  ref <309>: DATABASE ENTRY DATE: 2000-03-03
cacagtaactcatgaggtggataacagagggagggagctgccctggatgacctgcagccttccctccaaaggaaccttctgacaccactccaaagaatcaaggaaaggttcctgtggtgtgtctgctctctgctgagctgcactgacactctggcctttgtcagcagggtggggtgacttcagtccatagtcatcctcctgcttgtctttatggtcgagtttattcttttctgtcgtagcctttctcggttcatcttctcaatcctgagtctctgaagctgagcatcttctttggatggctccttgggcacctggctggccttggcaatcatgtctcgaattttctgtaggcattctgccagattgcggaactggtatcggctgctctcggaggtaagtaccagctctcctgccttgttgatcgtgagggcaatcttctggcgtacaggctccgcaatccagtctgcactggccaagtgaaaccttacttcggccttggaattcactttgttaacgttctgccctccaggaccgctgctcc

SEQ ID NO: 5807 - protein, 170 aa, Rattus norvegicus
  ref <308>: DATABASE ACCESSION NUMBER: SWISS-Prot / BAB22691
  ref <309>: DATABASE ENTRY DATE: 2002-10-01
TTFQSIYSLDKLYPESKGADTAWKVPEHAKQASSYIPLDRLSISYCRSSGPGGQNVNKVNSKAEVRFHLASADWIEEPVRQKIALTHKNKINKAGELVLTSESSRYQFRNLAECLQKIRDMIAEASQVPKEPSKEDARLQRLRIEKMNRERLRQKRLNSALKTSRRMTMD

SEQ ID NO: 5808 - DNA, 888 bp, Homo sapiens
  ref <308>: DATABASE ACCESSION NUMBER: Refseq / NM_001545
  ref <309>: DATABASE ENTRY DATE: 2002-11-05
gcatggcggccaccaggtgcctgcgctggggcctgagccgagccggagtctggctgctcccaccgcccgcacggtgcccacgccgggcgctgcacaagcagaaagacggcactgagttcaagagcatctacagcctggacaagctctaccccgaatctcagggctcggacaccgcctggagggtcccgaatggtgcaaagcaagccgacagtgacatccctctagatcgcttgacaatatcttattgtcggagtagtggtcctggggggcagaatgtgaacaaagtgaattccaaggcagaagtcaggttccatttggcaactgccgagtggatcgcggagcccgtgcggcagaagatagccatcacgcataaaaacaagatcaacaggttaggagagttgatccttacctctgagagcagccgctatcagttccggaatctggcagattgcctgcagaaaattcgagacatgatcactgaggccagccagacaccgaaggagccaacaaaagaagatgttaaacttcatagaatcaggatagaaaacatgaatcgggaaaggctgagacaaaagagaattcattctgctgtaaagacaagcaggagggtcgacatggactgaaatcaccctctgcagctgggagggctcttctgggcgtccgggcagctgcagctgagaggactttcacaccataaggagatttctgtttttctttttggctgttaatgcttgtctataacattggagccatcacaagaatgttcatttggaatgaaggctgcaggcactggttgcagacgtctttataggcagtcaccatgttgtcaaaccttaataatgcacctcatgtattagtcacaataaaaatcagaactcaaaaaaaaaa

SEQ ID NO: 5809 - protein, 206 aa, Homo sapiens
  ref <308>: DATABASE ACCESSION NUMBER: SWISS-Prot / Q14197
  ref <309>: DATABASE ENTRY DATE: 2002-06-15
MAATRCLRWGLSRAGVWLLPPPARCPRRALHKQKDGTEFKSIYSLDKLYPESQGSDTAWRVPNGAKQADSDIPLDRLTISYCRSSGPGGQNVNKVNSKAEVRFHLATAEWIAEPVRQKIAITHKNKINRLGELILTSESSRYQFRNLADCLQKIRDMITEASQTPKEPTKEDVKLHRIRIENMNRERLRQKRIHSAVKTSRRVDMD

SEQ ID NO: 5810 - DNA, 593 bp, Rattus norvegicus
  ref <308>: DATABASE ACCESSION NUMBER: EMBL / AA892511
  ref <309>: DATABASE ENTRY DATE: 2000-03-03
ccgggctcattaggaaacctttattgtcaccattagagataaaaacatcggagtcccacacgccacaccacacaaggaggctaactgaagggttactgattgtcacagcagcccagacaaagggctgaacctcggtccttagccaccccctcccctgcacgatcagtggcagagggcaatggtctccatgttgaggaagcggatgtgcatcttggtctcgatgtcgatgccctgccagatcttcaggaagtcctcaaaggtgatcccctcgtacacctggtccggttccatctgtcccacgcacacgctggcagcctccatcatggctccgtcggcgatggaccgagctgactccttctcgatgtgaggatttccagagagcagttcctccaccacatttcgatactcttccagggtgatgcggccgtcactgtccgagtcatacatatggaacagaaatttcagcttctccttccgagacagctccacttgttcctcacccagggtagtgtcaatgggccggaagtaggacatgatagtcaggaagtcctcgaagttgatctcatcggccaggccgctggaccccttacgca

SEQ ID NO: 5811 - protein, 214 aa, Rattus norvegicus
  ref <308>: DATABASE ACCESSION NUMBER: SWISS-Prot / AAF40439
  ref <309>: DATABASE ENTRY DATE: 2002-06-15
MGAAHSASEEVRELEGKTGFSSDQIEQLHRRFKQLSGDQPTIRKENFNNVPDLELNPIRSKIVRAFFDNRNLRKGSSGLADEINLEDFLTIMSYFRPIDTTLGEEQVELSRKEKLKFLFHMYDSDSDGRITLEEYRNVVEELLSGNPHIEKESARSIADGAMMEAASVCVGQMEPDQVYEGITFEDFLKIWQGIDIETKMHIRFLNMETIALCH

SEQ ID NO: 5812 - DNA, 800 bp, Homo sapiens
  ref <308>: DATABASE ACCESSION NUMBER: EMBL / U61538
  ref <309>: DATABASE ENTRY DATE: 1999-07-02
gaattccgggcaaagctctttcaccagatgtagactgtagccctgctgccttccctccagcgagtctgccagcatgcttcttcatcctttttatatgttctttgcttccttccctccctccttgcctcctgtcgccgtctcttctggcgccgctgctcccggaggagctcccggcacggcgatgggttctcgggcctccacgttactgcgggacgaagagctcgaggagatcaagaaggagaccggcttttcccacagtcaaatcactcgcctctacagccggttcaccagcctggacaaaggagagaatgggactctcagccgggaagatttccagaggattccagaacttgccatcaacccactgggggaccggatcatcaatgccttctttccagagggagaggaccaggtaaacttccgtggattcatgcgaactttggctcatttccgccccattgaggataatgaaaagagcaaagatgtgaatggacccgaaccactcaacagccgaagcaacaaactgcactttgcttttcgactatatgatttggataaagatgaaaagatctcccgtgatgagctgttacaggtgctacgcatgatggtcggagtaaatatctcagatgagcagctgggcagcatcgcagacaggaccattcaggaggctgatcaggatggggacagtgccatatctttcacagaatttgttaaggttttggagaaggtggatgtagaacagaaaatgagcatccgatttcttcactaaaggagaccaaactgttcttgcggtctagtat

SEQ ID NO: 5813 - protein, 194 aa, Homo sapiens
  ref <308>: DATABASE ACCESSION NUMBER: SWISS-Prot / Q99653
  ref <309>: DATABASE ENTRY DATE: 2002-06-15
GSRASTLLRDEELEEIKKETGFSHSQITRLYSRFTSLDKGENGTLSREDFQRIPELAINPLGDRIINAFFPEGEDQVNFRGFMRTLAHFRPIEDNEKSKDVNGPEPLNSRSNKLHFAFRLYDLDKDEKISRDELLQVLRMMVGVNISDEQLGSIADRTIQEADQDGDSAISFTEFVKVLEKVDVEQKMSIRFLH

SEQ ID NO: 5814 - DNA, 593 bp, Rattus norvegicus; identical to SEQ ID NO: 5810
  ref <308>: DATABASE ACCESSION NUMBER: EMBL / AA892511
  ref <309>: DATABASE ENTRY DATE: 2000-03-03

SEQ ID NO: 5815 - protein, 214 aa, Rattus norvegicus; identical to SEQ ID NO: 5811
  ref <308>: DATABASE ACCESSION NUMBER: SWISS-Prot / AAF40439
  ref <309>: DATABASE ENTRY DATE: 2002-06-15

SEQ ID NO: 5816 - DNA, 800 bp, Homo sapiens; identical to SEQ ID NO: 5812
  ref <308>: DATABASE ACCESSION NUMBER: EMBL / U61538
  ref <309>: DATABASE ENTRY DATE: 1999-07-02

SEQ ID NO: 5817 - protein, 194 aa, Homo sapiens; identical to SEQ ID NO: 5813
  ref <308>: DATABASE ACCESSION NUMBER: SWISS-Prot / Q99653
  ref <309>: DATABASE ENTRY DATE: 2002-06-15

SEQ ID NO: 5818 - DNA, 560 bp, Rattus norvegicus
  ref <308>: DATABASE ACCESSION NUMBER: EMBL / AA892522
  ref <309>: DATABASE ENTRY DATE: 2000-03-03
aaatgaaacaaggtttatgccacacagtccaacaatgtataaagagcttgaagtagaaaagcttgtggaaaatgtatactctttacatggtacatacagttttatagctcataaataaacacagagaacaggagccattgttcacattaccgaccagcaacacagagcagcagtaacaacacaaacacaatttccttcgactcagccacaaaaacttgaaatggtctcaccatacttgaggaaaatgacaggtggtgaagtgttacagccacacccacatcaccaagtgctttaagttgtctctgggttagaaatatcaacaaccgtattaactccagagagaagaaggcagggtaagaccctgtcctataaggcacttaataaattgacactacccttgtcttaaaatactgcaaatttgccttgaaatatgctgatgttttacggcgaaatttaggtttcttttatccaggtttagacatagacataatttgaataaattgataatactgtctgatggccactctttacaccagcttcaaaatggacccatttaaact

SEQ ID NO: 5819 - DNA, 502 bp, Rattus norvegicus
  ref <308>: DATABASE ACCESSION NUMBER: EMBL / AA892526
  ref <309>: DATABASE ENTRY DATE: 2000-03-03
cagactgcaaaacccatttaatcggaattttaaaagggggtgtacatctttgttccagcactttgaagcaggtagatctctgagttcaaggccagcctggtctacagagtgtgtgccaggacacccacggctatgtagatttaccctgcgggggggcgggggggagcatcccatagccttgttccatgccaactcgagtttgtggaaagtcactctactgtcaggtcctatggggatcgcaggtccaagtctctacccacagggtcatggtgacttggggtacagggttccttcctgtaccctcaatcctcaggagctgcaggtggtatggtagcttcctgggttctgccaggcctgctcattccctcctcctcgtaaacagagtgaagcttgttgatcaggaagatcttgtcctccccctcattccggatctgttccttgagcaggcagatgaccttcctttgtcctttcaccacctggatgttgaggtagacctcgtgcc

SEQ ID NO: 5820 - DNA, 1639 bp, Homo sapiens
  ref <308>: DATABASE ACCESSION NUMBER: EMBL / AB002405
  ref <309>: DATABASE ENTRY DATE: 2000-03-03
ctccactgtgggcgtgagcttctttatcacctgcatcaccctggtgtacagcatggctcactctttcggggagagctaccgggtgggcagcacctctggcatccacgccatcaccgtcttctgctcctgggactacaaggtgacgcagaagcgggcctcccgcctccagcaggacaatattcgcacccggctgaaggagctgctggccgagtggcagctgcggcacagccccaggagcgtgtgcgggaggctgcggcaggcggctgtgctggggcttgtgtggctgctgtgtctggggaccgcgctgggctgcgccgtggccgtccacgtcttctcggagttcatgatccagagtccagaggctgctggccaggaggctgtgctgctggtcctgcccctggtggttggcctcctcaacctgggggccccctacctgtgccgtgtcctggccgccctggagccgcatgactccccggtactggaggtgtacgtggccatctgcaggaacctcatcctcaagctggccatcctggggacactgtgctaccactggctgggccgcagggtgggcgtcctgcagggccagtgctgggaggattttgtgggccaggagctgtaccggttcctggtgatggacttcgtcctcatgttgctggacacgctttttggggaactggtgtggaggattatctccgagaagaagctgaagaggaggcggaagccggagtttgacattgcccggaatgtcctggagctgatttatgggcagactctgacctggctgggggtgctcttctcgcccctcctccccgccgtgcagatcatcaagctgctgctcgtcttctatgtcaagaagaccagccttctggccaactgccaggcgccgcgccggccctggctggcctcacacatgagcaccgtcttcctcacgctgctctgcttccccgccttcctgggcgccgctgtcttcctctgctacgccgtctggcaggtgaagccctcgagcacctgcggccccttccggaccctggacaccatgtacgaggccggcagggtgtgggtgcgccacctggaggcggcaggccccagggtctcctggctgccctgggtgcaccggtacctgatggaaaacaccttctttgtcttcctggtgtcagccctgctgctggccgtgatctacctcaacatccaggtggtgcggggccagcgcaaggtcatctgcctgctcaaggagcagatcagcaatgagggtgaggacaaaatcttcttaatcaacaagcttcactccatctacgagaggaaggagagggaggagaggagcagggttgggacaaccgaggaggctgcggcaccccctgccctgctcacagatgaacaggatgcctagggggacggcgatgggcctcacgggcccgcccagcaccctgagaccacactgttgcctcccagtgaccctgctgggacaccaggacaaggaagacagtttcgcctctcgaaagccgcagctgcgcctaggctggagctggaagggtgggtgaatccggcttgggcatccccaatgaactctgccctgcctgggactctatttattctgattaaaggggttttgcaaataaaaaaaaaaaaaaaaaaaaaaaaa

SEQ ID NO: 5821 - protein, 445 aa, Homo sapiens
  misc_feature (1)..(445): Xaa=Unknown amino acid
MAHSFGESYRVGSTSGIHAITVFCSWDYKVTQKRASRLQQDNIRTRLKELLAEWQLRHSPRSVCGRLRQAAVLGLVWLLCLGTALGCAVAVHVFSEFMIQSPEAAGQEAVLLVLPLVVGLLNLGAPYLCRVLAALEPHDSPVLEVYVAICRNLILKLAILGTLCYHWLGRRVGVLQGQCWEDFVGQELYRFLVMDFVLMLLDTLFGELVWRIISEKKLKRRRKPEFDIARNVLELIYGQTLTWLGVLFSPLLPAVQIIKLLLVFYVKKTSLLANCQAPRRPWLASHMSTVFLTLLCFPAFLGAAVFLCYAVWQVKPSSTCGPFRTLDTMYEAGRVWVRHLEAAGPRVSWLPWVHRYLMENTFFVFLVSALLLAVIYLNIQVVRGQRKVICLLKEQISNEGEDKIFLINKLHSIYERKEREERSRVGTTEEAAAPPALLTDEQDAX

SEQ ID NO: 5822 - DNA, 559 bp, Rattus norvegicus
  ref <308>: DATABASE ACCESSION NUMBER: EMBL / AA892531
  ref <309>: DATABASE ENTRY DATE: 2000-03-03
aaaaggaactttattgggtgttgggttcagatgaggtccatgaggatgtcgtcctccatgacgctgggctgcaggcccggctggggaaccgggccccggggacccccgctcagcagcatctgacctggcagtggcgccctctggggtagctgtgtgggccaagactgggtaggtggagggtgcaggagttgcggccctagctgcggctgccccaggctctgatgtggcggcagcaatgcaggggcccctggaggctggaggtggtgtagggaggcctggggtgggggtaccccagtctggggcggtgctggattaaggagaaggctccgcagctgggggttggctccagggttctggggtcgaaggatgggtccagaaggaggtgggccaggggctgctccaggaggaccttggggtgcccctgttggggcctgggtagtaccttggggctggggctgccctgtagccgcagaagctcccacagcaccctgaggctgaggctgtggtgcacggagctgtaatagattctgcgggggcctcgcttggtcctccagaatgg

SEQ ID NO: 5823 - DNA, 2329 bp, Homo sapiens
  ref <308>: DATABASE ACCESSION NUMBER: EMBL / AL136746
  ref <309>: DATABASE ENTRY DATE: 2002-07-12
ggctgcggctgcagtggtggtggcgggtaccgcacggggtatggtccccgggtccgagggcccggcccgcgccgggagcgtggtggccgacgtggtgtttgtgattgagggtacggccaacctgggaccctacttcgaggggctccgcaagcactacctgctcccggccatcgagtattttaatggtggtcctcctgctgagacggacttcgggggagactatggggggacccagtacagcctcgtggtgttcaacacagtggactgcgctcccgagtcctacgtacaatgtcacgctcccaccagcagcgcctatgagtttgtcacctggctcgatggcattaagttcatgggcgggggtggtgagagctgcagcctcatcgcggaaggactcagcacagccttgcagctgtttgatgacttcaagaagatgcgcgagcagattggccagacgcaccgggtctgcctcctcatctgcaactcacccccatacttgttgcctgctgttgagagcaccacgtactctggatgcacaactgagaatcttgtgcagcagattggggagcgggggatccacttctccattgtgtctccccggaagctgcctgcgcttcggcttctgtttgagaaggcagcccccccggccttgctggagccgctgcagcctccgacagatgtgagccaggacccgaggcacatggtgctggttcggggactcgtgctgcctgttgggggtggctcagccctaggccccctccagtcaaagcagccagtccccctgcctcccgccgcaccctcaggtgccactctctcagcagccccccagcagcctctgccccccgtccccccgcagtaccaggttcccgggaacctgagtgcagctcaggtggccgcgcagaatgcagtggaggctgccaagaaccagaaggctgggctgggccctcgcttctcgcccatcacccctctccaacaagctgctcccggagtgggtccccccttcagccaggccccagctccccaactacccccaggaccccctggcgcccccaagccaccacctgcttcccagcccagtctggtctccactgtggcccctggctccggcctggctcccacggcacagcccggggcaccgtccatggcaggcactgtggccccaggaggggtgagcggcccttccccagcccagctgggagccccagccctcggtgggcagcagtcagtctccaataagcttctggcctggagcggggtcctggagtggcaagagaaacccaaacctgcctcagtggatgccaacaccaagctgacgcggtcactgccctgccaggtctacgtgaatcatggcgagaacctgaagacggagcagtggccccagaagctgatcatgcagctcatcccccagcagctgctgaccaccctgggccctttgttccggaactcaaggatggtccagttccatttcaccaacaaggacctggagtctctcaaaggcctctaccgcatcatgggcaacggcttcgcgggctgcgtgcacttcccccacacggcgccctgtgaggtgcgcgtgctcatgctcctgtactcgtccaagaagaagatcttcatgggcctcatcccctacgaccagagcggcttcgtcaacggcatccggcaggtcatcaccaaccacaagcaggtccagcagcagaagctggagcagcagcagcgaggaatggggggacagcaggcaccccccagggctggggcccattctggaggaccaagccaggccctcacagaatctgctccagctccgcccaccgcagccccagcctcagggtaccgtaggggcctctggggccacggggcagccccagccccaaggtactgcccagcccccgccaggtgcccctcaaggccctcctggagcagcttctggcccaccccctcctggacccatccttcggccccagaaccctggggccaaccctcagctgcgaagcctcctcctcaacccaccaccgccgcagactggggtgcccccaccccaggcctccctccaccacctgcccagtcctggcccgcacaacttccccctcgggctccactgccaggtaaggggacccgggggagggcagaggtctggactgagtgtcccagcagctcctgggctagagcaccaagaccaagtgctcctgggaagtaaagacataggatccaagaatgagggttcccccagccgggcctgcagcccagcgtcatggaggacgacatcctcatggatctcatctgaatccccaacacccaataaagttcctttttaacacaaaaaaaaaaaaaaaaaaaa

SEQ ID NO: 5824 - protein, 574 aa, Homo sapiens
  ref <308>: DATABASE ACCESSION NUMBER: SWISS-Prot / AAG15589
  ref <309>: DATABASE ENTRY DATE: 2002-10-01
MVLVRGLVLPVGGGSAPGPLQSKQPVPLPPAAPSGATLSAAPQQPLPPVPPQYQVPGNLSAAQVAAQNAVEAAKNQKAGLGPRFSPITPLQQAAPGVGPPFSQAPAPQLPPGPPGAPKPPPASQPSLVSTVAPGSGLAPTAQPGAPSMAGTVAPGGVSGPSPAQLGAPALGGQQSVSNKLLAWSGVLEWQEKPKPASVDANTKLTRSLPCQVYVNHGENLKTEQWPQKLIMQLIPQQLLTTLGPLFRNSRMVQFHFTNKDLESLKGLYRIMGNGFAGCVHFPHTAPCEVRVLMLLYSSKKKIFMGLIPYDQSGFVNGIRQVITNHKQVQQQKLEQQQRGMGGQQAPPGLGPILEDQARPSQNLLQLRPPQPQPQGTVGASGATGQPQPQGTAQPPPGAPQGPPGAASGPPPPGPILRPQNPGANPQLRSLLLNPPPPQTGVPPPQASLHHLQPPGAPALLPPPHQGLGQPQLGPPLLHPPPAQSWPAQLPPRAPLPAAKRKREGEGRVFREKWERAYFFVEVKSMPMCLICKQIVSVLKEYNLKRHYESKHSKSYDQYTEQTRRIRARPIWPDP

SEQ ID NO: 5825 - DNA, 603 bp, Rattus norvegicus
  ref <308>: DATABASE ACCESSION NUMBER: EMBL / AA892538
  ref <309>: DATABASE ENTRY DATE: 2000-03-03
ggggaggaaaaggtttattcagcttacacttccacattgctgttcatcaccaaaggaagtcacacagggcaggaagcaggagctgatgcagaggacacggaggggtgttacttactggcttgctcagcttgctgttatagaagccatgactaccagcccagggatggtaacacccacaatgggctgggtcctcccaccttgatcactaattgagacccttacagctgggtctcaggaaggaatttccacaactgaggctcctttttctgtgataactccagcttgtatcaagttgacacaaccagtcagtacagcaagggaggaatgctgcttactggtttaagtatagtacccaggtccaccctcccacctcaacaaggaaacaccctaaaggcttaagtccaatcttacagaggtagtttctcagttgagaattcttcctgtcaggtggctttgtcaaagagagacaaacctagctaacagtggttggaaacctgcctgagtgaaactctaagtgatttctcacagaacatttcctaattcatgtagcaaagcctgcttacagtttcatcgggcatgctctcaagaagtccttgctggtca

SEQ ID NO: 5826 - DNA, 603 bp, Rattus norvegicus; identical to SEQ ID NO: 5825
  ref <308>: DATABASE ACCESSION NUMBER: EMBL / AA892538
  ref <309>: DATABASE ENTRY DATE: 2000-03-03

SEQ ID NO: 5827 - DNA, 584 bp, Rattus norvegicus
  ref <308>: DATABASE ACCESSION NUMBER: EMBL / AA892547
  ref <309>: DATABASE ENTRY DATE: 2000-03-03
ggaaaaaataattaaaattttcccaataaaggggagaattaacactaaaagaccatacataccctggttacaagttgatgatctcatttttcataatatggaagtgttcaatgttccagaatatgaactagcatttgcaattttgaaaccccaagtcctgtctctgtaaacccataaatgatgaaataaatacctagaaacaagaatcgtctagaagctgcggtccatgatagagcaatccgttgcggacagacagtgctgcaattgtcacagtgtcacctgctagtccccactgagcttcctcatgatatggctgtctgctgttgcattagtgaagatacttcccacaaccacatgagtaccccagagaccatgacggatcactttacagcagccaaggtcatcaacagagaatcctaaatgccggtaccgttcatctgtttcaaaaagtgtgttgtttgtatatggtccaaaaaatgccaaaccagacgacgggtcaatgaagtcagcccagtatccttcagcccgaagagcatagcaaatttccttagcaccattaatgaacttctccaagagcgcctctc

SEQ ID NO: 5828 - DNA, 455 bp, Homo sapiens
  ref <308>: DATABASE ACCESSION NUMBER: EMBL / AI927365
  ref <309>: DATABASE ENTRY DATE: 2000-03-14
tttttttttttttttttgtaaccaaatgtgtgatttattttgggaagaaaataattaaaactgaggcctttttccaataaagaggagaaataacaatagcagatcataccctggttacaagctaattaccacatcctatacaatgtggatgtgttcaacgtgtattcaatgatatgaataaatgaacatttgcaattttaaaatcccaaatattacatacaaatagtacagcaaatgaatggatatttctgctaatttccacttaatttcttcataatatggctgtctggtgttgcattagtgaagatactccctacaactacatgggtaccccagagactatgacgaatcactttacagcatccaaggtcatcaacagagaatcctaaatgtcggtagcgttcatcagtttcaaaaagagtgttgtttgtatatggtccaaaaaatgccaaacc

SEQ ID NO: 5829 - protein, 296 aa, Homo sapiens
  ref <308>: DATABASE ACCESSION NUMBER: SWISS-Prot / AAF29125
  ref <309>: DATABASE ENTRY DATE: 2002-10-01
MANVLCNRARLVSYLPGFCSLVKRVVNPKAFSTAGSSGSDESHVAAAPPDICSRTVWPDETMGPFGPQDQRFQLPGNIGFDCHLNGTASQKKSLVHKTLPDVLAEPLSSERHEFVMAQYVNEFQGNDAPVEQEINSAETYFESARVECAIQTCPELLRKDFESLFPEVANGKLMILTVTQKTKNDMTVWSEEVEIEREVLLEKFINGAKEICYALRAEGYWADFIDPSSGLAFFGPYTNNTLFETDERYRHLGFSVDDLGCCKVIRHSLWGTHVVVGSIFTNATPDSHIMKKLSGN

SEQ ID NO: 5830 - DNA, 618 bp, Rattus norvegicus
  ref <308>: DATABASE ACCESSION NUMBER: EMBL / AA892548
  ref <309>: DATABASE ENTRY DATE: 2000-03-03
gaaacaaatgtttattactgtttaatggaaccaaaggggcaacacaaagcattgaaaatgtcactggctcacaaatcagccaccttgttaccttcttggtcacatttgtttattcacaaggtttcattcacacatctaaacaagataccaatccagtacaagatcataacggttataaaagtaaacatttgttgggacaatgtacaataaattgcactttcttaacaagcatcacatttaccttaatagagtgtactgcacataatacatggcattgtggaaacaagtaactggtcagtgtttatagaggaagaggctgacggctaatgttgattttatggtcaattagtactttccagactagtcaactcctttattctaacatgtttttattgtagatgctggggaaaataatatttcataaaaatagcataaggtttatattacctcctcagtaagggaaaggcaggacttggaaagaaagaaatggggctgacaaaaaaccctttccctaatttgaacacagcatccatgcattatgtaaaaatgccaagaatagtgaaaccaatgcagggggctgatgggacatcttggatgctgggaccatctccatcttta

SEQ ID NO: 5831 - protein, 451 aa, Rattus norvegicus
  ref <308>: DATABASE ACCESSION NUMBER: SWISS-Prot / P02551
  ref <309>: DATABASE ENTRY DATE: 2002-06-15
MRECISIHVGQAGVQIGNACWELYCLEHGIQPDGQMPSDKTIGGGDDSFNTFFSETGAGKHVPRAVFVDLEPTVIDEVRTGTYRQLFHPEQLITGKEDAANNYARGHYTIGKEIIDLVLDRIRKLADQCTGLQGFLVFHSFGGGTGSGFTSLLMERLSVDYGKKSKLEFSIYPAPQVSTAVVEPYNSILTTHTTLEHSDCAFMVDNEAIYDICRRNLDIERPTYTNLNRLIGQIVSSITASLRFDGALNVDLTEFQTNLVPYPRIHFPLATYAPVISAEKAYHEQLSVAEITNACFEPANQMVKCDPRHGKYMACCLLYRGDVVPKDVNAAIATIKTKRTIQFVDWCPTGFKVGINYQPPTVVPGGDLAKVQRAVCMLSNTTAIAEAWARLDHKFDLMYAKRAFVHWYVGEGMEEGEFSEAREDMAALEKDYEEVGVDSVEGEGEEEGEEY

SEQ ID NO: 5832 - DNA, 4087 bp, Homo sapiens
  ref <308>: DATABASE ACCESSION NUMBER: EMBL / X01703
  ref <309>: DATABASE ENTRY DATE: 1993-04-26
gaattcatgccgttgggtggagtcagcgcccccaggctctacttggaaaacctttaagctcttttctttcgtaagctctctgggcgagggtggtggtatgttttgtgaggtttagcttagccccaaatcctcaagccccgccgccgccgctagtgcggtgcaggaaccgggccagtactgcgcccagggacagagcgctggggaggaacaaaggcggcgctaggctgtgttatccgagagatctttcgggggccgcgggcagcccgtcctgccgcgaccgagggtctgggcgtcccggctgggccccgtgtctgtgcgcacggtttcgctgatgctgaggggccactttctgtctcgcgttgttctctggggaccgggagaggaggaggcacccaaaaagagcgggggcgttgggcgagctcgggggacgtgggagggggaacgggaacaaagcgcagcctagggttagcgtgggaagaccctccgcggtctttggcgttttggaaagatacccacacattcccgggaaaacatggtgagtttctgcccggagcccccggagcgggtgtcagggcggcgaggggcggggttgtttgtttctggcttctatggcgttggagccactgggcgcggttcgcctcactgaacctcttctgtcaggagctgactgaaaaaaaaacaaaaaaacctttcatcattgcggaactgtaggctccaaaagggttttcttcactattataagttagatgacttttttttttcttgagcaaaatcataattcacttcacaagctctttaatgtctggtctggggacgccctgccctgaccgactgaagtgtgtgtgtgtgtgtgtgtgtgtgtgtgtgtgtgtctgtgggacgcctgccctgaccgactgaagtgtgtgtgtgtgtgtgtgtgtgtctgtctgtctcgtctggactgcacagttcagcgagggagaaaggcccactttgtgagggtaccgatggtcaggacccagggaaacgcccttccccgccgcccccccgccccgcccccaccacattcagcgaatagacaattgaaagtggtagccctaaagaccacagagaagaaaacctctattggatgcaaagaatatgaatattatgtgatgggtagagaatctcaggatgaaaatactattttgttgttttaaataaatatttcattatccttccactgggcttttattctttggtaccttttcatgtgatgcttgtttctaacttaggaacttttgtgtgtgtgtgtgtaagatacggataatttttcagcttttacagtggagaagatctggaaaaaggtttttttttaaaaaaaaaagtaatgaaattgctacagacaaagaagaattatactccgcttcccgttgtcccccgttccagtgcatcttaattaattcatttcaattcaggcacatggtcccgggcggtcagaggaggaaaactggcaaaacagcacaatgagatcatgtaggcagctgctggaaatagagcttgctctgttaaataatgtagcagacagtacaggctagcaccaggcacacagcaaatacagcaatgcagcaatgcagaaggcagaccttgtctaaactcctagtattgatggattctgcagtacagatgtccggattataatatcaagtcctattcagaggaaactttcatctttatttaaaagggaagaaagcagtaaaattaatcccaattaagtcataattggatttacttcattttacaaatttgtgctttgaatactgaatagcttttaaatatgaaaatcttctattcaagactggtagtaggccaatggctggatacccgtgctgacagggccaaggcgacaatcattattcagaccacacccatatgcagcatttgtagcaggtgattttccttaaatctttgtatcgtgctggggatatgacctcaaataatttagaaaaatatctgtatattattagaaatattttgaaatttcctataatttaaatgctaatacaccttaattttacatttttcacttttcctccccacagcgtgagtgcatctccatccacgttggccaggctggtgtccagattggcaatgcctgctgggagctctactgcctggaacacggcatccagcccgatggccagatgccaagtgacaagaccattgggggaggagatgattccttcaacaccttcttcagtgagacgggggctggcaagcatgtgccccgggcagtgtttgtagacttggaacccacagtcattggtgagttgacctcagtaacccaagtgagatcccagggtgctggacaggaggtctgtcctggggggctccgctggtcactcacccactctcctcccgctcctcgtcccctcctcctcctccccctgctcctcccccatcatgtctccagatgaagttcgcactggcacctaccgccagctcttccaccctgagcaactcatcacaggcaaagaagatgctgccaataactatgcccgagggcactacaccattggcaaggagatcattgacctcgtgttggaccgaattcgcaagctggtatgtttcttttcaagaataaagtaaattaatgagcctaaagaacacttttgaaataatgctttttttttcaaacacagaattgaactgttattttaataaagagtggaatgagtcattctttggggtttttaaaattcagttaaaatgaactatttgatgtcattttgtaaatgttaatgagaattttttaaaagcatttgtcaaataagatctaagtcctggagatgtatgaaagtgaaatatattactatgatgtactacaagataaactaacctttcctctgtcctctcttttgtataggccgaccagtgcacgcgtctccagggcttcttggttttccacagctttggtgggggaactggttctgggttcacctcgctgctcatggaacgtctctcagttgattatggcaagaagtccaagctggagttctctatttacccggcgccccaggtttccacagctgtagttgagccctacaactccatcctcaccacccacaccaccctggagcactctgattgtgccttcatggtagacaatgaggccatctatgacatctgtcgtagaaacctcgatattgagcgtccaacctatactaacctgaataggttaataggtcaaattgtgtcctccatcactgcttccctgagatttgatggagccctgaatgttgacctgacagaattccagaccaacctggtgccctatccccgcatccacttccctctggccacatatgcccctgtcatctctgctgagaaagcctaccatgaacagctttctgtagcagagatcaccaatgcttgctttgagccagccaaccagatggtgaaatgtgaccctggccatggtaaatacatggcttgctgcctgttgtaccgtggtgacgtggttcccaaagatgtcaatgctgccattgccaccatcaagaccaagcgtaccatccagtttgtggattggtgccccactggcttcaaggttggcatcaactaccagcctcccactgtggtgcctggtggagacctggccaaggtacagagagctgtgtgcatgctgagcaacaccacagccattgctgaggcctgggctcgcctggaccacaagtttgacctgatgtatgccaaacgtgcctttgttcactggtacgttggggaggggatggaggaaggtgagttttcagaggcccgtgaggacatggctgcccttgagaaggattatgaggaggttggtgtgcattctgttgaaggagagggtgaggaagaaggagaggaatactaaagttaaaacgtcacaaaggtgctgcttttacagggaagcttattctgttttaaacattgaaaatgttgtggtctgatcagttaatttgtatgtagcagtgtatgctctcatatcaattactgacctatgctctaaaacatgaatgcctttgttacagacccaagctgtccatttctgtgatgggttttgaataaagtattccctgtcttaaatgaattc

SEQ ID NO: 5833 - DNA, 644 bp, Rattus norvegicus
  ref <308>: DATABASE ACCESSION NUMBER: EMBL / AA892549
  ref <309>: DATABASE ENTRY DATE: 2000-03-03
gagatatattaaaagactttattcacaatagagaaattttacaaatataatttttaaaaattatgtgtcaatctattatgttttccgtaacatcagagatttatataaagttggaaacaacagaatgcacttatgaacaaatcaaaaacaatgtagaagtggatggatacacacgacagagaagtcactgagttctctaaatgagcacacaacttataggtataatattaactgcacaaagtataccaaaacatgttttgtaaacacaaaatcgggtgctaccttaactgctcacctttaagggcgtggatcatacatgtaagtcaaattgcacagctttgttggaaatgaatgactcgtcatctatttggagacttccgttgcttaaaattgacacaagataaaagcctaatcaattacgctactataaaatttgtctcttatcgcgtttaaatttttggtgttctgtgatctggcattaaaaaacagtccaagttttaaaacagaaaacattgctcgccagttggagagtagctcgtggttcggcttcctccctgctcgaaccggaacaaacgctacagtaccgtggagcaggcgcacaggacctgacgttcgcgtcccaaccgctacagaaatactcacca

SEQ ID NO: 5834 - DNA, 566 bp, Rattus norvegicus
  ref <308>: DATABASE ACCESSION NUMBER: EMBL / AA892550
  ref <309>: DATABASE ENTRY DATE: 2000-03-03
ggtgtaaaaccaaaatatggtgatatgatttttagaattatgtgataaagactgttcccttgcagtctctttactaggaagaggaaaacactaactctcaaaaaaagtgaacagtcagtaatatttgttacagcttctgtaaaaaacagaaaagcagagaaagacttctcaaaccatttctttaattttctcatgattctgctaaaagtcaccaaccactacttgaacctccaccttccgggtggcctctcaacctcccagggcacttacgcagtggccgcagaatctgttcagccacagcggctgcttgcactaacaacagcctcatttcttgacttgtgtgctcacaatgttaacgctgtccttcatctgcgtattaaaaaatcatcccggagtgacctcagagcatcaatcaaagctacaaaacacacaatagctagttttgtttaaaatatttgtatccgagattccatttttctaaaaaaaagaaagccccaaagttacataatgtgaaatccactcaacaaggcagctcacttggaggcccccaggtgaacgagagccat

SEQ ID NO: 5835 - DNA, 1486 bp, Homo sapiens
  ref <308>: DATABASE ACCESSION NUMBER: EMBL / AK024048
  ref <309>: DATABASE ENTRY DATE: 2002-08-06
agtgcgcgccggccgggcaaccctatgctggcgtaatcgggttcctccgagccgccgtaggactggttccggcgggctggtgaggaatggagccggtaggctgctgcggcgagtgccgcggctcctccgtagacccgcggagcaccttcgtgttgagtaacctggcggaggtggtggagcgtgtgctcaccttcctgcccgccaaggcgttgctgcgggtggcctgcgtgtgccgcttatggagggagtgtgtgcgcagagtattgcggacccatcggagcgtaacctggatctccgcaggcctggcggaggccggccacctggaggggcattgcttggttcgcgtggtagcagaggagcttgagaatgttcgcatcttaccacatacagttctttacatggctgattcagaaactttcattagtctggaagagtgtcgtggccataagagagcaaggaaaagaactagtatggaaacagcacttgcccttgagaagctattccccaaacaatgccaagtccttgggattgtgaccccaggaattgtagtgactccaatgggatcaggtagcaatcgacctcaggaaatagaaattggagaatctggttttgctttattattccctcaaattgaaggaataaaaatacaaccctttcattttattaaggatccaaagaatttaacattagaaagacatcaactcactgaagtaggtcttttagataaccctgaacttcgtgtggtccttgtctttggttataattgctgtaaggtgggagccagtaattatctgcagcaagtagtcagcactttcagtgatatgaatatcatcttggctggaggccaggtggacaacctgtcatcactgacttctgaaaagtatgtcttgtgtgcttctgatttcgtctgtgaatgaagggaaatggtctcaggttttgtcactttggggttaacaatttaaaaaacgtgtttaaagaattattaagataatagttcattccattttgtagtagacattggctaaggggcttactgaacataattctgcttacggttgaataattacatttttatatatattgtccttcaagaacttccttgagtcacattctccttaaaatttgacattgcctgttgatctttcctttgacagatgtggtactctgtgtgacctcaatgtgtcacctcctttctagtttcctcctttaaaggaaacacatggttagagtgtatctttatggcaaaacttctcagagcttctaatatgcccggtgctgtggaaatctggaaggagaatagcattacctgtgacagttcccaaatctgtttggtcacaaaacttttttccacagaatgtcttgcaagtcgtactggtttttggaaattctgtattagatcttttgaaaggctttttcaagcttaaaaattgtggatcttttttgttactaaggcttttgctttcaaagataaaaatatttgctcttc

SEQ ID NO: 5836 - protein, 277 aa, Homo sapiens
  misc_feature (1)..(277): Xaa=Unknown amino acid
MEPVGCCGECRGSSVDPRSTFVLSNLAEVVERVLTFLPAKALLRVACVCRLWRECVRRVLRTHRSVTWISAGLAEAGHLEGHCLVRVVAEELENVRILPHTVLYMADSETFISLEECRGHKRARKRTSMETALALEKLFPKQCQVLGIVTPGIVVTPMGSGSNRPQEIEIGESGFALLFPQIEGIKIQPFHFIKDPKNLTLERHQLTEVGLLDNPELRVVLVFGYNCCKVGASNYLQQVVSTFSDMNIILAGGQVDNLSSLTSEKYVLCASDFVCEX

SEQ ID NO: 5837 - DNA, 566 bp, Rattus norvegicus; identical to SEQ ID NO: 5834
  ref <308>: DATABASE ACCESSION NUMBER: EMBL / AA892550
  ref <309>: DATABASE ENTRY DATE: 2000-03-03

SEQ ID NO: 5838 - DNA, 1486 bp, Homo sapiens; identical to SEQ ID NO: 5835
  ref <308>: DATABASE ACCESSION NUMBER: EMBL / AK024048
  ref <309>: DATABASE ENTRY DATE: 2002-08-06

SEQ ID NO: 5839 - protein, 277 aa, Homo sapiens; identical to SEQ ID NO: 5836
  misc_feature (1)..(277): Xaa=Unknown amino acid

SEQ ID NO: 5840 - DNA, 549 bp, Rattus norvegicus
  ref <308>: DATABASE ACCESSION NUMBER: EMBL / AA892554
  ref <309>: DATABASE ENTRY DATE: 2000-03-03
caacgtttgcagctgtgtggctttgcagcacagcaattcataaaccacactgtacagaatcaccagcaagactggaatgatgttatagaaggcaccatcatgcttattacattaccagagaacaaaatacaggaaagacagtttctactgtacacagtttaaagaaaggaaaggggaggagtgtgttgagcagccatccatccctgtactcaagagggcaggtagaaaactgacaaaacggagctactaaacctggtctagtatttaagaccacagcttttgaagttctcgtttttgttatttcgttcatagctaaaggacttccttctggaatatttgcagtcttgttaaggtttgtgtgcacacgctggtcacagcaagcagatagaatgccctcatcatttcacaaactattctctactggaaaagaagatcaactttttatttccctgttgcctcctggtgcagatttcaatgttaatgacttcagagtacccgacagtgcattctgatgaatacgtaacaagtttccgtttgtgttgggggttg

SEQ ID NO: 5841 - DNA, 1501 bp, Homo sapiens
  ref <308>: DATABASE ACCESSION NUMBER: EMBL / AF070615
  ref <309>: DATABASE ENTRY DATE: 1999-07-05
aagatgaagtgtttggtgattctgagcctgaacttgatgaagaatcagaagatgaagtagaagaggaacaagaagaaagacaaccatctcctgaacctgtgcaagaaaatgctaacagtggttactatgaagctcaccctgtgactaatggcatagaggagcctttggaagaatcctctcatgaacctgaacctgagccagaatctgaaacaaagactgaagagctgaaaccacaagtggaggagaagaacttagaagaactagaggagaaatctactactcctcctccggcagaacctgtttctctgccacaagaaccaccaaaggctttctcctgggcttcagtgaccagtaaaaacctgcctcctagtggtactgtttcttcctctggaattccaccccatgttaaagcaccagtctcacagccaagagtcgaagctaaaccagaagttcaatctcagccacctcgtgtgcgtgaacaacgacctagagaacgacctggttttcctcctagaggaccaagaccaggcagaggagatatggaacagaatgactctgacaaccgtagaataattcgctatccagatagtcatcaactttttgttggtaacttgccacatgatattgatgaaaatgagctaaaggaattcttcatgagttttggaaacgttgtggaacttcgcatcaataccaagggtgttgggggaaagcttccaaattttggttttgtggtttttgatgactctgaaccagttcagagaatcttaattgcaaaaccgattatgtttcgaggggaagtacgtttaaatgtggaagagaaaaaaacaagagctgcaagagagcgagaaaccagaggtggtggtgatgatcgcagggatattaggcgcaatgatcgaggtcccggtggtccacgtggaattgtgggtggtggaatgatgcgtgatcgtgatggaagaggacctcctccaaggggtggcatggcacagaaacttggctctggaagaggaaccgggcaaatggagggccgcttcacaggacagcgtcgctgaagctccactgttggcaaagtcttggcagtggtacattattcatcgtgtttgcattcttgttaattttttttttggctttggaatgtgacacagcctttttgatcatttctttgatgtgaaaagcatctttggttatcagttaaattgaggtggacattatttccccaatttcacaacaggattcacattgttaatttataaatctagacttggagaattaaggactgagaaatgaccatatcttaaactatctacgacaaagtgaacttaaaaggacatgcccactgaattcaggtcctttgagtaaaaaaaaaatcttctgctgcacattttgtttaagtgttactgtttctgcctgttaatgctgggaacacaaatagtgcaatttgtgcaattggagaatcttgccttttttcttggctccccccaaaaaaaaaaaaaaaaaaaaaaaa

SEQ ID NO: 5842 - protein, 482 aa, Homo sapiens [sequence omitted]

SEQ ID NO: 5843 - DNA, 549 bp, Rattus norvegicus; identical to SEQ ID NO: 5840
  ref <308>: DATABASE ACCESSION NUMBER: EMBL / AA892554
  ref <309>: DATABASE ENTRY DATE: 2000-03-03

SEQ ID NO: 5844 - DNA, 1501 bp, Homo sapiens; identical to SEQ ID NO: 5841
  ref <308>: DATABASE ACCESSION NUMBER: EMBL / AF070615
  ref <309>: DATABASE ENTRY DATE: 1999-07-05

SEQ ID NO: 5845 - protein, 482 aa, Homo sapiens [sequence omitted]

SEQ ID NO: 5846 - DNA, 549 bp, Rattus norvegicus; identical to SEQ ID NO: 5840
  ref <308>: DATABASE ACCESSION NUMBER: EMBL / AA892554
  ref <309>: DATABASE ENTRY DATE: 2000-03-03

SEQ ID NO: 5847 - DNA, 1501 bp, Homo sapiens; identical to SEQ ID NO: 5841
  ref <308>: DATABASE ACCESSION NUMBER: EMBL / AF070615
  ref <309>: DATABASE ENTRY DATE: 1999-07-05

SEQ ID NO: 5848 - protein, 482 aa, Homo sapiens [sequence omitted]

SEQ ID NO: 5849 - DNA, 549 bp, Rattus norvegicus; identical to SEQ ID NO: 5840
  ref <308>: DATABASE ACCESSION NUMBER: EMBL / AA892554
  ref <309>: DATABASE ENTRY DATE: 2000-03-03

SEQ ID NO: 5850 - DNA, 1501 bp, Homo sapiens; identical to SEQ ID NO: 5841
  ref <308>: DATABASE ACCESSION NUMBER: EMBL / AF070615
  ref <309>: DATABASE ENTRY DATE: 1999-07-05

SEQ ID NO: 5851 - protein, 482 aa, Homo sapiens [sequence omitted]

SEQ ID NO: 5852 - DNA, 465 bp, Rattus norvegicus
  ref <308>: DATABASE ACCESSION NUMBER: EMBL / AA892561
  ref <309>: DATABASE ENTRY DATE: 2000-03-03
aagatttacttgtttattttttatatgtatattcatacactgttgctgtcttcagacaacccaatagagggcatcagatcccattacagatggttgggagccatcttgtggttgctgggaattgaactcaggacctctggaagagtagtcagtctcttaaccgctgagccatgtcttcagccttttacgggaaaggtaaatggctcctttgttaaatctgggcagtcgaccacagagacctggacatgagcaaagttgtcctttagccccttctgcaaaacttctgcgagctcctccagacttggcacgtggaaagaaaactcagtgcaagccattctctctcctctcagcaactcagacacagcagctgttggctgacctccaccagagttcacagggcaccagcgtgaacagtccctgctcttgtcacccactgaataaggtgtttgtaatcttccgttagaa

SEQ ID NO: 5853 - DNA, 2403 bp, Homo sapiens
  ref <308>: DATABASE ACCESSION NUMBER: Refseq / NM_014039
  ref <309>: DATABASE ENTRY DATE: 2002-11-05
ctgactaacgtgggcggagctctagctcgcgtatcctgaggaggcggggttggcctaggcgaagatccggactctgggtgttttgctaccgtgaccgtttagaacagaaactgttcatacttggtgcgctgtggactcttgtgataattaaccaagagtagctctatttgtccaacctcacacctaaagaagaaagaaaatggcttgtgctgagttttcttttcatgtaccaagtcttgaagagcttgctggagttatgcagaaggggttaaaagataactttgctgatgtccaggtctctgtagttgattgccctgatttgactaaggaaccctttacctttcctgtaaaaggcatctgtgggaaaactagaattgcagaagttggaggtgtgccttacttattgcctcttgtaaaccaaaaaaaagtttatgatctgaataaaattgcaaaagaaatcaagctgcctggagcctttattcttggagcaggagcaggtccatttcagactctcgggttcaattctgagtttatgccagttattcagacagaaagtgaacacaagcctcctgtaaatggaagttactttgcccatgtgaaccctgcagatggagggtgcctactggagaaatacagtgagaaatgtcatgattttcagtgtgcattactggctaatctttttgccagtgaaggccaacctggcaagcctgcagaattttcttcctgccccttgaactctgatgaagaagtgaataaatggttgcatttttatgaaatgaaagctcctttggtttgtctaccagtttttgtctccagagacccagggtttgatttgcgactggagcacactcatttttttagtcgtcatggagaaggtggacactaccattatgacactactccagatatagtggaatatcttggatacttcttacctgcagagtttctctatcgcattgatcaaccaaaagagacgcattcaattgggcgagattaaatcagctgatacttatttagaaaaagaaataattaaggttaattaattgattgacttattaattaatactgatataaaaccaatagaaatgatcccacaggccaggcacaatggctcatgcctataatcccagcactttgggaggctgaggcaggaagcacactggagcccaggagtttgagaccagcttgggcaacatagcaagaccctgtctatttttttaaaaaagtaaaaaatagaaattatctcactacttaaatcccatttttttcacttcatatgaaagaacatattgatagtatattctatattatttcatagatctgtctgaaagagattgggaacaaaaatatctaattgagatattctttaattttttacatagcagctttattttttttattctgtagtatcagcgaaatcagtcatgtttataccttgaatataaatatcaggaatcatgcaattatttctactatgtatttagtagtatcttatatttgtataacattattacattttgcaaattagtatcacaactgctaagtagatgtttctgagtattagaaaaatcagtgttattacctgcaggatattaaaaaacatttgaaaaagagaaaaagaaaaatcagtgtttagaaatgttgatagttattgaatctttgaattgaattttaaaaatccattctagtaatcagagtatactttttttatagaacaaggtggcaggtggggagccctttacccttctggtgaagttaaaccatagaagtttacaatttgcctttcacaaacattagcagtccgggcatggtggctgaagcctgtgatcccagcatgttgggaggccgagtgggaggattgcctgagcctaggagtttaaaccagcctgggcaccatggtgagaccccatctctattatttaaaatgtttcttaaataaaaaaaacacaaacattagcaactagttggctagccataattcctcccttgtttcgattgccagttagaagcaatttttatttcactggttatttgcaagagaaggggtaaaaaaacagcatcagagtgcaacactgaagtgagcttactttaatttgtaagtgaagctgttgctgaacgtgaccactatcgttgctgaaatataaaattatactcactgattgtaatggttgaaattttcctgaataatcattagccaaagatcaactctctaatggtgctaatggcaatctagctaatgtgcaaatttaggaagtcttcagtactaagtacataattttcaaataatattttttaattgtctactttggatgttagctatgtcttgtgagtataaattccaattttaagcactattttgatgcaaaaaaatgaataaaaaatttaatttaaaaaaaaaaaaaa

SEQ ID NO: 5854 - DNA, 478 bp, Rattus norvegicus
  misc_feature (1)..(478): n=a, c, g or t
  ref <308>: DATABASE ACCESSION NUMBER: EMBL / AA892635
  ref <309>: DATABASE ENTRY DATE: 2000-03-03
accataaatactttatttcaactagaaggtacaatctcccaagggtttcaaagttaaaaagctacaatcacatcatgttgaaatgacatttagaaaaccacaatgctgttaatggacggctccgctttgaccacgtacacttctgcacagcccttatggactctgcacaaagaaatcacttctctcccttctcctcttaattgttcttgtatgtaagttgctttctattccagtatatccagagtggcgagataaccaggccagccacgtagccaaaggtcgctccgagtgtacaggagatgggccacaccttaggagtttttatttaatcccctctcctctgctgtgtgacggctcaccctggcaacctgtaagctcttgcngtccctgccatggtctttcccaatccagtggaatangaaatgctccaagccatgctcctatgaaactagaaactgtagtaatctgaagactgttc

SEQ ID NO: 5855 - protein, 196 aa, Rattus norvegicus
  ref <308>: DATABASE ACCESSION NUMBER: SWISS-Prot / TVRTRH
  ref <309>: DATABASE ENTRY DATE: 2002-06-15
MAAIRKKLVVVGDGACGKTCLLIVFSKDEFPEVYVPTVFENYVADIEVDGKQVELALWDTAGQEDYDRLRPLSYPDTDVILMCFSVDSPDSLENIPEKWVPEVKHFCPNVPIILVANKKDLRSDEHVRTELARMKQEPVRTDDGRAMAVRIQAYDYLECSAKTKEGVREVFETATRAALQKRYGSQNGCINCCKVL

SEQ ID NO: 5856 - DNA, 3150 bp, Homo sapiens
  ref <308>: DATABASE ACCESSION NUMBER: EMBL / BC013135
  ref <309>: DATABASE ENTRY DATE: 2001-08-30
cgagagccgggtgcacgcgccggggaggtagccaacagccgttgggacgcgacgctggttcccaggggagagccagccgctgccgcggcactggttcagacggccaggccctagggacccaccatggatcctgaacacgccaaacctgagtcatccgaggcaccttcagggaacttgaaacaaccggagactgccgcagccctggcaagtagcggcagcgtagtgagttctgtacccaaggcacagcgcaacatctcagcgaagaccgcaccccggaagcaccccgcagtctcaattcgcagtgcgcagtccgcagccgccgcacgtccccaaggcagtgagggcaccgcaccctcaaggaaagccaccacacgcccacccccaaagcccacactcccaccccccaggcgggctggggctgagcccggggccggggcgggggctccggggggaccatgcccggaggccggccggcagcagcatggctcacgggcccggcgcgctgatgctcaagtgcgtggtggtcggcgacggggcggtgggcaagacgtgcctactcatgagctatgccaacgacgccttcccggaggagtacgtgcccaccgtcttcgaccactacgcagtcagcgtcaccgtggggggcaagcagtacctcctaggactctatgacacggccggacaggaagactatgaccgtctgaggcctttatcttacccaatgaccgatgtcttccttatatgcttctcggtggtaaatccagcctcatttcaaaatgtgaaagaggagtgggtaccggaacttaaggaatacgcaccaaatgtaccctttttattaataggaactcagattgatctccgagatgaccccaaaactttagcaagactgaatgatatgaaagaaaaacctatatgtgtggaacaaggacagaaactagcaaaagagataggagcatgctgctatgtggaatgttcagctttaacccagaagggattgaagactgtttttgatgaggctatcatagccattttaactccaaagaaacacactgtaaaaaaaagaataggatcaagatgtataaactgttgtttaattacgtgagaaacatcttcagtggccaaggaaactgtccatttctctcagaaagcaaatgaaatgctacagctatacccagaccttttataggtaatgaagcagttcaaaacttgaaagaaaacaaaacctgtcctcagaattctataaagtgtattaagaatgttccttaaaggtttaagaagcagtaagcagcatctgaagccacaatctattataaatactttatttcaactagaaggtacaatctctcaggggtttcatagtttaaaaagctacaatcacatcatgttgtaactacgtaaaaaacagagctgtaaatggaactgcttggctttgaccatacacatttctgcccagcccttacagaatctgcacaaagaaatatctccctttgctccagttaattgttcttgtatgtaagttgctttctattccagtatatccagagtggtgaaataacaaggccagccacgtagccaaaggtcgctccaagcgtacaggagatgggccatacctgaggagagaatgtatgagatcaaaaaagaacaaatgttttattattacttgagcacaagtgtaacctaaatatttctatattaaagcttaatgtgctttcttaaagaatgccaaaagtgtaataaggtcataactgcatttatcatgaacactaaaaatgtacacattttagttaatgtgcattaaactgtaacaaggcttctggcaattgtagatttagtttgacgctccccaaagtgcatgagacacatgctaaaattacaaattaaaattttgggtcagactttgccataatgatagactcaatttagctctctgaactagttggtaatttttttttttaattcccactttggctgtgtacatcaaatgaaatgagaagtgtgtatgctgaccaaaccacaagaaactttctttaagttgtgttaaagaggaaagacctagaatccaagcgtgttacatgaaaattgtaacagagcagctgcttccacctttcagatatagatgttggaaccacagcagaagttatagagcgacaacttatatacacacctagaatgtaagttaaacaaaataccggcttccagagaccccttttctccagccatattacatcaggctagaagtaattaatgttgatttatttcatctacaagcagttggtccctaagtgaaaggctctgcttgaaaaaaaaaagaaaaaaagttggaggaaaattttcatgttcttctgtgaagcttatttggtacactggagccatttctaatctttctctggggggaacaggccacagaactgtgttagaggtgaaccatcttaattactagttctattacctaattcagcttccttgtttggtctgctgtggatctgccttattgcatatgccatgcatcagataatggatgcatcagataatggtgttagacaaagcttcattgtgaacaacctaatgcattttagagaaacaatctcatcacattttttctagcctttcctacatttaaacttgctgttgcccaaattataattttttaaatgtctttggtgggcttctgttaattcacatgacttgagcttatagctatgtctactgcacagattgggtaatggaacactaaacttttatacttgaaaatgacagccttaaatgctcatatcagtcacaaatctaggatgtactgtcttgttgtatgtgagctttgtagagatttttaaaaatataagcatcaccttcccattgaagagtggagagagtctactggatgactggccaggaactttctctctgaatcggacatttggatgtcttctttcttccaagaaatggtggttcacattaaagtatcatggccttatgtatgctcaaatggaatcttatgtaactttcttatttaattttggtctgcttatttttagataaaattgaaaggaattgtataaatcaattaacatattagctgagttgtccaacacatggtataaacgaattacaacagtaaactattacacatttccaacttgcaaaaaaaaaaaaaaa

SEQ ID NO: 5857 - protein, 213 aa, Homo sapiens
  ref <308>: DATABASE ACCESSION NUMBER: SWISS-Prot / P17081
  ref <309>: DATABASE ENTRY DATE: 2002-06-15
MPGAGRSSMAHGPGALMLKCVVVGDGAVGKTCLLMSYANDAFPEEYVPTVFDHYAVSVTVGGKQYLLGLYDTAGQEDYDRLRPLSYPMTDVFLICFSVVNPASFQNVKEEWVPELKEYAPNVPFLLIGTQIDLRDDPKTLARLNDMKEKPICVEQGQKLAKEIGACCYVECSALTQKGLKTVFDEAIIAILTPKKHTVKKRIGSRCINCCLIT

SEQ ID NO: 5858 - DNA, 478 bp, Rattus norvegicus; identical to SEQ ID NO: 5854
  misc_feature (1)..(478): n=a, c, g or t
  ref <308>: DATABASE ACCESSION NUMBER: EMBL / AA892635
  ref <309>: DATABASE ENTRY DATE: 2000-03-03

SEQ ID NO: 5859 - protein, 196 aa, Rattus norvegicus; identical to SEQ ID NO: 5855
  ref <308>: DATABASE ACCESSION NUMBER: SWISS-Prot / TVRTRH
  ref <309>: DATABASE ENTRY DATE: 2002-06-15

SEQ ID NO: 5860 - DNA, 3150 bp, Homo sapiens; identical to SEQ ID NO: 5856
  ref <308>: DATABASE ACCESSION NUMBER: EMBL / BC013135
  ref <309>: DATABASE ENTRY DATE: 2001-08-30

SEQ ID NO: 5861 - protein, 213 aa, Homo sapiens; identical to SEQ ID NO: 5857
  ref <308>: DATABASE ACCESSION NUMBER: SWISS-Prot / P17081
  ref <309>: DATABASE ENTRY DATE: 2002-06-15

SEQ ID NO: 5862 - DNA, 480 bp, Rattus norvegicus
  misc_feature (1)..(480): n=a, c, g or t
  ref <308>: DATABASE ACCESSION NUMBER: EMBL / AA892637
  ref <309>: DATABASE ENTRY DATE: 2000-03-03
tcttcaactttattttagctaagtcattttcagattctggaaaagtgacatttccaggttaaccttgagaatgttaggcaagcaagcaagtttagtaaagttgccttgcaggaatgagaacttctggtggtggagctcattggacttacagtgtacctagatgtaacatgactgaaaaattaaaactgattgcttctgtgtcttttgtgtgatcattagccttaatcatccaaggcagtgctgtctatctgaactacctttgagacagactctctgaaaggctggatccccatgttccagccaagtgttatgaaccagtcatctttattgtactcatacaggctaggtacatgcacactactagacaacactgccttccaccacccacgacagcatcgaatatgatccagatctctattttgttatcaagctttaccanaaatatacttaaatggactatagtaaaaaaagagtcactag

SEQ ID NO: 5863 - DNA, 506 bp, Rattus norvegicus
  ref <308>: DATABASE ACCESSION NUMBER: EMBL / AA892642
  ref <309>: DATABASE ENTRY DATE: 2000-03-03
catggccaaacaaaagtatttattagggtttttttcttataaacattttcttctaaagaaaaaaaacctaaaatttaaatacctcacattctgccacatgagactgtatacattatttacatctgtcaaataaaacatattacagattttctgacattcagtatttcctttaaaataataacagagaaacaactttgatcagtaactacaatttgcataatcttggcacaatttacaatatggcgcctacgttgcatttcatagtttagatcgtttttgtcccatctaactatcttactagagaacctgtcccatcacgagaacagacatgtgtctccgtgcatagcttaagcaattgcacaatgcgaatcctccttctgcttccattacctggcactggcagcagttctgatttttgtcttcagaaatgatttctattctgtgttccttatatgctatcttcacaacattatttctaccaataattttaagtaataacttaaatg

SEQ ID NO: 5864 - DNA, 3325 bp, Homo sapiens
  ref <308>: DATABASE ACCESSION NUMBER: EMBL / AL162039
  ref <309>: DATABASE ENTRY DATE: 2000-03-23
aattaacaagcatgttagttgctggtagaggttttggaggttaatttaccttaaattggaagacttttaattgcagtctctttctaccttccctctgttagtcatttgtaaattctaaatggtcaccataaaatgtattaggtaggagaagatacgttttatgtataatatatctcagactgagttactgcctgtcttatcaggatggataaaacactacagtctcttatcaggaaatagagatgatgtggatatttatatattacatatataaccaccagactccattttatatattagcattttccttgcttatgggaaaatagcaaaacaacatttcatttatacttttgtttacccctctctgagacaggttttgataaccactgaaatggtagaatatgtgagatacaaatattgagttgtagaactttctttttaaggtgaataagtcatgccttaacatccaaataagagttcatcttcagagtggttcttttgggagcactgtttattccagctatactgcaaaagtataatgtttttggaactgttctagagcataccatgaaaagcagtttgttattatgcaggaaaatcagtttcatcattttagttacactaaacacttttggcagcttaatatgacctttttaaattttttttattttttttatttttatttctttaagatggagtcttgctctgttgcccgggctggagtacaatggcatgatctcagctcactgcaacctccacctcctgggttcaagcatttctcctgcctcagcctcccaagtagctgggattacaggcagcaccacacctggctaattttcatatttttagtagagatggggtttcaacatattggccaggctggtctcaaactcctgacctcaagtgatccgccctccccagcctcccaaagtgctgggattacaggtgtgagccaccacagccagccagtatgacctatcttaatcatcagctcaactgtaatttaaatttggctgttctctggagctaaaccattagggaagttcaaaggaatgtgccatgatttccgaatttgcacaagagaatgttttaagcattggtagcatcattgaataaaagaatagtttcctgatgtcactattttgaagtggaaattatcacttggatgtggaggttttactttttaaaaacattcagcttaattaccttaccttaattaccttagttagatatactaatggaaaaaaaccaagtcctttctctagaacttgttttctatttttgttccttttcatgaaaacttctcaatttaattttaactactgtaggatagtattgattgaatggatactatggaaaagtggatccaatatttaagatagaagtagtttaaggagacaacagcctttactgccatttttttttaaatgttttcactcagatgaacaatttgactttaataaaagactggagatttttgtacaaagaaataggaataagtttcatatactaattatgctgagttttaagcctacatatcacaaaatatttagaattgtataaccttttcatatatttataacttttaatgtctttttaaaagatgtgggaccaaaaatatatttataatttggaaatgtgactgcataccaataagaaaacttaccttattttgaaatttatctgggatattaaagaatctaccaattcttaaaaacacagatttatactttaagcttattttaaaattaaagaatatataccaattcttagaaacactttaaggactactcttaaataacttaaatatcagagttttgttgtaatattaaaatttaccatggaaatcactgttgttcagctatcaccttaattgtgtatgatatgataaatgtttagcagtaaagctatcttaagatttaatggaaaagtttaatttgaagatgtaacaaaaattctgaccacagttgattctgaatttttaaggctttcctaataggctgatcacagagaataatccattttgaaggtataaaactgcactgtatgtctgtcacttgtagctgaactgattcacattttgacaaaagagagaaaatacaaaaatgagttttgcaaatgtaataactttttctgcatatagaactaaataattgaaaaatatgggctatagttctcaaaggtagatagtaaaatcactggctttttccagctgtatgtttttccactgtgcgtgtacacacacactggaaaataattaggctgattttgcaggtcttcattgttagagattctgaagtatttactgtcaattcataggtttcagtttatttaggaaattagtgtttgacagctttttttaaattatttcactgaagctgagattattagtgatacaaagttaaaatttcaatatttaatttctctatatattattaatattaaattgttttttacttataaattcatgttctcatctgatttaatattaaatttgtataggtgggcgtttcttaccattttgcacaagtttttgtttttctgaaatacttaattgtgcaggttgtaaaaaagattagtgcattttcattttaaggatgctttgctccttaaattgttcgacagaaatgactttttagggaaagtagtttttttggagctactaacttgtatttattattgtacatgcataaccagggtggtgagggcactaatcttgtaggaaacacttacttgatgttttatttgaacttttcctataggtttaacttttactgcatagaattaacactaggaacagtgtcatgaaatctgggttgaaggagaatacagtatatatgagaacacttaaagttcaaatagaaatcatttctgaagacaaaagcagaggaatattgtcagtgccaagtaatggaagaataagggcggcatttacactgtgcaagtattgagaagagtgcataaagacagggaactactctcatggagacagtttctctcttataatcaagtaactagaaggggaaaaatcatctaagttatgaaatccaacataggcgctatattacaaactgtgccggattatgcaaattgtagttgttactgatcaaagtttaattgcttcatttttgtttaaaaagggatactgatgtcagaaaatctgtaatatgttttattcaaaagatgtaaataatgtatacagacttgtatgtgatgggatgggaaatatttaaattctaggtgttttttttttttttaaagaagaaactcaatgtttataagaaaaaaatgaataaatagttacgtttggccctgaaaaaaaaaa

SEQ ID NO: 5865 - DNA, 459 bp, Rattus norvegicus
  ref <308>: DATABASE ACCESSION NUMBER: EMBL / AA892675
  ref <309>: DATABASE ENTRY DATE: 2000-03-03
cggagctggggaccgaacccagggccttgcgcttcctaggtaagcgctctaccactgagctaaatccccagccccagtgcctgcccctcttaaggcctgttctcacaacatccttaccaaccactttgccagtagaacagccgctgtagatgaactgctggcccgtgctgtgggctggggagaatcggcatcggatcagagtgtgaagcactccatggcctctgtaggtcatcaaggagctgtcacctgggagcttcaacttcttccaggctttcttgggcacctgctgccagcgatagtcccagttctgctgtgtggcagccagtcgtgacgcttccatgccttctcggctggaaaagcgtctgatatcccagagcttaatggtctgatctttggagttggagatgagataccgggcatcacccttgctgtcaatgaaggtgatgccatcctggtggc

SEQ ID NO: 5866 - DNA, 2778 bp, Homo sapiens
  ref <308>: DATABASE ACCESSION NUMBER: EMBL / AF267858
  ref <309>: DATABASE ENTRY DATE: 2001-01-02
tggtcgataaggtgggggcgtcgaggtctttgagtcctaaggcttctaattggttagatgagataagctagtgaagcgctttcttccgagagggatttcgattggtcggtcagagaggttacctggaaatccaacaccgcccaacacccctcccgctccccagtccggggacttcgataggattggagaaggtttgtgttcccgacgccttggtagttggcataggctaaagaaaagggatctcagccccgaggaagggtcaccctcctagagatagctactaccccgtctcaggagaccctggtatttctagagcacgctttgctttcaccaaacccaaggaggtgacaggaggagcccccgcacaggacctaagaatactgtgaccagaagatgggatcgcggaacagcagcagtgcaggatccgggtccggagacccctccgagggcttgccccgaagaggggctggcctgcgtcggagtgaggaagaggaagaagaggatgaagatgtggatctggcccaggtactggcctatctcctccgcagaggccaagtgaggttggtgcagggaggaggtgcagcaaatttacaattcattcaggccctcttggactcagaggaagagaatgacagagcttgggatggtcgtcttggggatcgatacaacccacctgtggatgctacccctgacacccgggagctggaattcaatgagatcaagacacaagtggaactggccacagggcagctggggcttaggcgggccgcccagaagcacagctttcctcgaatgttgcaccagagagaacggggcctctgccatcggggaagcttctcccttggagaacagtctcgagtgatatctcacttcttgcccaatgatctgggcttcactgatagctactctcagaaggctttctgtggcatctacagcaaagatggtcaaatattcatgtctgcttgccaagaccagacaatccgactctatgactgccgatatggccgtttccataaattcaagagcatcaaggcccgcgacgtaggctggagcgtcttggatgtggccttcacccctgatgggaaccacttcctctactctagctggtctgattacattcatatctgcaatatctatggtgagggagatacacacactgccctggatctcaggccagatgagcgtcgctttgctgtcttctccattgctgtctcctcagatggacgagaagtactaggaggggccaatgatggctgcctgtatgtctttgaccgagaacagaaccggcgcacccttcagattgagtcccatgaggatgatgtgaatgcagtggcctttgctgatataagctcccaaatcctgttctctgggggagatgatgccatctgcaaagtgtgggatcgacgcaccatgcgggaggatgaccccaagcctgtgggtgcactggctggacaccaggatggcatcaccttcattgacagcaagggtgatgcccggtatctgatctccaactctaaagaccagaccatcaaactctgggatatccgacgcttttccagccgggaaggcatggaagcttcacgccaggctgccacacagcaaaactgggactatcggtggcagcaagtgcccaaaaaagcctggcggaagctgaagctcccaggggacagctccttgatgacctaccggggccacggagtgctgcacaccctcatccgctgccggttctcccccattcatagcactggccagcagttcatctacagtggctgctccactggcaaagtggttgtgtacgaccttctaagtggccacattgtgaagaagctgaccaaccacaaggcctgtgtgcgtgacgtcagttggcacccctttgaagagaagattgtcagcagttcgtgggacgggaacctgcgtctgtggcagtaccgccaaggctggagtacttccgaggatgacatgccagaatctgaggaatgtgccagcgcccctgccccagtccgccccaatcctctacacccttttcctcaccccaggtagatccaacctccagccccatatagggtgaacctcttgataagctctctgcctcctcctccctttctcccttgtggggaatgtttggaggaatcactggcatttgatggggaataacataagcctgggctctgagcctcagctgagccctggaagattctccccatggggcagagtggtctccttacgtgctcacacccagtcagcttgggtccctatctctggccagagtttggcaggactggccattatctggggtgtggcctctgccagcaagagaagtgtcctgggtgtttttaatcatgtttgaatgttaggggttggatcctagagtagatgcctgaggccacatctgaacagacctgtcagccaggcctgccaggtcttcacgttgaggattcaactggccaatcacaggacaggtgtcctggcctttcttcctgaggtctctaggggaggggcatgggtaagggtgtttcctcagcaccctcctggggtggggattatgtctgctgtcatgtctgggtctttagggtaggacaggctgtggtatgagaggcaggagtctccacaaggcttcatgtggccccttaataggcaggccctgccctctgggaaggtcccttcatgctggaggcacacagctttaaggaagtaggttgaagtaggactccttcgtcctctcactggctttggctccctcaataaactgtgtgggaacctgaaaaaaaaaaaaaaaaa

SEQ ID NO: 5867 - protein, 548 aa, Homo sapiens
  ref <308>: DATABASE ACCESSION NUMBER: SWISS-Prot / AAG44727
  ref <309>: DATABASE ENTRY DATE: 2002-10-01
MGSRNSSSAGSGSGDPSEGLPRRGAGLRRSEEEEEEDEDVDLAQVLAYLLRRGQVRLVQGGGAANLQFIQALLDSEEENDRAWDGRLGDRYNPPVDATPDTRELEFNEIKTQVELATGQLGLRRAAQKHSFPRMLHQRERGLCHRGSFSLGEQSRVISHFLPNDLGFTDSYSQKAFCGIYSKDGQIFMSACQDQTIRLYDCRYGRFHKFKSIKARDVGWSVLDVAFTPDGNHFLYSSWSDYIHICNIYGEGDTHTALDLRPDERRFAVFSIAVSSDGREVLGGANDGCLYVFDREQNRRTLQIESHEDDVNAVAFADISSQILFSGGDDAICKVWDRRTMREDDPKPVGALAGHQDGITFIDSKGDARYLISNSKDQTIKLWDIRRFSSREGMEASRQAATQQNWDYRWQQVPKKAWRKLKLPGDSSLMTYRGHGVLHTLIRCRFSPIHSTGQQFIYSGCSTGKVVVYDLLSGHIVKKLTNHKACVRDVSWHPFEEKIVSSSWDGNLRLWQYRQGWSTSEDDMPESEECASAPAPVRPNPLHPFPHPR

SEQ ID NO: 5868 - DNA, 451 bp, Rattus norvegicus
  ref <308>: DATABASE ACCESSION NUMBER: EMBL / AA892680
  ref <309>: DATABASE ENTRY DATE: 2000-03-03
aaaaacaaggcactgctctctatttaaagtaaacctattgagcgacagccgtggcacagaatatgttcaagatggggcgtgaaccccagggctcccgcatggagcccagtactgtagatgccagcagaaggaccagtctctgatggactcagaactggataaaccacactgggcgtttcccagttaagtgtttgccagtgtgtggccaggcctattacagctactgagcaaacgggttggcatgaatagttatgtccttaatgtgcacatcattaagaggtctgtaagtcttctcatttactggtaacttctccaattcatccaaagtctccagaccatctattacctttccgaacactgtatatttcatgtccaagtgtggctgcttgccatacgtgatgaagaactgagatccgttggtgtttgggccattattagccatagatacaac

SEQ ID NO: 5869 - protein, 163 aa, Rattus norvegicus; identical to SEQ ID NO: 4784
  ref <308>: DATABASE ACCESSION NUMBER: SWISS-Prot / CSRTA
  ref <309>: DATABASE ENTRY DATE: 2002-06-15

SEQ ID NO: 5870 - DNA, 1137 bp, Homo sapiens; identical to SEQ ID NO: 5714
  ref <308>: DATABASE ACCESSION NUMBER: EMBL / AF251049
  ref <309>: DATABASE ENTRY DATE: 2001-04-16

SEQ ID NO: 5871 - protein, 48 aa, Homo sapiens; identical to SEQ ID NO: 5715
  ref <308>: DATABASE ACCESSION NUMBER: PIR / S64705
  ref <309>: DATABASE ENTRY DATE: 2000-07-21

SEQ ID NO: 5872 - DNA, 382 bp, Rattus norvegicus
  ref <308>: DATABASE ACCESSION NUMBER: EMBL / AA892754
  ref <309>: DATABASE ENTRY DATE: 2000-03-03
aaaggtctcaagataatttattccaaattttaatataaacaagtaattagcctgtattatacatgcagaacaatttcagccccttccttcccttcccctccccccacacaatgaaaaggcatagtctgtacatgatgctactcggctcttgtagggaaaatgtcactgtgctttgtgtgggctttgtgtgtctcttttctgcagtgctgtggcacatttgatccgacaccgttgacacatgggatatagccaccaaggcacaaaaagggggaaggagcagcaactttgatacaaagaataaggaccaaacaagccattcctgtgcttgaggatggacacacacacacttgaggacccttctttccttctcaaataatcacaa

SEQ ID NO: 5873 - DNA, 711 bp, Rattus norvegicus
  ref <308>: DATABASE ACCESSION NUMBER: EMBL / AA892775
  ref <309>: DATABASE ENTRY DATE: 2000-03-03
caaactttttttttatttttttttttttttttgcgttgaaaatcatttaatgagaattatactttttctctatcagattagatctgttctagtgattattgtctggtgttacaagctcatctgtctcagagttggttagtgtgcatgaagctacttaagaaagatatggacaagcacagctcactggtccccctgagcacctcacaagactgggaacatcctctcaagggttaaaacagacgggcatacgggctgagaatttattttgaaggcaggataaacaggccagctctaagaagatactgttttgaaagctcacacgtttcataagtttctgagttcaggcagtctcagttctcatccactgagtcctgggccctcaaaagccctccaggtccaccacagaggctgttctaactgggtgctgagcctatacaaagccctggcactcacacaactgccattccccaagatcaactcgtctcctgtaaatatgtgctgtttgtatccggcacagggctgatgaagatggatcccgatggagcctactgtgcattacttcctgatgtgcagagatgtgtgtggtgagactgtgcgggatgctgggagcagtgtgcagtgcgttgggagactgagaagtgaaagccctgttggtttgaggggaaagcaaggaaatgtgacctttcccatagctactcccacagtgagaaa

SEQ ID NO: 5874 - protein, 148 aa, Rattus norvegicus
  ref <308>: DATABASE ACCESSION NUMBER: Refseq / NP_036903
  ref <309>: DATABASE ENTRY DATE: 2002-11-05
MKALLVLGFLLLSASVQAKIYERCQFARTLKRNGMSGYYGVSLADWVCLAQHESNYNTQARNYNPGDQSTDYGIFQINSRYWCNDGKTPRAKNACGIPCSALLQDDITQAIQCAKRVVRDPQGIRAWVAWQRHCKNRDLSGYIRNCGV

SEQ ID NO: 5875 - DNA, 1487 bp, Homo sapiens
  ref <308>: DATABASE ACCESSION NUMBER: Refseq / NM_000239
  ref <309>: DATABASE ENTRY DATE: 2002-11-05
ctagcactctgacctagcagtcaacatgaaggctctcattgttctggggcttgtcctcctttctgttacggtccagggcaaggtctttgaaaggtgtgagttggccagaactctgaaaagattgggaatggatggctacaggggaatcagcctagcaaactggatgtgtttggccaaatgggagagtggttacaacacacgagctacaaactacaatgctggagacagaagcactgattatgggatatttcagatcaatagccgctactggtgtaatgatggcaaaaccccaggagcagttaatgcctgtcatttatcctgcagtgctttgctgcaagataacatcgctgatgctgtagcttgtgcaaagagggttgtccgtgatccacaaggcattagagcatgggtggcatggagaaatcgttgtcaaaacagagatgtccgtcagtatgttcaaggttgtggagtgtaactccagaattttccttcttcagctcattttgtctctctcacattaagggagtaggaattaagtgaaaggtcacactaccattatttccccttcaaacaaataatatttttacagaagcaggagcaaaatatggcctttcttctaagagatataatgttcactaatgtggttattttacattaagcctacaacatttttcagtttgcaaatagaactaatactggtgaaaatttacctaaaaccttggttatcaaatacatctccagtacattccgttcttttttttttttgagacagtctcgctctgtcgcccaggctggagtgcagtggcgcaatctcggctcactgcaacctccacctcccgggttcacgccattctcctgcctcagcctcccgagtagctgggattacgggcgcccgccaccacgcccggctaattttttgtatttttagtagagacagggtttcaccgtgttagccaggatggtctcgatctcctgaccttgtgatccacccacctcggcctcccaaagtgctgggattacaggcgtgagccactgcgcccggccacattcagttcttatcaaagaaataacccagacttaatcttgaatgatacgattatgcccaatattaagtaaaaaatataagaaaaggttatcttaaatagatcttaggcaaaataccagctgatgaaggcatctgatgccttcatctgttcagtcatctccaaaaacagtaaaaataaccactttttgttgggcaatatgaaatttttaaaggagtagaataccaaatgatagaaacagactgcctgaattgagaattttgatttcttaaagtgtgtttctttctaaattgctgttccttaatttgattaatttaattcatgtattatgattaaatctgaggcagatgagcttacaagtattgaaataattactaattaatcacaaatgtgaagttatgcatgatgtaaaaaatacaaacattctaattaaaggctttgcaacac

SEQ ID NO: 5876 - protein, 148 aa, Homo sapiens
  ref <308>: DATABASE ACCESSION NUMBER: SWISS-Prot / P00695
  ref <309>: DATABASE ENTRY DATE: 2002-06-15
MKALIVLGLVLLSVTVQGKVFERCELARTLKRLGMDGYRGISLANWMCLAKWESGYNTRATNYNAGDRSTDYGIFQINSRYWCNDGKTPGAVNACHLSCSALLQDNIADAVACAKRVVRDPQGIRAWVAWRNRCQNRDVRQYVQGCGV

SEQ ID NO: 5877 - DNA, 662 bp, Rattus norvegicus
  ref <308>: DATABASE ACCESSION NUMBER: EMBL / AA892779
  ref <309>: DATABASE ENTRY DATE: 2000-03-03
aagtgggaaagtcagctttatttataaaagtggtcgggtacagaggacgccatcccacccctctaaatgactgtaacagacattcacatgatactcacatagtttaactcttcctatataaaactgaacaacagtattataggatgaggaaagaaccccacaaggtttgcctaagacatcaaaacaaacaaaccgaagctgcctagcattaatgatctactgacaacagaatgagaaactaaggctcatacctatggcatgctactgcaccaaggaatgcctggagaggccaatgctccacaatgaacagccatttgagcaggttggtttgtgactctggctgatttcgccaactaacagttataccgattttataaacaaatccttgtgaaacagggaagacttgctaccaaggagaatatgttaacagtcctgcctcactgttcaggtcaactagtaaacaacggcataaaaagaacttaaaacctcagctcccaaacaactggtttacagaattagaactctctctgaaatcagggtactgccccgtagttacttataaagttcttcatagtagaaatgatatattctagttaaccaaagagttcaaaataaattacccaaataacaatttgtcagttagctgtaactgttactttaaa

SEQ ID NO: 5878 - DNA, 1484 bp, Homo sapiens
  ref <308>: DATABASE ACCESSION NUMBER: EMBL / AL136667
  ref <309>: DATABASE ENTRY DATE: 2002-07-12
gggggccttggaggcgccacgtcccttgcggcggcgggagagaagtcgcttggacttcggggcggcctcggacggccatggcctttaccttgtactcactgctgcaggcagccctgctctgcgtcaacgccatcgcagtgctgcacgaggagcgattcctcaagaacattggctggggaacagaccagggaattggtggatttggagaggagccgggaattaaatcacagctaatgaaccttattcgatctgtaagaaccgtgatgagagtgccattgataatagtaaactcaattgcaattgtgttacttttattatttggatgaatatcagtggagaaaatggagactcagaagaggacatgccagtagaagttattactttggtcattattggaatatttatatcttagctggctgaccttgcacttgtcaaaaatgtaaggctgaaaataaaaccagggtttctatttatctgttttttttttttaatgttgcacttgtagtttcattacaaaagatcagatcatgaaaggcagtaactctccaggactggaatatctgattgctcagtgttgatagtagttcatgctgtggtgagattgttaaaagggtgcaagactgttgcttctctttttttagatatttttctatctctcacttctcagggatggaattctttttcaaagttttgaagttccttgcaacttagccatgatgtgagtggttatccctagataaaattaaaaggatttttaaaaagtaattactgcacataaaatgataaataggtaatttgaataattttattttaagctccttggttaattattttgtctattgtctcagctataaattcaaatttatacgtactattgagtattaatattctctgatttcagggagaattctgtcagtcacatgatgattatgtttttgtttaacattctttccatgcacttgttattttattaatttgcctgaatgatgagaccagaccagtgtctacagattttcattgtcagaaaaatctataagtctgccctttttacaatgatgatttaaaaaaaacaacagcgtaaatattagcccacaagagcagtcctaaacaatcacaattacactgtactacccaagaagactgtttattgtgaagcatttacctttcaaaaaatcattacatttctatttcttggtggagcagcacattgtggagtgtgattcttaattcttcattgagtttgtcaataggacattgatgctggataggttgtcttttgtatttatgtctcagaccatcttgtgagattgtttgcctatctcataatacagttttatgcagaaaggttgaaactatgtaaatggtttttatggaaattatcagttacaacattttaaaggtgtagaatggcatctttgtttataggagaacatttgtaaataaagttaaatttctaagttaaaaaaaaaaaaaaaaaaaaaaaa

SEQ ID NO: 5879 - protein, 83 aa, Homo sapiens
  misc_feature (1)..(83): Xaa=Unknown amino acid
MAFTLYSLLQAALLCVNAIAVLHEERFLKNIGWGTDQGIGGFGEEPGIKSQLMNLIRSVRTVMRVPLIIVNSIAIVLLLLFGX

SEQ ID NO: 5880 - DNA, 662 bp, Rattus norvegicus; identical to SEQ ID NO: 5877
  ref <308>: DATABASE ACCESSION NUMBER: EMBL / AA892779
  ref <309>: DATABASE ENTRY DATE: 2000-03-03

SEQ ID NO: 5881 - DNA, 1484 bp, Homo sapiens; identical to SEQ ID NO: 5878
  ref <308>: DATABASE ACCESSION NUMBER: EMBL / AL136667
  ref <309>: DATABASE ENTRY DATE: 2002-07-12

SEQ ID NO: 5882 - protein, 83 aa, Homo sapiens; identical to SEQ ID NO: 5879
  misc_feature (1)..(83): Xaa=Unknown amino acid

SEQ ID NO: 5883 - DNA, 558 bp, Rattus norvegicus
  ref <308>: DATABASE ACCESSION NUMBER: EMBL / AA892780
  ref <309>: DATABASE ENTRY DATE: 2000-03-03
caatagagagatgtttaataagacttgctcagactggaggcttagatcctccctgtgccgcatacccaatacagaaaaaggtttctataaagtgaacacttttaagtagtaagtagtagaaagagggaggccctgagactagcctggagagtgaggtaaggcagtggtggactcctctgtgggccaggcctgggaaagacgggagctcttcttgcaaaggccttgctgccacctttgtatagggggggataggatggaggtgtccttgaagatcaagcccgtagtggggcgatcacagcagtgcaagtgaggctttccacaaggacagatggctaaaaacgaccgtcaccaggaagtgtcacccccaaccccagagttctttccactagatctggtgggggcactctagccttcactgtgacacaggaccctaaacatgggtcaagccatctgcaaggtgccgactgctctttgtcaacacgggggctacgccgctttcttcctttttgcacgcttagcacagcccctgccgaaccagcctcctacgatgggggtggc

SEQ ID NO: 5884 - DNA, 528 bp, Rattus norvegicus
  ref <308>: DATABASE ACCESSION NUMBER: EMBL / AA892801
  ref <309>: DATABASE ENTRY DATE: 2000-03-03
caaccacagaagagtttattactccaatgattcgcacagctgggttgcaggtctaagggttgcctgccttcctggaggcactcccccacttccccctctgggggaattacacttggccacatacatctctgcaaactgcttcagtgtgaaggcccacccatgcaggccagagccaaagcctacagtgcccaggacaggatcgatcatgatattgcccatgggtccactctcgccctcgccataggtggagatgatgacattgacgttctccacgatgcgctggaaggtctggtagagctcctcaggctccagttgcagttccagcagggcccggtccatcttgttcatcatcagcacgggcttgatgcgctcagcgatggcctgccgcagcactgtctctgtctgcacacagacaccagacacacagtccaccaccaccagtgctccatcagtgacacgcagagcagcggtcacctctgaggagaagtccacatgacctggagagtcaatgaggttgatcctcgtgcc

SEQ ID NO: 5885 - protein, 857 aa, Rattus norvegicus
  ref <308>: DATABASE ACCESSION NUMBER: SWISS-Prot / P05197
  ref <309>: DATABASE ENTRY DATE: 2002-06-15
VNFTVDQIRAIMDKKANIRNMSVIAHVDHGKSTLTDSLVCKAGIIASARAGETRFTDTRKDEQERCITIKSTAISLFYELSENDLNFIKQSKDGSGFLINLIDSPGHVDFSSEVTAALRVTDGALVVVDCVSGVCVQTETVLRQAIAERIKPVLMMNKMDRALLELQLEPEELYQTFQRIVENVNVIISTYGEGESGPMGNIMIDPVLGTVGFGSGLHGWAFTLKQFAEMYVAKFAAKGEGQLGAAERAKKVEDMMKKLWGDRYFDPANGKFSKSANSPDGKKLPRTFCQLILDPIFKVFDAIMNFRKEETAKLIEKLDIKLDSEDKDKEGKPLLKAVMRRWLPAGDALLQMITIHLPSPVTAQKYRCELLYEGPPDDEAAMGIKSCDPKGPLMMYISKMVPTSDKGRFYAFGRVFSGVVSTGLKVRIMGPNYTPGKKEDLYLKPIQRTILMMGRYVEPIEDVPCGNIVGLVGVDQFLVKTGTITTFEHAHNMRVMKFSVSPVVRVAVEAKNPADLPKLVEGLKRLAKSDPMVQCIIEESGEHIIAGAGELHLEICLKDLEEDHACIPIKKSDPVVSYRETVSEESNVLCLSKSPNKHNRLYMKARPFPDGLAEDIDKGEVSARQELKARARYLAEKYEWDVAEARKIWCFGPDGTGPNILTDITKGVQYLNEIKDSVVAGFQWATKEGALCEENMRGVRFDVHDVTLHADAIHRGGGQIIPTARRCLYASVLTAQPRLMEPIYLVEIQCPEQVVGGIYGVLNRKRGHVFEESQVAGTPMFVVKAYLPVNESFGFTADLRSNTGGQAFPQCVFDHWQILPGDPFDNSSRPSQVVAETRKRKGLKEGIPALDNFLDKL

SEQ ID NO: 5886 - DNA, 1573 bp, Homo sapiens
  ref <308>: DATABASE ACCESSION NUMBER: EMBL / M19997
  ref <309>: DATABASE ENTRY DATE: 2000-03-04
gcgtcagccctgttgtcagagtggccgtggaggccaagaacccggctgacctgcccaagctggtggaggggctgaagcggctggccaagtccgaccccatggtgcagtgcatcatcgaggagtcgggagagcatatcatcgcgggcgccggcgagctgcacctggagatctgcctgaaggacctggaggaggaccacgcctgcatccccatcaagaaatctgacccggtcgtctcgtaccgcgagacggtcagtgaagagtcgaacgtgctctgcctctccaagtcccccaacaagcacaaccggctgtacatgaaggcgcggcccttccccgacggcctggccgaggacatcgataaaggcgaggtgtccgcccgtcaggagctcaagcagcgggcgcgctacctggccgagaagtacgagtgggacgtggctgaggcccgcaagatctggtgctttgggcccgacggcaccggccccaacatcctcaccgacatcaccaagggtgtgcagtacctcaacgagatcaaggacagtgtggtggccggcttccagtgggccaccaaggagggcgcactgtgtgaggagaacatgcggggtgtgcgcttcgacgtccacgacgtcaccctgcacgccgacgccatccaccgcggagggggccagatcatccccacagcacggcgctgcctctatgccagtgtgctgaccgcccagccacgcctcatggagcccatctaccttgtggagatccagtgtccagagcaggtggtcggtggcatctacggggttttgaacaggaagcggggccacgtgttcgaggagtcccaggtggccggcacccccatgtttgtggtcaaggcctatctgcccgtcaacgagtcctttggcttcaccgctgacctgaggtccaacacgggcggccaggcgttcccccagtgtgtgtttgaccactggcagatcctgcccggagaccccttcgacaacagcagccgccccagccaggtggtggcggagacccgcaagcgcaagggcctgaaagaaggcatccctgccctggacaacttcctggacaaattgtaggcggcccttcctgcagcgcctgccgccccggggactcgcagcacccacagcaccacgtcctcgaattctcagacgacacctggagactgtcccgacacagcgacgctcccctgagaggtttctggggcccgctgcgtgccatcactcaaccataacacttgatgccgtttctttcaatatttatttccagagtccggaggcagcagacacgccctcttagtagggacttaatgggccggtcggggagggggaggcgggatgggacacccaacactttttccatttcttcagagggaaactcagatgtccaaactaattttaacaaacgcattaagaggtttatttgggtacatggcccgcagtggcttttgccccagaaaggggaaaggaacacgcgggtagatgatttctagcaggcaggaagtcctgtgcggtgtcaccatgagcactcagctgtactagtgccattggaataataaatttgataaggtgtg

SEQ ID NO: 5887 - protein, 857 aa, Homo sapiens
  ref <308>: DATABASE ACCESSION NUMBER: SWISS-Prot / P13639
  ref <309>: DATABASE ENTRY DATE: 2002-06-15
VNFTVDQIRAIMDKKANIRNMSVIAHVDHGKSTLTDSLVCKAGIIASARAGETRFTDTRKDEQERCITIKSTAISLFYELSENDLNFIKQSKDGAGFLINLIDSPGHVDFSSEVTAALRVTDGALVVVDCVSGVCVQTETVLRQAIAERIKPVLMMNKMDRALLELQLEPEELYQTFQRIVENVNVIISTYGEGESGPMGNIMIDPVLGTVGFGSGLHGWAFTLKQFAEMYVAKFAAKGEGQLGPAERAKKVEDMMKKLWGDRYFDPANGKFSKSATSPEGKKLPRTFCQLILDPIFKVFDAIMNFKKEETAKLIEKLDIKLDSEDKDKEGKPLLKAVMRRWLPAGDALLQMITIHLPSPVTAQKYRCELLYEGPPDDEAAMGIKSCDPKGPLMMYISKMVPTSDKGRFYAFGRVFSGLVSTGLKVRIMGPNYTPGKKEDLYLKPIQRTILMMGRYVEPIEDVPCGNIVGLVGVDQFLVKTGTITTFEHAHNMRVMKFSVSPVVRVAVEAKNPADLPKLVEGLKRLAKSDPMVQCIIEESGEHIIAGAGELHLEICLKDLEEDHACIPIKKSDPVVSYRETVSEESNVLCLSKSPNKHNRLYMKARPFPDGLAEDIDKGEVSARQELKQRARYLAEKYEWDVAEARKIWCFGPDGTGPNILTDITKGVQYLNEIKDSVVAGFQWATKEGALCEENMRGVRFDVHDVTLHADAIHRGGGQIIPTARRCLYASVLTAQPRLMEPIYLVEIQCPEQVVGGIYGVLNRKRGHVFEESQVAGTPMFVVKAYLPVNESFGFTADLRSNTGGQAFPQCVFDHWQILPGDPFDNSSRPSQVVAETRKRKGLKEGIPALDNFLDKL

SEQ ID NO: 5888 - DNA, 528 bp, Rattus norvegicus; identical to SEQ ID NO: 5884
  ref <308>: DATABASE ACCESSION NUMBER: EMBL / AA892801
  ref <309>: DATABASE ENTRY DATE: 2000-03-03

SEQ ID NO: 5889 - protein, 857 aa, Rattus norvegicus; identical to SEQ ID NO: 5885
  ref <308>: DATABASE ACCESSION NUMBER: SWISS-Prot / P05197
  ref <309>: DATABASE ENTRY DATE: 2002-06-15

SEQ ID NO: 5890 - DNA, 1573 bp, Homo sapiens; identical to SEQ ID NO: 5886
  ref <308>: DATABASE ACCESSION NUMBER: EMBL / M19997
  ref <309>: DATABASE ENTRY DATE: 2000-03-04

SEQ ID NO: 5891 - protein, 857 aa, Homo sapiens; identical to SEQ ID NO: 5887
  ref <308>: DATABASE ACCESSION NUMBER: SWISS-Prot / P13639
  ref <309>: DATABASE ENTRY DATE: 2002-06-15

SEQ ID NO: 5892 - DNA, 528 bp, Rattus norvegicus; identical to SEQ ID NO: 5884
  ref <308>: DATABASE ACCESSION NUMBER: EMBL / AA892801
  ref <309>: DATABASE ENTRY DATE: 2000-03-03

SEQ ID NO: 5893 - protein, 857 aa, Rattus norvegicus; identical to SEQ ID NO: 5885
  ref <308>: DATABASE ACCESSION NUMBER: SWISS-Prot / P05197
  ref <309>: DATABASE ENTRY DATE: 2002-06-15

SEQ ID NO: 5894 - DNA, 1573 bp, Homo sapiens; identical to SEQ ID NO: 5886
  ref <308>: DATABASE ACCESSION NUMBER: EMBL / M19997
  ref <309>: DATABASE ENTRY DATE: 2000-03-04

SEQ ID NO: 5895 - protein, 857 aa, Homo sapiens; identical to SEQ ID NO: 5887
  ref <308>: DATABASE ACCESSION NUMBER: SWISS-Prot / P13639
  ref <309>: DATABASE ENTRY DATE: 2002-06-15

SEQ ID NO: 5896 - DNA, 528 bp, Rattus norvegicus; identical to SEQ ID NO: 5884
  ref <308>: DATABASE ACCESSION NUMBER: EMBL / AA892801
  ref <309>: DATABASE ENTRY DATE: 2000-03-03

SEQ ID NO: 5897 - protein, 857 aa, Rattus norvegicus; identical to SEQ ID NO: 5885
  ref <308>: DATABASE ACCESSION NUMBER: SWISS-Prot / P05197
  ref <309>: DATABASE ENTRY DATE: 2002-06-15

SEQ ID NO: 5898 - DNA, 1573 bp, Homo sapiens; identical to SEQ ID NO: 5886
  ref <308>: DATABASE ACCESSION NUMBER: EMBL / M19997
  ref <309>: DATABASE ENTRY DATE: 2000-03-04

SEQ ID NO: 5899 - protein, 857 aa, Homo sapiens; identical to SEQ ID NO: 5887
  ref <308>: DATABASE ACCESSION NUMBER: SWISS-Prot / P13639
  ref <309>: DATABASE ENTRY DATE: 2002-06-15

SEQ ID NO: 5900 - DNA, 499 bp, Rattus norvegicus
  ref <308>: DATABASE ACCESSION NUMBER: EMBL / AA892805
  ref <309>: DATABASE ENTRY DATE: 2000-03-03
agctgatgcagccttggtgaaagctgctgtcagtatagagcatggtaatagcacgtatacagcatggttatagcatgtgtatagcatgtatatagcatgtatacagcatggggtcaacggcgtgaaacaaactgtttcattgcaggagaaaagagcgattccagaaacactttccaacttactttgccactgttaatcactctgagtgtttgcagccatactggagagccagcttattgagactgtcttcctgggccagctcccgctgcagcagcaccatggtgcccgttcctggcggttggctgctgttcttctggcgttccttgccccggggtcgtaacaccacctgatgtgactcttcctcggaggagtccccggagtccccgctgccattcttgaacatgtaaacatgactgtttggagtcctacagacaacagctgggccttggaaggtcttggctaacacttccttctgcctcatttcctttcttaacttttc

SEQ ID NO: 5901 - DNA, 1042 bp, Homo sapiens
  ref <308>: DATABASE ACCESSION NUMBER: EMBL / BG420645
  ref <309>: DATABASE ENTRY DATE: 2001-03-20
gggggcctggacgagggggccgcggtctggctagggagccgcgcgggctcatggcgtgaagaaaatgaggcacgaggaattgttaaccaagaccttccaaggcccagctgttgtgtgtgggactccgaccagccacgtatacatgtttaagaatggcagtggggactcgggggactcttctgaagaagagtctcaccgtgtggttttgcggccccggggcaaggagcgccacaagagcggtgtccaccagcctccccaggcgggagcaggtgacgtggtgctgctgcagcgggagctggcccaggaggacagcctcaacaagctggcgctgcagtatggctgcaaagttgcagatatcaagaaagtcaacaacttcatcagagaacaagacttatatgctttgaaatctgttaagattccagtgagaaaccatgggatcctgatggagacccacaaagaactgaaaccccttctgagcccgtcttccgagaccacagtgaccgtggaactgccagaggcagacagagcaggcgcgggcaccggtgcccaggccggccaactgatgggcttctttaaggggatcgaccaggatattgagcgtggagtgcagtcagaaatctttctacatgaacagttactgcatggacacctcccatcaggcactgctcccggcaactccgaagaacgcctatggatggtgcacattgtggcatcagtggtggaatgctggttactccagcctgcagaatgggcatcggctggccggccaagaatcagggccaacttcacaatacaaagctaagggtgagaacccctaataagcatgaacaccactgctcatccccaagggtccgaggcacgggctaccgtccaggcaagccatcaacacagcttgaagagaagccgatgcacttggcacagagacagtcgacaaagcacacagagcgagcacagcgtcgtcataagagcaggcgcggaagaaaaaggacgaagcgaggacaagagcaagcagacagcaggcgcactagttccgcgaagaagc

SEQ ID NO: 5902 - DNA, 664 bp, Rattus norvegicus
  ref <308>: DATABASE ACCESSION NUMBER: EMBL / AA892813
  ref <309>: DATABASE ENTRY DATE: 2000-03-03
ggccacagtcatggcattccctcccggtgctcttcaccctttaccaaagagacaagcacttgcaaaaaagcaacggagccagcacggtcttcaaccccagcgtcttgcactaccagcaggctttgaccagtgcgcagttgcagcaacacacggcgttcattcccacagtacccatgatgcacagcgctacgtccgccactgtctctgcagcaacaactcctgcaacaagtgtccccttcgcagcaacagccacagccaatcagataattctgaaataatcaacagaaatggaatggaatgccaagaatctgcattgagaataactaaacattgttactgtacatactatcccctttgctcctcaatagaattgccacaaactgcatgctaaatttagttcttccggacagaccgcaaccctaaggctagttctgctatgtcatatacgagtattaaatatggtatgcttagtatattccagcctaagatagttaactacctgagaccagctgcgatgttcaaagacatacaggatgaggttttcttttacagggttctgagcgtagtttctgtcccaggaatattgtcttatctccataactatagccgatgcaaaaagcccacccagtatacacatttcgactcagaatacttcaaatttagc

SEQ ID NO: 5903 - DNA, 2595 bp, Homo sapiens
  misc_feature (1)..(2595): n=a, c, g or t
  ref <308>: DATABASE ACCESSION NUMBER: EMBL / AF061261
  ref <309>: DATABASE ENTRY DATE: 2000-03-03
ctgaaggtaaaattttccagatacggcagacggctttcagagtacaataaacagggaatgagaactatttacatggaagtttctttctcatgatgcggtggagaagcctcggccacttggttctgccagatgttcctggggttactgtaaatgggaaggacaggcagagctaaacaaggtttatcatttaaaagtgcctgntgtgaagtcacttttgctggaaaactgcagcttggagctttctttgtattcacatcccactcttctgtcaagtacactttaccctgaccttatgagtggatgaagatacctcagttgtctgactttgccaattgcttaatttcagaatttaaaaaggggaaagaaaaacatcctgctaaaatatgaacatctgagtgtcttattttccaacatcgtcaatagctgtgagcgtcagcattaaatattctcccaaggagtgccatgatattgaagtcactttattaataacagctgtatctgcaaaacagtcaagagactcggacgttgaaagccagagatgacactgagcatgcttttattgcggcctaccatctttaagtgggacatattgattgatgagtgattgcctgtccatacactctctcatcatcctgttccttggattggacttcactaagcaatttatcactcaccttcagacttacatgtgggagttttcacaacagtagttttggaatcattagaacttggattgatttcatcatttaacagaaacaaacagcccaaattactttatcaccatggctttgaacgttgccccagtcagagatacaaaatggctgacattagaagtctgcagacagtttcaaagaggaacatgctcacgctctgatgaagaatgcaaatttgctcatccccccaaaagttgtcaggttgaaaatggaagagtaattgcctgctttgattccctaaagggccgttgttcgagagagaactgcaagtatcttcaccctccgacacacttaaaaactcaactagaaattaatggaaggaacaatttgattcagcaaaaaactgcagcagcaatgcttgcccagcagatgcaatttatgtttccaggaacaccacttcatccagtgcccactttccctgtaggtcccgcgatagggacaaatacggctattagctttgctccttacctagcacctgtaacccctggagttgggttggtcccaacggaaattctgcccaccacgcctgttattgttcccggaagtccaccggtcactgtcccgggctcaactgcaactcagaaacttctcaggactgacaaactggaggtatgcagggagttccagcgaggaaactgtgcccggggagagaccgactgccgctttgcacaccccgcagacagcaccatgatcgacacaagtgacaacaccgtaaccgtttgtatggattacataaaggggcgttgcatgagggagaaatgcaaatattttcaccctcctgcacacttgcaggccaaaatcaaagctgcgcagccgcggccgcggccacagtcatgactcagtcgactgccaaagcaatgaagcgacctctcgaagcaactgtagacctggcctttccccctggtgctcttcatcctttaccaaagagacaagcacttgaaaaaagcaatggtaccagcgcggtctttaaccccagcgtcttgcactaccagcaggctctcaccagcgcacagttgcagcaacacgccgcgttcattccaacagggtcagttttgtgcatgacacccgctaccagtattgtacccatgatgcacagcgctacgtccgccactgtctctgcagcaacaactcctgcaacaagtgtccccttcgcagcaacagccacagccaatcagataattctgaaataatcagcagaaacggaatggaatgccaagaatctgcattgagaataactaaacattgttactgtacatactatcctgtttcctcctcaatagaattgccacaaactgcatgctaaataaagatgtagttcttctggacagaccacaactctaagaagctagtgctgctatctcatatatgagtattaaatatggtatgcttagtatattccaacctaagatagttaactacctgagaccagctgtgatgtttaaagacataaaggataaagtttacttttaaagggtttctaaacatagtttctgtcctaggaatattgtcttatctccataactatatagctgatgcagaaagtccagccagtttactcatttcgattcagaatatttcaaatttagcaataaacaattagcattagttaaaaaagaaacatattccaagggcaggttcgattctagctctaattactgtcatgtcatttacccactggatcaaagggtatgtttcacttcttgacaatataaatgctgcagcaaagatgagaggtgaagtaaaaccgatacctgtcctgcaggtctaaaatttgaatggaaattcaagcacaagtactggggacacatcaaagtgtggtgtttggtttgcctggagatgccacgttgaatcatgtgattctagagtcgacctgcaggcatgc

SEQ ID NO: 5904 - protein, 256 aa, Homo sapiens
  misc_feature (1)..(256): Xaa=Unknown amino acid
MALNVAPVRDTKWLTLEVCRQFQRGTCSRSDEECKFAHPPKSCQVENGRVIACFDSLKGRCSRENCKYLHPPTHLKTQLEINGRNNLIQQKTAAAMLAQQMQFMFPGTPLHPVPTFPVGPAIGTNTAISFAPYLAPVTPGVGLVPTEILPTTPVIVPGSPPVTVPGSTATQKLLRTDKLEVCREFQRGNCARGETDCRFAHPADSTMIDTSDNTVTVCMDYIKGRCMREKCKYFHPPAHLQAKIKAAQPRPRPQSX

SEQ ID NO: 5905 - DNA, 543 bp, Rattus norvegicus
  ref <308>: DATABASE ACCESSION NUMBER: EMBL / AA892818
  ref <309>: DATABASE ENTRY DATE: 2000-03-03
gcatctccagtcatgctttattctgcagagggaaattctgtggcctgcccttcacctctcctttctcattagaacagaagtgtgttagtccaggccctccagaccctgctcccatccagagagtataatgtactcaagagggagtagctgtgtgtgcatgcagatatgtgtgtatatgtataggtatatacatatgtatatatatacatatacacatatatattttggctgtacagtatttataggtatggggaaaacaggattaacattacaatgatagctgcaacccatcgaatccagttaaatcagccaaagacaaagaaagcaccacttggcctctgaatggctgtttggtttctatctgaacaaacataaccagtagatggaatagatcaggctggtatcaagcccagaatggctaaaggaggcccttccttgtgtttttccagggtgtctactctaggaatggactgttcttttgggttctctctctctctctctctctccctctctctctctctctctctctctctctctctctgt

SEQ ID NO: 5906 - DNA, 590 bp, Rattus norvegicus
  ref <308>: DATABASE ACCESSION NUMBER: EMBL / AA892820
  ref <309>: DATABASE ENTRY DATE: 2000-03-03
catggagcaaacattttatttaataagttataagatacactttccagtcggcatttgttccagtttggtctccatggctactaagcctgtatccctttcgcatccagcttcagctgctctgggtcctaacgggtggcttttagcacccacacctctctggctgccgtgccttggtgcgggacacctacttcacccctaccatatccacgacaacagccacaacacccgattttgagggggaaggggtatttgacagcctggaaatgcttacaccaaagcctttaaagagaccctaggtgcatgtgttagtgccttggtccttaaggcctctcatgggtcataacaggggtgggtatccaccccttccagcttttgcaaggaggaggtcctacagtaatttatcagtggcctctgccatttagcacaagcaatggactctgggggcagctgacagaggctctgcatttggccatgaccacatgtcttcaagaaagtaggcaagagcagaatccctcctactccagagctggctttgcgatgaagtcaaagtggtcagggcgcagacatggagaacgatctgggtcagactt

SEQ ID NO: 5907 - DNA, 4879 bp, Homo sapiens
  ref <308>: DATABASE ACCESSION NUMBER: EMBL / AB007899
  ref <309>: DATABASE ENTRY DATE: 1999-01-11
gcccgggtgggtggctgcgcagggccctacctgggcgggagcggctgcagagccctgtccacgcggtgcctccccagcacggcacctcccactccaggctgttggttacctggccgggagctggcagagaccaggatttctcctcgccgccgttgctgttgttaggggaaacagaccatctgcatctagacctgcctctctctccgctccccacttcagacgagctcttcctgcctggaatctgtgatccgtatgtgaaactttcattgtacgtagcggatgagaatagagaacttgctttggtccagacaaaaacaattaaaaagacactgaacccaaaatggaatgaagaattttatttcagggtaaacccatctaatcacagactcctatttgaagtatttgacgaaaatagactgacacgagacgacttcctgggccaggtggacgtgccccttagtcaccttccgacagaagatccaaccatggagcgaccctatacatttaaggactttctcctcagaccaagaagtcataagtctcgagttaagggatttttgcgattgaaaatggcctatatgccaaaaaatggaggtcaagatgaagaaaacagtgaccagagggatgacatggagcatggatgggaagttgttgactcaaatgactcggcttctcagcaccaagaggaacttcctcctcctcctctgcctcccgggtgggaagaaaaagtggacaatttaggccgaacttactatgtcaaccacaacaaccggaccactcagtggcacagaccaagcctgatggacgtgtcctcggagtcggacaataacatcagacagatcaaccaggaggcagcacaccggcgcttccgctcccgcaggcacatcagcgaagacttggagcccgagccctcggagggcggggatgtccccgagccttgggagaccatttcagaggaagtgaatatcgctggagactctctcggtctggctctgcccccaccaccggcctccccaggatctcggaccagccctcaggagctgtcagaggaactaagcagaaggcttcagatcactccagactccaatggggaacagttcagctctttgattcaaagagaaccctcctcaaggttgaggtcatgcagtgtcaccgacgcagttgcagaacagggccatctaccaccgccatcagtggcctatgtacataccacgccgggtctgccttcaggctgggaagaaagaaaagatgctaaggggcgcacatactatgtcaatcataacaatcgaaccacaacttggactcgacctatcatgcagcttgcagaagatggtgcgtccggatcagccacaaacagtaacaaccatctaatcgagcctcagatccgccggcctcgtagcctcagctcgccaacagtaactttatctgccccgctggagggtgccaaggactcacccgtacgtcgggctgtgaaagacaccctttccaacccacagtccccacagccatcaccttacaactcccccaaaccacaacacaaagtcacacagagcttcttgccacccggctgggaaatgaggatagcgccaaacggccggcccttcttcattgatcataacacaaagactacaacctgggaagatccacgtttgaaatttccagtacatatgcggtcaaagacatctttaaaccccaatgaccttggcccccttcctcctggctgggaagaaagaattcacttggatggccgaacgttttatattgatcataatagcaaaattactcagtgggaagacccaagactgcagaacccagctattactggtccggctgtcccttactccagagaatttaagcagaaatatgactacttcaggaagaaattaaagaaacctgctgatatccccaataggtttgaaatgaaacttcacagaaataacatatttgaagagtcctatcggagaattatgtccgtgaaaagaccagatgtcctaaaagctagactgtggattgagtttgaatcagagaaaggtcttgactatgggggtgtggccagagaatggttcttcttactgtccaaagagatgttcaacccctactacggcctctttgagtactctgccacggacaactacacccttcagatcaaccctaattcaggcctctgtaatgaggatcatttgtcctacttcacttttattggaagagttgctggtctggccgtatttcatgggaagctcttagatggtttcttcattagaccattttacaagatgatgttgggaaagcagataaccctgaatgacatggaatctgtggatagtgaatattacaactctttgaaatggatcctggagaatgaccctactgagctggacctcatgttctgcatagacgaagaaaactttggacagacatatcaagtggatttgaagcccaatgggtcagaaataatggtcacaaatgaaaacaaaagggaatatatcgacttagtcatccagtggagatttgtgaacagggtccagaagcagatgaacgccttcttggagggattcacagaactacttcctattgatttgattaaaatttttgacgaaaatgagctggagttgctcatgtgcggcctcggtgatgtggatgtgaatgactggagacagcattctatttacaagaacggctactgcccaaaccaccccgtcattcagtggttctggaaggctgtgctactcatggacgccgaaaagcgtatccggttactgcagtttgtcacagggacatcgcgagtacctatgaatggatttgccgaactttatggttccaatggtcctcagctgtttacaatagagcaatggggcagtcctgagaaactgcccagagctcacacatgctttaatcgccttgacttacctccatatgaaacctttgaagatttacgagagaaacttctcatggccgtggaaaatgctcaaggatttgaaggggtggattaagcaccctgtgcctcgggggtggttgttcttcaagcaagttctgcttgcacttttgcatttgcctaacagacttttgcagaggcgatggcagagagcagctgcaggcatggtccctggagccgagccttcaccacgcactcgtccaagttcggatgcgggaacctggtcccagcttgagttcctgcctttcccaccacaaattatcaactggttgatgtgtacactaattacatttcaggaggacttaatgctatttatgttgtgcctctgcaggcaaagcccttaataaatattttacatcctttctaatgacaatgaatggaattaatcactcaacaggtatagtattacgactcatgtttactttttaaaatgatttagaccgattttcagattttatttcgttatgattaaagatgtctcatgtacttggaaaagtgagcatttttttttttttttgtatttcactttcataccaggcttaatgtcaatgacatttttatttttgaagtactctgacacctccaccctctactttattagaattggaaggcaaatttttgtccaaaaacctacagacaagtactttgagagaatttccaatataatattagacataatgataattttttccatactcagaatgaaaaactggatattacgtttttgttttggggtttttttgtacaaatttagctaatagctacaggctgagagaattgtaacatagcatgacaaattttgtgttgacttgaaaggaatcacaccattattccttagaagtaattacatgtgttctaacacatttgagacagggttggactcccatttctcatccgagaaattacttaacccttcctggcgctgtacagtcatcttttattctatttcctctttgctgtttgtagtagagacattttgaatgaaacttggcactgcttgattcaaaactgtggaaaccagatctgtttagtctcctgtttgtatgcgtttgctaatggtagctaaataaccagtttttgttgtaaatgcaccaattctgaaggcactttatgtactacatggaggtcatatctggttttgtttttatttttttatcatgaacattaaatgtgatgatgatttcttttccctgcacacatctttccggtgcaatatctatcaattgtgaatctggctgctggtgtataaaaacctggatgtaaagctgagcctacagacctgtcctcaccaactgttttgtgatttctactcaactacaaagatttatttaatgtactcttaatctaactgagttttgttaccaatgacctgttgcatgcttcaataccgtgtactgcctgagttgtgcctcttgtgtgctagattaaaagtgagacagagacttgacttgatcctctgagctcaagctattgagctggtagtggcagaggactgagggtacctgcacagtttgattcttttccacgtgtaagtctccattgcagaattgtcgtgctttgagaaaacacctgaggcagtgtgggagttgaacgaccctgctgtcctttttaacctgtgttgtcctagaccctgtcggggcagtcaggggacactagagatttgatctcatgcgagtcatcaataggacaaaaaagttgtggtttggggaggtctgtttgttacataaaaaggacctttcggtgtaagaaattgccgtttttaccctgccctggctggcatgtgagaagccatggaaggttgtggttgtaaatgagttgtctaaaggggtgcagaggcctgaggtttctaaaagaaggtagatttctacagagctgagtgttggttcctttttcttattggttgaaaattacctggtagtgatcagaaaacttagatgctatgtaact

SEQ ID NO: 5908 - protein, 995 aa, Homo sapiens
  ref <308>: DATABASE ACCESSION NUMBER: SWISS-Prot / BAA23711
  ref <309>: DATABASE ENTRY DATE: 2003-02-01
PGGWLRRALPGRERLQSPVHAVPPQHGTSHSRLLVTWPGAGRDQDFSSPPLLLLGETDHLHLDLPLSPLPTSDELFLPGICDPYVKLSLYVADENRELALVQTKTIKKTLNPKWNEEFYFRVNPSNHRLLFEVFDENRLTRDDFLGQVDVPLSHLPTEDPTMERPYTFKDFLLRPRSHKSRVKGFLRLKMAYMPKNGGQDEENSDQRDDMEHGWEVVDSNDSASQHQEELPPPPLPPGWEEKVDNLGRTYYVNHNNRTTQWHRPSLMDVSSESDNNIRQINQEAAHRRFRSRRHISEDLEPEPSEGGDVPEPWETISEEVNIAGDSLGLALPPPPASPGSRTSPQELSEELSRRLQITPDSNGEQFSSLIQREPSSRLRSCSVTDAVAEQGHLPPPSVAYVHTTPGLPSGWEERKDAKGRTYYVNHNNRTTTWTRPIMQLAEDGASGSATNSNNHLIEPQIRRPRSLSSPTVTLSAPLEGAKDSPVRRAVKDTLSNPQSPQPSPYNSPKPQHKVTQSFLPPGWEMRIAPNGRPFFIDHNTKTTTWEDPRLKFPVHMRSKTSLNPNDLGPLPPGWEERIHLDGRTFYIDHNSKITQWEDPRLQNPAITGPAVPYSREFKQKYDYFRKKLKKPADIPNRFEMKLHRNNIFEESYRRIMSVKRPDVLKARLWIEFESEKGLDYGGVAREWFFLLSKEMFNPYYGLFEYSATDNYTLQINPNSGLCNEDHLSYFTFIGRVAGLAVFHGKLLDGFFIRPFYKMMLGKQITLNDMESVDSEYYNSLKWILENDPTELDLMFCIDEENFGQTYQVDLKPNGSEIMVTNENKREYIDLVIQWRFVNRVQKQMNAFLEGFTELLPIDLIKIFDENELELLMCGLGDVDVNDWRQHSIYKNGYCPNHPVIQWFWKAVLLMDAEKRIRLLQFVTGTSRVPMNGFAELYGSNGPQLFTIEQWGSPEKLPRAHTCFNRLDLPPYETFEDLREKLLMAVENAQGFEGVD

SEQ ID NO: 5909 - DNA, 503 bp, Rattus norvegicus
  ref <308>: DATABASE ACCESSION NUMBER: EMBL / AA892821
  ref <309>: DATABASE ENTRY DATE: 2000-03-03
aggtcggacgcctgctttattcagacgggaaaagagcagggagtggatggagaccagcagaaaagaccacactaggtcagcactgggcaaggagtggccagggtgtgactctaagagttggcagaaaagccctggcgtcttgagtcacgacagtctatctgaagtagttgggacactcgtgggcgaccacgttccaggcttggttaaaggcctccacgacagcgggctccaggggaccttcctcagtggccgccaagttctgctccagctgctccaggctggacatgcccaagatgactgcgtcccctcgggtgccctggagctgtgagtgatggtacatccagcgcagggcagccgaggtcatgctgggggcactggtgccataggtggtcttcagggccttttctaccagggcaatggcctcaaagtggtgttccttccagaagcggttcctgtaggtctcagaccagctattcccaaagaagcggccctcgggctgtttc

SEQ ID NO: 5910 - protein, 338 aa, Rattus norvegicus
  ref <308>: DATABASE ACCESSION NUMBER: SWISS-Prot / BAA90396
  ref <309>: DATABASE ENTRY DATE: 2002-06-01
MSRSPAPRAVSGAPLRPGTVLGTMEMGRRMDASASAATVRAFLERGLNELDTAFMYCDGQSESILGSLGLGLGSGDCTVKIATKANPWDGKSLKPDSVRSQLETSLKRLQCPRVDLFYLHAPDHGTPIVETLQACQQLHQEGKFVELGLSNYASWEVAEIYTLCKSNGWILPTVYQGMYNATTRQVETELLPCLRYFGLRFYAYNPLAGGLLTGKYRYEDKDGKQPEGRFFGNSWSETYRNRFWKEHHFEAIALVEKALKTTYGTSAPSMTSAALRWMYHHSQLQGTRGDAVILGMSSLEQLEQNLAATEEGPLEPAVVEAFNQAWNVVAHECPNYFR

SEQ ID NO: 5911 - DNA, 1319 bp, Homo sapiens
  ref <308>: DATABASE ACCESSION NUMBER: EMBL / Y16675
  ref <309>: DATABASE ENTRY DATE: 1998-11-12
ctcgcgtagtctcccgcgccgccgtccactgcgcgcttcgctctccgccgcccgaggcccgcgcgctcgccatgtcccggccaccgccaccgcgggtcgcctcggtgctgggcaccatggagatggggcgccgcatggacgcgcccgccagcgccgcggccgtgcgcgcctttctggagcgcggccacaccgaactggacacggccttcatgtacagcgacggccagtccgagaccatcctgggcggcctggggctcgggctgggcggtggcgactgcagagtgaaaattgccaccaaggccaacccttgggatggaaaatcactaaagcctgacagtgtccggtcccagctggagacgtcattgaagaggctgcagtgtccccaagtggacctcttctacctacacgcacctgaccacggcaccccggtggaagagacgctgcatgcctgccagcggctgcaccaggagggcaagttcgtggagcttggcctctccaactatgctagctgggaagtggccgagatctgtaccctctgcaagagcaatggctggatcctgcccactgtgtaccagggcatgtacaacgccaccacccggcaggtggaaacggagctcttcccctgcctcaggcactttggactgaggttctatgcctacaaccctctggctgggggcctgctgactggcaagtacaagtatgaggacaaggacgggaaacagcctgtgggccgcttctttgggaatagctgggctgagacctacaggaatcgcttctggaaggagcaccacttcgaggccattgcgttggtggagaaggccctgcaggccgcatatggcgccagcgcccccagtgtgacctcggctgccctccggtggatgtaccaccactcacagctgcagggtgcccacggggacgcggtcatcctgggcatgtccagcctggagcagctggagcagaacttggcagcaacagaggaagggcccctggagccggctgtcgtggatgcctttaatcaagcctggcatttggttgctcacgaatgtcccaactacttccgctaggcccatcatggctcaggctgcccaaggcttttctgtcacctcttttgttctctcacactgaccagtcttggccttaagctgacttagaagggtttttctgaattgtctagatccatgcattatttttctagcttcctgccttgctccctattcactttacactgtgaaaggtggggggtgagtcccacttgagcgcttcctgttgaataaagcaggcacttgacctggctgtagcctaggtcttgagtgaacccc

SEQ ID NO: 5912 - protein, 330 aa, Homo sapiens [sequence omitted]

SEQ ID NO: 5913 - DNA, 503 bp, Rattus norvegicus; identical to SEQ ID NO: 5909
  ref <308>: DATABASE ACCESSION NUMBER: EMBL / AA892821
  ref <309>: DATABASE ENTRY DATE: 2000-03-03

SEQ ID NO: 5914 - protein, 338 aa, Rattus norvegicus; identical to SEQ ID NO: 5910
  ref <308>: DATABASE ACCESSION NUMBER: SWISS-Prot / BAA90396
  ref <309>: DATABASE ENTRY DATE: 2002-06-01

SEQ ID NO: 5915 - DNA, 1319 bp, Homo sapiens; identical to SEQ ID NO: 5911
  ref <308>: DATABASE ACCESSION NUMBER: EMBL / Y16675
  ref <309>: DATABASE ENTRY DATE: 1998-11-12

SEQ ID NO: 5916 - protein, 330 aa, Homo sapiens [sequence omitted]

SEQ ID NO: 5917 - DNA, 626 bp, Rattus norvegicus
  ref <308>: DATABASE ACCESSION NUMBER: EMBL / AA892828
  ref <309>: DATABASE ENTRY DATE: 2000-03-03
actcataggtaggaatcccctttattccttatcaaaacagtttaacagcaaatgtagataatatatgttttatttagacatataagttatcttccatgggggcattctatcttgccccttctaatgaaagagggcaaatttttatattaatcttattcaaagactagaccaacttaacagtaacagacaaagagagcagagcatctagggtagggagtagaaaaattctactcataagcacatttaaacttcttaccagtacagagacacctgctgccacatcagcattactcctgactagtaagtctcccagtacacgtcaggggaagtcccaacacgtattttaaataaatttcactgacttgacattcaacgtctagattagatattcaaagtcttctttattgcaaatatgatgtctttgacctgaggtatggagttgtcttctagaatctttgcgtaaggcatagggacatcagcaccagtgactcgaacagcaggcgcatcaaggaagttgaatgcagggccttccataattctcgcacaaatctcagctcctactccaaattgtggccagcctccttccacagttacgagatgatttgtcttcatgacactggcttcta

SEQ ID NO: 5918 - protein, 359 aa, Rattus norvegicus; identical to SEQ ID NO: 4536
  ref <308>: DATABASE ACCESSION NUMBER: SWISS-Prot / P49432
  ref <309>: DATABASE ENTRY DATE: 2002-06-15

SEQ ID NO: 5919 - DNA, 1095 bp, Homo sapiens
  ref <308>: DATABASE ACCESSION NUMBER: EMBL / M34055
  ref <309>: DATABASE ENTRY DATE: 2000-03-04
ccaagatggcggcggtgtctggcttggtgcggagaccccttcgggaggtctccgggctgctgaagaggcgctttcactggaccgcgccggctgccgtgcaggtgacagttcgtgatgctataaatcagggtatggatgaggagctggaaagagatgagaaggtatttctgcttggagaagaagttgcccagtatgatggggcatacaaggttagtcgagggctgtggaagaaatatggagacaagaggattattgacactcccatatcagagatgggctttgctggaattgctgtaggtgcagctatggctgggttgcggcccatttgtgaatttatgaccttcaatttctccatgcaagccattgaccaggttataaactcagctgccaagacctactacatgtctggtggccttcagcctgtgcctatagtcttcaggggacccaatggtgcctcagcaggtgtagctgcccagcactcacagtgctttgctgcctggtatgggcactgcccaggcttaaaggtggtcagtccctggaattcagaggatgctaaaggacttattaaatcagccattcgggataacaatccagtggtggtgctagagaatgaattgatgtatggggttccttttgaatttcctccggaagctcagtcaaaagattttctgattcctattggaaaagccaaaatagaaaggcaaggaacacatataactgtggtttcccattcaagacctgtgggccactgcttagaagctgcagcagtgctatctaaagaaggagttgaatgtgaggtgataaatatgcgtaccattagaccaatggacatggaaaccatagaagccagtgtcatgaagacaaatcatcttgtaactgtggaaggaggctggccacagtttggagtaggagctgaaatctgtgccaggatcatggaaggtcctgcgttcaatttcctggatgctcctgctgttcgtgtcactggtgctgatgtccctatgccttatgcaaagattctagaggacaactctatacctcaggtcaaagacatcatatttgcaataaagaaaacattaaatatttagtttggacttg

SEQ ID NO: 5920 - protein, 359 aa, Homo sapiens [sequence omitted]

SEQ ID NO: 5921 - DNA, 626 bp, Rattus norvegicus; identical to SEQ ID NO: 5917
  ref <308>: DATABASE ACCESSION NUMBER: EMBL / AA892828
  ref <309>: DATABASE ENTRY DATE: 2000-03-03

SEQ ID NO: 5922 - protein, 359 aa, Rattus norvegicus; identical to SEQ ID NO: 4536
  ref <308>: DATABASE ACCESSION NUMBER: SWISS-Prot / P49432
  ref <309>: DATABASE ENTRY DATE: 2002-06-15

SEQ ID NO: 5923 - DNA, 1095 bp, Homo sapiens; identical to SEQ ID NO: 5919
  ref <308>: DATABASE ACCESSION NUMBER: EMBL / M34055
  ref <309>: DATABASE ENTRY DATE: 2000-03-04

SEQ ID NO: 5924 - protein, 359 aa, Homo sapiens [sequence omitted]

SEQ ID NO: 5925 - DNA, 626 bp, Rattus norvegicus; identical to SEQ ID NO: 5917
  ref <308>: DATABASE ACCESSION NUMBER: EMBL / AA892828
  ref <309>: DATABASE ENTRY DATE: 2000-03-03

SEQ ID NO: 5926 - protein, 359 aa, Rattus norvegicus; identical to SEQ ID NO: 4536
  ref <308>: DATABASE ACCESSION NUMBER: SWISS-Prot / P49432
  ref <309>: DATABASE ENTRY DATE: 2002-06-15

SEQ ID NO: 5927 - DNA, 1095 bp, Homo sapiens; identical to SEQ ID NO: 5919
  ref <308>: DATABASE ACCESSION NUMBER: EMBL / M34055
  ref <309>: DATABASE ENTRY DATE: 2000-03-04

SEQ ID NO: 5928 - protein, 359 aa, Homo sapiens [sequence omitted]

SEQ ID NO: 5929 - DNA, 626 bp, Rattus norvegicus; identical to SEQ ID NO: 5917
  ref <308>: DATABASE ACCESSION NUMBER: EMBL / AA892828
  ref <309>: DATABASE ENTRY DATE: 2000-03-03

SEQ ID NO: 5930 - protein, 359 aa, Rattus norvegicus; identical to SEQ ID NO: 4536
  ref <308>: DATABASE ACCESSION NUMBER: SWISS-Prot / P49432
  ref <309>: DATABASE ENTRY DATE: 2002-06-15

SEQ ID NO: 5931 - DNA, 1095 bp, Homo sapiens; identical to SEQ ID NO: 5919
  ref <308>: DATABASE ACCESSION NUMBER: EMBL / M34055
  ref <309>: DATABASE ENTRY DATE: 2000-03-04

SEQ ID NO: 5932 - protein, 359 aa, Homo sapiens [sequence omitted]

SEQ ID NO: 5933 - DNA, 626 bp, Rattus norvegicus; identical to SEQ ID NO: 5917
  ref <308>: DATABASE ACCESSION NUMBER: EMBL / AA892828
  ref <309>: DATABASE ENTRY DATE: 2000-03-03

SEQ ID NO: 5934 - protein, 359 aa, Rattus norvegicus; identical to SEQ ID NO: 4536
  ref <308>: DATABASE ACCESSION NUMBER: SWISS-Prot / P49432
  ref <309>: DATABASE ENTRY DATE: 2002-06-15

SEQ ID NO: 5935 - DNA, 1095 bp, Homo sapiens; identical to SEQ ID NO: 5919
  ref <308>: DATABASE ACCESSION NUMBER: EMBL / M34055
  ref <309>: DATABASE ENTRY DATE: 2000-03-04

SEQ ID NO: 5936 - protein, 359 aa, Homo sapiens [sequence omitted]

SEQ ID NO: 5937 - DNA, 626 bp, Rattus norvegicus; identical to SEQ ID NO: 5917
  ref <308>: DATABASE ACCESSION NUMBER: EMBL / AA892828
  ref <309>: DATABASE ENTRY DATE: 2000-03-03

SEQ ID NO: 5938 - protein, 359 aa, Rattus norvegicus; identical to SEQ ID NO: 4536
  ref <308>: DATABASE ACCESSION NUMBER: SWISS-Prot / P49432
  ref <309>: DATABASE ENTRY DATE: 2002-06-15

SEQ ID NO: 5939 - DNA, 1095 bp, Homo sapiens; identical to SEQ ID NO: 5919
  ref <308>: DATABASE ACCESSION NUMBER: EMBL / M34055
  ref <309>: DATABASE ENTRY DATE: 2000-03-04

SEQ ID NO: 5940 - protein, 359 aa, Homo sapiens [sequence omitted]

SEQ ID NO: 5941 - DNA, 634 bp, Rattus norvegicus
  ref <308>: DATABASE ACCESSION NUMBER: EMBL / AA892829
  ref <309>: DATABASE ENTRY DATE: 2000-03-03
tttttaagccaaaaattaattttattgaatcaaggcattcattcagcacttaacacagattgcaagaatacctcagcatgtaggggtacagggagagagggaacggtttacatttatgatgtaaaataaaaaaacctaatcgctacagatagtttgtaaaatttgtaaaactcctcgaacaaggtctagccaactttactgtttagtgattttccccctttcttaaaggacgagaagctagatgatgtgtgtattactggttataactaataaatcagcttggaaaatcctaagacagaagcataaatacaatataaaaaggcgagatttttaaaatcgtattataagaatattaacaataagtggaaaagatacattagaaccagagcggtgttacactagttcaaaacagaactcaaaggcaaaacaaagctgatgcacatggagggaaacggcctgatttcaggaagtgtgtccagacagacacccacagagaagtgctgtcagtgactgcgtggtcccctgtgttgctcagccctgcatccctggcagagtgcctggctcaggaagttaggctttctctaaggacttgtagtactccaccagcacagtccacgccttgggggccatgaag

SEQ ID NO: 5942 - protein, 624 aa, Rattus norvegicus
  ref <308>: DATABASE ACCESSION NUMBER: Refseq / NP_035993
  ref <309>: DATABASE ENTRY DATE: 2002-01-07
MEIPGSLCKKVKLSNNAQNWGMQRATNVTYQAHHVSRNKRGQVVGTRGGFRGCTVWLTGLSGAGKTTVSMALEEYLVCHGIPCYTLDGDNIRQGLNKNLGFSPEDREENVRRIAEVAKLFADAGLVCITSFISPYTQDRNNARQIHEGASLPFFEVFVDAPLHVCEQRDVKGLYKKARAGEIKGFTGIDSEYEKPEAPELVLKTDSCDVNDCVQQVVELLQERDIVPVDASYEVKELYVPENKLHLAKTDAEALPALKINKVDMQWVQVLAEGWATPLNGFMREREYLQCLHFDCLLDGGVINLSVPIVLTATHEDKERLDGCTAFALVYEGRRVAILRNPEFFEHRKEERCARQWGTTCKNHPYIKMVLEQGDWLIGGDLQVLDRIYWNDGLDQYRLTPTELKQKFKDMNADAVFAFQLRNPVHNGHALLMQDTHKQLLERGYRRPVLLLHPLGGWTKDDDVPLMWRMKQHAAVLEEGILDPETTVVAIFPSPMMYAGPTEVQWHCRARMVAGANFYIVGRDPAGMPHPETGKDLYEPTHGAKVLTMAPGLITLEIVPFRVAAYNKKKKRMDYYDSEHHEDFEFISGTRMRKLAREGQKPPEGFMAPKAWTVLVEYYKSLEKA

SEQ ID NO: 5943 - DNA, 2511 bp, Homo sapiens
  ref <308>: DATABASE ACCESSION NUMBER: EMBL / Y10387
  ref <309>: DATABASE ENTRY DATE: 1998-10-23
cgcagagaaccccggctgctcagcgcgctccgggtcatggagatccccgggagcttgtgcaagaaagtcaagctgagcaataacgcgcagaactggggaatgcagagagcaaccaatgtcacctaccaagcccatcatgtcagcaggaacaagagaggtcaggtggtggggaccagaggtggctttcgtggttgcacagtttggctaacaggcttgtctggagcgggaaagactactgtgagcatggccttggaggagtacctggtttgtcatggtattccatgctacactctggatggtgacaatattcgtcaaggtctcaataaaaatcttggctttagtcctgaagacagagaagagaatgttcgacgcatcgcagaagttgctaaactgtttgcagatgctggcttagtgtgcatcacaagtttcatatcaccttacactcaggatcgcaacaatgcaaggcaaattcatgaaggtgcaagtttaccgttttttgaagtatttgttgatgctcctctgcatgtttgtgaacagagggatgtcaaaggactctacaaaaaagcccgggcaggagaaattaaaggtttcactgggatcgattctgaatatgaaaagccagaggcccctgagttggtgctgaaaacagactcctgtgatgtaaatgactgtgtccagcaagttgtggaacttctacaggaacgggatattgtacctgtggatgcatcttatgaagtaaaagaactatatgtgccagaaaataaacttcatttggcaaaaacagatgcggaaacattaccagcactgaaaattaataaagtggatatgcagtgggtgcaggttttggcagaaggttgggcaaccccattgaatggctttatgagagagagggagtacttgcagtgccttcattttgattgtcttctggatggaggtgtcattaacttgtcagtacctatagttctgactgcgactcatgaagataaagagaggctggacggctgtacagcatttgctctgatgtatgagggccgccgtgtggccattcttcgcaatccagagttttttgagcacaggaaagaggagcgctgtgccagacagtggggaacgacatgcaagaaccacccctatattaagatggtgatggaacaaggagattggctgattggaggagatcttcaagtcttggatcgagtttattggaatgatggtcttgatcagtatcgtcttactcctactgagctaaagcagaaatttaaagatatgaatgctgatgctgtctttgcatttcaactacgcaacccagtgcacaatggacatgccctgttaatgcaggatacccataagcaacttctagagaggggctaccggcgccctgtcctcctcctccaccctctgggtgcttggacaaaggatgacgatgttcctttgatgtggcgtatgaagcagcatgctgcagtgttggaggaaggagttctgaatcctgagacgacagtggtggccatcttcccatctcccatgatgtatgctggaccaactgaggtccagtggcattgcagagcacggatggttgcaggagccaacttttacattgttggacgagaccctgctggcatgcctcatccagaaacagggaaggatctttatgagccaagtcatggtgccaaagtgctgacgatggcccctggtttaatcactttggaaatagttccctttcgagttgcagcttacaacaagaaaaagaagcgtatggactactatgactctgaacaccatgaagactttgaatttatttcaggaacacgaatgcgcaaacttgctcgagaaggccagaaaccacctgaaggtttcatggctcccaaggcttggaccgtgctgacagaatactacaaatccttggagaaagcttaggctgttaacccagtcactccacctttgacacattactagtaacaagaggggaccacatagtctctgttggcatttctttgtggtgtctgtctggacatgcttcctaaaaacagaccattttccttaacttgcatcagttttggtctgccttatgagttctgttttgaacaagtgtaacacactgatggttttaatgtatcttttccacttattatagttatattcctacaatacaattttaaaattgtctttttatattatatttatgcttctgtgtcatgattttttcaagctgttatattagttgtaaccagtagtattcacattaaatcttgctttttttccccttaaaaaaagaaaaaaattaccaaacaataaacttggctagaccttgttttgaggattttacaagacctttgtagcgattagattttttttctacattgaaaatagaaactgcttcctttcttctttccagtcagctattggtctttccagctgttataatctaaagtattcttatgatctgtgtaagctctgaatgaacttctttactcaataaaattaattttttggcttcttaaaaaaaaaaaaaaaaaa

SEQ ID NO: 5944 - protein, 624 aa, Homo sapiens
  ref <308>: DATABASE ACCESSION NUMBER: SWISS-Prot / O43252
  ref <309>: DATABASE ENTRY DATE: 2002-06-15
MEIPGSLCKKVKLSNNAQNWGMQRATNVTYQAHHVSRNKRGQVVGTRGGFRGCTVWLTGLSGAGKTTVSMALEEYLVCHGIPCYTLDGDNIRQGLNKNLGFSPEDREENVRRIAEVAKLFADAGLVCITSFISPYTQDRNNARQIHEGASLPFFEVFVDAPLHVCEQRDVKGLYKKARAGEIKGFTGIDSEYEKPEAPELVLKTDSCDVNDCVQQVVELLQERDIVPVDASYEVKELYVPENKLHLAKTDAETLPALKINKVDMQWVQVLAEGWATPLNGFMREREYLQCLHFDCLLDGGVINLSVPIVLTATHEDKERLDGCTAFALMYEGRRVAILRNPEFFEHRKEERCARQWGTTCKNHPYIKMVMEQGDWLIGGDLQVLDRVYWNDGLDQYRLTPTELKQKFKDMNADAVFAFQLRNPVHNGHALLMQDTHKQLLERGYRRPVLLLHPLGAWTKDDDVPLMWRMKQHAAVLEEGVLNPETTVVAIFPSPMMYAGPTEVQWHCRARMVAGANFYIVGRDPAGMPHPETGKDLYEPSHGAKVLTMAPGLITLEIVPFRVAAYNKKKKRMDYYDSEHHEDFEFISGTRMRKLAREGQKPPEGFMAPKAWTVLTEYYKSLEKA

SEQ ID NO: 5945 - DNA, 635 bp, Rattus norvegicus
  ref <308>: DATABASE ACCESSION NUMBER: EMBL / AA892832
  ref <309>: DATABASE ENTRY DATE: 2000-03-03
ccgggtaatcaaaaaggttttaatgattaatgtttagacattatttgacagtgtgggtatatccagatgagctaagcacactttgacagcacactactgaatgttatagttttgtactaagatatgtaaagaacctgcgagcggtaccctcggatggagacacacatggacgctctagattagagaagatcaatgtaaacagacgctgcaactccgtccaaacagaggctaatgaggaccaactggctccttagaatatgaatgtgcaaaattaaagcatggtaaactggtatttacataaatatcaaacccacaattagtttgtacattgtcaattgtcttctaggatgtgtcacgagtggttcaatcaattttcttcaatgcagaaggtgttcaaaggctaaactttcaacactttaaagatgacacatgtaacaatagtccccacttgtatgaccaacgtctccagcgcactatctgttacttttaaacaagcgctttaaatcaatctttagatgctaagcagaaaaaaattacagatgccaccgagatttacactgaataaagcgattgctccccaaacacccagttcctgcgtgctccagctctttaattttgcctcaaaatgattacgg

SEQ ID NO: 5946 - DNA, 570 bp, Rattus norvegicus
  ref <308>: DATABASE ACCESSION NUMBER: EMBL / AA892835
  ref <309>: DATABASE ENTRY DATE: 2000-03-03
gggggaagggatacgatagatataactgttatccaatctgctgtccactgtgtacacacatacccacacacatacatatacatacacaccaaaagtcccccccaaaaaacaaaaaccaccctcaacctgtaccaatacttcatattttgaccaaaagaatcgatcctgggaagaagtgcaaaatgcaaaatccaatgaccaagaaatgctgataaaacagcatcattaatatacaaaatatttatattacggaactaataacaggtgatgttctccatgtctgtaaaactttggaacaacagagctgattgttaaatctagtccatgccagcttccaaaacccagaagattttagttagcttcattttttgatgcttcatcaaaattttctacaagatctggaacgtcatcatcctcttcatcaatgtcttctggtttgggtgctttactatccaatacttgtcgtgggaactgttcagctaactttctaaggctcgttaagctgtcagcaccaagctgacttagtattccaggaagcatttctgtgattggtttggcttctgcatgacc

SEQ ID NO: 5947 - DNA, 2160 bp, Homo sapiens
  ref <308>: DATABASE ACCESSION NUMBER: EMBL / AK027582
  ref <309>: DATABASE ENTRY DATE: 2002-08-06
gtctttctctgtctcggctgaggcagccatctttctcttgccgcgtgctggtgttggaggaccctccctgcttcagggtacagctcgcagaaagaagaaggtggtacatagaacagccacagctgatgacaaaaagcttcagagttctctaaaaaaactggctgtgaataatatagctggtattgaagaggtgaacatgattaaagatgatgggacagttattcatttcaacaatcccaaagtccaagcttccctttctgctaatacctttgcaattactggtcatgcagaagccaaaccaatcacagaaatgcttcctggaatattaagtcagcttggtgctgacagtttaacaagccttaggaagttagctgaacagttcccacggcaagtcttggacagtaaagcaccaaaaccagaagacattgatgaggaagatgatgatgttccagatcttgtagaaaattttgatgaggcatcaaagaatgaagctaactaaaagtttggtttttggaagctggcatggactagatttaacaaatcagctatgtggttccaaagttttacagacatggagaacatcacctgttactagttcagtaatataaatattttgtatattaataatgctgtttgttcagcatttttcggtcatttgattttgcattttgcacttcctcccaggatatttttttggtcaaaatatgaagtattggtgcagtttgagggtgttttggtttttgattcctggtttttttgttttttgtttggggtatttttggtgtatgtatgtttatgtatgtgtgtgggtatgtgtgtatacagtggagagcaaattggaaaacagttctatttatcctcctccctccccagtagaaataaaaaaaaatctttacatttgttacttttcttttccccccgtaagacacagaattaatggaaagtgagtatcttggatttcaaatctgaagagatttttaccattagtggtttgattttaatttgcttggttaactatcatatttttcatacacttctctggatttaaaatatcttgaggtattttgccactggcttcatgctggagtaatgggtaacatatctttggtatggttgccttagattaacttacctagtcagacccagaagaacttcttttactagcttgcttcctaaatgccttttttcctctccttttggtctccaaatggcctggtcagcttttggtaatattcttcctcatcttccacctagcttgagaaggatgttctccatatagagtttagcgagtgcctaatccctccttttgtaagattttgttccctcagcttgaggaacaacttcatcttcaactttttatttctccctgatgttacagtttggtagatttcaaactggaatagctagcatgtgcttgctaaataattttatgccagccttatcctgtatcctagctgttcttaacagcaggtacaaaaatgcctgtttttcagcaaggttgaaattgggaatgtccttttgaatcagaagaaaataggccatagactcatctcccagcacaaatgggcattctatgaaatggtactggccctaggaggatttcctcaaccactctcctactcttggccttgaacctacctctgggttggatcttactattgtagctgctcactataccctcctgcatgcttagaataatgctttgaggggagcactggtaaaacacagtatttatttttttacctcctttaagaggacttggaggtaagttgcattcattcactcaagtttccctcttgctgtctaatagaagcttactttttgctatatcagcatttgttacagccaatatttaaggacaaaatttagaaaatatatcatttcctggcccatcatcaaactaatacagcttaaccttgcagctaccaacttttgtgtcaagctagatatctttatttgatatctaaggtgcaagaccaacaatatattaagagatctgtagacatgaaggcaaagctcttgtattttttttcatccaaacacctcaatttattttataaattcgttcatttttcctgttatgttttatataatatatggactaaacaaaataaaataacagtgcaaaagaggagaatatttcctcttgtgcttttcttg

SEQ ID NO: 5948 - DNA, 544 bp, Rattus norvegicus
  ref <308>: DATABASE ACCESSION NUMBER: EMBL / AA892842
  ref <309>: DATABASE ENTRY DATE: 2000-03-03
cacaatgtcatatatttgcaatgctttcaaagcccaacagtgattttaaaaagaaattaaacaacatgccctcattgactttttaaaaatctatacaattcaagctaatgaaatagtttattatacatagtaaacgtggcgtttaaaaaaaaattccaggcccagatgtctgcaggagtatgtgagaaatggattccacgcgagcataagcagaaaaactactgaatgagaccacaagtccaccaactcctttatagtaaatgccgacgttcaccgaggctcgaattcctgtggtgtcaggagatatatttaacgtattacacacatgcttacgatgcataggaaaatggaaaacaaaagatgcagttgcataccatgtggactcccaaattttctaatttacaacttgttaagaatgacaatatacagagaaagtattttaaaatagtgtatgattcactgatgattttttttttactcaaataaataccaaattttgccattttaatgtcacagtatcattcagttttcaatccaaggggag

SEQ ID NO: 5949 - DNA, 2287 bp, Homo sapiens
  ref <308>: DATABASE ACCESSION NUMBER: EMBL / U03851
  ref <309>: DATABASE ENTRY DATE: 1998-02-05
gaattcggcacgagcggatctggaggagcagttgtctgatgaagagaaggtgcgtatagcagcaaaattcatcattcatgcccctcctggagaatttaatgaggttttcaatgatgttcggttactgcttaataatgacaatcttctcagggaaggagcagcccatgcatttgcacagtataacttggaccagtttactccagtaaaaattgaaggttatgaagatcaggtattgataacagaacatggcgacttgggaaatggaaagtttttggatccaaagaacagaatctgttttaaatttgatcacttaaggaaggaggcaactgatccaagaccctgtgaagtagaaaatgcagttgaatcatggagaacttcagtagaaactgctctgagagcttacgtaaaagaacattacccgaatggagtctgcactgtgtatggcaaaaaaatagatggacagcaaaccattattgcatgcatagaaagccatcagttccaagcaaaaaatttttggaatggtcgttggaggtcagaatggaagtttacaatcactccttcaaccactcaagtggttggcatcttgaaaattcaggttcattattatgaagatggtaatgttcagctagtgagtcataaagatatacaagattccctaacagtgtctaatgaagtgcaaacagcaaaagaatttataaagattgtagaagctgcagaaaatgaataccagactgccatcagtgagaattatcagacaatgtcggacactactttcaaagccttacgtcgacagttgccagttacacgcactaagattgattggaacaagatccttagctacaagattggcaaagagatgcagaatgcataagatgaacattgcatgaccggatcattttagtgtctttgcgttaaaaaatcattgcaaaagtattctgaactgtcaagctgcccagtcagatgggctgttgcatttaaaatcactgtaattaattagtttgattagagcacaaagcttagctaatcaaccattattttcattttgtttgttctaagaggattgaaaatcagtttagtttaaatgtctttctggttaggcctttctttcttacaatgaagagatgattcttctagtttatggttaaaagtttttgaagtgtctcaaaaatattttactaactgtaaccctaaaattgatgtcttttggtttatgaaatcagtaatttttgatatttccccagttctttttaatggggtcaataatggacattctagtttaaggtggttgatggatttagccatatatgctgctaaagaaattgtctaccttttcttcctcacctgttccatttatgtaaagttgagattagagggaaagcattttctatatcaattgtgtttaaacctttcaagaaggttatttagctagcttagtgttgaactaaattttttttaaacaaggcaaggtctaatgctgttttgagattctgaaattaatgaaaatacttatttcagaaatgcatttaatgctttttttcttgtgacagttacgcaaatcagcttgaattccatatgtccctgagttatttttatcataaagccacaaatgtattataacaaggcaaattgtaatatatataatcctgaactcatgaccatgtctcagtttatttttttttttcttggattgaaaagtactgaaattcaatgtgacattaaaatgcaaattttcctatttatttgagtagaaaatcacttaccagtgagcatatatattttaaaatactttctttggatattgtaattcttaactggttgtaaattagaaaagctgggattacatatggtgtgcggttacagtctaaattttttcatcctcctatgcatcataagcatgtttgtaatattttcaaaaatagttctactgatgctacaggaatttcaagcctgtggtgaatgttagtatttaccatagggagtgaagtggagttatggtttcattcaatagagtattgctgattatacttgagtggaatcctttcctcacgtactcccacagacgtctgggcctggaaattttttttttattttattttattgtttttttttttagaaaaacaccacttttattatgtacaataaaatatttcattagcttgaattgtatagatttttaaaaattcaatgaaagcatgttgtttaatttctttttaaaaatcactgttgggctttgaaagcattgagaatataatatgaaattatgaaaaaaaaaaaaaaaaaactcgag

SEQ ID NO: 5950 - protein, 286 aa, Homo sapiens
  ref <308>: DATABASE ACCESSION NUMBER: SWISS-Prot / P47755
  ref <309>: DATABASE ENTRY DATE: 2002-06-15
MADLEEQLSDEEKVRIAAKFIIHAPPGEFNEVFNDVRLLLNNDNLLREGAAHAFAQYNLDQFTPVKIEGYEDQVLITEHGDLGNGKFLDPKNRICFKFDHLRKEATDPRPCEVENAVESWRTSVETALRAYVKEHYPNGVCTVYGKKIDGQQTIIACIESHQFQAKNFWNGRWRSEWKFTITPSTTQVVGILKIQVHYYEDGNVQLVSHKDIQDSLTVSNEVQTAKEFIKIVEAAENEYQTAISENYQTMSDTTFKALRRQLPVTRTKIDWNKILSYKIGKEMQNA

SEQ ID NO: 5951 - DNA, 600 bp, Rattus norvegicus
  ref <308>: DATABASE ACCESSION NUMBER: EMBL / AA892843
  ref <309>: DATABASE ENTRY DATE: 2000-03-03
ggacagcagcagcacccaaggcttctttattggtgttttagaaagaaagggtggacttcagggtgaagcagtactcttaaggctcaataccaatagattttcttgaatcttcgagtctcctggatccccatggcctccatcacatcttcttctaatgtctttagccggggcacgtaagttctttctaaagcatcttccactgatgtgtccttggggccatcagtccatgtttcagggacaatgccatctgctctaggaaattcaggtttggggataattctcccagatcttgtagagacacgaacacgctctcctgcctcagtaaatctccactggatctcagtaggtttcctgtccacaggatccactagcttgacttggtgatgaagcaagggggcttcgctagggatcatggtccctcggtgatccttggttctgccaatgtagcggtaatgcgtgttcaatccctccaggacaacccagttccgctgccgaacaacttggactactttgccctgcttcccagcatccttgccttctaagatttccaccatgtctccaaaagaataggtgccagtcttcatcagagatggggtctac

SEQ ID NO: 5952 - DNA, 951 bp, Homo sapiens
  ref <308>: DATABASE ACCESSION NUMBER: EMBL / AK024570
  ref <309>: DATABASE ENTRY DATE: 2000-09-29
atgtgctgaaaatccgaagtgccgcggaaagtggaggtgagggccgcccgccctagaggtgcccgtccgagaggcagagctgacaaggaaggtttcgagcgttttgctggcaaagggatttcttacaacctccaggcatgcgtctttctgccctgctggccttggcatccaaggtcactctgcccccccattaccgctatgggatgagccccccaggctctgttgcagacaagaggaagaaccccccatggatcaggcggcgcccagtggttgtggaacccatctctgatgaagactggtatctgttctgtggggacacggtggagatcctagaaggcaaggatgccgggaagcagggcaaagtggttcaagttatccggcagcgaaactgggtggtcgtgggagggctgaacacacattaccgctacattggcaagaccatggattaccggggaaccatggtccctagtgaagcccccttgctccaccgccatgtcaaacttgtggatcctatggacaggaaacccactgagatcgactggagatttactgaagcaggacagcgggtaagagtctccacacgatcagggagaattatccctaaacccgaatttcccagagctgatggcatcgtccctgaaacgtggattgatggccccaaagacacatcagtggaagatgctttagaaagaacctatgtgccctgtctaaagacactgcaggaggaggtgatggaggccatggggatcaaggagacccggaaatacaagaaggtctattggtattgagcctggggcagagcagctcctccccaacttctgtcccagccttgaaggctgaggcacttctttttcagatgccaataaagagcactttatgagtcaaaaaaaaaaaaaaaaaaaaaaaaaaaaaaaaaaaaaaaaaaaaaaaaaaaaaaaaaaaaaaaaaaaa

SEQ ID NO: 5953 - protein, 217 aa, Homo sapiens
  misc_feature (1)..(217): Xaa=Unknown amino acid
MRLSALLALASKVTLPPHYRYGMSPPGSVADKRKNPPWIRRRPVVVEPISDEDWYLFCGDTVEILEGKDAGKQGKVVQVIRQRNWVVVGGLNTHYRYIGKTMDYRGTMVPSEAPLLHRHVKLVDPMDRKPTEIDWRFTEAGQRVRVSTRSGRIIPKPEFPRADGIVPETWIDGPKDTSVEDALERTYVPCLKTLQEEVMEAMGIKETRKYKKVYWYX

SEQ ID NO: 5954 - DNA, 537 bp, Rattus norvegicus
  ref <308>: DATABASE ACCESSION NUMBER: EMBL / AA892847
  ref <309>: DATABASE ENTRY DATE: 2000-03-03
ccggagctggggaccgaacccagggccttgcgcttcctaggcaagcgctctaccactgagctaaatccccaacccccctcaagtctctattcttaattttaaaaatcccaaatcctgatttctgagtcagcaaagtcagaggctggagtccaatgggcatcagggccctgcccgagggggctcaggagactggcccagttgttcagcgaaatctgcagagctgtgtggggacagaggcccaaaggccacaggaaactgccccaagagttccaagtttccaagggggcccctgcctcagccgggcatggcgtggattctgaccctgcaaatgcactttgggcatgatggccggcacattcccaagtagcctggggaggcagggccctgccatgcccttggcgtgccaaggctccgtggtctaggcccagtggagctgccgtaacctgtcattcttgggtcctcacaactgggacatcattgtgtatatccccaagcccttgacgggatataggtaccacatcacaacccccgaagggt

SEQ ID NO: 5955 - protein, 415 aa, Rattus norvegicus
  ref <308>: DATABASE ACCESSION NUMBER: SWISS-Prot / CAA11703
  ref <309>: DATABASE ENTRY DATE: 2003-02-01
MLQKTVLLLALVAQVLMLENGLLRTPPMGWLAWERFRCNIDCVEDPKNCISDGLFMEMADRLAQDGWRDLGYVYLNIDDCWIGGRDASGRLIPDPKRFPHGIAFLADYAHSLGLKLGIYEDMGKMTCMGYPGTTLDKVELDAETFAEWKVDMLKLDGCFSSSRERAEGYPKMAAALNATGRPIAFSCSWPAYEGGLPPKVNYTEVSRVCNLWRNYKDIQDSWKSVLSILDWFVRHQDVLQPVAGPGHWNDPDMLLIGNFGLSFDESRAQMALWTVLAAPLLMSTDLRTISPQNMDILQNPLMIKINQDPLGIQGRRILKSKSHIEVFKRYLSNQASALVFFSRRTDMPFRFHCSLLELNYPKGRVYEGQNVFTGDIFSGLQTEVNFTVIINPSGVVMWYLYPIKDLGISTMMSHW

SEQ ID NO: 5956 - DNA, 3598 bp, Homo sapiens
  ref <308>: DATABASE ACCESSION NUMBER: Refseq / NM_000262
  ref <309>: DATABASE ENTRY DATE: 2002-11-05
cgcttcggtagcataagtgcggtgggagggggctctgcggttttggggacccagggcgggaacccggacccggctggaagtccggagcctgccgcagccccgcccctccgctctttcttggtgaccttaagccagtggctgcctttttctgagcccgggcggggccgaaggcgcccgtaggccctcgggactcccagcactgcagagggtgtgaggtctgacatccaagacacgttgtttcgtatttctgaaggaagaactcaagctccgggaagtgatggctggggatggggcgggcaacttggggaccgagtgtacgatccacgcctaaggttgagggcggccgagctagccaggcagccgtgaccccagtgcttttcagacgtttcttagcttccagagcccaacacatacagctgatacacgcagaccagatctggtcaggtcctcggaagctgagtccagagcgatgctgctgaagacagtgctcttgctgggacatgtggcccaggtgctgatgctggacaatgggctcctgcagacaccacccatgggctggctggcctgggaacgcttccgctgcaacattaactgtgatgaggacccaaagaactgcataagtgaacagctcttcatggagatggctgaccggatggcacaggatggatggcgggacatgggctacacatacctaaacattgatgactgctggatcggcggtcgcgatgccagtggccgcctgatgccagatcccaagcgcttccctcatggcattcctttcctggctgactacgttcactccctgggcctgaagttgggtatctacgcggacatgggcaacttcacctgcatgggttacccaggcaccacactggacaaggtggtccaggatgctcagaccttcgccgagtggaaggtagacatgctcaagctggatggctgcttctccacccccgaggagcgggcccaggggtaccccaagatggctgctgccctgaatgccacaggccgccccatcgccttctcctgcagctggccagcctatgaaggcggcctccccccaagggtgaactacagtctgctggcggacatctgcaacctctggcgtaactatgatgacatccaggactcctggtggagcgtgctctccatcctgaattggttcgtggagcaccaggacatactgcagccagtggccggccctgggcactggaatgaccctgacatgctgctcattgggaactttggtctcagcttagagcaatcccgggcccagatggccctgtggacggtgctggcagcccccctcttgatgtccacagacctgcgtaccatctccgcccagaacatggacattctgcagaatccactcatgatcaaaatcaaccaggatcccttaggcatccagggacgcaggattcacaaggaaaaatctctcatcgaagtgtacatgcggcctctgtccaacaaggctagcgccttagtcttcttcagctgcaggaccgatatgccttatcgctaccactcctcccttggccagctgaacttcaccgggtctgtgatatatgaggcccaggacgtctactcaggtgacatcatcagtggcctccgagatgaaaccaacttcacagtgatcatcaacccttcaggggtagtgatgtggtacctgtatcccatcaagaacctggagatgtcccagcagtgaggagctgggacatgtgacaggctgtggtggcaccactgagcctagaccatggagccttggcatgcccagggcaagtggggaggttctctgctccccaggcctgctcggtgactgaccccatcatacccaaagtgcaatctcacggccaggttctatgccctgtccaagcgtaaaccctcttggaaacttcttttggggcaattttcctgtggccttcctggcctctacttccatgtgcgcagccccacagacgttgctgagcaactcgccagcctcctgagctccatgcccatcaggactctagcctctgaccttgctgttgactctgaaatcaggatttggaagttttcgaattaggagtagagagatctgacctcttgccaggaatgcccatggatcatgtgattggcttttctacccatagagggccttgcagcctgataccactgggagtgagggtcacaaaggagaccttggctccctcaggtcaccaataaacctgttctttaatcaagtagttgtaatatggacctggggtacctttagttagggactctggtggcactacacggggtgctggattcaaatctcacctctatggatgatgtctggcatcgtctggcccctccttttccaaagtgaccagaagattgtacttcctagagatgccagacttgcctcacacccaggagctgcccctgctgtgcctggtatgctggcagtggtgatggtgacaacacaatgaggccaagtagcaatgctcccaggtcctgcagcttgtgctctgcccagcagtcccctggccagcacctcagcctgctcttctctctggtggctccaccccaacccctacttcttttcctttatttctctcccaacctggctgcaaaggaggttcatatccccagatgtgtccacaaacctgtccaggagttgtgtcttaaaattgatttcctgtccctcttcctaaggacaggggtaacagtcaaagtgaaggaatgatgggttcttgcctgtcttgctttggtccgtatttcccaagccctcctcttttagccaaggctacagggcacttgtcttccctggtggctctcccctttggagagagctagtggcagagaacctagctaggtctccttgggctttgaatgcaggagcacccagtgccccaggccttgcactgtgctgcccaaggagtattttctgggtggatctcccatactcctcagggttctgaggtccttgtatttagggtatggtgtaaaaacttacatatgcacattttgttacatcatttaagatgattgaagctttactggttaagtacagggtcaccagagaaagttcctttccccagttgatgtcttgaggctgttgagaaacttaggacagaagcctacctcatcccaggcctgcccctccgtgcatagctctgcctttgggtcttgttcatagtgctgttcaggcaaaatggaatagtctcaggagggaacaccttctcttgctagctccaggaaggctttgtgggaaatgagttgagaccatggacttgggagttgggggccagagttgagcctggacttgaccaattaattcccttacctttcagcccaagatagctacatgtctttacttgctgtataagttttccttttgtcctgggggtgcctgattgatcctatctcttcacccttcattctttcaacaaacatgccatctatctcccaggacatttattcccttctattcaaggccagttaggaatgcaattattttttttttcagttaaatacagacttgtttggacgcaaggtaccctttctctttttaaaaactttttatcatgaaaactttcaaatacaaaaataaaatggtagagagtgaacctccatg

SEQ ID NO: 5957 - protein, 411 aa, Homo sapiens
  ref <308>: DATABASE ACCESSION NUMBER: SWISS-Prot / P17050
  ref <309>: DATABASE ENTRY DATE: 2002-06-15
MLLKTVLLLGHVAQVLMLDNGLLQTPPMGWLAWERFRCNINCDEDPKNCISEQLFMEMADRMAQDGWRDMGYTYLNIDDCWIGGRDASGRLMPDPKRFPHGIPFLADYVHSLGLKLGIYADMGNFTCMGYPGTTLDKVVQDAQTFAEWKVDMLKLDGCFSTPEERAQGYPKMAAALNATGRPIAFSCSWPAYEGGLPPRVNYSLLADICNLWRNYDDIQDSWWSVLSILNWFVEHQDILQPVAGPGHWNDPDMLLIGNFGLSLEQSRAQMALWTVLAAPLLMSTDLRTISAQNMDILQNPLMIKINQDPLGIQGRRIHKEKSLIEVYMRPLSNKASALVFFSCRTDMPYRYHSSLGQLNFTGSVIYEAQDVYSGDIISGLRDETNFTVIINPSGVVMWYLYPIKNLEMSQQ

SEQ ID NO: 5958 - DNA, 593 bp, Rattus norvegicus
  ref <308>: DATABASE ACCESSION NUMBER: EMBL / AA892849
  ref <309>: DATABASE ENTRY DATE: 2000-03-03
agaaatgatatttaatacttctggaatgattaggaatctgagaacagattgtgggtggctaccctgggctccaggatgtgagagcctgatcctgcttccctgcatggggtcttgccctgcggagaagggacaggcaacttgagtcctgaccgaagggtgggcaggcagaggcaggcagaccaggcagcagctgtagcttggagaatggcacagcagtaggcccatgatgaggctggcttcagtcaagggaggattggaaggctgagacgcttggctaggtgagcaggcaggtgggccaggaagcaaaggacatagagcctacgaaaggccggggcagccaggccgcctgcaaggatgcccatagctgctgtcgctgcagccactgctctgtaggctgtagtggtcatcggcatcactgctgctgccaacactgtccagctccccagggccaaactccatgccctctatatccacctcttgctctgaatcgtctgtggacacagcagaaccagtgctgtcagtgcgcactcgctctacactctgcaccgatagctgctccaaacgtctctttaggaagcgatgctcccgctgaa

SEQ ID NO: 5959 - DNA, 1508 bp, Homo sapiens
  ref <308>: DATABASE ACCESSION NUMBER: EMBL / BC002713
  ref <309>: DATABASE ENTRY DATE: 2001-07-13
ggcacgaggcgcggagtctggaagtgcggcggccgggcgcgcggggtgggcggcgagcggagccggccggagcgggccgggcagcggccgccgccgtcccggggcggacgggcgcgggcgggaggatggagctgaactccctgctgatcctgctggaggcggccgagtacctggagcgcagggatcgagaggccgagcacggctacgcctcggtgctgcccttcgacggcgacttcgccagggagaaaacaaaggcggccggcctggtgcgcaaggccccgaacaacaggcctcctcagtgagcaagcccggcccccgctgccgcttctctccaaaccaagtccctgacccgtggagaactctggggcgtgagctggggctcccccagcatggagaatccaaagctgacaaccagcgtcctggccaaggctgcccgaacactgcctctatgctgagcgtttcacacatgcagccagttcatcttcaccccaggctcagagaggtcttcacacaacgagccattctggaagctccagctgctgctgggctgcctggcactgcccgcttgccggtcagggcctgccgagctgcctgccccttccagctgggcagagtcccctgcaaggaggcagggcccagcttccacatccggagccctggtcagcatagctgcccacggtctgttctcagattcctaatcattccagaagtattaaacgtcattgctgcaaacctcggcaggtgccgtgtgaggggcttaatgaccaccacagggagctcagaccccaaccctggatcccaggagaaaggagtggaccgaggaaggaaggaaggcaaggctgtctgtccatccgtccgtctgtccacctacctgtcagtccacataggctcctggcgtggacaaggggtctgtgaagggcgggaactgggtgagcacctggggcaggtgggtggttaaggtccttcccacttcgcaggtgtcagaacctagggctgggctctcggggccaggcaggccagcccagcccacgccgagctgggcagcgtctgctctggtaggactgtcagacgcacacgcgcacgcacctagacacacccactcatgtacatgctcacacatgcagacacacctgggcgtcccgaggtcacatgttctggggatgatggccttcaggggtcatctggcaaacagcccctgggctgtgcctggatccccctctagctcctgctcacccacgcccacccagtagtcctgcctgtctgcacaggagaggggcttctcttcctggctggggctggggtgaactggaggctggttaagttgcagccgctgggtcctcgggggcttactcatctcccttttttaaacaaaaagcaaaaaagtaaaatgctgcactgcccagcagcccggttagggctcctggagccaccttaggaaagggcttctcatgagctctgctgcggcagcttcagctggcagagaggctttcccagaaaaaaaaaaaaaa

SEQ ID NO: 5960 - protein, 209 aa, Homo sapiens; identical to SEQ ID NO: 5684
  ref <308>: DATABASE ACCESSION NUMBER: SWISS-Prot / Q14582
  ref <309>: DATABASE ENTRY DATE: 2002-06-15

SEQ ID NO: 5961 - DNA, 644 bp, Rattus norvegicus
  ref <308>: DATABASE ACCESSION NUMBER: EMBL / AA892851
  ref <309>: DATABASE ENTRY DATE: 2000-03-03
caaagagaaaaattttattgatataaaatgcacttataaaatgtccacagaagacatgtcatttttcactgctatataaatttattgggaatgttattcacatctattgtcacctaaaacatactgtaaacaatgggttattccctaagacaaatgcatacgtgattctcagcaatcattggtttgattattagtaggttacaaggtcacatctctgtggaatgtcagtgaccgctgtagtgtgacaggcttcagcgcatcattgcacacactgcttcagaacagtccccaccgggtctggacccaggacgcaaagcaccccctctgcttgaaacggcagctctggaaggtctgcgtcacagctccaggtctctcgctgcagcactctatgggcacgtgtgatgacgtgtacacacgcacgactaaaaagtttacctctcgtaaacaagagcaacattaccgtcaactctcctgcatatttaagtagtaaagtctacgtatttgtaaacaaacaaaacacacaaatctatttttaaaaacttccatcagctcgtaattcctctgtgatctaagtgagtccacactgaatttctgaaaggcgcatgtattaccttaggtaataaagctctgcaaggggtgcttca

SEQ ID NO: 5962 - DNA, 186 bp, Homo sapiens
  ref <308>: DATABASE ACCESSION NUMBER: EMBL / BE139189
  ref <309>: DATABASE ENTRY DATE: 2000-07-01
ttttttaaagagaaaaatttttattgtgatataaaatgcacttataaaatgtccaccagaaggcatgtaattcttcactgctatataaatttactgggaatatgttattcaccatctaggtatgatactgccaactaaaacatactgtaaacgatgagttatactctataacaaatgcatcactga

SEQ ID NO: 5963 - protein, 350 aa, Homo sapiens
  ref <308>: DATABASE ACCESSION NUMBER: SWISS-Prot / AAC50062
  ref <309>: DATABASE ENTRY DATE: 2003-02-01
MSHQTGIQASEDVKEIFARARNGKYRLLKISIENEQLVIGSYSQPSDSWDKDYDSFVLPLLEDKQPCYILFRLDSQNAQGYEWIFIAWSPDHSHVRQKMLYAATRATLKKEFGGGHIKDEVFGTVKEDVSLHGYKKYLLSQSSPAPLTAAEEELRQIKINEVQTDVGVDTKHQTLQGVAFPISREAFQALEKLNNRQLNYVQLEIDIKNEIIILANTTNTELKDLPKRIPKDSARYHFFLYKHSHEGDYLESIVFIYSMPGYTCSIRERMLYSSCKSRLLEIVERQLQMDVIRKIEIDNGDELTADFLYEEVHPKQHAHKQSFAKPKGPAGKRGIRRLIRGPAETEATTD

SEQ ID NO: 5964 - DNA, 644 bp, Rattus norvegicus; identical to SEQ ID NO: 5961
  ref <308>: DATABASE ACCESSION NUMBER: EMBL / AA892851
  ref <309>: DATABASE ENTRY DATE: 2000-03-03

SEQ ID NO: 5965 - DNA, 186 bp, Homo sapiens; identical to SEQ ID NO: 5962
  ref <308>: DATABASE ACCESSION NUMBER: EMBL / BE139189
  ref <309>: DATABASE ENTRY DATE: 2000-07-01

SEQ ID NO: 5966 - protein, 350 aa, Homo sapiens; identical to SEQ ID NO: 5963
  ref <308>: DATABASE ACCESSION NUMBER: SWISS-Prot / AAC50062
  ref <309>: DATABASE ENTRY DATE: 2003-02-01

SEQ ID NO: 5967 - DNA, 644 bp, Rattus norvegicus; identical to SEQ ID NO: 5961
  ref <308>: DATABASE ACCESSION NUMBER: EMBL / AA892851
  ref <309>: DATABASE ENTRY DATE: 2000-03-03

SEQ ID NO: 5968 - DNA, 186 bp, Homo sapiens; identical to SEQ ID NO: 5962
  ref <308>: DATABASE ACCESSION NUMBER: EMBL / BE139189
  ref <309>: DATABASE ENTRY DATE: 2000-07-01

SEQ ID NO: 5969 - protein, 350 aa, Homo sapiens; identical to SEQ ID NO: 5963
  ref <308>: DATABASE ACCESSION NUMBER: SWISS-Prot / AAC50062
  ref <309>: DATABASE ENTRY DATE: 2003-02-01

SEQ ID NO: 5970 - DNA, 644 bp, Rattus norvegicus; identical to SEQ ID NO: 5961
  ref <308>: DATABASE ACCESSION NUMBER: EMBL / AA892851
  ref <309>: DATABASE ENTRY DATE: 2000-03-03

SEQ ID NO: 5971 - DNA, 186 bp, Homo sapiens; identical to SEQ ID NO: 5962
  ref <308>: DATABASE ACCESSION NUMBER: EMBL / BE139189
  ref <309>: DATABASE ENTRY DATE: 2000-07-01

SEQ ID NO: 5972 - protein, 350 aa, Homo sapiens; identical to SEQ ID NO: 5963
  ref <308>: DATABASE ACCESSION NUMBER: SWISS-Prot / AAC50062
  ref <309>: DATABASE ENTRY DATE: 2003-02-01

SEQ ID NO: 5973 - DNA, 591 bp, Rattus norvegicus
  ref <308>: DATABASE ACCESSION NUMBER: EMBL / AA892854
  ref <309>: DATABASE ENTRY DATE: 2000-03-03
gaatgacactggatgaataggaaacgttaaagaatttgatacaagagactggtattttgtctgtgtgaaagatgtgaataataaaaatagattagcagggtcacagtgcaaaggaatatatttatatactgttaaggagcctggaactttaagctgaggatctttcagtgttactggttttaatccaagacaataaattttgtacaagcaacctttcaaagtcgaagcattatttccctcatgaagattctctctaaaggagacctgctctgcatcaccttaggctggtaatgcgtctgcttcttagggaccttctggaaactattctggaagcctgatttttgcaagggtgcaaactaactgaagtccatctcataaacctcttgttagtaggagctatgggttcagattcgacatgtatgcttttattcctctagggtctaggatagtttaacactaaacaacaggtctattaccaaagtggcttgtcactaaatgcctgctcgaaaatatcctcccttaaggaacaagaatatgggttgagtatgggaaggagctcgagtatctcctctcagctactgcaggattttt

SEQ ID NO: 5974 - protein, 109 aa, Rattus norvegicus
  ref <308>: DATABASE ACCESSION NUMBER: Refseq / NP_061354
  ref <309>: DATABASE ENTRY DATE: 2002-09-19
MRLSTATLLLLLASCLSPGHGILEAHYTNLKCRCSGVISTVVGLNIIDRIQVTPPGNGCPKTEVVIWTKMKKVICVNPRAKWLQRLLRHVQSKSLSSTPQAPVSKRRAA

SEQ ID NO: 5975 - DNA, 1216 bp, Homo sapiens
  ref <308>: DATABASE ACCESSION NUMBER: Refseq / NM_006419
  ref <309>: DATABASE ENTRY DATE: 2002-11-05
ttcggcacttgggagaagatgtttgaaaaaactgactctgctaatgagcctggactcagagctcaagtctgaactctacctccagacagaatgaagttcatctcgacatctctgcttctcatgctgctggtcagcagcctctctccagtccaaggtgttctggaggtctattacacaagcttgaggtgtagatgtgtccaagagagctcagtctttatccctagacgcttcattgatcgaattcaaatcttgccccgtgggaatggttgtccaagaaaagaaatcatagtctggaagaagaacaagtcaattgtgtgtgtggaccctcaagctgaatggatacaaagaatgatggaagtattgagaaaaagaagttcttcaactctaccagttccagtgtttaagagaaagattccctgatgctgatatttccactaagaacacctgcattcttcccttatccctgctctggattttagttttgtgcttagttaaatcttttccagggagaaagaacttccccatacaaataaggcatgaggactatgtgaaaaataaccttgcaggagctgatggggcaaactcaagcttcttcactcacagcaccctatatacacttggagtttgcattcttattcatcagggaggaaagtttctttgaaaatagttattcagttataagtaatacaggattattttgattatatacttgttgtttaatgtttaaaatttcttagaaaacaatggaatgagaatttaagcctcaaatttgaacatgtggcttgaattaagaagaaaattatggcatatattaaaagcaggcttctatgaaagactcaaaaagctgcctgggaggcagatggaacttgagcctgtcaagaggcaaaggaatccatgtagtagatatcctctgcttaaaaactcactacggaggagaattaagtcctacttttaaagaatttctttataaaatttactgtctaagattaatagcattcgaagatccccagacttcatagaatactcagggaaagcatttaaagggtgatgtacacatgtatcctttcacacatttgccttgacaaacttctttcactcacatctttttcactgactttttttgtgggggcggggccggggggactctggtatctaattctttaatgattcctataaatctaatgacattcaataaagttgagcaaacattttactt

SEQ ID NO: 5976 - protein, 109 aa, Homo sapiens
  ref <308>: DATABASE ACCESSION NUMBER: SWISS-Prot / O43927
  ref <309>: DATABASE ENTRY DATE: 2002-06-15
MKFISTSLLLMLLVSSLSPVQGVLEVYYTSLRCRCVQESSVFIPRRFIDRIQILPRGNGCPRKEIIVWKKNKSIVCVDPQAEWIQRMMEVLRKRSSSTLPVPVFKRKIP

SEQ ID NO: 5977 - DNA, 436 bp, Rattus norvegicus
  ref <308>: DATABASE ACCESSION NUMBER: EMBL / AA892860
  ref <309>: DATABASE ENTRY DATE: 2000-03-03
ccatataataatttaatatatgccagccaaacaaagtagtttatctttattcaattaaataaaaacagacctgtcaggtatattatataacattcactatatacacatgatttaggcgatgcaaggtaattctaggtatgctaactgttcaactattagtgaaacacagaaggtgtcaggagcccagcgtgttcctgctcacattgggtgcctgcgtttctgtggacagttagagggacagccacaagccaggacagatattaccagtaaacgtctgagggacagaggggctggggatgagtctagcagagattaacagtctcctaagtgtggatagcatacttgacagttacgctttaacaagttcctcttcgatcatgttcatgacgtcaaagtttttgtttgaaggcaacaccaccacattttacctcgtgcc

SEQ ID NO: 5978 - DNA, 293 bp, Homo sapiens
  misc_feature (1)..(293): n=a, c, g or t
  ref <308>: DATABASE ACCESSION NUMBER: EMBL / AA032215
  ref <309>: DATABASE ENTRY DATE: 2000-03-03
ttttttttttttcttcatataataatttaatatatgccagccaaacaaagtatttgtatctttattcaattaaattaaaacagacctgccaggtatattatataacattcactatatacatatgatttaggcaatgcaagataattctagatatgctgattactcaactatgtgtaaaacatgagcggtgtcagtgatgcccagcaagtgctccttttcacattgggtgcctgcatttccatggtatggttagagggatagctacgagccatgacttggactaccagtanact

SEQ ID NO: 5979 - protein, 1333 aa, Homo sapiens [sequence omitted]

SEQ ID NO: 5980 - DNA, 436 bp, Rattus norvegicus; identical to SEQ ID NO: 5977
  ref <308>: DATABASE ACCESSION NUMBER: EMBL / AA892860
  ref <309>: DATABASE ENTRY DATE: 2000-03-03

SEQ ID NO: 5981 - DNA, 293 bp, Homo sapiens; identical to SEQ ID NO: 5978
  misc_feature (1)..(293): n=a, c, g or t
  ref <308>: DATABASE ACCESSION NUMBER: EMBL / AA032215
  ref <309>: DATABASE ENTRY DATE: 2000-03-03

SEQ ID NO: 5982 - protein, 1333 aa, Homo sapiens [sequence omitted]

SEQ ID NO: 5983 - DNA, 593 bp, Rattus norvegicus
  ref <308>: DATABASE ACCESSION NUMBER: EMBL / AA892863
  ref <309>: DATABASE ENTRY DATE: 2000-03-03
gcattttcctagatcatttttacttgaccttttttttgggacaaaagagtaggtaatgcaaaacatgttttatattaaaacagatgcagatagtattgaatagaatataaaatttacattacttttgagacaaagtacttttgacatcaaagacatttcaaactaagctacttatgagcttctgggtgcatccctccctaaccctgagcagaagaccctgctcgctcacactacctaacatcatggcctctgctgcattgacagaagtctaaaagcagcaaagtcagtgcttactcatttggcaaagtaccagtgaatttacttaaacaattgacaccttagggctttctcatcttacgagcattttaacctgacgttaaaaggcctgagtgaatagaatctcaatgcctgagttgagaattttcattgtaaagtgaattttcctccagtaagtgtttttaacaagcctcactgagggtctgacatgcgagctggacaatatcctaggaacctggtcaccagataaggaggtacagatacacttttcaagggcatcatcacaaatgagaacaaactactcaccttctgcagta

SEQ ID NO: 5984 - DNA, 570 bp, Rattus norvegicus
  ref <308>: DATABASE ACCESSION NUMBER: EMBL / AA892864
  ref <309>: DATABASE ENTRY DATE: 2000-03-03
aaacttaatgaagagtagtaataccccatgcctgtccacagctgtccagggttccctgagcaggagggagtgctgactgcctctctttgcacactctgtctttatttcctaaacagaaggagagctaaatggcgctctggacagctcctggacccttccttccctacatgcagtgcttgggccctgctgaggggcacagtgaccttatgacctatagtaagtggccagcctctgactgctatgcatggtcagggccaccagagggggcagagggccctcccaagatctagaataaattccaccaactccgggatacctggatcccaccttcctggagcccccccccccttccagcagccaggcagttctccttggcagcagagcccctccccagggttctatgtgcagtgacatgatcctgaggtaacagcaaggccctctgtaaagatgaaagtgctccaagggagcagtgagccccagttattgctggcgctaagtgaggcctggcgtaagcctttgggcgggcacctgagaggacaggggctcagacttcactgcttcagggtagcc

SEQ ID NO: 5985 - protein, 303 aa, Rattus norvegicus
  ref <308>: DATABASE ACCESSION NUMBER: Refseq / NP_035974
  ref <309>: DATABASE ENTRY DATE: 2002-09-19
MPEASSPRRTPQNVPYQDLPHLVNADGQYLFCRYWKPSGTPKALIFVSHGAGEHCGRYDELAHMLKGLDMLVFAHDHVGHGQSEGERMVVSDFQVFVRDVLQHVDTIQKDYPDVPIFLLGHSMGGAISILVAAERPTYFSGMVLISPLVLANPESASTLKVLAAKLLNFVLPNMTLGRIDSSVLSRNKSEVDLYNSDPLVCRAGLKVCFGIQLLNAVARVERAMPRLTLPFLLLQGSADRLCDSKGAYLLMESSRSQDKTLKMYEGAYHVLHRELPEVTNSVLHEVNSWVSHRIAAAGAGCPP

SEQ ID NO: 5986 - DNA, 533 bp, Rattus norvegicus
  misc_feature (1)..(533): n=a, c, g or t
  ref <308>: DATABASE ACCESSION NUMBER: EMBL / AA892888
  ref <309>: DATABASE ENTRY DATE: 2000-03-03
gacaataagaactctggctctttattgagtgctgctctcattctgacgtttgtctgctctctgttcctctgtagttcaggatagagtgtatggtggggagggaggctgaggtggccaagcaagggatacatgccaagggggcaccagggagaacgttacaatgctgtgagacacggggcatggctggaaggacacacaagggcgagagagagagagagagagagagagagagagagagagagaatgaatgaatgaataaatgaatgaataggggtcctaaaagggttgggttgggtaagtccagggccttgcagtctagttttctgcctcaagagagcaggaagaaagcctcactgtggagaaaggctgaagctgattaatgatcaccccggccgtggcagcggtgctgagagtctctgctttacctgacccctccttanaagtactggggtgggttctggctgcacatggggagatcagatggccttcttgggggagagttatttcacagttttccccatgatgtggggccc

SEQ ID NO: 5987 - DNA, 508 bp, Rattus norvegicus
  ref <308>: DATABASE ACCESSION NUMBER: EMBL / AA892895
  ref <309>: DATABASE ENTRY DATE: 2000-03-03
cagggctgaaaacgagtctttattgtccccactacttgagggggataaatcgggaggagtgggtggcaccaatgccgggccggccgtgcttcacaggcttgtaggtgatggagaactcgcccaggtagtggccgatcatctcgggtttgatctccacctggttgaaggtcttgccgttgtacacacccaccatgctgccgaccatctcgggcagaatgatcatgtccctaaggtgggtcttcacgacctccggcttctccatgggtggcgcctccttcttggccttcctcaagcgcttgagcagtgagtgctgcttcctccgcaggcctcggttcaggcgccgtctctgccgggcgctgtacaactgcatcagctgctcataggacatgtccagcagctggtcgaggtccacgccacggtaggtgaacttgcggaaggttcgctttttcttctgctccacttcggccatcttggcggctgctgggaaaaggaagcggtgtcagcggtt

SEQ ID NO: 5988 - protein, 144 aa, Rattus norvegicus; identical to SEQ ID NO: 2362
  ref <308>: DATABASE ACCESSION NUMBER: SWISS-Prot / P11174
  ref <309>: DATABASE ENTRY DATE: 2002-06-15

SEQ ID NO: 5989 - DNA, 221 bp, Homo sapiens
  ref <308>: DATABASE ACCESSION NUMBER: EMBL / AA434279
  ref <309>: DATABASE ENTRY DATE: 2000-03-03
cggcagcatggtgggcgtctacaacggcaagaccttcaaccaggtggagatcaagcccgagatgatcggccactacctgggcgagttctccatcacctacaagcccgtaaagcatggccggcccggcatcggggccacccactcctcccgcttcatccctctcaagtaatggctcagctaataaaggcgcacatgactccaaaaaaaaaaaaaaaaaaacc

SEQ ID NO: 5990 - protein, 144 aa, Homo sapiens; identical to SEQ ID NO: 2362
  ref <308>: DATABASE ACCESSION NUMBER: SWISS-Prot / R3HU15
  ref <309>: DATABASE ENTRY DATE: 2002-06-15

SEQ ID NO: 5991 - DNA, 508 bp, Rattus norvegicus; identical to SEQ ID NO: 5987
  ref <308>: DATABASE ACCESSION NUMBER: EMBL / AA892895
  ref <309>: DATABASE ENTRY DATE: 2000-03-03

SEQ ID NO: 5992 - protein, 144 aa, Rattus norvegicus; identical to SEQ ID NO: 2362
  ref <308>: DATABASE ACCESSION NUMBER: SWISS-Prot / P11174
  ref <309>: DATABASE ENTRY DATE: 2002-06-15

SEQ ID NO: 5993 - DNA, 221 bp, Homo sapiens; identical to SEQ ID NO: 5989
  ref <308>: DATABASE ACCESSION NUMBER: EMBL / AA434279
  ref <309>: DATABASE ENTRY DATE: 2000-03-03

SEQ ID NO: 5994 - protein, 144 aa, Homo sapiens; identical to SEQ ID NO: 2362
  ref <308>: DATABASE ACCESSION NUMBER: SWISS-Prot / R3HU15
  ref <309>: DATABASE ENTRY DATE: 2002-06-15

SEQ ID NO: 5995 - DNA, 574 bp, Rattus norvegicus
  ref <308>: DATABASE ACCESSION NUMBER: EMBL / AA892919
  ref <309>: DATABASE ENTRY DATE: 2000-03-03
ccggccgccaaacattttttttttctttttttttttttttttttttttttgaaatgcaatagctcgcttttaataacaacatacaaaatctagggaaaaccccaagtagtgcccactcccagagaccaaggaatggaaccagatgggagccatgctcccgtgcctgctctccagccccgaggggctgaactctacatccacagctgagttctctggatctggggcactaaccccaacagcaacaggaggcccagcttccagtttattccagttgggtagaggaggcctcagctagagcacactgccagggtgaggcttgggctgatgacccacatggccacttgcacccaccaaggacaatgcagactcatgagcagcctggtctcctctctgcctaggaagccaggctgaagacaagcccagcatgctgatcaaagcacggggcaaaggggacagcaccagcctcgctctaagctctggctcagggtggttctgcctacaaccttcccagaaggattccaccccggtccccatcagacatccctcagcagaagtaccctcccactttccttca

SEQ ID NO: 5996 - protein, 704 aa, Rattus norvegicus
  ref <308>: DATABASE ACCESSION NUMBER: SWISS-Prot / P41777
  ref <309>: DATABASE ENTRY DATE: 2002-06-15
MADTGLRRVVPSDLYPLVLGFLRDNQLSEVASKFAKATGATQQDANASSLLDIYSFWLKSTKAPKVKLQSNGPVAKKAKKETSSSDSSEDSSEEEDKAQVPTQKAAAPAKRASLPQHAGKAAAKASESSSSEESSEEEEEKDKKKKPVQQKAVKPQAKAVRPPPKKAESSESESDSSSEDEAPQTQKPKAAATAAKAPTKAQTKAPAKPGPPAKAQPKAANGKAGSSSSSSSSSSSDDSEEEKKAAAPLKKTAPKKQVVAKAPVKVTAAPTQKSSSSEDSSSEEEEEQKKPMKKKAGPYSSVPPPSVSLSKKSVGAQSPKKAAAQTQPADSSADSSEESDSSSEEEKKTPAKTVVSKTPAKPAPVKKKAESSSDSSDSDSSEDEAPAKPVSATKSPLSKPAVTPKPPAAKAVATPKQPAGSGQKPQSRKADSSSSEEESSSSEEEATKKSVTTPKARVTAKAAPSLPAKQAPRAGGDSSSDSESSSSEEEKKTPPKPPAKKKAAGAAVPKPTPVKKAAAESSSSSSSSEDSSEEEKKKPKSKATPKPQAGKANGVPASQNGKAGKESEEEEEDTEQNKKAAGTKPGSGKKRKHNETADEAATPQSKKVKLQTPNTFPKRKKGEKRASSPFRRVREEEIEVDSRVADNSFDAKRGAAGDWGERANQVLKFTKGKSFRHEKTKKKRGSYRGGSISVQVNSVKFDSE

SEQ ID NO: 5997 - DNA, 574 bp, Rattus norvegicus; identical to SEQ ID NO: 5995
  ref <308>: DATABASE ACCESSION NUMBER: EMBL / AA892919
  ref <309>: DATABASE ENTRY DATE: 2000-03-03

SEQ ID NO: 5998 - protein, 704 aa, Rattus norvegicus; identical to SEQ ID NO: 5996
  ref <308>: DATABASE ACCESSION NUMBER: SWISS-Prot / P41777
  ref <309>: DATABASE ENTRY DATE: 2002-06-15

SEQ ID NO: 5999 - DNA, 388 bp, Rattus norvegicus
  ref <308>: DATABASE ACCESSION NUMBER: EMBL / AA892967
  ref <309>: DATABASE ENTRY DATE: 2000-03-03
attgtttgtcaaatgggtgaaatttattgcatatttcctaataacaaaccaattcagaaaggaatgaattttgcagaaatccttgccgtttagcctttccttgtccttactttgccatacttaaagttcaataatgtggaaactccttttaggagtttagttggtgaaatgcagtaacacagtaattaacaatagcaggaacatctcaaatagttgataagtatatgcaaaaggcaaactatcaagtgacttgctcaaacgggagtgttcacaggggcccacggaagttcacttgctgttgaagggatcctccgatttggcttcaaaggcactgacatggtttggaaagttaagaaattgcatctaatttcttcttttagatgaattt

SEQ ID NO: 6000 - DNA, 465 bp, Rattus norvegicus
  misc_feature (1)..(465): n=a, c, g or t
  ref <308>: DATABASE ACCESSION NUMBER: EMBL / AA892999
  ref <309>: DATABASE ENTRY DATE: 2000-03-03
gagtggcagtgatttattgcatactcacatatacatacaggctgacggccaccctgccttcctagccaccatgtgagtacaaacacagttcttctggaggttttatctctatgcccttccccctacagtgggacttcttggaagtctgaaaagtggaaggtcacagagacccatgtagttgggagagagaagacaacaactatgtatgtcttgactgaggcaaaagagtcttgaggccagtggtaatcgagtcctgaacccaaggtcctccagaaaggttttcaccaactatctgatatgacatcaactttacccttgggtgtgggcagtttttccttctccttgactctcttctagatggctggcacagacagtcaggtggggctgtggttctgcactcctgacccacaagaagctagggagtaagataaccatccagccatagctcctgggtcatggtangaa

SEQ ID NO: 6001 - DNA, 289 bp, Rattus norvegicus
  ref <308>: DATABASE ACCESSION NUMBER: EMBL / AA893002
  ref <309>: DATABASE ENTRY DATE: 2000-03-03
gagaaggtcaacctgaaggcagtgccctttgggaaagacgtctctcatcaccaggtacatcaaccattactctcagcgaagtacaaaggtacacacatcagtgacttccttacaataaatacagagtcatgcatcccacacgagaaggcaccgaaactggtcacttagtactcatagaaattattagctacattaacaaagccacccaaattatctgtacaaggaaatgtaacaatatattccaaaggtgaaaacacattagaacatctttaaaatagtatgcaataaa

SEQ ID NO: 6002 - DNA, 901 bp, Homo sapiens
  ref <308>: DATABASE ACCESSION NUMBER: EMBL / BG261086
  ref <309>: DATABASE ENTRY DATE: 2001-03-09
ccttacattggaaaaggtattttaaatttagccttgccgtattatttaaaataccttttccaatgtaagggacaaaaggaactatactgttgtcccttacattggaaaaggtattttaaatttagccttgccgtattatttatagttaggaatttactacatttggtagtctgttttgaaactaagcacttgtgtctgaaagatgcagataatatctatctatttattacacagtgggctctgtttgctgcagaaaagagtgaaacttttaactgcttagcacacttgccagtgaaatatacctgacagagcagaggttataactttggctctaattacttttagtaatggtaagacaacgtgagtttgtttgtttacatgctgtttacaatggcataattttaaaaatatatacaattgagatatttattgcctactattttaaagatgttttatgtgttttcacctttggaatatattgttacatttccttgtacagataattttggtggctttgttaatgtagctagtaatttttatgactactaagtgaccagttttcggtgcttttattgtgggatgctgattatgtatttattgtacggaagtcctgacgtgtgtattttgtactttggtgaaagtatggtcgatcctgatgtacatgatgatgaagaattttttcccaagggaactggttgagatcaatcttctcaaattaaaagatgctttgagaaaaaaacaaaaagggggggctaagatcccgagggccagtttaagcgccccgttctgtaaggggccataagcgttataaaaaggaggccggaaaaccgggggaaaatctggtttggaccctcgcgggctaggacaccaaatcagtaaagaagtaaacgtgtggatgtaa

SEQ ID NO: 6003 - DNA, 365 bp, Rattus norvegicus
  ref <308>: DATABASE ACCESSION NUMBER: EMBL / AA893011
  ref <309>: DATABASE ENTRY DATE: 2000-03-03
ccgggccaacatccccctaactcttccccctccccttctttacgggtgttcccctccccatccttcacccattgccgccctccccgcaacaatcacgttcactggggcgatggtaagactcttaaagctggtaggcagagtttttgaaggtgagatttatatggatagatgaggtgacagtcagagaaggactgtgttaggttgctggaacaatggctctttgacagaaccaagaacatgaccagtattaccacttaagcacaaagtaagcatacatattgacaagatggagagatgacctagagacagaataagacgtgcttaaagacaatgttggattttaacactcagacaggctcttgcaa

SEQ ID NO: 6004 - DNA, 367 bp, Rattus norvegicus
  ref <308>: DATABASE ACCESSION NUMBER: EMBL / AA893032
  ref <309>: DATABASE ENTRY DATE: 2000-03-03
acagtgacaagaaggcttacaaaggagaaggaagaagaacacattggacacctgagattgacaagggtcatttttggtccaagtgctgttaacatttttgagggagttttaaggcatttgggtctcagggtttgttagcttgccctattgccttcttagccagcagttctgagcaactctcaagctttgttaccatctgaggtgcatcttctttctgtgtacttctatttctaactcattgttatgctgttactctctggtctcccatgtagagtactcaggaggattttcttgatctttccgctccattgagaacatctttaattgtatgaaacatcgcaggttgtctttatctacagagtaaagg

SEQ ID NO: 6005 - DNA, 479 bp, Rattus norvegicus
  misc_feature (1)..(479): n=a, c, g or t
  ref <308>: DATABASE ACCESSION NUMBER: EMBL / AA893082
  ref <309>: DATABASE ENTRY DATE: 2000-03-03
aagacaggatgtcagtccctgaaaataacatttactggttattgcctttaaaactgtggattttttttaagttacagaaaatccagttctgcaccacaatacaactgtaaaaaatctgcatcaccttaaaactgtgcagtaatgccattttataactgcataaattttattagcgttctaaacagttttgcgattttttttttgtattatatgcttgcaggttatatcttagtgcaattcagtcccaaatactttaattttggaaaaaaaacatacagtttgaatgtaaaatacccctacagatataagcaggggcgtttcccccttttaatactttggttttcaatacagtccacggtatagcaagaactacacatacccaacttatatttaagttgcaagcacatgcttcagaagctacttttaaaacagtcnccttgcaaactctaccccccttaacatcacaacagtaaacgatt

SEQ ID NO: 6006 - protein, 369 aa, Rattus norvegicus
  ref <308>: DATABASE ACCESSION NUMBER: Refseq / NP_062191
  ref <309>: DATABASE ENTRY DATE: 2002-05-21
MASELAMNNSDLPTSPLAMEYVNDFDLMKFEVKKEPVETDRIISQCGRLIAGGSLSSTPMSTPCSSVPPSPSFSAPSPASGSEQKAHLEDYYWMTGYPQQLNPEALGFSPEDAVEALISNSHQLQGGFDGYARGAQQLAAAAGAGAGASLGGSGEEMGPAAAVVSAVIAAAAAQSGGAPHYHHHHHHATGHHHHPTAGAPGAAGSASASASGAGGAGGGGPASAGGGGGGGGGGTAGAGGALHPHHAAGGLHFDDRFSDEQLVTMSVRELNRQLRGVSKEEVIRLKQKRRTLKNRGYAQSCRFKRVQQRHVLESEKNQLLQQVDHLKQEISRLVRERDAYKEKYEKLVSSGFRENCSSSDNPSSPEFFM

SEQ ID NO: 6007 - DNA, 4246 bp, Homo sapiens
  misc_feature (1)..(4246): n=a, c, g or t
  ref <308>: DATABASE ACCESSION NUMBER: EMBL / AF055376
  ref <309>: DATABASE ENTRY DATE: 1999-06-30
atcttttttcatcttctagctgtagctcgggctgcttgtcggcttggctccccctcccccctttgctctctgcctcgtctttccccaggacttcgctattttgcttttttaaaaaaaggcaagaaagaactaaactcccccctccctctcctccagtcgggctgcacctctgccttgcactttgcacagaggtagagagcgcgcgagggagagagaggaaagaaaaaaaataataaagagagccaagcagaagaggaggcgagaagcatgaagtgttaactcccccgtgccaaggcccgcgccgcccggacagacgcccgccgcgccttccagccccgagcggacgccgcgcgccgccctgcctgcagcccgggccggcgacggcgagcccttccttatgcaaagcgcgccagcagcgcgaaggcgggacgccgcgcaccgggccgggctcctccagcttcgccgccgcagccaccaccgccgccaccgcagctcgcggaggatcttcccgagcctgaagccgccggctcggcgcgcaaggaggcgagcgcaaggaggggccggggcgagcgagggagcacattggcgtgagcaggggggagggagggcgggcgcggggggcgcgggcagggcgggggggtgtgtgtgtgagcgcgcttggaggtttcgggccagccaccgccgcgcaagctagaagcgccccagcccggcaagctggctcacccgctggccacccagcacagcccgctggcccctctcctgcagcccatctggcggagcggcggcggcggcggcggcggcaggagaatggcatcagaactggcaatgagcaactccgacctgcccaccagtcccctggccatggaatatgttaatgacttcgatctgatgaagtttgaagtgaaaaaggaaccggtggagaccgaccgcatcatcagccagtgcggccgtctcatcgccgggggctcgctgtcctccacccccatgagcacgccgtgcagctcggtgcccccttcccccagcttctcggcgcccagcccgggctcgggcagcgagcagaaggcgcacctggaagactactactggatgaccggctacccgcagcagctgaaccccgaggcgctgggcttcagccccgaggacgcggtcgaggcgctcatcagcaacagccaccagctccagggcggcttcgatggctacgcgcgcggggcgcagcagctggccgcggcggccggggccggtgccggcgcctccttgggcggcagcggcgaggagatgggccccgcggccgccgtggtgtccgccgtgatcgccgcggccgccgcgcagagcggcgcgggcccgcactaccaccaccaccaccaccacgccgccggccaccaccaccacccgacggccggcgcgcccggcgccgcgggcagcgcggccgcctcggccggtggcgctgggggcgcgggcggcggtggcccggccagcgctgggggcggcggcggcggcggcggcggcggaggcggcgggggcgcggcgggggcggggggcgccctgcacccgcaccacgccgccggcggcctgcacttcgacgaccgcttctccgacgagcagctggtgaccatgtctgtgcgcgagctgaaccggcagctgcgcggggtcagcaaggaggaggtgatccggctgaagcagaagaggcggaccctgaaaaaccgcggctatgcccagtcctgccgcttcaagagggtgcagcagagacacgtcctggagtcggagaagaaccagctgctgcagcaagtcgaccacctcaagcaggagatctccaggctggtgcgcgagagggacgcgtacaaggagaaatacgagaagttggtgagcagcggcttccgagaaaacggctcgagcagcgacaacccgtcctctcccgagtttttcatgtgagtctgacacgcgattccagctagccaccctgataagtgctccgcgggggtccggctcgggtgtgggcttgctagttctagagccatgctcgccaccacctcaccacccccacccccaccgagtttggcccccttggccccctacacacacacaaacccgcacgcacacaccacacacacacacacacacacacacacacaccccacaccctgctcgagtttgtggtggtggtggctgttttaaactggggagggaatgggtgtctggctcatggattgccaatctgaaattctccataacttgctagcttgttttttttttttttttttacacccccccgccccaccccccggacttgcacaatgttcaatgatctcagcagagttcttcatgtgaaacgttgatcacctttgaagcctgcatcattcacatattttttcttcttcttccccttcagttcatgaactggtgttcattttctgtgtgtgtgtgtgttttattttgtttggatttttttttttaattttacttttagagcttgctgtgcttgcccacctcttttccaacctccaccctcactccttctcaacccatctcttccgagatgaaagaaaaaaaaaagcaaagtttttttttcttctcctgagttcttcagtgagattgagcttgcaaaggaaaaaaaaatgtgaaatgttatagacttgcagcgtgccgagttccatcgggttttttttttagcattgttatgctaaaatagagaaaaaaatcctcatgaaccttccacaatcaagcctgcatcaaccttctgggtgtgacttgtgagttttggccttgtgatgccaaatctgagagtttagtctgccattaaaaaaactcattctcatctcatgcattattatgcttgctactttgtcttagcaacaatgaactataactgtttcaaagactttatggaaaagagacattatattaataaaaaaaaaagcctgcatgctggacatatatggtataattattttttcctttttttttccttttggcttggaaatggacgttcgaagacttatagcatggcattcatacttttgttttattgcctcatgacttttttgagtttagaacaaaacagtgcaaccgtagagccttcttcccatgaaattttgcatctgctccaaaactgctttgagttactcagaacttcaacctcccaatgcactgaaggcattccttgtcaaagataccagaatgggttacacatttaacctggcaaacattgaagaactcttaatgttttctttttaataagaatgacgcccactttggggactaaaattgtgctattgccgagaagcagtctaaaatttatttttnaaaaagagaaactgccccattatttttggtttgttttatttttattttatattttttggcttttggtcattgtcaaatgtggaatgctctgggtttctagtatataatttaattctagtgtttataatctgttagcccagttaaaatgtatgctacagataaaggaatgttatagataaatttgaaagagttaggtctgtttagctgtagattttttaaacgattgatgcactaaattgtttactattgtgatgttaaggggggtagagtttgcaaggggactgtttaaaaaaagtagcttatacagcatgtgcttgcaacttaaatataagttgggtatgtgtagtctttgctataccactgactgtattgaaaaccaaagtattaagaggggaaacgcccctgtttatatctgtaggggtattttacattcaaaaatgtatgtttttttttcttttcaaaattaaagtatttgggactgaattgcactaagatataacctgcaagcatataatacaaaaaaaaattgcaaaactgtttagaacgctaataaaatttatgcagttataaaaatggcattactgcacagttttaagatgatgcagatttttttacagttgtattgtggtgcagaactggattttctgtaacttaaaaaaaatccacagttttaaaggcaataatcagtaaatgttattttcagggactacatcctgtctttaaaaagaaatgaaaagtaaatcttaccacaataaatataaaaaaatcttgtcagttacttttcttttacatattttgctgtgcaaaattgttttatatcttgagttactaactaaccacgcgtgttgttcctatgtgcttttctttcattttcaattctggttatatcaagaaaagataatctacaataataaacggcatttttttttgattctgtaaaaaaaaa

SEQ ID NO: 6008 - protein, 374 aa, Homo sapiens
  misc_feature (1)..(374): Xaa=Unknown amino acid
MASELAMSNSDLPTSPLAMEYVNDFDLMKFEVKKEPVETDRIISQCGRLIAGGSLSSTPMSTPCSSVPPSPSFSAPSPGSGSEQKAHLEDYYWMTGYPQQLNPEALGFSPEDAVEALISNSHQLQGGFDGYARGAQQLAAAAGAGAGASLGGSGEEMGPAAAVVSAVIAAAAAQSGAGPHYHHHHHHAAGHHHHPTAGAPGAAGSAAASAGGAGGAGGGGPASAGGGGGGGGGGGGGGAAGAGGALHPHHAAGGLHFDDRFSDEQLVTMSVRELNRQLRGVSKEEVIRLKQKRRTLKNRGYAQSCRFKRVQQRHVLESEKNQLLQQVDHLKQEISRLVRERDAYKEKYEKLVSSGFRENGSSSDNPSSPEFFMX

SEQ ID NO: 6009 - DNA, 479 bp, Rattus norvegicus
  ref <308>: DATABASE ACCESSION NUMBER: EMBL / AA893088
  ref <309>: DATABASE ENTRY DATE: 2000-03-03
acgatattgtacagtttctgaagctaataacagagttctcttgcatgtacatttaaagcatgacaaaataaaacgtatttcacaaaagaaattcatattacagtactgtggggatcagaggcaaagagtgtgcacttgtgggtgatgaacaatacattcgattcaaaagaataatctgtgtgaataacagcttcttggctataataaatacaggacaggttaagagcaacacctggagtttacggatacaagacaggtgttttgtaatggacgcacttaggaacggtagagcgctcttgacttggcagcggcatcttgctagctctacaatcattagacctttttgagcactgcagatgaggctaccctacattcaccagcccatacctcagcgtgccaaccgcagttactgcccattttcccctgggtaactagtaccaatgttcaagcaaggtttcaaatcagccgtacctttaatt

SEQ ID NO: 6010 - DNA, 634 bp, Rattus norvegicus
  ref <308>: DATABASE ACCESSION NUMBER: EMBL / AA893172
  ref <309>: DATABASE ENTRY DATE: 2000-03-03
aagataatttaactccagcactaaagccaatgggtgttagttcttgacccaagagatttgttaaccatcaaagcagtatcttgtttcagttcttagagtgtatctttgtgacttcagatctagagtggagaatacctcatgtactataacttgaagttattgttctctctgtttatctctagaaaagtttttgctgataatcactacaatttaaattctaagtggaggacagtgcagtaagtaagtcaaaggaaaccttttatgatagcacacctaataaaagtttgaagactattttagtaaatttatatagctagtcaagtgatgaggataaatattaatatccaataatttttatacaagaaatcttttattagcactcataattatgcctgtcacaaagaaagtactcatacttgaattttaatttatttaaatcaaattcatcttgaatatctattattaattattaccagtcagtgatacccaacttcatttcgtagtagaatcatatgggagctttcctgaaattgagtcatgcttcagtctttccaaaacctcttccagtgagtctcactgtagttagagttcagggcaactgctctaaattagttcagtaaaggtccttttctct

SEQ ID NO: 6011 - DNA, 2712 bp, Homo sapiens
  ref <308>: DATABASE ACCESSION NUMBER: EMBL / AK023165
  ref <309>: DATABASE ENTRY DATE: 2002-08-06
ttttaatggtgctcatatatactgtattttttgttgtttagttttacttattgagagtgtcacaacatgaatcacataatcatgattttttttttttacttttactccccaaattattcatgtttcttagatcgtagtcattgagaagtcccaataactctaaacttttgagttataacgtagtaaacttctctttcatctttgtgttagctctgtagtcttaacctggattttaatttttttgtttccaaagtcacaattgaattattcttagataccttaagccactgaattcagttctgtttgactgaaagcaaaacaacgtgacagtttattttcaaacactaacttcttgatattttgttatggtatatctttttattaaatatttattttgactaagctttcataaaatatttgaagctattttaatcatcaagtatggaaaacaaattactattgcattttcctatatatgcatatattatggattaaccagaattgtatcatttttggcctaatgtctggatataaaagataattagcctactatagtattaataaatttttcagttggtttgggcaaatttaaacctgaaaaataggttaaaaagtagttacaaattaaacttactaatttatacctgattttttttcttgaattaaagtacattttaaatgagctttataataccttaaaaagttggttctaatttaaaatatgaaagctctggctatcatcctgggatagtaatttctaattatatagtatttcaaaactatatattttttagttcctttgagataactaatttctaattatatatgtttcaaaaaccatatcctgtattttttttaagaattgttttataaataggtcataagatacaaggtctgcattagaagacccactcttactaggttccctaaggatctgccatagattttttttttttttttttttttttaggtagtttaaagcaagcactgataccagtgggagttggtcttgatctaggagattctgttaagcatccaaaaacaatgcctaatttcagttcttaggttatggcttgtgactccagataaaagatggagaatacctcatgtactgtgacttgaaaatgaattcttaaaattcttaggctctctccatgtatctttcttaaggaaaagtttctgagtgtgatctctcttttgccatagtatcaagtggagggtagttcagaaaagttaataggaaatcttttgtgacagcagactataatagaagtttgagtaatattttaataaatttatataattcaaatgataaaaatgtatcaatgttatccaatgatttttattaaaaaattaccttattattagaactgtgcctattacataaaaagtgctcatgtatttgaattttaaataatttatttaaatcaagaccaccataagtcattaataatttaataattgttttaaatcagtggttttcaaccctcacttcatattagaatcatctgaggacttttaatatggaatccacctcataacaattaagtctaaatttctggaagatggagccatgcttgtttttccaaaagctctttgagtgattctaatttgtagtcagagttgaagaccactgctctaaattagtgcaggaaaatgcttttatttctcccatgttaacttttaaaactagtaatgtacccagttaagttttgatggtttaaattccactaaagaacatattcttctaataactagcatttattacatgaaatttaagagtttaagttccatcaaactagcccttgtgtaagattattatttcttctctataacttcaaaatagatatttcattcaaactgttcaggtgagaaaacataatggatttttttttttttcctctggagctgcctgttcagtgagatggaggaggtgggcacatttaaggtcagttcactaacctatggttcagagttctgatcatatggaagtttggaaaagagagcttatcacaggtttgtatgctggtgaatggatagttttaattctcactgtctcaaaagagaatcagctctccagcagttctagaaaagctttgacaatccccaaggggcagtgttaccttactccttcactgcttcttagaaggtagaattaagtttctggaattgcacctacatgttttcttattaacattcagaattgggaatattaatttttccagtgagtagttttctgaaattggtaacttggagagtaaaataacgtattttgcttttcaattttgtgtttgtttacttttatgtaaaaatttgatatgtgaattacacagttctaataaaacctcatgccttttcattacatctaatttgaactctcaacttcatgttacagaatgctttaaagatgctttaatgaaaagtattaagaaaatatatagatttgtatgtcagtttatacttcagaaatccatatatttgtcatatttatttttttagaaacctcctaattggataactagatggtatttaaaatgaatgcccaaaaatatcttgtacctttgtccaaaagtttatctgttggaagccgccagccattcatgtagagagtttataagaaaataatttaaaattgtatgcattttatattactatggtatctgtgtaccatatttctaagtattcattattaaattggtacttcttaaaacc

SEQ ID NO: 6012 - DNA, 491 bp, Rattus norvegicus
  ref <308>: DATABASE ACCESSION NUMBER: EMBL / AA893183
  ref <309>: DATABASE ENTRY DATE: 2000-03-03
tctcaacctatcagaaagacaaacaaatcaccgacaacaggggtggggccttgaccttttgaggactgggatgcttttctccttttgctatgaggaataaaactaaaaattatgtcactgagtaaaaataaaagtggggagaaaataattctctgggtaaacagcttttctgatattttatatgttgtttttccttaactgtcactttccttttttttttttttttcatttttttcttttttaaaaagacacccgagttgctttcaagaataagcatatcacttaacccttagaaaattaggcaggatgccatgttgatggaatagggattggtttaggggacaggaaaataagctacaacttgtagcctctgtccaaagggaatgtgccttcagcagggcctgtgagatctaatgtgaagagagacacaacatgtgagatgggacttggtgtgtgaggcatggagtcattggagactcttccctcgtgcc

SEQ ID NO: 6013 - DNA, 491 bp, Rattus norvegicus; identical to SEQ ID NO: 6012
  ref <308>: DATABASE ACCESSION NUMBER: EMBL / AA893183
  ref <309>: DATABASE ENTRY DATE: 2000-03-03

SEQ ID NO: 6014 - protein, 345 aa, Homo sapiens
  ref <308>: DATABASE ACCESSION NUMBER: PIR / S57447
  ref <309>: DATABASE ENTRY DATE: 1999-09-24
AMVSEFLKQACYIEKQEQEYVQAVKSYKGGPGSAVSPYPSFNPSSDVAALHKAIMVKGVDEATIIDILTKRTNAQRQQIKAAYLQETGKPLDETLKKALTGHLEEVVLAMLKTPAQFDADELRAAMKGLGTDEDTLIEILTTRSNQQIREITRVYREELKRDLAKDITSDTSGDFRNALLALAKGDRCEDMSVNQDLADTDARALYEAGERRKGTDVNVFNTILTTRSYPHLRKVFQNYRKYSQHDMNKALDLELKGDIEKCLTTIVKCATSTPAFFAEKLYEAMKGAGTRHKTLIRIMVSRSEIDMNEIKVFYQKKYGIPLCQAILDETKGDYEKILVALCGGN

SEQ ID NO: 6015 - DNA, 491 bp, Rattus norvegicus; identical to SEQ ID NO: 6012
  ref <308>: DATABASE ACCESSION NUMBER: EMBL / AA893183
  ref <309>: DATABASE ENTRY DATE: 2000-03-03

SEQ ID NO: 6016 - DNA, 491 bp, Rattus norvegicus; identical to SEQ ID NO: 6012
  ref <308>: DATABASE ACCESSION NUMBER: EMBL / AA893183
  ref <309>: DATABASE ENTRY DATE: 2000-03-03

SEQ ID NO: 6017 - protein, 345 aa, Homo sapiens; identical to SEQ ID NO: 6014
  ref <308>: DATABASE ACCESSION NUMBER: PIR / S57447
  ref <309>: DATABASE ENTRY DATE: 1999-09-24

SEQ ID NO: 6018 - DNA, 643 bp, Rattus norvegicus
  ref <308>: DATABASE ACCESSION NUMBER: EMBL / AA893184
  ref <309>: DATABASE ENTRY DATE: 2000-03-03
acatcagtttaatgccttctgtacagcaccagaggttaaaagtggatctgagtaagcaaatgttctttattagtcacagtttgtcatcacacatttatttctacaataaacatacaggggagaggaagacagctcaggccaaaagctttcgccttaaataaatacgcacttcacccgctccatatgaacacccaaccaagcgcccggtcctgaaggctatgcaagtcgcatggggttctctaagtttgctttgaaagtttcaagaaacttggtagctagttcatcatcaaccattcggctgtcacttgacatcgtgacagttataagctggtgctgccgcacttgggggttcccctcttcatcctcagtgagtttcagcactggacggaatcttccaactgccaagatacaggcctgaggcgggttaatcactgcagtgaactcatcgatgccaaacatgcccaagttggaaatactaaaagatcctccttggtactcctccggcaacaattttccatctcttgctttctttgacagaacctttacagcgtcagcgatctcccgtatgtccttagcagctgcatcttttatgattggtgtaattaaacctttatctgttgccacagccactgaaatgtcaaca

SEQ ID NO: 6019 - DNA, 667 bp, Rattus norvegicus
  ref <308>: DATABASE ACCESSION NUMBER: EMBL / AA893193
  ref <309>: DATABASE ENTRY DATE: 2000-03-03
acaatgtaggaaaatttaatacatactatataaacaacattatttacatcagaaatcaccaggacagtggcatttttcacaaatataaattaattactgtttagtcaacaggtttcaaaagtccacaagtttacaagaaaaaccatctgtccccaaatgggtagggcacatggactaaagcagcctggacccttggcatggctctcttcacccaacacagctggcctcggctaggagacacaggtgctgggcctggaccacggctcctgctgacaagtgggttttggtctgtaggattcagtgttgctgtgtgtgaacacttaggtgaatcacctttgccctgcaaagcctgatgtatctgtcagacacaccaggtcagagcatcagcagcacagtgagaaatgtttgcgctccctttgtggggcggaaggaatgactacacagaggataaggagggaacatcaggttgggctcctgcagctggccaagtctgagaggacacagtggtcagcagaggctgcatcttccttttctagggccacagtgcatcataggacttcaggccttgacaacactcacacctaacttccccaagttttgccacctcctcaagaatgagctgcccaaagccaggctccaaagaactccactggtaacaaatgtctgc

SEQ ID NO: 6020 - DNA, 258 bp, Homo sapiens
  ref <308>: DATABASE ACCESSION NUMBER: EMBL / AA904277
  ref <309>: DATABASE ENTRY DATE: 2000-03-03
tttttttttttgttagcccaattctaaaaatgctcagtaacactttttaatatacaagaatcaaaagtacagcagtattacaatgtaggaaaatttaatacatactatataaacaacattatttacatcagaaatcactaggacagtggcatttttcacaaatataaattaattactgtttagtcaacaggttttaaaagtccacaattttacaataaagaaaaaccatctgtccccagatgagtggggcacagatgg

SEQ ID NO: 6021 - DNA, 663 bp, Rattus norvegicus
  ref <308>: DATABASE ACCESSION NUMBER: EMBL / AA893217
  ref <309>: DATABASE ENTRY DATE: 2000-03-03
aacataaagatagtgaaatcttaaggataaggaggcaatttatatagcctcttctattcattgttcaggatggagctttccaaagggcataggtatgagatttaacactggaaaaatacatatgaaacttgtttaaccggctgcacttaggaccaggcacagcacaataaatagagaactgcataatcttttaaaaagactgctatattttaacacatccttacgaaagaagcactatcagtgaacaatctgaaactctacagtgtgggcagagggaaagttaccgtgaaaatctgagcgttgtttctgtaacttcttcacactcatacatcaacagtctcagagggaggaagaacgcacatctcaaatccaggacaacaaaacacacttggtcaagtagtttcttgggatcattcattctgatcacaagcctaggttgctggtaggtgtaggcagacaggttttgaaatctttctcatctccactagtcagggcttctggatacgaagccatattggaagcaaactgattaagcagcaccgttaatccacctctcaacaagtcattgcataatccatatctgatttaatagtttttaaattgttatgtggaagaatatccttcttgaatagcagtctatcgtgtagacatgcactagcaagg

SEQ ID NO: 6022 - DNA, 646 bp, Rattus norvegicus
  ref <308>: DATABASE ACCESSION NUMBER: EMBL / AA893230
  ref <309>: DATABASE ENTRY DATE: 2000-03-03
gagttgccacgcatttattttcaagtcatcatcgtcatctttgtgaggtccaaaggctttgagaagtacagtgggtgagggggatgacgttgcagaggcagcccgtccatgctgcaaagggctgggtaatgttagtacggaaatccagacagacctcctcttacaggcaaccagtacatggccacatcatttattggtattcaccccctgcaggggttgtgccatgtggtcttactgctgtgttcgccatctctagacttcccttacaaaaaccttcagtccaggttttcaggccccggaggctgtcatcctctgctcccttgacctcggctccctagtagtctcgcacgggcagggtgatcctctggataaacgtgtcatatttcacttggccgttaggttcgatgcccgcttccttgaaaagctcatccacttctttgtgagtgagcttctctcccagtttcatgagtttcgaccgcaactcagacgccatgatgtaacctttcttctccttgtctgtcatcagcatggccagaaggatttctttctttgggtcctcttgcttgatttgcatgtgcataatggtcaggaaggtggagaaatccagttctccgttcttgtctattccatgagtctgcaggtgccg

SEQ ID NO: 6023 - DNA, 984 bp, Homo sapiens
  ref <308>: DATABASE ACCESSION NUMBER: EMBL / AF308287
  ref <309>: DATABASE ENTRY DATE: 2001-01-11
agggctcccgggaagaaacactggcatttgtccctttgcttcggcttctggaggcagagactctgagcccagggagagccttctgcagccccatttcctcaaaaatccaacctgcccaggtggcgggtcatgagctgtgctcaggaagctggaatctgaccctggtggcgtcgggcccagtctccatggcagccgagcatttattacccgggcctccacccagcttggcagactttagacttgaggctggaggaaagggaactgaacgcggttctgggagcagcaagcccacgggtagcagcggaggccccagaatggccagtttctttcccaagaccaaatttaatgagtacaaggatgttcttccctgtatgacagcagcagaggggaagataaaagccaccgacttcatggtggccatgaggtgcctgggggccagcccgacgccaggggaggtgcagcggcacctgcagacccacgggatagacggaaatggagagctggatttctccacttttctgaccattatgcacatgcaaataaaacaagaagacccaaagaaagaaattcttctagccatgttgatggtggacaaggagaagaaaggttacgtcatggcgtccgacctgcggtcaaaactcacgagtctgggggagaagctcacccacaaggaagtggatgatcttttcagggaagcagatatcgaacccaatggcaaagtgaagtatgatgaatttatccacaagatcacccttcctggacgggactattgaaggaggagaatgggagagcctcccctgggcctgaaaacttggagcaattaattttttttaaaaagtgttcttttcacttgggagagatggcaaacacagtggcaagacaacattacccaactatagaagagaggctaactagcaacaataatagatgatttcagccatggtatgagtagatctttaataaaagatttgtattgattttatt

SEQ ID NO: 6024 - DNA, 514 bp, Rattus norvegicus
  ref <308>: DATABASE ACCESSION NUMBER: EMBL / AA893260
  ref <309>: DATABASE ENTRY DATE: 2000-03-03
gtaaatcaggataatcagctttaatagttcccctttaaatttaggaaattattgatgtagcaataaagatgacattcagcatattctgtcagttaactggaaatgaatctggtaaacatgacttctgatttagacaaaaaacaaagtcttcccaccatgatgataatggactgaacctctgaaactgtaagccagccctaattaaaagattttctttcgtgatcatggtatctcccctgccaagtgcagaccgacaggagcaggatgtagatcactcctgagagacacagccagaatacagcaaatacagaggcgaatgccagcagcaaaccactgaactgagaataggacccccgttgaaggaatcagagaaagaacgggaagagcttgaaggggctcgagaccccatatgtacaacaatgccaagcaaccagagcttccagggactaagccactacctaaagactagacatggaattgacctggactctgacctcataagtagcaatgcata

SEQ ID NO: 6025 - DNA, 296 bp, Rattus norvegicus
  ref <308>: DATABASE ACCESSION NUMBER: EMBL / AA893289
  ref <309>: DATABASE ENTRY DATE: 2000-03-03
ggtggtgcataactttaatcccaacacttgggaggcagaagcaggatgatctctgtatgttcaaggccagcctggtctacatagtgagatgacccactctcccccgtaccccagtgaaagttctgaggctgcagctcagtcggcggagtgctttctgggcatgctcaaagccctgggtttgaaatctagcaccacattaaacctggcacactggcacatacttataatcccaacattcaggaggtagggaaaagagaaaatttaaggtcatgattatatacttattgagttcttta

SEQ ID NO: 6026 - DNA, 370 bp, Rattus norvegicus
  ref <308>: DATABASE ACCESSION NUMBER: EMBL / AA893320
  ref <309>: DATABASE ENTRY DATE: 2000-03-03
gaaaaatagtcatttaatatttaagggagaatagaaatcgtgggtatctaagtttgagcgaccccaacaaaccctgaaacaggaacaccttggggttcaaaggccaaagttgcgtgagcagtcctcactgtcccgcctgtgatctacctggaacttctcatttgcagccaaagggcccagcaggatcgaggcccatgtggctacttttcccactgacgtgtatacaacaagttatcagaaggcacacaattcatagtgcaacagagaaaggaagtcaggttacagactggctcagaatcaggccagagaccctgcacttcctcagtctgaatacacaggtgcatgaatcccacacctgaggactcctgca

SEQ ID NO: 6027 - DNA, 362 bp, Rattus norvegicus
  ref <308>: DATABASE ACCESSION NUMBER: EMBL / AA893328
  ref <309>: DATABASE ENTRY DATE: 2000-03-03
aaaaaaaggaaaaaaagacaaacctggaagattttaaaaacaacaaaacactagttagttgcttcatgttacatttcacaaccattatgttaaatgttttcttttctacagaaacagggtcctttacattacaactgcaatagtttactgctagatgtttaaaattacaggctagtattcactggaacctgttgatggtaacatcttgaggttttctgagctcccacctaaggtacaccaggccctctcctaggaccatatttgcaggggaaggggagggagaggaaatcacagatcaagttcttaagattgtttcactctcttcgtggatttccgtttcttggagatctgttcaaaaattc

SEQ ID NO: 6028 - protein, 591 aa, Rattus norvegicus
  ref <308>: DATABASE ACCESSION NUMBER: SWISS-Prot / P35565
  ref <309>: DATABASE ENTRY DATE: 1995-11-01
MEGKWLLCLLLVLGTAAIQAHDGHDDDMIDIEDDLDDVIEEVEDSKSKSDTSTPPSPKVTYKAPVPTGEVYFADSFDRGSLSGWILSKAKKDDTDDEIAKYDGKWEVDEMKETKLPGDKGLVLMSRAKHHAISAKLNKPFLFDTKPLIVQYEVNFQNGIECGGAYVKLLSKTSELNLDQFHDKTPYTIMFGPDKCGEDYKLHFIFRHKNPKTGVYEEKHAKRPDADLKTYFTDKKTHLYTLILNPDNSFEILVDQSVVNSGNLLNDMTPPVNPSREIEDPEDRKPEDWDERPKIADPDAVKPDDWDEDAPSKIPDEEATKPEGWLDDEPEYIPDPDAEKPEDWDEDMDGEWEAPQIANPKCESAPGCGVWQRPMIDNPNYKGKWKPPMIDNPNYQGIWKPRKIPNPDFFEDLEPFRMTPFSAIGLELWSMTSDIFFDNFIISGDRRVVDDWANDGWGLKKAADGAAEPGVVGQMLEAAEERPWLWVVYILTVALPVFLVILFCCSGKKQSNAMEYKKTDAPQPDVKDEEGKEEEKNKGDEEEEEEKLEEKQKSDAEEDGGTGSQDEEDSKPKAEEDEILNRSPRNRKPRRE

SEQ ID NO: 6029 - DNA, 4117 bp, Homo sapiens
  ref <308>: DATABASE ACCESSION NUMBER: EMBL / L10284
  ref <309>: DATABASE ENTRY DATE: 1999-07-02
tccgcctctctctttactgcggcgcggggcaaggtgtgcgggcgggaaggggcacgggcacccccgcggtccccgggaggctagagatcatggaagggaagtggttgctgtgtatgttactggtgcttggaactgctattgttgaggctcatgatggacatgatgatgatgtgattgatattgaggatgaccttgacgatgtcattgaagaggtagaagactcaaaaccagataccactgctcctccttcatctcccaaggttacttacaaagctccagttccaacaggggaagtatattttgctgattcttttgacagaggaactctgtcagggtggattttatccaaagccaagaaagacgataccgatgatgaaattgccaaatatgatggaaagtgggaggtagaggaaatgaaggagtcaaagcttccaggtgataaaggacttgtgttgatgtctcgggccaagcatcatgcgatctctgctaaactgaacaagcccttcctgtttgacaccaagcctctcattgttcagtatgaggttaatttccaaaatggaatagaatgtggtggtgcctatgtgaaactgctttctaaaacaccagaactcaacctggatcagttccatgacaagaccccttatacgattatgtttggtccagataaatgtggagaggactataaactgcacttcatcttccgacacaaaaaccccaaaacgggtatctatgaagaaaaacatgctaagaggccagatgcagatctgaagacctattttactgataagaaaacacatctttacacactaatcttgaatccagataatagttttgaaatactggttgaccaatctgtggtgaatagtggaaatctgctcaatgacatgactcctcctgtaaatccttcacgtgaaattgaggacccagaagaccggaagcccgaggattgggatgaaagaccaaaaatcccagatccagaagctgtcaagccagatgactgggatgaagatgcccctgctaagattccagatgaagaggccacaaaacccgaaggctggttagatgatgagcctgagtacgtacctgatccagacgcagagaaacctgaggattgggatgaagacatggatggagaatgggaggctcctcagattgccaaccctagatgtgagtcagctcctggatgtggtgtctggcagcgacctgtgattgacaaccccaattataaaggcaaatggaagcctcctatgattgacaatcccagttaccagggaatctggaaacccaggaaaataccaaatccagatttctttgaagatctggaacctttcagaatgactccttttagtgctattggtttggagctgtggtccatgacctctgacattttttttgacaactttatcatttgtgctgatcgaagaatagttgatgattgggccaatgatggatggggcctgaagaaagctgctgatggggctgctgagccaggcgttgtggggcagatgatcgaggcagctgaagagcgcccgtggctgtgggtagtctatattctaactgtagcccttcctgtgttcctggttatcctcttctgctgttctggaaagaaacagaccagtggtatggagtataagaaaactgatgcacctcaaccggatgtgaaggaagaggaagaagagaaggaagaggaaaaggacaagggagatgaggaggaggaaggagaagagaaacttgaagagaaacagaaaagtgatgctgaagaagatggtggcactgtcagtcaagaggaggaagacagaaaacctaaagcagaggaggatgaaattttgaacagatcaccaagaaacagaaagccacgaagagagtgaaacaatcttaagagcttgatctgtgatttcttctccctcctcccctgcaagagtggtcctaggagaggacctggcacaccttaggttgacattcagaaaacttcaagacatcaccatcagcaggctccagttgaacactagtctgtgtaactttaaacatctagcagtaaatacttgcagttgtgatataaaggaccctgtttctgtagaaaagaaaacatttaacataatggttgtgaaatgtaacatgaagcaaactaacttttttttttttaacatctttgtttttaaaatagaatgatagaactttgccagtctttaagatcttggcttaatttaatgtattaatctgtttgtgcaaacataataccaccatttaaaaatgttagggagatgagttgcagtttttataatagattttttttaaagtttggtattgtaaaacattcacacctctgtccctcaaaattgataattacgtttaaagtgcagtcatttgtggttagaatcttgttttgtttgcttccattattgagttcctcctaaggaaattgaggagagggactgaatagaagcccaaattcatataaaagttgcgtttaagttgtattaaaaatagatatataagaaaaaattctttcacttgatgtttgttagaccagaaagtgtgtgtgttctgtagctcagttcccagacagctttttaggtagtggaggaggtggcttcatgtggcacttgggcatttatattccacttgggagggtcaggcctgtggcttctggagcaggtggcttgttaaggaacgctagcagggcatggcacgtgagctccggaatagatgtcttcatcacttcttccactgtgtgttgacactgttttccttacctatttcctcagatccccagctttctcctcgctatgcattttcttcacagtgcagcttgcagtccgttgctgaaaatgattataagccctgcataatgttaagctttattgtgattacgtgtatgtttcttctttcttttaagcagacccatacctttccagggtcaaagtacagaatagaatacattgatacaaagtacagaaaaatactttgatttttatccatttcttttactctgtgtaaagactttagaagtctaattcacaggcaaaccaatacagaattgactgcagttgaacagactagaagtatttgtgggaggagtgacatgaagcatgagttatctgattttttttgtagctgctatatattttaagccttcatttgcaattcatgtaacagttgtgtcataaattacacaataaagcagtcctgttcaaatttttttttaacgtggcttgtagaatttttaaaaaagtgatcttaggtttgttttttcatgcgggatgcagatgggtgctatcagagcctctcccacaccactatagtgtaataatgttattattactctacactgaaacgtattcagagttagatattattttagcttcagttgttctttagaggctttcaaatgtaccgatgatactgtttcttgcactgaatatataaacactccacagtgtttatattgggaagatattgggaaggaaatatatttgtaaaagatgaaggctgtatctatttttttttctttttaaactggttcacttaaattcttttgaggatgggatgtatttttcttgctgttcagtgctttttccttttcatctgttgttctgtggtcacagtgaccttagctacatagcagactttcccaaatgtattgattacaaataaacagttgttacttagcaagacctgaaaatatgtctgcaggtttctccttgaagcaaatgtgtgggatcattgcatttccagaaatctgcctccttcacccaccgttgacagtatatgtcatgcctcactttcttgtagctgagctttaaatcattagagcttaaattgtcagatcgttcattgcctttccagggttatttagtaaagtttgttgaaaacaaaaacgccttttcttggttcttttttcagttattttgaaggtccagcatcctgattaaatgtctgacacttaatgaatgaccagcagcagctttcagctcttaaaaagacacttatattttgattttacatgctggttacctgttccattgttgtcaaatgcccagtgtccatcagatgtgttcctccattttcttatccacaaagtactcctcacttttcaatttgtcatgttactaaaccc

SEQ ID NO: 6030 - protein, 592 aa, Homo sapiens
  ref <308>: DATABASE ACCESSION NUMBER: SWISS-Prot / P27824
  ref <309>: DATABASE ENTRY DATE: 2001-10-16
MEGKWLLCMLLVLGTAIVEAHDGHDDDVIDIEDDLDDVIEEVEDSKPDTTAPPSSPKVTYKAPVPTGEVYFADSFDRGTLSGWILSKAKKDDTDDEIAKYDGKWEVEEMKESKLPGDKGLVLMSRAKHHAISAKLNKPFLFDTKPLIVQYEVNFQNGIECGGAYVKLLSKTPELNLDQFHDKTPYTIMFGPDKCGEDYKLHFIFRHKNPKTGIYEEKHAKRPDADLKTYFTDKKTHLYTLILNPDNSFEILVDQSVVNSGNLLNDMTPPVNPSREIEDPEDRKPEDWDERPKIPDPEAVKPDDWDEDAPAKIPDEEATKPEGWLDDEPEYVPDPDAEKPEDWDEDMDGEWEAPQIANPRCESAPGCGVWQRPVIDNPNYKGKWKPPMIDNPSYQGIWKPRKIPNPDFFEDLEPFRMTPFSAIGLELWSMTSDIFFDNFIICADRRIVDDWANDGWGLKKAADGAAEPGVVGQMIEAAEERPWLWVVYILTVALPVFLVILFCCSGKKQTSGMEYKKTDAPQPDVKEEEEEKEEEKDKGDEEEEGEEKLEEKQKSDAEEDGGTVSQEEEDRKPKAEEDEILNRSPRNRKPRRE

SEQ ID NO: 6031 - DNA, 519 bp, Rattus norvegicus
  misc_feature (1)..(519): n=a, c, g or t
  ref <308>: DATABASE ACCESSION NUMBER: EMBL / AA893338
  ref <309>: DATABASE ENTRY DATE: 2000-03-03
aggaaatgtacatgaaactaaattgttattttcaacaaacagaaagtttacgtttagctcttgacatagtgatcctgaaaggaaattcacaggtaccagacagaactaattaaacaacttcttcatattaagcctactctgaaaatctgcaataaaataaatgctgctatgttttctggttacaatgactcaaataagtaaaacttgtgctttgaggagcaggtgtttcctacaaaatgttgctggaaatctgtaaagatgttactattaagacaagaactaagatattttaaagtttaagcatactaacttaagtgggcatatgctacaatctcaaaggggccatgtctacatggactaatccgtgcctctgaaaaaaaggggtctgaacatgtgaaactttaagcagcacttgtacagaccatgtgcagcataangtcacagctcaagtctactttaaaaacaaacaaacaaacaaaaataccctctttccaagctgtcagacttgctagtaacaag

SEQ ID NO: 6032 - DNA, 1420 bp, Homo sapiens
  ref <308>: DATABASE ACCESSION NUMBER: EMBL / BC008045
  ref <309>: DATABASE ENTRY DATE: 2001-07-13
ggcacgaggctgaagcaggcgctcttggctcggcgcggcccgctgcaatccgtggaggaacgcgccgccgagccaccatcatgcctgggcacttacaggaaggcttcggctgcgtggtcaccaaccgattcgaccagttatttgacgacgaatcggaccccttcgaggtgctgaaggcagcagagaacaagaaaaaagaagccggcgggggcggcgttgggggccctggggccaagagcgcagctcaggccgcggcccagaccaactccaacgcggcaggcaaacagctgcgcaaggagtcccagaaagaccgcaagaacccgctgccccccagcgttggcgtggttgacaagaaagaggagacgcagccgcccgtggcgcttaagaaagaaggaataagacgagttggaagaagacctgatcaacaacttcagggtgaagggaaaataattgatagaagaccagaaaggcgaccacctcgtgaacgaagattcgaaaagccacttgaagaaaagggtgaaggaggcgaattttcagttgatagaccgattattgaccgacctattcgaggtcgtggtggtcttggaagaggtcgagggggccgtggacgtggaatgggccgaggagatggatttgattctcgtggcaaacgtgaatttgataggcatagtggaagtgatagatcttctttttcacattacagtggcctgaagcacgaggacaaacgtggaggtagcggatctcacaactggggaactgtcaaagacgaattaacagagtcccccaaatacattcagaaacaaatatcttataattacagtgacttggatcaatcaaatgtgactgaggaaacacctgaaggtgaagaacatcatccagtggcagacactgaaaataaggagaatgaagttgaagaggtaaaagaggagggtccaaaagagatgactttggatgagtggaaggctattcaaaataaggaccgggcaaaagtagaatttaatatccgaaaaccaaatgaaggtgctgatgggcagtggaagaagggatttgttcttcataaatcaaagagtgaagaggctcatgctgaagattcggttatggaccatcatttccggaagccagcaaatgatataacgtctcagctggagatcaattttggagaccttggccgcccaggacgtggcggcaggggaggacgaggtggacgtgggcgtggtgggcgcccaaaccgtggcagcaggaccgacaagtcaagtgcttctgctcctgatgtggatgacccagaggcattcccagctctggcttaactggatgccataagacaaccctggttcctttgtgaacccttctgttcaaagcttttgcatgcttaaggattccaaacgactaagaaattaaaaaaaaaaaaaaaaaaaaaaaa

SEQ ID NO: 6033 - protein, 409 aa, Homo sapiens
  misc_feature (1)..(409): Xaa=Unknown amino acid
MPGHLQEGFGCVVTNRFDQLFDDESDPFEVLKAAENKKKEAGGGGVGGPGAKSAAQAAAQTNSNAAGKQLRKESQKDRKNPLPPSVGVVDKKEETQPPVALKKEGIRRVGRRPDQQLQGEGKIIDRRPERRPPRERRFEKPLEEKGEGGEFSVDRPIIDRPIRGRGGLGRGRGGRGRGMGRGDGFDSRGKREFDRHSGSDRSSFSHYSGLKHEDKRGGSGSHNWGTVKDELTESPKYIQKQISYNYSDLDQSNVTEETPEGEEHHPVADTENKENEVEEVKEEGPKEMTLDEWKAIQNKDRAKVEFNIRKPNEGADGQWKKGFVLHKSKSEEAHAEDSVMDHHFRKPANDITSQLEINFGDLGRPGRGGRGGRGGRGRGGRPNRGSRTDKSSASAPDVDDPEAFPALAX

SEQ ID NO: 6034 - DNA, 489 bp, Rattus norvegicus
  ref <308>: DATABASE ACCESSION NUMBER: EMBL / AA893406
  ref <309>: DATABASE ENTRY DATE: 2000-03-03
aatattctaaaatactttaataattaagattggtgggaagactgatatacaatgtaattatttattttacaagattctgtacactggagaagcatcttaacctacaacatgagaagcttttacccttttacattatgattgtaagcttcaaattacagaaagaaacacgtaatcaacttttatatacataaaaacaaaaccacgggctagatgccgccctaacagatgacgctgcagaagacgaatgagatgaactgtgagtcagggcccttgatggcacacacaagcacacggggagtcaggcttggcactgtgaggcagggaaagcagcagggagacaagacaggcaggcatggtgggtgcctctgtgagccctgtaagcagggggtggaggcagatccttggctacattgtgaggtgacatgagagcctgtctaataaaacacaaagttaccacagcacaggcagcacaggcccataaagtgctct

SEQ ID NO: 6035 - DNA, 548 bp, Rattus norvegicus
  ref <308>: DATABASE ACCESSION NUMBER: EMBL / AA893443
  ref <309>: DATABASE ENTRY DATE: 2000-03-03
aaaaaggtaaacccatatttatttactagcactgttaaaacattacacaaaacacattcaagtggcaagtaattataatgcaagcccttgcacggcaatccaaatttattgaactacggatgctaagttatacaaaattgcaccactttaattaaggcttttagtttacatttggccacctcaaagttgtaacatcaggttggtcaatttaaatactgtggctccctgttggatggacacacaatctttacacccaaacgttaatgcatacaaagcaacaaggcattgttaaatagaacagcaagagttactgcagattagccttgtgaccaattacacatgattaaaaatacttcccacattcacatccacagtactcgtccaccatttaacatctcaaccaaaacgttacacatggaaacagtcactaacaggcgaagatactaaacctgtgtatttggtattgcagacacacgtgtgcacgagcaagcaagggaggcacagtgagaatctacagctgcagaagcctgaaatgatttacaaagttg

SEQ ID NO: 6036 - protein, 184 aa, Rattus norvegicus
  ref <308>: DATABASE ACCESSION NUMBER: SWISS-Prot / AAA92787
  ref <309>: DATABASE ENTRY DATE: 2002-10-01
MREYKLVVLGSGGVGKSALTVQFVQGIFVEKYDPTIEDSYRKQVEVDAQQCMLEILDAAGTEQFTAMRDLYMKNEQGFALVYSITTQIDCNDLQGLREQILRVKDTDDVPMILVGNKCDLEDERVVPKEQGQNLARQWSNCAFLESSAKSKINVNEIFYDLVRQINRKTPVPGNRRKKSPCQLL

SEQ ID NO: 6037 - DNA, 1927 bp, Homo sapiens
  ref <308>: DATABASE ACCESSION NUMBER: Refseq / NM_015646
  ref <309>: DATABASE ENTRY DATE: 2002-10-20
gtaaaccagccggagcggcgcggcagcggcaggaccgccgtggcgcctagagtagcgacccggggggagcgcggggcgacgctggctgcagggacccggtgacagcgtgagaggttcgcagagtactaggttttgacaagcttgcatcatgcgtgagtataagctagtcgttcttggctcaggaggcgttggaaagtctgctttgactgtacaatttgttcaaggaatttttgtagaaaaatacgatcctacgatagaagattcttatagaaagcaagttgaagtagatgcacaacagtgtatgcttgaaatcttggatactgcaggaacggagcaatttacagcaatgagggatttatacatgaaaaatggacaaggatttgcattagtttattccatcacagcacagtccacatttaacgatttacaagacctgagagaacagattcttcgagttaaagacactgatgatgttccaatgattcttgttggtaataagtgtgacttggaagatgaaagagttgtagggaaggaacaaggtcaaaatctagcaagacaatggaacaactgtgcattcttagaatcttctgcaaaatcaaaaataaatgttaatgagatcttttatgacctagtgcggcaaattaacagaaaaactccagtgcctgggaaggctcgcaaaaagtcatcatgtcagctgctttaatatactaaatgcattgtagctctgagccaggtctgaagaactgttgcccaattcaacagtgccagcattccaactttgttaaacctaccaacatcttaaatggactttcctgtggtggtaccctttaagaggcggatgaaagctactatatcagtttgcacattctaatcactttccagtatcacaagagagatttttacttatataatagtcctagagtttgcagctggtaaaaccagaggctacatccagtattactgctaagagacattcttcatccaccaatgttgtacatgtatgaaaatggtgtactgtatactttaacatgccccatactttgtattggagagtacaataatgtaaatcctaaaagcaccactattttagcataataaaagaaagtccaaagagctcctatatagactactccagataacttcgcttctttgatacttgtagcttattgtaattttttttaagaaattcaaggtcattattattgtacaaaataagcgctttgattaacacagctatatagtttttttaatttttaaaaaacctgtggagacggtgatcttgtctttaaaacatgatagtcctttcagtataatgtcttagattaaagacgttgcctttaatatctgttgggaaggaaatgtccagacttttcaaatctcttattatatgtttcctttttttgtttacatagggaacaatgtttatagtcgtgtgtacagtgggggtctacaacaagaagtgtatattttcaaacaattttttaatgatttaacaatttttgtaaatcattttcaggcttctgcagctgtagattctcactgtgaatcccttgcttgctcatgcataagtgtatttgcaataccaaatatacaggtttagtatttttgcctgttagtgattgtttcacatgtgtaacgttttggttgagatgttaaatggtggacgagtactgtggatgtgaatgtgggaagtaattttaatcatatgtaattggtcacaaggcctaatttgcagtaactattgctgttttatttaacaatgccttgttgctttgtatgcattaatgtttggatgtaaagattgtgtgtctatccaacagggagccacagtatttaaattgaccaacctaatgttacaactactttgaggtggccaaatgtaaactaaaagccttaattaaagtggtgcaattttgtaaaaaaaaaa

SEQ ID NO: 6038 - protein, 184 aa, Homo sapiens
  ref <308>: DATABASE ACCESSION NUMBER: SWISS-Prot / P09526
  ref <309>: DATABASE ENTRY DATE: 2002-06-15
MREYKLVVLGSGGVGKSALTVQFVQGIFVEKYDPTIEDSYRKQVEVDAQQCMLEILDTAGTEQFTAMRDLYMKNGQGFALVYSITAQSTFNDLQDLREQILRVKDTDDVPMILVGNKCDLEDERVVGKEQGQNLARQWNNCAFLESSAKSKINVNEIFYDLVRQINRKTPVPGKARKKSSCQLL

SEQ ID NO: 6039 - DNA, 410 bp, Rattus norvegicus
  ref <308>: DATABASE ACCESSION NUMBER: EMBL / AA893454
  ref <309>: DATABASE ENTRY DATE: 2000-03-03
gcttctcagattttattttgatttgggttcacagcaatcccaaggtgccagagcccactgtcagtgggcaaagtatactttagacacagggaaggtgggtacaccccaccactgacagacttagaagatgcatttggctacagcatggatgatctctggtgtgacattttctgacgtctccataagacactccccatgagtttctatttaattcgcttctaagaaactttggaaatttcaaaataagtggatggtcaagaataaaaaaatatgatcttttttaagctgtgtgtataatgtgcctggtaagttagagggaaatgagttttggaaagcagggtttatgtggtataaaaatactgttcatttacctaagactgataataaattttatggttgaataaaactta

SEQ ID NO: 6040 - DNA, 354 bp, Rattus norvegicus
  ref <308>: DATABASE ACCESSION NUMBER: EMBL / AA893471
  ref <309>: DATABASE ENTRY DATE: 2000-03-03
aagcatgggctttcagcagggttcagcctaaagtgcagtcccagtaaagtcgggggctgcacgaccattacactttgcgggggttggctcaacttcatcagaagggatgactatgacccacagggaaacaacccatgaagagaagaacacagtgaggaaaacatccaccatcttacaagtcactttgttaccacgggcacgaaatggcagttactgttagtaggtatctgaattaactttctgcataatacaagtaggtcaaagtccagcagcaaaatattgcaacccagcaagtagatacagtttcagggtgttatactgtggaggagagtacacaaaggacaaacaatgata

SEQ ID NO: 6041 - protein, 3461 aa, Rattus norvegicus
  ref <308>: DATABASE ACCESSION NUMBER: Refseq / NP_035391
  ref <309>: DATABASE ENTRY DATE: 2002-09-19
MERGCWAPRALVLAVLLLLATLRARAATGYYPRFSPFFFLCTHHGELEGDGEQGEVLISLHIAGNPTYYVPGQEYHVTISTSTFFDGLLVTGLYTSTSIQSSQSIGGSSAFGFGIMSDHQFGNQFMCSVVASHVSHLPTTNLSFVWIAPPAGTGCVNFMATATHRGQVIFKDALAQQLCEQGAPTEATAYSHLAEIHSDSVILRDDFDSYQQLELNPNIWVECSNCEMGEQCGTIMHGNAVTFCEPYGPRELTTTCLNTTTASVLQFSIGSGSCRFSYSDPSITVSYAKNNTADWIQLEKIRAPSNVSTVIHILYLPEEAKGESVQFQWKQDSLRVGEVYEACWALDNILVINSAHREVVLEDNLDPVDTGNWLFFPGATVKHSCQSDGNSIYFHGNEGSEFNFATTRDVDLSTEDIQEQWSEEFESQPTGWDILGAVVGADCGTVESGLSLVFLKDGERKLCTPYMDTTGYGNLRFYFVMGGICDPGVSHENDIILYAKIEGRKEHIALDTLTYSSYKVPSLVSVVINPELQTPATKFCLRQKSHQGYNRNVWAVDFFHVLPVLPSTMSHMIQFSINLGCGTHQPGNSVSLEFSTNHGRSWSLLHTECLPEICAGPHLPHSTVYSSENYSGWNRITIPLPNAALTRDTRIRWRQTGPILGNMWAIDNVYIGPSCLKFCSGRGQCTRHGCKCDPGFSGPACEMASQTFPMFISESFGSARLSSYHNFYSIRGAEVSFGCGVLASGKALVFNKDGRRQLITSFLDSSQSRFLQFTLRLGSKSVLSTCRAPDQPGEGVLLHYSYDNGITWKLLEHYSYVNYHEPRIISVELPDDARQFGIQFRWWQPYHSSQGEDVWAIDEIVMTSVLFNSISLDFTNLVEVTQSLGFYLGNVQPYCGHDWTLCFTGDSKLASSMRYVETQSMQIGASYMIQFSLVMGCGQKYTPHMDNQVKLEYSANHGLTWHLVQEECLPSMPSCQEFTSASIYHASEFTQWRRVTVVLPQKTWSGATRFRWSQSYYTAQDEWALDNIYIGQQCPNMCSGHGSCDHGVCRCDQGYQGTECHPEAALPSTIMSDFENPSSWESDWQEVIGGEVVKPEQGCGVVSSGSSLYFSKAGKRQLVSWDLDTSWVDFVQFYIQIGGESAACNKPDSREEGILLQYSNNGGIQWHLLAEMYFSDFSKPRFVYLELPAAGKTPCTRFRWWKPVFSGEDYDQWAVDDIIILSEKQKQVIPVVNPTLPQNFYEKPAFDYPMNQMSVWLMLANEGMAKNDSFCATTPSAMVFGKSDGDRFAVTRDLTLKPGYVLQFKLNIGCTSQFSSTAPVLLQYSHDAGMSWFLLKEGCFPASAAKGCEGNSRELSEPTVYYTGDFEEWTRITIAIPRSLASSKTRFRWIQESSSQKNVPPFGLDGVYISEPCPSYCSGHGDCISGVCFCDLGYTAAQGTCVSNTPNHSEMFDRFEGKLSPLWYKITGGQVGTGCGTLNDGRSLYFNGLGKREARTVPLDTRNISLVQFYIQIGSKTSGITYITPRARYEGLVVQYSNDNGILWHLLRELDFMSFLEPQIISIDLPREAKTPATAFRWWQPQHGKHSAQWALGDVLIGVNDSSQTGFQDKLDGSIDLQANWYRIQGGQVDIDCLSMDTALIFTENIGNPRYAETWDFHVSESSFLQWEMNMGCSKPFSGAHGIQLQYSLNNGKDWQLVTEECVPPTIGCVHYTESSTYTSERFQNWRRVTVYLPLATNSPRTRFRWIQTNYTVGADSWAIDNVILASGCPWMCSGRGICDSGRCVCDRGFGGPFCVPVVPLPSILKDDFNGNLHPDLWPEVYGAERGNLNGETIKSGTCLIFKGEGLRMLISRDLDCTNTMYVQFSLRFIAKGTPERSHSILLQFSVSGGVTWHLMDEFYFPQTTSILFINVPLPYGAQTNATRFRLWQPYNNGKKEEIWIIDDFIIDGNNLNNPVLLLDTFDFGPREDNWFFYPGGNIGLYCPYSSKGAPEEDSAMVFVSNEVGEHSITTRDLSVNENTIIQFEINVGCSTDSSSADPVRLEFSRDFGATWHLLLPLCYHSSSLVSSLCSTEHHPSSTYYAGTTQGWRREVVHFGKLHLCGSVRFRWYQGFYPAGSQPVTWAIDNVYIGPQCEEMCYGHGSCINGTKCICDPGYSGPTCKISTKNPDFLKDDFEGQLESDRFLLMSGGKPSRKCGILSSGNNLFFNEDGLRMLVTRDLDLSHARFVQFFMRLGCGKGVPDPRSQPVLLQYSLNGGLSWSLLQEFLFSNSSNVGRYIALEMPLKARSGSTRLRWWQPSENGHFYSPWVIDQILIGGNISGNTVLEDDFSTLDSRKWLLHPGGTKMPVCGSTGDALVFIEKASTRYVVTTDIAVNEDSFLQIDFAASCSVTDSCYAIELEYSVDLGLSWHPLVRDCLPTNVECSRYHLQRILVSDTFNKWTRITLPLPSYTRSQATRFRWHQPAPFDKQQTWAIDNVYIGDGCLDMCSGHGRCVQGSCVCDEQWGGLYCDEPETSLPTQLKDNFNRAPSNQNWLTVSGGKLSTVCGAVASGLALHFSGGCSRLLVTVDLNLTNAEFIQFYFMYGCLITPSNRNQGVLLEYSVNGGITWNLLMEIFYDQYSKPGFVNILLPPDAKEIATRFRWWQPRHDGLDQNDWAIDNVLISGSADQRTVMLDTFSSAPVPQHERSPADAGPVGRIAFEMFLEDKTSVNENWLFHDDCTVERFCDSPDGVMLCGSHDGREVYAVTHDLTPTENWIMQFKISVGCKVPEKIAQNQIHVQFSTDFGVSWSYLVPQCLPADPKCSGSVSQPSVFFPTEGWKRITYPLPESLTGNPVRFRFYQKYSDVQWAIDNFYLGPGCLDNCGGHGDCLKEQCICDPGYSGPNCYLTHSLKTFLKERFDSEEIKPDLWMSLEGGSTCTECGVLAENTALYFGGSTVRQAITQDLDLRGAKFLQYWGRIGSENNMTSCHRPVCRKEGVLLDFSTDGGITWTLLHEMDFQKYISVRHDYILLPEGALTNTTRLRWWQPFVISNGLVVSGVERAQWALDNILIGGAEINPSQLVDTFDDEGSSHEENWSFYPNAVRTAGFCGNPSFHLYWPNKKKDKTHNALSSRELIIQPGYMMQFKIVVGCEATSCGDLHSVMLEYTKDARSDSWQLVQTQCLPSSSNSIGCSPFQFHEATIYNAVNSSSWKRITIQLPDHVSSSATQFRWIQKGEETEKQSWAIDHVYIGEACPKLCSGHGYCTTGAVCICDESFQGDDCSVFSHELPSYIKDNFESARVTEANWETIQGGVIGSGCGQLAPYAHGDSLYFNGCQIRQAATKPLDLTRASKIMFVLQIGSPAQTDSCNSDLSGPHTVDKAVLLQYSVNNGITWHVIAQHQPKDFTQAQRVSYNVPLEARMKGVLLRWWQPRHNGTGHDQWALDHVEVVLVSTRKQNYMMNFSRQHGLRHFYNRRRRSLRRYP

SEQ ID NO: 6042 - DNA, 11580 bp, Homo sapiens
  misc_feature (1)..(11580): n=a, c, g or t
  ref <308>: DATABASE ACCESSION NUMBER: Refseq / NM_005045
  ref <309>: DATABASE ENTRY DATE: 2000-11-01
cacgcgtgggctcggcgggggcccgctcccaggcccgctcccgagcccgttccgctcccgtccgccttcttctcgccttctctccgcgtggctcctccgtcccggcgtctccaaaactgaatgagcgagcggcgcgtagggcgncggcggcggcggcggcggcggcggcggcggcatggagcgcagtggctgggcccggcagactttcctcctagcgctgttgctgggggcgacgctgagggcgcgcgcggcggctggctattacccccgcttttcgcccttctttttcctgtgcacccaccacggggagctggaaggggatggggagcagggcgaggtgctcatttccctgcatattgcgggcaaccccacctactacgttccgggacaagaataccatgtgacaatttcaacaagcaccttttttgacggcttgctggtgacaggactatacacatctacaagtgttcaggcatcacagagcattggaggttccagtgctttcggatttgggatcatgtctgaccaccagtttggtaaccagtttatgtgcagtgtggtagcctctcacgtgagtcacctgcccacaaccaacctcagtttcatctggattgctccacctgcgggcacaggctgtgtgaatttcatggctacagcaacacaccggggccaggttattttcaaagatgctttagcccagcagttgtgtgaacaaggagctccaacagatgtcactgtgcacccacatctagctgaaatacatagtgacagcattatcctgagagatgactttgactcctaccaccaactgcaattaaatccaaatatatgggttgaatgtaacaactgtgagactggagaacagtgtggcgcgattatgcatggcaatgccgtcaccttctgtgaaccatatggcccacgagaactgattaccacaggccttaatacaacaacagcttctgtcctccaattttccattgggtcaggttcatgtcgctttagttattcagaccccagcatcatcgtgttatatgccaagaataactctgcggactggattcagctagagaaaattagagccccttccaatgtcagcacaatcatccatatcctctaccttcctgaggacgccaaaggggagaatgtccaatttcagtggaagcaggaaaatcttcgtgtaggtgaagtgtatgaagcctgctgggccttagataacatcttgatcatcaattcagctcacagacaagtcgttttagaagatagtctcgacccagtggacacaggcaactggcttttcttcccaggagctacagttaagcatagctgtcagtcagatgggaactccatttatttccatggaaatgaaggcagcgagttcaattttgccaccaccagggatgtagatctttccacagaagatattcaagagcaatggtcagaagaatttgagagccagcctacaggatgggatgtcttgggagctgtcattggtacagaatgtggaacgatagaatcaggcttatcaatggtcttcctcaaagatggagagaggaaattatgcactccatccatggacactaccggttatgggaacctgaggttttactttgtgatgggaggaatttgtgaccctggaaattctcatgaaaatgacataatcctgtatgcaaaaattgaaggaagaaaagagcatataacactggataccctttcctattcctcatataaggttccgtctttggtttctgtggtcatcaatcctgaacttcagactcctgctaccaaattttgtctcaggcaaaagaaccatcaaggacataataggaatgtctgggctgtagactttttccatgtcttgcctgttctcccttctacaatgtctcacatgatacagttttccatcaatctgggatgtggaacgcatcagcctggtaacagtgtcagcttggaattttctaccaaccatgggcgctcctggtccctccttcacactgaatgcttacctgagatctgtgctggaccccacctcccccacagcactgtctactcctctgaaaactacagtgggtggaaccgaataacaattccccttcctaacgcagcactaacccggaacaccaggattcgctggagacaaacaggaccaatccttggaaacatgtgggcaattgataatgtttatattggcccgtcatgtctcaaattctgttctggcagaggacagtgcactagacatggttgcaagtgtgaccctggattttctggcccagcttgtgagatggcatcccagacattcccaatgtttatttctgaaagctttggcagttccaggctctcctcttaccataacttttactctatccgtggtgctgaagtcagctttggttgtggtgtcttggccagtggtaaggccctggttttcaacaaagaagggcggcgtcagctaattacatctttccttgacagctcacaatccaggtttctccagttcacactgagactggggagcaaatctgttctgagcacgtgcagagcccctgatcagcctggtgaaggagttttgctgcattattcttatgataatgggataacttggaaactcctggagcattattcatatctcagctatcatgagcccagaataatctccgtagaactaccaggtgatgcaaagcagtttggaattcagttcagatggtggcaaccgtatcattcttcccagagagaagatgtatgggctattgatgagattatcatgacatctgtgcttttcaacagcattagtcttgactttaccaatcttgtggaggtcactcagtctctgggattctaccttggaaatgttcagccatactgtggccacgactggaccctttgttttacaggagattctaaacttgcctcaagtatgcgctatgtggaaacacaatcaatgcagataggagcatcctatatgattcagttcagtttggtgatgggatgtggccagaaatacaccccacacatggacaaccaggtgaagctggagtactcaaccaaccacggccttacctggcacctcgtccaagaagaatgccttccaagtatgccaagttgtcaggaatttacatcagcaagtatttaccatgccagtgagtttacacagtggaggagagtcatagtgcttcttccccagaaaacttggtccagtgctacccgtttccgctggagccagagctattacacagctcaagacgagtgggctttggacagcatttacattgggcagcagtgccccaacatgtgcagtgggcatggctcatgcgatcatggcatatgcaggtgtgaccaggggtaccaaggcactgaatgccacccagaagctgcccttccgtccacaattatgtcagattttgagaaccagaatggctgggagtctgactggcaagaagttattgggggagaaattgtaaaaccagaacaagggtgtggtgtcatctcttctggatcatctctgtacttcagcaaggctgggaaaagacagctggtgagttgggacctggatacttcttgggtggactttgtccagttctacatccagataggcggagagagtgcttcatgcaacaagcctgacagcagagaggagggcgtcctccttcagtacagcaacaatgggggcatccagtggcacctgctagcagagatgtacttttcagacttcagcaaacccagatttgtctatctggagcttccagctgctgccaagaccccttgcaccaggttccgctggtggcagcccgtgttctcaggggaggactatgaccagtgggcagtcgatgacatcatcattctgtccgagaagcagaagcagatcatcccagttatcaatccaactttacctcagaacttttatgagaagccagcttttgattaccctatgaatcagatgagtgtgtggttgatgttggctaatgaaggaatggttaaaaatgaaaccttctgtgctgccacaccatcagcaatgatatttggaaaatcagatggagatcgatttgcagtaactcgagatttgaccctgaaacctggatatgtgctacagttcaagctaaacataggttgtgccaatcaattcagcagtactgctccagttcttcttcagtactctcatgatgctggtatgtcctggtttctggtgaaagaaggctgttacccggcttctgcaggcaaaggatgcgaaggaaactccagagaactaagtgagcccaccatgtatcacacaggggactttgaagaatggacaagaatcaccattgttattccaaggtctcttgcatccagcaagaccagattccgatggatccaggagagcagctcacagaaaaacgtgcctccatttggtttagatggagtgtacatatccgagccttgtcccagttactgcagtggccatggggactgcatttcaggagtgtgtttctgtgacctgggatatactgctgcacaaggaacctgtgtgtcaaatgtccccaatcacaatgagatgttcgataggtttgaggggaagctcagccctctgtggtacaagataacaggtgcccaggttggaactggctgtggaacacttaacgatggcaaatctctctacttcaatggccctgggaaaagggaagcccggacggtccctctggacaccaggaatatcagacttgttcaattttatatacaaattggaagcaaaacttcaggcattacctgcatcaaaccaagaactagaaatgaagggcttattgttcagtattcaaatgacaatgggatactctggcatttgcttcgagagttggacttcatgtccttcctggaaccacagatcatttccattgacctgccacaggacgcgaagacacctgcaacggcatttcgatggtggcaaccgcaacatgggaagcattcagcccagtgggctttggatgatgttcttataggaatgaatgacagctctcaaactggatttcaagacaaatttgatggctctatagatttgcaagccaactggtatcgaatccaaggaggtcaagttgatattgactgtctctctatggatactgctctgatattcactgaaaacataggaaaacctcgttatgctgagacctgggattttcatgtgtcagcatctacctttttgcagtttgaaatgagcatgggctgtagcaagcccttcagcaactcccacagtgtacagctccagtattctctgaacaatggcaaggactggcatcttgtcaccgaagagtgtgttcctccaaccattggctgtctgcattacacggaaagttcaatttacacctcggaaagattccagaattggaagcggatcactgtctaccttccactctccaccatttctcccaggacccggttcagatggattcaggccaactacactgtgggggctgattcctgggcgattgataatgttgtactggcctcagggtgcccttggatgtgctcaggacgagggatttgtgatgctggacgctgtgtgtgtgaccggggctttggtggaccctattgtgttcctgttgttcctctgccctcgattcttaaagacgatttcaatgggaatttacatcctgacctttggcctgaagtgtatggtgcagagagggggaatctgaatggtgaaaccatcaaatctggaacatctctaatttttaaaggggaaggactaaggatgcttatttcaagagatctagattgtacaaatacaatgtatgtccagttttcacttagatttatagcaaaaagtaccccagagagatctcactctattctgttacaattctccatcagtggaggaatcacttggcacctgatggatgaattttactttcctcaaacaacgaatatacttttcatcaatgttcccttgccatacactgcccaaaccaatgctacaagattcagactctggcaaccttataataacggtaagaaagaagaaatctggattgttgatgacttcattatcgatggaaataatgtaaacaaccctgtgatgctcttggatacatttgattttgggcccagagaagacaattggtttttctatcctggtggtaacatcggtctttattgtccatattcttcaaagggggcacctgaagaagattcagctatggtgtttgtttcaaatgaagttggtgagcattccattaccacccgtgacctaaatgtgaatgagaacaccatcatacaatttgagatcaacgttggctgttcgactgatagctcatccgcggatccagtgagactggaattttcaagggacttcggggcgacctggcaccttctgctgcccctctgctaccacagcagcagccacgtcagctctttatgctccaccgagcaccaccccagcagcacctactacgcaggaaccatgcagggctggaggagggaggtcgtgcactttgggaagctgcacctttgtggatctgtccgtttcagatggtaccagggattttaccctgccggctctcagccagtgacatgggccattgataatgtctacatcggtccccagtgtgaggagatgtgtaatggacaggggagctgtatcaatggaaccaaatgtatatgtgaccctggctactcaggtccaacctgtaaaataagcaccaaaaatcctgattttctcaaagatgatttcgaaggtcagctagaatctgatagattcttattaatgagtggtgggaaaccatctcgaaagtgtggaatcctttctagtggaaacaacctctttttcaatgaagatggcttgcgcatgttgatgacacgagacctggatttatcacatgctagatttgtgcagttcttcatgagactgggatgtggtaaaggcgttcctgaccccaggagtcaacccgtgctcctacagtattctctcaacggtggcctctcgtggagtcttcttcaggagttccttttcagcaattccagcaatgtgggcaggtacattgccctggagatacccttgaaagcccgttctggttctactcgccttcgctggtggcaaccgtctgagaatgggcacttctacagcccctgggttatcgatcagattcttattggaggaaatatttctggtaatacggtcttggaagatgatttcacaacccttgatagtaggaaatggctgcttcacccaggaggcaccaagatgcccgtgtgtggctctactggtgatgccctggtcttcattgaaaaggccagcacccgttacgtggtcagcacagacgttgccgtgaatgaggattccttcctacagatagacttcgctgcctcctgctcagtcacagactcttgttatgcgattgaattggaatactcagtagatcttggattgtcatggcacccattggtaagggactgtctgcctaccaatgtggaatgcagtcgctatcatctgcaacggatcctggtgtcagacactttcaacaagtggactagaatcactctgcctctccctccttataccaggtcccaagccactcgtttccgttggcatcaaccagctccttttgacaagcagcagacatgggcaatagataatgtctatatcggggatggctgcatagacatgtgcagtggccatgggagatgcatccagggaaactgcgtctgtgatgaacagtggggtggcctgtactgtgatgaccccgagacctctcttccaacccaactcaaagacaacttcaatcgagctccatccagtcagaactggctgactgtgaacggagggaaattgagtacagtgtgtggagccgtggcgtcgggaatggctctccatttcagtgggggttgtagtcgattattagtcactgtggatctaaacctcactaatgctgagttcatccaattttacttcatgtatgggtgcctgattacaccaaacaaccgtaaccaaggtgttctcttggaatattctgtcaatggaggcattacctggaacctgctcatggagattttctatgaccagtacagtaagcccggatttgtgaatatccttctccctcctgatgctaaagagattgccactcgcttccgctggtggcagccaagacatgacggcctggatcagaacgactgggccattgacaatgtcctcatctcaggctctgctgaccaaaggaccgttatgctggacaccttcagcagcgccccagtaccccagcacgagcgctcccctgcagatgccggccctgtcgggaggatcgcctttgacatgtttatggaagacaaaacttcagtgaatgagcactggctattccatgatgattgtacagtagaaagattctgtgactcccctgatggtgtgatgctctgtggcagtcatgatggacgggaggtgtatgcagtgacccatgacctgactcccactgaaggctggattatgcaattcaagatctcagttggatgtaaggtgtctgaaaaaattgcccagaatcaaattcatgtgcagtattctactgacttcggtgtgagttggaattatctggtccctcagtgcttgcctgctgacccaaaatgctctggaagtgtttctcagccatctgtattctttccaactaaagggtggaaaaggatcacctacccacttcctgaaagcttagtgggaaatccggtaaggtttaggttctatcagaagtactcagacatgcagtgggcaatcgataatttctacctgggccctggatgcttggacaactgcaggggccatggagattgcttaagggaacagtgcatctgtgatccgggatactcagggccaaactgctacttgacccacactctgaagactttcctgaaggaacgctttgacagtgaagaaatcaaacctgacttatggatgtccttagaaggtggaagtacttgcactgagtgtggaattcttgccgaggacactgcactctattttgggggatccactgtgagacaagcggttacacaagatttggatcttcgaggtgcaaagttcctgcaatactgggggcgcatcggtagtgagaacaacatgacctcttgccatcgtcccatctgccggaaggaaggcgtgctgttggactactctaccgatggaggaattacctggactttgctccatgagatggattaccagaaatacatttctgttagacacgactacatacttcttcctgaagatgccctcaccaacacaactcgacttcgctggtggcagccttttgtgatcagcaatggaattgtggtctctggggtggagcgtgctcagtgggcactggacaacattttgattggtggagcagaaatcaatcccagccaattggtggacacttttgatgatgaaggcacttcccatgaagaaaactggagtttttaccctaatgctgtaaggacagcaggattttgtggcaatccatcctttcacctctattggccaaataaaaagaaggacaagactcacaatgctctctcctcccgagaactcattatacagccaggatacatgatgcagtttaaaattgtggtgggttgtgaagccacttcttgtggtgaccttcattccgtaatgctggaatacactaaggatgcaagatcggattcctggcagctcgtacagacccagtgccttccttcctcttctaacagcattggctgctcccctttccagttccatgaagccaccatctacaactctgtcaacagctcaagctggaaaagaatcaccatccagctgcctgaccatgtctcctctagtgcaacacagttccgctggatccagaagggagaagaaactgagaagcaaagctgggcaattgaccacgtgtacattggagaggcttgccccaagctctgcagcgggcacggatactgcacgaccggtgccatctgcatctgcgacgagagcttccaaggtgatgactgctctgttttcagtcacgaccttcccagttatattaaagataattttgagtccgcaagagtcaccgaggcaaactgggagaccattcaaggtggagtcataggaagtggctgtgggcagctggccccctacgcccatggagactcactgtactttaatggctgtcagatcaggcaagcagctaccaagcctctggatctcactcgagcaagcaaaatcatgtttgttttgcaaattgggagcatgtcgcagacggacagctgcaacagtgacctgagtggcccccacgctgtggacaaggcggtgctgctgcaatacagcgtcaacaacgggatcacctggcatgtcatcgcccagcaccagccaaaggacttcacacaagctcagagagtgtcttacaatgtccccctggaggcacggatgaaaggagtcttactgcgctggtggcaaccacgccacaatggaacaggtcatgatcaatgggctttggaccatgtggaggtcgtcctagtaagcactcgcaaacaaaattacatgatgaatttttcacgacaacatgggctcagacatttctacaacagaagacgaaggtcacttaggcgatacccatgaagaatcaaaaagtttattttttttcttccaacatgtgatgtgttgctctccattcttttaaatctcgcactacatctgatatcaggaaatatctgtgaaggacttggtgattacctgaaagcccttctcaagaccgagtgtacaccactttcccacactgtgaactaatgacaagtgacttatttgctcataagtaaatgtcttcatgttgatgtgtccgtgaaagttgtgatctgttgtaatatcagttacagtggcagtattgacaataagaaacagtttaacagaaaaatgaaatttaagcacaaaaaatttaagagattttatgtttaaaatggcatttagcacagtatttaacattcttggtcacaaagctatttaagtggactgtatttcagctatgtctcatgttttatatgattaaattatcattgtttgtcctttatgtattctcttctacaatacaacacattgaaactgtatttacttgttatgttgtaatattttgctgctgaatttggggctacttatattctgcagaaaattaattgaaatacctattcaagaagatagttgtaaagatattgtatctcctttaatatactccttaaaaatgtatgttggtttagcgttgttttgtggataagaaaaatgcttgaccctgaaatattttctactttaaattgtggatgaagaccctatctcccacaaataagttcccatttccttgtctaaagatctttttttaagtgttctgtggctgatttactaacagtaactgccattttttgtctgtgataacagagtgatttgtaaaacagtggttgttttttcattgtgttttcttcgtggattgttttttctgcgggtcatattcataccttctgatgaagttgtacaacaccagcaacattataatggccctgtagctctgaatgctatttgtgtaactgaaaggttgcactctagggtgaaccaagctataaaagcccatgcttaaataaaaattatgtccaaaagcc

SEQ ID NO: 6043 - protein, 3460 aa, Homo sapiens [sequence omitted]

SEQ ID NO: 6044 - DNA, 598 bp, Rattus norvegicus
  ref <308>: DATABASE ACCESSION NUMBER: EMBL / AA893532
  ref <309>: DATABASE ENTRY DATE: 2000-03-03
gaattagaagaattttaataaaatcatcaagtttacatttgtacatcttgtgggtttgggacccattaagaggcaaaggaagctatgatgacagattcctgtgggagagcaagcaggaagcaagggttgccctagttgtgcaacaggcgccccatgacagtgtgacccatttctctgtgctccagggctgtcgaccacggctcacagagcctctctaaactctgtgctcagacctggtgcccacagcgtaggtgacaggcctggtaggcagaagcagataaacagtcaaactgaacattcctgctcccctccagatgccaatgtgacctgagctcagcctgtgcagttccagctagcatggctacagagcccgaggaaggagctgagcgccagctgttgtgctacccagggacagtcacgagagagcagggctgtgacaaaactatgctgtgttcattttaaaaatgggatttgtgaaatggcccctgggagagtttgaggaaggtaaggaaataagagtttgtaacatgtgaggtggctctccaccttgtagaactgtctgctttaaaggatttggtgggggccggggctgggctgc

SEQ ID NO: 6045 - DNA, 461 bp, Rattus norvegicus
  ref <308>: DATABASE ACCESSION NUMBER: EMBL / AA893569
  ref <309>: DATABASE ENTRY DATE: 2000-03-03
ccaggggggaaaaatcttaaaggatgagaggaacagctctgctaaaacacagacaaagcgccgttccacacaaacatcaatcctcagaactcaagtcactctgaacacaaggaaaacagccacctcacaacgtggccaaagctgccagcaaacctgggagcggctcaatcagcaaagtgcaggaacctcacttctgttccagcccacccccagccatgaagaacccccaccaaagggccagggagggtgaggaggaaccgtgaagaggaaaggaagcatggggacaggtacacacactacaatggtctcctccttgcccactctttattccagctgagtagttcagacaaccgtcctttgttcttgatctggctggacacacctggatcgtgactactgaccctcatccagcttcctctcaagcttgaggactatctcctatctgtaacttttaagtccac

SEQ ID NO: 6046 - DNA, 564 bp, Rattus norvegicus
  ref <308>: DATABASE ACCESSION NUMBER: EMBL / AA893596
  ref <309>: DATABASE ENTRY DATE: 2000-03-03
ccacattgtggaaaaactaagcagaacattgaacgttttcgaacaatggcacaaataggtagacaaagctaaacaggcagcagggcttacattgtaagtttatagttaaaactacggatgaacatttcagtgcaccacaattccaaactgcaacgaagacggtaggtactcggggatccagctgaggagagatgggtcactgcagctgtactctgtaagcacctattagcaacttcacctacagaagagaagtgaatgtgtcagtacacacagctcccatctttaaggttattgctgtttttagtaaaaatataatcctgctcatcagtggaaccattagaatggttcagcaatccagcttccttcctagagagcccagtggcagtttagtactgaaggtagggtttgggctgctaaggagggaggcctgcatacctgagccaaagtctacactcaagacacatatttgcccaacatatacatcttagttcttcgacatttcagtgttataaggatgtataatttaaagggaaaaaatgagcagttactgtctataaatatgaa

SEQ ID NO: 6047 - protein, 307 aa, Rattus norvegicus
GEDEPFITTNRIPNNLLRDAVKNGDYIAVKVALNSNEEYNLDQEDSTGMTLVMLAAAGGQDDLLRLLITKGAKVNGRQKNGTTALIHAAEKNFLTTVAILLEAGAFVNVQQSNGETALMKACKRGNSDIVRLVIECGADCNILSKHQNSALYFAKQCNNVLVYELLKSHLETLSRVAEETIRDYFESRLALLEPVFPIACHRLCEGPDFSTDFNYMPPQNMPEGSGVLLFIFHANFLGKDVIARLCGPCSVQAVVLNDKFQLPVFLDSHFVYSFSPVAGPNKLFIRLTEAPFAKVKLLIGAYRVQLQ

SEQ ID NO: 6048 - DNA, 3234 bp, Homo sapiens
  ref <308>: DATABASE ACCESSION NUMBER: EMBL / BC003542
  ref <309>: DATABASE ENTRY DATE: 2001-06-06
gctgctaggatggagcaggttgcggagggagcaagggtgaccgcagtccctgtgtcagctgccgacagcactgaggagttggccgaagtcgaagaaggagttggagtagtgggcgaagataatgacgcagccgcgagaggagcggaggcctttggcgacagtgaggaggacggagaggatgtgttcgaggtggagaagatcctggacatgaagaccgaggggggtaaagttctttacaaagttcgctggaaaggctatacatcggatgatgatacctgggagcccgagattcacctggaggactgtaaagaagtgcttcttgaatttaggaagaaaattgcagagaacaaagccaaagcagtcaggaaggatattcagagactatccttaaataacgacatatttgaggcgaactctgatagcgatcagcaaagtgagacaaaagaagatacttccccaaagaagaaaaagaaaaaattgaggcagagagaagagaaaagcccagatgatctgaaaaagaaaaaagcaaaggccgggaagctaaaagacaagtccaaaccagacctggagagctccttggaaagtttagtttttgatttaaggacaaagaaaagaatttctgaagccaaagaagaactaaaggagtccaaaaagcccaaaaaagatgaagtaaaagaaacaaaagaattaaagaaagttaaaaagggtgaaataagagatttaaagacgaaaacaagagaagatcccaaagaaaatagaaaaacaaaaaaagaaaaatttgtcgaatcccaggtggaatctgaatcaagtgtacttaatgattctccctttccagaggatgacagtgaagggctacattccgacagcagagaagagaaacaaaacactaaaagtgcaagagagagagcagggcaggacatggggctggagcatggctttgagaagcccctagacagtgccatgagtgctgaggaggataccgatgtcagaggcaggaggaaaaagaagaccccgagaaaggctgaggacactagagagaacaggaagctagagaacaagaacgctttcttagagaagaaaactgtgcctaaaaagcagaggaatcaagacagaagcaaaagtgctgcagagttagagaagctgatgcctgtatctgcccaaacgccaaagggccggaggttgagcggggaagagagaggcctctggtccacggactcagccgaggaggacaaagaaaccaaaagaaatgaatccaaagaaaaatatcagaaaaggcatgattctgacaaggaagaaaaaggcagaaaagagccaaaaggattaaagacacttaaggaaatcagaaatgcatttgatttatttaaattaactccagaagaaaaaaatgatgtttctgagaataatcggaaaagggaagaaataccactggattttaaaaccatagacgatcacaaaaccaaggaaaacaaacagtcacttaaagaaaggagaaacaccagagacgaaacggatacttgggcatacattgctgcagaaggtgatcaggaggttttagacagcgtgtgccaagcagatgagaattcagatggcaggcagcagattctgagtttgggcatggacctgcagttggaatggatgaagttggaagatttccaaaagcaccttgatgggaaagatgagaattttgctgcaacagatgcaattccaagtaatgtgttaagggatgctgtgaaaaatggggattatattactgtaaaagttgcacttaattcaaatgaagaatataacctggaccaagaggattccagtggaatgacactggtgatgcttgccgccgccggagggcaggacgacctcctgcgactcctcatcacaaaaggcgcgaaagtgaacggtcggcagaagaacgggaccaccgccctcattcatgctgcagagaagaactttttaacaacagtggctattcttttggaagcaggagcttttgtaaatgtccagcaaagcaatggtgagactgcactgatgaaggcctgtaaaagaggaaattcagacatcgtacgactcgtaattgaatgtggagctgactgcaatattttgtcaaagcaccagaatagtgccctgcactttgcgaagcagtctaacaatgtgcttgtgtacgacttgctgaagaaccatttagagacactttcaagagtagcagaagagacaataaaggattactttgaagctcgccttgctctgctagaaccagtttttccaatcgcatgtcatcgactctgtgagggtccagatttttcaacagatttcaattacaaacccccacagaacataccagaaggctctggcatcctgctgtttatcttccatgcaaactttttgggtaaagaagttattgctcggctctgtggaccgtgtagtgtacaagctgtagttctgaatgataaatttcagcttcctgtttttctggacagtcattttgtttactcattcagccctgttgcaggtcccaataaactcttcataaggttgacagaagcaccctctgccaaggttaagttgctaataggtgcatacagagtgcagctgcagtgaccaaacagaagggactgggcggagttctcttcagaccgattcctatactctctttgacagcagtttggaattcttctagcacatctatgtaaagttttgtctgtaaacctcttgcagttaagcctgttgtctgttgtagtctgtaagatgcgacatagctgtgtctgtgccagtatgccggaatctcagtgcagtgtccagactgcgtatttcagtttttccacaatgtggatagtacatatgaggattatttaagaaaattaaagacttcactttcttttttctggagacggagtttcgctcttgttgcccaggctggagtgcaatggtgcgatctcggctcgctgcaagctctgcctcctgggttcaagtgattctcctgcctcagcctcctgagtagctgggattacagacacccgccatggcacccagctaattttgtatttttagtagagatggggtttatccatgttggtcaggctggtcttgaactcctgacctcaggtgatccgcccgcctcggcctcccaaagtgcttggattacaggcatgagccaccgcacccagcaagagttattttcttaacttgaaattttctactagccctggtgaacttctgtgcttaaaaaaaaaaaaaaaaaaa

SEQ ID NO: 6049 - protein, 863 aa, Homo sapiens
  ref <308>: DATABASE ACCESSION NUMBER: SWISS-Prot / AAH03542
  ref <309>: DATABASE ENTRY DATE: 2003-02-01
AARMEQVAEGARVTAVPVSAADSTEELAEVEEGVGVVGEDNDAAARGAEAFGDSEEDGEDVFEVEKILDMKTEGGKVLYKVRWKGYTSDDDTWEPEIHLEDCKEVLLEFRKKIAENKAKAVRKDIQRLSLNNDIFEANSDSDQQSETKEDTSPKKKKKKLRQREEKSPDDLKKKKAKAGKLKDKSKPDLESSLESLVFDLRTKKRISEAKEELKESKKPKKDEVKETKELKKVKKGEIRDLKTKTREDPKENRKTKKEKFVESQVESESSVLNDSPFPEDDSEGLHSDSREEKQNTKSARERAGQDMGLEHGFEKPLDSAMSAEEDTDVRGRRKKKTPRKAEDTRENRKLENKNAFLEKKTVPKKQRNQDRSKSAAELEKLMPVSAQTPKGRRLSGEERGLWSTDSAEEDKETKRNESKEKYQKRHDSDKEEKGRKEPKGLKTLKEIRNAFDLFKLTPEEKNDVSENNRKREEIPLDFKTIDDHKTKENKQSLKERRNTRDETDTWAYIAAEGDQEVLDSVCQADENSDGRQQILSLGMDLQLEWMKLEDFQKHLDGKDENFAATDAIPSNVLRDAVKNGDYITVKVALNSNEEYNLDQEDSSGMTLVMLAAAGGQDDLLRLLITKGAKVNGRQKNGTTALIHAAEKNFLTTVAILLEAGAFVNVQQSNGETALMKACKRGNSDIVRLVIECGADCNILSKHQNSALHFAKQSNNVLVYDLLKNHLETLSRVAEETIKDYFEARLALLEPVFPIACHRLCEGPDFSTDFNYKPPQNIPEGSGILLFIFHANFLGKEVIARLCGPCSVQAVVLNDKFQLPVFLDSHFVYSFSPVAGPNKLFIRLTEAPSAKVKLLIGAYRVQLQ

SEQ ID NO: 6050 - DNA, 564 bp, Rattus norvegicus; identical to SEQ ID NO: 6046
  ref <308>: DATABASE ACCESSION NUMBER: EMBL / AA893596
  ref <309>: DATABASE ENTRY DATE: 2000-03-03

SEQ ID NO: 6051 - protein, 307 aa, Rattus norvegicus; identical to SEQ ID NO: 6047

SEQ ID NO: 6052 - DNA, 3234 bp, Homo sapiens; identical to SEQ ID NO: 6048
  ref <308>: DATABASE ACCESSION NUMBER: EMBL / BC003542
  ref <309>: DATABASE ENTRY DATE: 2001-06-06

SEQ ID NO: 6053 - protein, 863 aa, Homo sapiens; identical to SEQ ID NO: 6049
  ref <308>: DATABASE ACCESSION NUMBER: SWISS-Prot / AAH03542
  ref <309>: DATABASE ENTRY DATE: 2003-02-01

SEQ ID NO: 6054 - DNA, 511 bp, Rattus norvegicus
  ref <308>: DATABASE ACCESSION NUMBER: EMBL / AA893603
  ref <309>: DATABASE ENTRY DATE: 2000-03-03
ggagaccaccatttatttttggttaatgccaaccaggaacactactcccgtagtacagtctgacacaggatcctcaggatgacaacaatggaaagcaagagcatggcaggtttcctgtttcagacctgaggtttgggagcttggggtctggccatgaagagcccactgctcataatcctcccaacacgcagagaaatcaagtctcaagtacttcccttcatctgctgcctctctcaagggagttttgggtttccctagaatagatgacaaagtaatgtgctgggtatggcggctcctccaggcacacaggccaaggctggaggagcatcttctactgtgcccaacctgggctaaataggcagatactatcacaaagaaataaaagccccaagtgctctaataatggacagatattcacaactcgaagcctcagtttccccttctgtaaaatgaaggagctgggtaggtcaggatcagtattttggctaagggtatgtggctaagggataaa

SEQ ID NO: 6055 - DNA, 511 bp, Rattus norvegicus; identical to SEQ ID NO: 6054
  ref <308>: DATABASE ACCESSION NUMBER: EMBL / AA893603
  ref <309>: DATABASE ENTRY DATE: 2000-03-03

SEQ ID NO: 6056 - DNA, 298 bp, Rattus norvegicus
  ref <308>: DATABASE ACCESSION NUMBER: EMBL / AA893612
  ref <309>: DATABASE ENTRY DATE: 2000-03-03
catgagaattgccatttattcccgaagttgccaaaatcatcaccaaggattcaccaggggtgccaagggaacgaggaggctcaaacactgattgggggttgtcagtttagagggagatgggatgggtgggggaaccccagctgtccctcccccatctaatgccacagaaaagggtcctcctctggccggctcccctccccatccccatgtccagtttttctcaaggggaggtgggttggggacttgggaagaggttgtagtgtgagtgggccccaggagatggaagggcactgggggt

SEQ ID NO: 6057 - protein, 212 aa, Rattus norvegicus
  ref <308>: DATABASE ACCESSION NUMBER: SWISS-Prot / AAC97475
  ref <309>: DATABASE ENTRY DATE: 2003-02-01
SSDPWAPAPAFSDPWGGSPAKPSSNGTAAVGGFDTEPDEFSDFDRLRTALPTSGSSTGELELLAGEVPARSPGAFDMSGVGGSLAESVGSPPPAATPTPTPPTRKTPESFLGPNAALVDLDSLVSRPGPTPPGSKASNPFLPSGAPPTGPSVTNPFQPAPPATLTLNQLRLSPVPPVPGAPPTYISPLGGGPGLPPMMPPGPPAPNTNPFLL

SEQ ID NO: 6058 - DNA, 298 bp, Rattus norvegicus; identical to SEQ ID NO: 6056
  ref <308>: DATABASE ACCESSION NUMBER: EMBL / AA893612
  ref <309>: DATABASE ENTRY DATE: 2000-03-03

SEQ ID NO: 6059 - protein, 212 aa, Rattus norvegicus; identical to SEQ ID NO: 6057
  ref <308>: DATABASE ACCESSION NUMBER: SWISS-Prot / AAC97475
  ref <309>: DATABASE ENTRY DATE: 2003-02-01

SEQ ID NO: 6060 - DNA, 607 bp, Rattus norvegicus
  ref <308>: DATABASE ACCESSION NUMBER: EMBL / AA893621
  ref <309>: DATABASE ENTRY DATE: 2000-03-03
gcagacgccggtttattaccgaaggctagccaggactcttctactagcccagccagcggatgcccacaagggtcccaactcagtcttccaagagcaaggcagggctgcctcacggtggagatgggagcagtgttccctcctggggcaatggcggttttcctgctcagtggcagccagggtaggcagtggataccagcaccgtcttctcaggagggcactctcagcttcggagtccccaaaaagaactgtaggacacggtcagccaggagtgccaggccgaagtccagggccaggacctggccgatgaccagcttgaactctacagggatgtccacgaggccaaactggctgttgaagtcaggggaggagcccaggagcaagcccatgatggccatcagtgacactgccagactccacaccaagggcttgttctcaggcaggctctccatgaagggtgggcccttgtagttgatggcaaaggtagccatctgcatggccatggccatgatgtacacagtgctgttgaccaggctcggctcaaactccttgtacaggtctacaaactgttcctgcttctcagggctgcgtgcctgggcctcccggtaca

SEQ ID NO: 6061 - protein, 1200 aa, Rattus norvegicus
  ref <308>: DATABASE ACCESSION NUMBER: SWISS-Prot / BAB20095
  ref <309>: DATABASE ENTRY DATE: 2001-10-16
MAVVGNAVPCGARPGGARDNGSPQPGSRLRPGLAAGPALIANGDELVAAVWPYRRLALLRRLTVLPFAGLLYPAWLGAAASGCWGWGSSWTQIPEAALLALATICLAHALTVLSGHWSVHAHCALTCTPEYDPNKVTFVKVVPTPNNGSTELVALHRDKGEDGLEVLSFEFQKIKYSYDALEKKQFLSVAFPVGNAFSYYQSNRGFQEDSEIRAAEKKFGSNKAEMVVPDFSELFKERATAPFFVFQVFCVGLWCLDEYWYYSVFTLSMLVAFEASLVQQQMRNMSEIRKMGNKPHMIQVYRSRKWRPVASDDIVPGDIVSIGRSPQENLVPCDVLLLRGRCIVDEAMLTGESVPQMKEPIEDLSPDRVLDLQADARLHVIFGGTKVVQHIPPQKATSGLKPVDNGCVAFVLRTGFNTSQGRLLRTILFGVKRVTANNLETFIFILFLLVFAIAAAAYVWVEGTKDPSRNRYKLFLECTLILTSVVPPELPIELSLAVNTSLIALAKLYMYCTEPFRIPFAGKVEVCCFDKTGTLTSDSLVVRGVAGLRDGKEVTPVSSIPIETHRALASCHSLMQLDDGTLVGDPLEKAMLTAVDWTLTKDEKVFPRSIKTQGLKIHQRFHFASALKRMSVLASYEKLGSTDLCYIAAVKGAPETLHSMFSQCPPDYHHIHTEISREGARVLALGYKELGHLTHQQAREIKREALECSLKFVGFIVVSCPLKADSKAVIREIQNASHRVVMITGDNPLTACHVAQELHFIDKAHTLILHPPSEKGQPCEWRSIDSSIVLPLTLGSPKALALEHALCLTGDGLAHLQAVDPQQLLCLIPHVQVFARVAPKQKEFVITSLKELGYVTLMCGDGTNDVGALKHADVGVALLANAPERVVERRRRPRDSPVLSNSGPRVSRSTKQKSALLSPEEPPASHRDRLSQVLRDLEEESTPIVKLGDASIAAPFTSKLSSIQCICHVIKQGRCTLVTTLQMFKILALNALILAYSQSVLYLEGVKFSDFQATLQGLLLAGCFLFISRSKPLKTLSRERPLPNIFNLYTILTVMLQFSVHFLSLVYLYREAQARSPEKQEQFVDLYKEFEPSLVNSTVYIMAMAMQMATFAINYKGPPFMESLPENKPLVWSLAVSLLAIIGLLLGSSPDFNSQFGLVDIPVEFKLVIGQVLALDFCLALLADRVLQFFLGTPKLRVPS

SEQ ID NO: 6062 - DNA, 3483 bp, Homo sapiens
  ref <308>: DATABASE ACCESSION NUMBER: Refseq / NM_020410
  ref <309>: DATABASE ENTRY DATE: 2001-12-10
atggagaagtgggaggagctgaacagccatcagccaggagaggagtacgaccccagcaaagcgacctttgtgaaggtggtgccaacccccaacaatggctccacggagctcgtggccctgcaccgcaatgagggcgaagacgggcttgaggtgctgtccttcgaattccagaagatcaagtattcctacgatgccctggagaagaagcagtttctccccgtggcctttcctgtgggaaacgccttctcatactatcagagcaacagaggcttccaggaagactcagagatccgagcagctgagaagaaatttgggagcaacaaggccgagatggtggtgcctgacttctcggagcttttcaaggagagagccacagcccccttctttgtatttcaggtgttctgtgtggggctctggtgcctggatgagtactggtactacagcgtctttacgctatccatgctggtggcgttcgaggcctcgctggtgcagcagcagatgcggaacatgtcggagatccggaagatgggcaacaagccccacatgatccaggtctaccgaagccgcaagtggaggcccattgccagtgatgagatcgtaccaggggacatcgtctccatcggccgctccccacaggagaacctggtgccatgtgacgtgcttctgctgcgaggccgctgcatcgtagacgaggccatgctcacgggggagtccgtgccacagatgaaggagcccatcgaagacctcagcccagaccgggtgctggacctccaggctgattcccggctgcacgtcatcttcgggggcaccaaggtggtgcagcacatccccccacagaaagccaccacgggcctgaagccggttgacagcgggtgcgtggcctacgtcctgcggaccggattcaacacatcccagggcaagctgctgcgcaccatcctcttcggggtcaagagggtgactgcgaacaacctggagaccttcatcttcatcctcttcctcctggtgtttgccatcgctgcagctgcctatgtatggattgaaggtaccaaggaccccagccggaaccgctacaagctgtttctggagtgcaccctgatcctcacctcggtcgtgcctcctgagctgcccatcgagctgtccctggccgtcaacacctccctcatcgccctggccaagctctacatgtactgcacagagcccttccggatcccctttgctggcaaggtcgaggtgtgctgctttgacaagacggggacgttgaccagtgacagcctggtggtgcgcggtgtggccgggctgagagacgggaaggaggtgaccccagtgtccagcatccctgtagaaacacaccgggccctggcctcgtgccactcgctcatgcagctggacgacggcaccctcgtgggtgaccctctagagaaggccatgctgacggccgtggactggacgctgaccaaagatgagaaagtattcccccgaagtattaaaactcaggggctgaaaattcaccagcgctttcattttgccagtgccctgaagcgaatgtccgtgcttgcctcgtatgagaagctgggctccaccgacctctgctacatcgcggccgtgaagggggcccccgaaactctgcactccatgttctcccagtgcccgcccgactaccaccacatccacaccgagatctcccgggaaggagcccgcgtcctggcgctggggtacaaggagctgggacacctcactcaccagcaggcccgggaggtcaagcgggaggccctggagtgcagcctcaagttcgtcggcttcattgtggtctcctgcccgctcaaggctgactccaaggccgtgatccgggagatccagaatgcgtcccaccgggtggtcatgatcacgggagacaacccgctcactgcatgccacgtggcccaggagctgcacttcattgaaaaggcccacacgctgatcctgcagcctccctccgagaaaggccggcagtgcgagtggcgctccattgacggcagcatcgtgctgcccctggcccggggctccccaaaggcactggccctggagtacgcactgtgcctcacaggcgacggcttggcccacctgcaggccaccgacccccagcagctgctccgcctcatcccccatgtgcaggtgttcgcccgtgtggctcccaagcagaaggagtttgtcatcaccagcctgaaggagctgggctacgtgaccctcatgtgtggggatggcaccaacgacgtgggcgccctgaagcatgctgacgtgggtgtggcgctcttggccaatgcccctgagcgggttgtcgagcggcgacggcggccccgggacagcccaaccctgagcaacagtggcatcagagccacctccaggacagccaagcagcggtcggggctccctccctccgaggagcagccaacctcccagagggaccgcctgagccaggtgctgcgagacctcgaggacgagagtacgcccattgtgaaactgggggatgccagcatcgcagcacccttcacctccaagctctcatccatccagtgcatctgccacgtgatcaagcagggccgctgcacgctggtgaccacgctacagatgttcaagatcctggcgctcaatgccctcatcctggcctacagccagagcgtcctctacctggagggagtcaagttcagtgacttccaggccaccctacaggggctgctgctggccggctgcttcctcttcatctcccgttccaagcccctcaagaccctctcccgagaacggcccctgcccaacatcttcaacctgtacaccatcctcaccgtcatgctccagttctttgtgcacttcctgagccttgtctacctgtaccgtgaggcccaggcccggagccccgagaagcaggagcagttcgtggacttgtacaaggagtttgagccaagcctggtcaacagcaccgtctacatcatggccatggccatgcagatggccaccttcgccatcaattacaaaggcccgcccttcatggagagcctgcccgagaacaagcccctggtgtggagtctggcagtttcactcctggccatcattggcctgctcctcggctcctcgcccgacttcaacagccagtttggcctcgtggacatccctgtggagttcaagctggtcattgcccaggtcctgctcctggacttctgcctggcgctcctggccgaccgcgtcctgcagttcttcctggggaccccgaagctgaaagtgccttcctgagatggcagtgctggtacccactgcccaccctggctgccgctgggcgggaaccccaacagggccccgggagggaaccctgcccccaaccccccacagcaaggctgtacagtctcgcccttggaagactgagctgggacccccacagccatccgctggcttggccagcagaaccagccccaagccagcacctttggtaaataaagcagcatctgagattttaaa

SEQ ID NO: 6063 - protein, 1204 aa, Homo sapiens
  ref <308>: DATABASE ACCESSION NUMBER: SWISS-Prot / Q9HD20
  ref <309>: DATABASE ENTRY DATE: 2002-06-15
MAAAAAVGNAVPCGARPCGVRPDGQPKPGPQPRALLAAGPALIANGDELVAAVWPYRRLALLRRLTVLPFAGLLYPAWLGAAAAGCWGWGSSWVQIPEAALLVLATICLAHALTVLSGHWSVHAHCALTCTPEYDPSKATFVKVVPTPNNGSTELVALHRNEGEDGLEVLSFEFQKIKYSYDALEKKQFLPVAFPVGNAFSYYQSNRGFQEDSEIRAAEKKFGSNKAEMVVPDFSELFKERATAPFFVFQVFCVGLWCLDEYWYYSVFTLSMLVAFEASLVQQQMRNMSEIRKMGNKPHMIQVYRSRKWRPIASDEIVPGDIVSIGRSPQENLVPCDVLLLRGRCIVDEAMLTGESVPQMKEPIEDLSPDRVLDLQADSRLHVIFGGTKVVQHIPPQKATTGLKPVDSGCVAYVLRTGFNTSQGKLLRTILFGVKRVTANNLETFIFILFLLVFAIAAAAYVWIEGTKDPSRNRYKLFLECTLILTSVVPPELPIELSLAVNTSLIALAKLYMYCTEPFRIPFAGKVEVCCFDKTGTLTSDSLVVRGVAGLRDGKEVTPVSSIPVETHRALASCHSLMQLDDGTLVGDPLEKAMLTAVDWTLTKDEKVFPRSIKTQGLKIHQRFHFASALKRMSVLASYEKLGSTDLCYIAAVKGAPETLHSMFSQCPPDYHHIHTEISREGARVLALGYKELGHLTHQQAREVKREALECSLKFVGFIVVSCPLKADSKAVIREIQNASHRVVMITGDNPLTACHVAQELHFIEKAHTLILQPPSEKGRQCEWRSIDGSIVLPLARGSPKALALEYALCLTGDGLAHLQATDPQQLLRLIPHVQVFARVAPKQKEFVITSLKELGYVTLMCGDGTNDVGALKHADVGVALLANAPERVVERRRRPRDSPTLSNSGIRATSRTAKQRSGLPPSEEQPTSQRDRLSQVLRDLEDESTPIVKLGDASIAAPFTSKLSSIQCICHVIKQGRCTLVTTLQMFKILALNALILAYSQSVLYLEGVKFSDFQATLQGLLLAGCFLFISRSKPLKTLSRERPLPNIFNLYTILTVMLQFFVHFLSLVYLYREAQARSPEKQEQFVDLYKEFEPSLVNSTVYIMAMAMQMATFAINYKGPPFMESLPENKPLVWSLAVSLLAIIGLLLGSSPDFNSQFGLVDIPVEFKLVIAQVLLLDFCLALLADRVLQFFLGTPKLKVPS

SEQ ID NO: 6064 - DNA, 508 bp, Rattus norvegicus
  ref <308>: DATABASE ACCESSION NUMBER: EMBL / AA893641
  ref <309>: DATABASE ENTRY DATE: 2000-03-03
acagtcttgtcccaaactctttattctgtgcctcagaaatctcagatttttaccttgtcttacaacttgtgccttcatctaattactaaaccagtggttgtcactgacttagtggtcacaaccagtgaggcttgggtatgtggatactgcagtgggtggctgagccaggaccaagaatttagaagaggccactgaccctgtgctcagtggggccagaagcagaaaccatgatgcttggtgtgttttctgacatacttaaacaatttcaacagattctagaatgtttgaaacacagcatatgccccacatacgggctctgggctggtaccagcccagccatgcttacaccgtgtgcaccctgctcagctaccgccctcacacatgcacgctcatttatgtgccaaggcaactctgcccatggctgcagccacatccaagaaacaacttcacttgtggaaatgaaaggtgggttccctgtcttcacagaggataagactaccacagtcct

SEQ ID NO: 6065 - protein, 379 aa, Rattus norvegicus
  ref <308>: DATABASE ACCESSION NUMBER: SWISS-Prot / Q9QXQ7
  ref <309>: DATABASE ENTRY DATE: 2002-06-15
MKKPIGILSPGVALGTAGGAMSSKFFLMALATFFSFAQVVIKANSWWSLSMNNPVQMSEVYIIGAQPLCSQLAGLSQGQKKLCHLYQDHMQYIGEGAKTGIKECQYQFRHRRWNCSTVDNTSVFGRVMQIGSRETAFTYAVSAAGVVNAMSRACREGELSTCGCSRARPKDLPRDWLWGGCGDNIDYGYRFAKEFVDARERERIHAKGSYESARILMNLHNNEAGRRTVYNLADVACKCHGVSGSCSLKTCWLQLADFRKVGDALKEKYDSAAAMRLNSRGKLVQVNSRFNSPTTQDLVYIDPSPDYCVRNESTGSLGTQGRLCNKTSEGMDGCELMCCGRGYDQFKTVQTERCHCKFHWCCYVKCKKCTEIVDQFVCK

SEQ ID NO: 6066 - DNA, 2457 bp, Homo sapiens
  ref <308>: DATABASE ACCESSION NUMBER: EMBL / AL390088
  ref <309>: DATABASE ENTRY DATE: 2000-07-19
cggggccggcgaactgcggcccggaacggctgaggaagggcccgtcccgccttccccggcgcgccatggagccccgggcggttgcagaagccgtggagacgggtgaggaggatgtgattatggaagctctgcggtcatacaaccaggagcactcccagagcttcacgtttgatgatgcccaacaggaggaccggaagagactggcggagctgctggtctccgtcctggaacagggcttgccaccctcccaccgtgtcatctggctgcagagtgtccgaatcctgtcccgggaccgcaactgcctggacccgttcaccagccgccagagcctgcaggcactagcctgctatgctgacatctctgtctctgaggggtccgtcccagagtccgcagacatggatgttgtactggagtccctcaagtgcctgtgcaacctcgtgctcagcagccctgtggcacagatgctggcagcagaggcccgcctagtggtgaagctcacagagcgtgtggggctgtaccgtgagaggagcttcccccacgatgtccagttctttgacttgcggctcctcttcctgctaacggcactccgcaccgatgtgcgccagcagctgtttcaggagctgaaaggagtgcgcctgctaactgacacactggagctgacgctgggggtgactcctgaagggaaccccccacccacgctccttccttcccaagagactgagcgggccatggagatcctcaaagtgctcttcaacatcaccctggactccatcaagggggaggtggacgaggaagacgctgccctttaccgacacctggggacccttctccggcactgtgtgatgatcgctactgctggagaccgcacagaggagttccacggccacgcagtgaacctcctggggaacttgcccctcaagtgtctggatgttctcctcaccctggagccacatggagactccacggagttcatgggagtgaatatggatgtgattcgtgccctcctcatcttcctagagaagcgtttgcacaagacacacaggctgaaggagagtgtagctcccgtgctgagcgtgctgactgaatgtgcccggatgcaccgcccagccaggaagttcctgaaggcccaggtgctgccccctctgcgggatgtgaggacacggcctgaggttggggagatgctgcggaacaagcttgtccgcctcatgacacacctggacacagatgtgaagagggtggctgccgagttcttgtttgtcctgtgctctgagagtgtgccccgattcatcaagtacacaggctatgggaatgctgctggccttctggctgccaggggcctcatggcaggaggccggcccgagggccagtactcagaggatgaggacacagacacagatgagtacaaggaagccaaagccagcataaaccctgtgaccgggagggtggaggagaagccgcctaaccctatggagggcatgacagaggagcagaaggagcacgaggccatgaagctggtgaccatgtttgacaagctctccaggaacagagtcatccagccaatggggatgagtccccggggtcatcttacgtccctgcaggatgccatgtgcgagactatggagcagcagctctcctcggaccctgactcggaccctgactgaggatggcagctcttctgctcccccatcaggactggtgctgcttccagagacttccttggggttgcaacctcgggaagccacatcccactggatccacacccgcccccacttctccatcttagaaaccccttctcttgactcccgttctgttcatgatttgcctctggtccagtttctcatctctggactgcaacggtcttcttgtgctagaactcaggctcagcctcgaattccacagacgaagtactttcttttgtctgcgccaagaggaatgtgttcagaagctgctgcctgagggcagggcctacctgggcacacagaagagcatatgggagggcaggggtttgggtgtgggtgcacacaaagcaagcaccatctgggattggcacactggcagagccagtgtgttggggtatgtgctgcacttcccagggagaaaacctgtcagaactttccatacgagtatatcagaacacacccttccaaggtatgtatgctctgttgttcctgtcctgtcttcactgagcgcagggctggaggcctcttagacattctccttggtcctcgttcagctgcccactgtagtatccacagtgcccgagttctcgctggttttggcaattaaacctccttcctactggtttagactacacttacaacaaggaaaatgcccctcgtgtgaccatagattgagatttataccacataccacacatagccacagaaacatcatcttgaaataaagaagagttttggacaaaaaaaaaaaaaaaaaaaaaaaaaaaaaaaaaaaaaa

SEQ ID NO: 6067 - protein, 365 aa, Homo sapiens
  ref <308>: DATABASE ACCESSION NUMBER: SWISS-Prot / P41221
  ref <309>: DATABASE ENTRY DATE: 2002-06-15
MAGSAMSSKFFLVALAIFFSFAQVVIEANSWWSLGMNNPVQMSEVYIIGAQPLCSQLAGLSQGQKKLCHLYQDHMQYIGEGAKTGIKECQYQFRHRRWNCSTVDNTSVFGRVMQIGSRETAFTYAVSAAGVVNAMSRACREGELSTCGCSRAARPKDLPRDWLWGGCGDNIDYGYRFAKEFVDARERERIHAKGSYESARILMNLHNNEAGRRTVYNLADVACKCHGVSGSCSLKTCWLQLADFRKVGDALKEKYDSAAAMRLNSRGKLVQVNSRFNSPTTQDLVYIDPSPDYCVRNESTGSLGTQGRLCNKTSEGMDGCELMCCGRGYDQFKTVQTERCHCKFHWCCYVKCKKCTEIVDQFVCK

SEQ ID NO: 6068 - DNA, 508 bp, Rattus norvegicus; identical to SEQ ID NO: 6064
  ref <308>: DATABASE ACCESSION NUMBER: EMBL / AA893641
  ref <309>: DATABASE ENTRY DATE: 2000-03-03

SEQ ID NO: 6069 - protein, 379 aa, Rattus norvegicus; identical to SEQ ID NO: 6065
  ref <308>: DATABASE ACCESSION NUMBER: SWISS-Prot / Q9QXQ7
  ref <309>: DATABASE ENTRY DATE: 2002-06-15

SEQ ID NO: 6070 - DNA, 2457 bp, Homo sapiens; identical to SEQ ID NO: 6066
  ref <308>: DATABASE ACCESSION NUMBER: EMBL / AL390088
  ref <309>: DATABASE ENTRY DATE: 2000-07-19

SEQ ID NO: 6071 - protein, 365 aa, Homo sapiens; identical to SEQ ID NO: 6067
  ref <308>: DATABASE ACCESSION NUMBER: SWISS-Prot / P41221
  ref <309>: DATABASE ENTRY DATE: 2002-06-15

SEQ ID NO: 6072 - DNA, 457 bp, Rattus norvegicus
  misc_feature (1)..(457): n=a, c, g or t
  ref <308>: DATABASE ACCESSION NUMBER: EMBL / AA893662
  ref <309>: DATABASE ENTRY DATE: 2000-03-03
gagttataaaaaagagatatttattttagctcacagatctgtctttaaaaggaaaccacacaacagttggactaaagagaaatctgacacataatcccatcaataaagtctgatacaatgaaagggcatcaaggccatctgactcacaaatgtgaaagagagcattaatcagaaacaatacaatattaagaagctctaaacatgatggggccctgaggaggaattgaagacttctgttaaaaccttcagaggggcctcattaaaagaaagaatgagaaagtgtgtgtaagggtcataacctccataagagagatgtgctggtttgatgagaatgacccacacaggctcatatgtttgaacacttggctccagttgatggaactgttcgggaaggattangaggtgtggtctcgctaggagagacacatcacttggggggaatgcttcgaggtttcan

SEQ ID NO: 6073 - DNA, 496 bp, Rattus norvegicus
  ref <308>: DATABASE ACCESSION NUMBER: EMBL / AA893663
  ref <309>: DATABASE ENTRY DATE: 2000-03-03
gaaaaacaaggaatttaatttattttacaattgtacaaatgataaagcaggaatagctcattgctatgcacaaacaacagaagacattgttgaccagaaagaacctacagagtgagcttcatccttcctttctacggatggtagaagaaagacacagcaattatcctatgcagcaaagcgatctgtaaactctgttttgcttttcttctcctggctatgtacatctaaaactcttgtgctttcaccaacacaaacaaaacagtattctgtaaaaggcgctacataaaggagaaacacacagcctagacccacagtcagaaaaccgcaatttaaatacatcgccagcttgaaggtaatttttttccctttacttttgttttgaaaggcttgaacagactagttgctgactatttctctaggaaagaacatataattcagctacgaagtgggtctttcttaaagcagagtagtaagtgaagtttcaaaagaacttctg

SEQ ID NO: 6074 - protein, 359 aa, Rattus norvegicus
  ref <308>: DATABASE ACCESSION NUMBER: Refseq / NP_033209
  ref <309>: DATABASE ENTRY DATE: 2002-10-02
MRSIRKRWTICTISLLLIFYKTKEIARTEEHQETQLIGDGELCLSRSLVNSSDKIIRKAGSTIFQHSVQGWKINSSLVLEIRKNILRFLDAERDVSVVKSSFKPGDVIHYVLDRRRTLNISHNLHSLLPEVSPMKNRRFKTCAVVGNSGILLDSGCGKEIDSHNFVIRCNLAPVVEFAADVGTKSDFITMNPSVVQRAFGGFRNESDREKFVHRLSMLNDSVLWIPAFMVKGGEKHVEWVNALILKNKLQVRTAYPSLRLIHAVRGYWLTNKVPIKRPSTGLLMYTLATRFCDEIHLYGFWPFPKDLNGKAVKYHYYDDLKYRYFSNASPHRMPLEFKTLNVLHNRGALKLTTGKCMKQ

SEQ ID NO: 6075 - DNA, 381 bp, Homo sapiens
  ref <308>: DATABASE ACCESSION NUMBER: EMBL / AA833803
  ref <309>: DATABASE ENTRY DATE: 2000-03-03
tttttttttgaaaaaaagggattaatttattttacaattttacaaatgataaaacaataatacccggttgctatacacaaacaataagaaaacagtgttgaacagaatgaacttgaacttgacagaataaacctcatctttcagttccacaaattctataagaaatactcagtagcaattattctgtgcagcaatgctatctctgtaaactctttttttttcctgctatttacatttgaaacacttgtgcttttgcctacacaaagaaacggtttttattaaaaggtgctacttaaatgagaaacacaaggcctggagccacaatctgaaaactgtaattcgaatacattgctagcttgaagcctttacttttcttcttta

SEQ ID NO: 6076 - protein, 359 aa, Homo sapiens
  ref <308>: DATABASE ACCESSION NUMBER: Refseq / NP_005659
  ref <309>: DATABASE ENTRY DATE: 2002-11-05
MRSIRKRWTICTISLLLIFYKTKEIARTEEHQETQLIGDGELSLSRSLVNSSDKIIRKAGSSIFQHNVEGWKINSSLVLEIRKNILRFLDAERDVSVVKSSFKPGDVIHYVLDRRRTLNISHDLHSLLPEVSPMKNRRFKTCAVVGNSGILLDSECGKEIDSHNFVIRCNLAPVVEFAADVGTKSDFITMNPSVVQRAFGGFRNESDREKFVHRLSMLNDSVLWIPAFMVKGGEKHVEWVNALILKNKLKVRTAYPSLRLIHAVRGYWLTNKVPIKRPSTGLLMYTLATRFCDEIHLYGFWPFPKDLNGKAVKYHYYDDLKYRYFSNASPHRMPLEFKTLNVLHNRGALKLTTGKCVKQ

SEQ ID NO: 6077 - DNA, 409 bp, Rattus norvegicus
  ref <308>: DATABASE ACCESSION NUMBER: EMBL / AA893664
  ref <309>: DATABASE ENTRY DATE: 2000-03-03
aaaaacaatccattttattaggttttaaaactagttacacaattgaaagtcaattaggtactactctgtacagggactgtgcctgggtatgctcacacttcaatactgtactaagcccactgtgtagattgagacattcagcatgtagatactaaaaaataaactgtagtattcctttaaggaagattgtaaagggtgtgtcacaagatgacattcatcaactttgaattattccaactagaagatattttacactctaaagttgtgacaggcaaacatgttacttaaaaatgcacacaaaaaggtacataaaaatccagatattctaatgataaatgaacttaaaaaaccacctatgtttcagcttttgtaacatgagaagataaagaatataatttaaaaacacaca

SEQ ID NO: 6078 - DNA, 6106 bp, Homo sapiens
  ref <308>: DATABASE ACCESSION NUMBER: EMBL / D38521
  ref <309>: DATABASE ENTRY DATE: 2001-10-10
cgccgagtccgacttgcagctggcccagatcaaatgcaacctgggccgggccgtgcagctccaagagctgtggcccgggggcctcttctggaccaggaaactctccacatatattcgactttatgggagaaaatttagcaaagaagatcatgttctttttattaagttattgtatgagctggtatcaattccaaaactggaaatcagcatgatgcagggatttgcccgccttttgatcaacttgttaaagaaaaaggaacttctttcaagagctgatttggagttaccctggagaccactttatgacatggtagaaagaatattatattccaagacagagcacctaggattaaattggtttcctaattctgtagaaaatattctcaaaacactcgtgaaaagctgccgaccatattttccagcagatgccaccgctgagatgctagaagaatggcgacctttaatgtgcccttttgatgtaaccatgcaaaaggccatcacttattttgaaatatttcttcctacctcccttcctccagaacttcatcataaaggttttaaactttggtttgatgaattaattggcctttgggtttcagtgcaaaatctcccacaatgggaggggcaactagtaaatctctttgctcgattggctacagataatatagggtacatagattgggatccatatgtaccaaagatatttacaagaattctgagaagcttgaacctcccagtgggaagcagtcaagtgttagtcccaagatttttaacaaatgcttatgatataggacatgctgtaatatggatcaccgccatgatgggtggaccaagtaagctagtgcaaaaacacttagctggtttgtttaacagcatcacatctttttaccatccttcaaataatgggcgctggctgaacaagttaatgaaactacttcagcggttgccaaacagtgttgttagaagattgcatcgtgaaagatacaagaagccctcttggttaactcctgtgcctgatagccacaagcttactgatcaagatgttacagactttgtacaatgcattattcagcctgtcctcttggctatgtttagcaaaaccggtagtctagaagcagcccaggctttgcagaatcttgcactcatgagacctgaattggtaataccccctgtacttgaaagaacatatcctgcattagagacattaacagaacctcaccagctcacagctactttaagttgtgtaattggagtagcccgcagtttggtatcaggaggcagatggtttcctgaaggtcctacacatatgctacctctgttgatgagagcattgcctggggtggatccaaatgactttagtaaatgcatgatcacattccagttcatagcaacattttctactctggtgcctttagtagattgttcatctgtactacaagaaagaaatgacctcacagaagtggaacgagaactttgttcagccacagctgaatttgaggatttcgtcttacagtttatggacagatgttttggacttatagaaagtagcacattggagcaaacaagagaagagacagaaactgagaaaatgacacacttggagagtttggtcgaattaggtctgtcttctacgtttagtacaatcctcacccaatgttccaaagaaatatttatggtggcccttcagaaggtttttaatttttctacttcacatatatttgaaacaagagtagcaggtcgcatggtggcagacatgtgccgcgctgctgtaaagtgctgcccagaagaatctttgaagctctttgttccccactgctgcagtgttataactcagcttacaatgaatgatgatgtattaaatgatgaagagctagacaaggaattactatggaatcttcaacttttgtctgagattactcgagtggatggaaggaagttgcttctttatagggagcagcttgtaaagattctccaaagaaccctacatttaacctgtaagcagggttacactctgtcttgtaaccttttgcatcatcttctccgttctaccacacttatctaccctacagaatactgcagtgtgccaggtggctttgacaagcctccttctgaatactttcctatcaaggactggggcaaacccggggacttgtggaatctgggaatccagtggcatgttccttcttcagaagaagtgtcttttgccttttatcttttggactcctttcttcagcctgagctcgtcaaactccagcattgtggggatggaaaacttgaaatgtctagagatgatattctacagagtctgactatagtgcacaactgtttaattggctctggaaacctcctacctccgttgaaaggagagccagttactaacttagtaccaagtatggtgtccttggaagagacaaagttgtatactggacttgaatatgatctgtctcgagagaaccaccgagaagtaattgctacagttataaggaaacttcttaaccacatacttgataattcagaagatgatactaagtcattgtttcttattataaagattattggagaccttttacaattccaaggatctcacaagcatgaatttgactcccgatggaaaagcttcaacttagtaaagaaatcaatggaaaatcggctccatgggaaaaaacaacatatcagagcactgttgattgatagagtaatgttacagcatgagctacggacactaactgttgagggttgtgaatacaaaaagatacatcaagatatgatcagagatcttcttcgtttatctacaagttcatacagtcaggtgagaaataaggctcagcaaacattttttgctgccttgggagcatataacttctgttgcagagatatcattcccttggttttggagttcttaaggcctgatagacaaggtgttacacagcaacaattcaagggtgccttgtactgtctccttggaaatcacagtggtgtgtgcttggcaaaccttcatgattgggactgtattgtacagacgtggccagcgattgtttcttcagggcttagccaagcaatgtccctggaaaagccatcaatagtgagattgtttgatgatcttgcagaaaagattcataggcagtatgaaacaattggcttggacttcacaattccaaagtcatgtgttgaaatagcggaattacttcaacagtcaaaaaacccctctatcaaccagatattgcttagcccagaaaaaattaaggaaggaattaaacgccaacaagaaaagaatgccgatgccctaaggaactatgaaaatttggtagacaccttgctagatggtgtggagcaaagaaacctgccctggaaatttgaacatataggcattgggcttctgtctctactgctgagagatgaccgagtgttgcctcttcgtgccatacggttttttgttgagaatctcaaccatgatgcaattgtagttcgaaagatggctatctcagctgttgctggtatccttaaacagctaaaaagaacccacaaaaagctgaccattaacccctgtgaaatcagtggatgccctaaacccacccaaattattgctggtgataggcctgataatcattggttgcattatgacagcaaaactataccaagaactaaaaaagaatgggagtcaagttgctttgtggaaaaaactcactggggatactacacctggccaaagaatatggttgtttatgctggtgtggaagagcagcctaagcttggcagaagcagggaggatatgacagaggcagaacagattatatttgatcatttttctgatcctaaatttgttgagcagttaattacttttctatcattagaagacagaaaaggaaaagataagtttaatccacgacgtttttgtctctttaagggtatattcaggaattttgatgatgccttcctgccagttctgaagccccatttagaacatttggttgcagattcacatgaaagcacccagcgatgtgttgcagaaattatagctggtttaatcagaggttctaagcactggacatttgaaaaggtggagaagctttgggagcttctgtgccctctgcttagaacagcactgtccaatattaccgtagaaacttataatgactggggagcttgtatagcaacatcctgtgaaagcagagatccccggaaacttcactggctttttgaactgctgttggaatcaccattgagtggtgaaggaggatcctttgtagatgcatgtcgactttatgtactacaaggtggccttgcccagcaagaatggagagtgcctgaactattgcacagactactgaagtacttggaacccaaactcacccaggtttacaaaaatgtcagagaaagaataggaagtgtgctgacctacatattcatgatagatgtatctttgccaaataccacaccaaccatatcgcctcatgtccctgagtttactgctcgaattctggagaaattgaaacctctcatggatgtggatgaagaaattcagaaccatgttatggaagaaaatggaattggtgaagaagatgagcgaactcagggcattaaactcttgaaaaccatattgaaatggctgatggcaagtgcaggaagatccttttctacagcagttacagaacaacttcagcttctacctttgtttttcaagattgccccagtggaaaatgacaatagctacgatgaactgaaaagagatgcaaagttatgtttatcattaatgtctcaggggttgctttaccctcatcaagtgcctttggtacttcaggtgctaaaacaaacagcaagaagcagttcttggcatgcacgatacacagtactgacctacctccagaccatggtattttataacctctttattttcctaaacaatgaagatgcagttaaagatatcaggtggctggttataagtcttttggaggacgaacaactggaggttcgagaaatggctgctactaccttaagcggtctgctacagtgtaactttcttaccatggacagtcctatgcagattcattttgagcaactttgcaaaacaaaactacctaagaaaagaaagcgagaccctggttctgtaggagataccattccttctgcagagttggtcaaacgccatgctggggtgctaggacttggtgcatgtgttctttctagtccttacgatgttcccacctggatgccccagctcctcatgaatctcagtgcacatctaaatgatcctcagcctattgagatgactgtaaaaaaaaccttatccaatttccgaaggactcaccatgacaactggcaggaacataaacagcaattcactgatgaccaactgcttgttctcaccgatcttcttgtgtcaccatgctattatgcatagaaagatgactagtcctcacttcaggctcttttcatcaaaaattccacaccctcaggtaccatctgtggtggctctctgcaagttttaaaactgcctctgctgagctctcatcattttggtggtttctgtgttagatctcgttagtctgcattccacagcttctcagttgccatttgatttcccaacttgtccggaagtgtttccagaatactgatcactttttttttttgaggcatctgacaaagtcacaaagtctcagactagaaataattacccagtatgatcatggcatccaagaccagagtctcagaactcattaagaaacagtttacttggaatggagaatacccatctgtaatacaggtcctgtcatttcattcatctcaaattattttgaattcttcccaaatggctgctggatttaggtggtaataggggctgtgggccataaatctgaagccttgagaaccttgggtctggagagccatgaagagggaaggaaaagagggcaagtcctgaacctaaccaatgacctgatggattgctcgaccaagacacagaagtgaagtctgtgtctgtgcacttcccacagactggagtttttggtgctgaatagagccagttgctaaaaaattgggggtttggtgaagaaatctgattgttgtgtgtattcaatgtgtgattttaaaaataaacagcaacaacaat

SEQ ID NO: 6079 - DNA, 485 bp, Rattus norvegicus
  ref <308>: DATABASE ACCESSION NUMBER: EMBL / AA893667
  ref <309>: DATABASE ENTRY DATE: 2000-03-03
aaagacagacccacaacgcctttcaaaggtgaaaaagaaaatgccctttccctcctgggtcgagggtgaggggaaggatagaggtcaattcattcttctctcagactcgctctcatccactgggtgtcctcggggaggaccgttttctggaagccagtgcagaagggtgccctgttctctctggtgtcccaagctcagctctgtccagtgtccgaggagcctcctcccaggaacaggggctggctgtccctgtgtgggtcggaagaagtcagtcctgctccatctcgatgagcgctgcgctgccgctccatctcaccgtggcagcagcgtgtaccccctgagggcgggctggtcagctggggcatctggttcagtccaggcaggcccatcagaagccaaacatcatgtcggcaatttggacctgcactctggagctggggtccaataactctgcctcactcatccttgcttgtcatcagattttg

SEQ ID NO: 6080 - protein, 227 aa, Rattus norvegicus
  ref <308>: DATABASE ACCESSION NUMBER: SWISS-Prot / AAK69754
  ref <309>: DATABASE ENTRY DATE: 2003-02-01
MGGKQSTAARSRGPFPGVSTDDSAVPPPGGAPHFGHYRTGGGAMGLRSRSVSSVAGMGMDPSTAGGVPFSLYTPASRGTGDSERAPGGGGSTSDSTYAHGNGYQETGGGHHRDGMLYLGSRASLADALPLHIAPRWFSSHSGFKCPICSKSVASDEMEMHFIMCLSKPRLSYNDDVLTKDAGECVICLEELLQGDTIARLPCLCIYHKSCIDSWFEVNRSCPEHPAD

SEQ ID NO: 6081 - DNA, 1260 bp, Homo sapiens
  ref <308>: DATABASE ACCESSION NUMBER: EMBL / BC007235
  ref <309>: DATABASE ENTRY DATE: 2001-07-13
ccctgcggctcccccggctttcggagcccgggggcggcctgtggcgcgcggagcccgcgccggactgcgcctctttggaccttgaggggaaacatgcgtttgccttggatcgtttgaaattctgagtttgggatccccgcccgcccgcctgcctcttccgccccgcgggttttttccttttttccttttgctttttttccttttctccctccgggtctcctttttgactccctccccctttatgctcgcccagccctccccctgctgctgagaagtgggggagggtctcggcctccaggttcccgccccaccggggcccgggcgagcatggggggcaagcagagcacggcggcccgctcccggggccccttcccgggggtctccaccgatgacagcgccgtgccgccgccgggaggggcgccccatttcgggcactaccggacgggcggcggggccatggggctgcgcagccgctcggtcagctcggtggcaggcatgggcatggaccccagcacggccgggggggtgccctttggcctctacacccccgcctcccggggcaccggcgactccgagagggcgcccggcggcggagggtctgcgtccgactccacctatgcccatggcaatggttaccaggagacgggcggcggtcaccatagagacgggatgctgtacctgggctcccgagcctcgctggcggatgctctacctctgcacatcgcacccaggtggttcagctcgcatagtggtttcaagtgccccatttgctccaagtctgtggcttctgacgagatggaaatgcactttataatgtgtttgagcaaacctcgcctctcctacaacgatgatgtgctgactaaagacgcgggtgagtgtgtgatctgcctggaggagctgctgcagggggacacgatagccaggctgccctgcctgtgcatctatcacaaaagctgcatagactcgtggtttgaagtgaacagatcttgtccggaacaccctgcggactgacctgcgggcttgcttgctgactcctctcaaagatcatggttctcccttcctccctgaggacaccaaattggatgagagcaagtttgagagaagaatgaatcaactgctatccttcccctcacccctcagcccaggagggaaagggcattttctttttcatctttgaaaggcattgtgggtctgtctttaaagtgtttacaaaaaaaaattatataaaaaaaaaaaaaaaaaaaaaaaaaaaaaaaaaaa

SEQ ID NO: 6082 - protein, 227 aa, Homo sapiens
MGGKQSTAARSRGPFPGVSTDDSAVPPPGGAPHFGHYRTGGGAMGLRSRSVSSVAGMGMDPSTAGGVPFGLYTPASRGTGDSERAPGGGGSASDSTYAHGNGYQETGGGHHRDGMLYLGSRASLADALPLHIAPRWFSSHSGFKCPICSKSVASDEMEMHFIMCLSKPRLSYNDDVLTKDAGECVICLEELLQGDTIARLPCLCIYHKSCIDSWFEVNRSCPEHPAD

SEQ ID NO: 6083 - DNA, 485 bp, Rattus norvegicus; identical to SEQ ID NO: 6079
  ref <308>: DATABASE ACCESSION NUMBER: EMBL / AA893667
  ref <309>: DATABASE ENTRY DATE: 2000-03-03

SEQ ID NO: 6084 - protein, 227 aa, Rattus norvegicus; identical to SEQ ID NO: 6080
  ref <308>: DATABASE ACCESSION NUMBER: SWISS-Prot / AAK69754
  ref <309>: DATABASE ENTRY DATE: 2003-02-01

SEQ ID NO: 6085 - DNA, 1260 bp, Homo sapiens; identical to SEQ ID NO: 6081
  ref <308>: DATABASE ACCESSION NUMBER: EMBL / BC007235
  ref <309>: DATABASE ENTRY DATE: 2001-07-13

SEQ ID NO: 6086 - protein, 227 aa, Homo sapiens; identical to SEQ ID NO: 6082

SEQ ID NO: 6087 - DNA, 485 bp, Rattus norvegicus; identical to SEQ ID NO: 6079
  ref <308>: DATABASE ACCESSION NUMBER: EMBL / AA893667
  ref <309>: DATABASE ENTRY DATE: 2000-03-03

SEQ ID NO: 6088 - protein, 227 aa, Rattus norvegicus; identical to SEQ ID NO: 6080
  ref <308>: DATABASE ACCESSION NUMBER: SWISS-Prot / AAK69754
  ref <309>: DATABASE ENTRY DATE: 2003-02-01

SEQ ID NO: 6089 - DNA, 1260 bp, Homo sapiens; identical to SEQ ID NO: 6081
  ref <308>: DATABASE ACCESSION NUMBER: EMBL / BC007235
  ref <309>: DATABASE ENTRY DATE: 2001-07-13

SEQ ID NO: 6090 - protein, 227 aa, Homo sapiens; identical to SEQ ID NO: 6082

SEQ ID NO: 6091 - DNA, 485 bp, Rattus norvegicus; identical to SEQ ID NO: 6079
  ref <308>: DATABASE ACCESSION NUMBER: EMBL / AA893667
  ref <309>: DATABASE ENTRY DATE: 2000-03-03

SEQ ID NO: 6092 - protein, 227 aa, Rattus norvegicus; identical to SEQ ID NO: 6080
  ref <308>: DATABASE ACCESSION NUMBER: SWISS-Prot / AAK69754
  ref <309>: DATABASE ENTRY DATE: 2003-02-01

SEQ ID NO: 6093 - DNA, 1260 bp, Homo sapiens; identical to SEQ ID NO: 6081
  ref <308>: DATABASE ACCESSION NUMBER: EMBL / BC007235
  ref <309>: DATABASE ENTRY DATE: 2001-07-13

SEQ ID NO: 6094 - protein, 227 aa, Homo sapiens; identical to SEQ ID NO: 6082

SEQ ID NO: 6095 - DNA, 485 bp, Rattus norvegicus; identical to SEQ ID NO: 6079
  ref <308>: DATABASE ACCESSION NUMBER: EMBL / AA893667
  ref <309>: DATABASE ENTRY DATE: 2000-03-03

SEQ ID NO: 6096 - protein, 227 aa, Rattus norvegicus; identical to SEQ ID NO: 6080
  ref <308>: DATABASE ACCESSION NUMBER: SWISS-Prot / AAK69754
  ref <309>: DATABASE ENTRY DATE: 2003-02-01

SEQ ID NO: 6097 - DNA, 1260 bp, Homo sapiens; identical to SEQ ID NO: 6081
  ref <308>: DATABASE ACCESSION NUMBER: EMBL / BC007235
  ref <309>: DATABASE ENTRY DATE: 2001-07-13

SEQ ID NO: 6098 - protein, 227 aa, Homo sapiens; identical to SEQ ID NO: 6082

SEQ ID NO: 6099 - DNA, 485 bp, Rattus norvegicus; identical to SEQ ID NO: 6079
  ref <308>: DATABASE ACCESSION NUMBER: EMBL / AA893667
  ref <309>: DATABASE ENTRY DATE: 2000-03-03

SEQ ID NO: 6100 - protein, 227 aa, Rattus norvegicus; identical to SEQ ID NO: 6080
  ref <308>: DATABASE ACCESSION NUMBER: SWISS-Prot / AAK69754
  ref <309>: DATABASE ENTRY DATE: 2003-02-01

SEQ ID NO: 6101 - DNA, 1260 bp, Homo sapiens; identical to SEQ ID NO: 6081
  ref <308>: DATABASE ACCESSION NUMBER: EMBL / BC007235
  ref <309>: DATABASE ENTRY DATE: 2001-07-13

SEQ ID NO: 6102 - protein, 227 aa, Homo sapiens; identical to SEQ ID NO: 6082

SEQ ID NO: 6103 - DNA, 461 bp, Rattus norvegicus
  ref <308>: DATABASE ACCESSION NUMBER: EMBL / AA893670
  ref <309>: DATABASE ENTRY DATE: 2000-03-03
ggtagaaaaatcattgtattgaataatcacaatatttctctatagacagatctctacagttccagtgctctagggaaatgcttccagaataccagttgatttcagaatacaagctttgtccagaccactgtccacttaataaatattgaaacctatactactgagactcagactttattaagattttcacatataatagagcatagtttccattgcatccaaggagcaatcagggatggcagcatgtcattttgtaacaactgtcactgtggcttttcgattctggtttgcagaaaccttatcctcagttaaatctagtcatgcttttaagaaatgctttaggtcactccaagcttggcaattaacatttggcatgaacaagggtaaaaccagcacaatagagaacagacacaacctcacaggccataaacacatacagcaaaggatgaaaaaagagaaag

SEQ ID NO: 6104 - DNA, 497 bp, Rattus norvegicus
  ref <308>: DATABASE ACCESSION NUMBER: EMBL / AA893683
  ref <309>: DATABASE ENTRY DATE: 2000-03-03
gagaaactaaggtattttatttgaaggaacccaagtgaatgccaagtgtaaaaggtggagtgctgggaggcaaggctgtcagtgcactggcggcgtcagagcctcgtacagtctctgggcggccagttccaccatttctcggagggactcatcatcctcacttccttcttcacattctacagcccgagtctccaaattaatatttgctgtttttccatccaccgtgacactgaggacagagtcatctttcacactgacacagtcttctccaaatatgtcctggagcatgacctcaagcctcttgctgtaaacgtgcatctctagcttcttagagaccttctgcactgcacctttccttatttttggattcgactgaacttccaatatcacggtggtcactgtgtctgcatacatgtcgttagaggggttcgccagccactccaggaccaccatgcccggctcctgcaccacggtgatgcttttgaataccttcaaag

SEQ ID NO: 6105 - protein, 684 aa, Rattus norvegicus
  ref <308>: DATABASE ACCESSION NUMBER: Refseq / NP_061283
  ref <309>: DATABASE ENTRY DATE: 2002-01-07
MSAIPAEESDQLLIRPLGAGQEVGRSCIILEFKGRKIMLDCGIHPGLEGMDALPYIDLIDPAEIDLLLISHFHLDHCGALPWFLQKTSFKGRTFMTHATKAIYRWLLSDYVKVSNISADDMLYTETDLEESMDKIETINFHEVKEVAGIKFWCYHAGHVLGAAMFMIEIAGVKLLYTGDFSRQEDRHLMAAEIPNIKPDILIIESTYGTHIHEKREEREARFWHTVHDIVNRGGRGLIPVFALGRAQELLLILDEYWQNHPELHDIPIYYASSLAKKCMAVYQTYVNAMNDKIRKQININNPFVFKHISNLKSMDHFDDIGPSVVMASPGMIQNGLSRELFESWCTDKRNGVIIAGYCVEGTLAKHIMSEPEEITTMSGQKLPLKMSVDYISFSAHTDYQQTSEFIRALKPPHVILVHGEQNEMARLKAALIREYEDNDEVHIEVHNPRNTEAVTLNFRGEKLAKVMGFLADKKPEQGQRVSGILVKRNFNYHILSPCDLSNYTDLAMSTVKQTQAIPYTGPFYLLYYQLQKLTGDVEELDIQEKPALKVFKSITVVQEPGMVGSEWLANPSNDMYADTVTTVILEVQSNPKIRKGAVQKVSKKLEMHVYSKRLEVMLQDIFGEDCVSVKDDSVLSVTVDGKTANINLETRAVECEEGSEDDESLREMVELAAQRLYEALTPVH

SEQ ID NO: 6106 - DNA, 2286 bp, Homo sapiens
  ref <308>: DATABASE ACCESSION NUMBER: Refseq / NM_016207
  ref <309>: DATABASE ENTRY DATE: 2002-11-05
gttcctcacccccgcttcgccctcacactttcgggatgtctgcgattcctgctgaggagagcgaccagctgctgatccgaccccttggagctgggcaagaagtaggaagatcatgtattattctcgagttcaaaggaagaaaaataatgctcgactgtgggatccaccctggcctagaaggaatggatgctcttccttatattgatttaattgacccagctgagattgatctcctattaattagtcatttccatttggatcactgtggagctctgccctggtttctacagaagacaagtttcaaaggaagaacatttatgactcatgccacaaaagctatttatagatggcttctttctgattatgtcaaagttagtaacatatcagcagacgacatgctgtataccgagacagatttggaagaaagcatggacaaaattgaaactatcaactttcatgaagttaaggaagttgcgggaatcaagttttggtgttaccatgcaggtcacgtcctaggagccgccatgttcatgattgagatcgcaggcgtgaagcttttgtacactggtgatttctcaagacaagaagataggcacttaatggcagctgaaattcctaatattaagcctgatattcttatcattgaatctacttatgggacccatatccatgagaaacgtgaagagcgagaagcaagattctgtaacactgtccacgatattgtaaacagaggaggcaggggtctcattcctgtctttgctcttggaagggctcaggagctgctcttgattctagatgagtactggcagaatcacccagaactacatgacattccaatatactatgcatcatctttggccaagaagtgtatggcagtgtaccagacatatgtaaatgccatgaatgacaaaatccgcaaacagatcaacatcaataatccctttgttttcaaacacattagtaacctcaagagcatggatcattttgatgacattggtcccagtgttgtaatggcctccccaggcatgatgcaaagtggcttatccagagaattatttgaaagctggtgtactgataagaggaatggtgtcattatagcgggatactgtgtagaagggacacttgccaagcacatcatgtctgaacctgaagaaatcactactatgtctggacagaagttaccactgaaaatgtctgttgattacatttctttctcagctcacacggattaccagcaaaccagtgaatttattcgtgctttgaaaccgcctcatgtgattttagtccatggagaacagaatgaaatggccagattgaaagcagcactgattcgagaatatgaagataacgatgaagttcacatagaggttcataatcctcggaatacagaagcagtgaccttaaacttcagaggagaaaaactagccaaggttatgggatttttagcagacaaaaaaccagaacaaggccagcgggtctcaggaatacttgttaaaagaaactttaattatcacatactttctccttgcgacctgtccaattatactgacctggccatgagcacggtgaagcagacccaagccattccatatactggtccctttaatttgctctgttaccagctgcagaaattgacaggtgatgtggaagaattagaaattcaagaaaaacctgctctgaaagtgttcaaaaatattactgtaatacaagaaccaggcatggtggtattagaatggctggcaaacccttctaatgatatgtatgcagatacagtaacaactgtgatattggaagttcagtcaaatcccaaaataagaaaaggtgcagtacagaaggtttctaaaaaattagaaatgcacgtttacagcaagaggttggagatcatgctccaggacatatttggagaagactgtgtaagtgtaaaggatgactctattcttagcgtcacagtggacgggaaaactgccaaccttaacttggagacacggactgtagaatgtgaagagggaagtgaagacgatgaatccctccgagaaatggtggagctggctgcacagagactgtacgaggccctgacgccagttcactgagactgtgcctgtatatgaactttgaaaaaatacttgactctacttttgttacctaaaataaaatgcattcgtttctctgggaaaaaaaaaaaaaaaaaaaaaaaaaaaaaaaaaaaaaaaaaaaaaaaaaaaaaaaaaaaaaaaaaaaaaaaaaaaaaaaaaaaaaaaaaaaaaaaaaaaaaaaaaaaaaaaaaaa

SEQ ID NO: 6107 - protein, 684 aa, Homo sapiens
  ref <308>: DATABASE ACCESSION NUMBER: SWISS-Prot / Q9UKF6
  ref <309>: DATABASE ENTRY DATE: 2002-06-15
MSAIPAEESDQLLIRPLGAGQEVGRSCIILEFKGRKIMLDCGIHPGLEGMDALPYIDLIDPAEIDLLLISHFHLDHCGALPWFLQKTSFKGRTFMTHATKAIYRWLLSDYVKVSNISADDMLYTETDLEESMDKIETINFHEVKEVAGIKFWCYHAGHVLGAAMFMIEIAGVKLLYTGDFSRQEDRHLMAAEIPNIKPDILIIESTYGTHIHEKREEREARFCNTVHDIVNRGGRGLIPVFALGRAQELLLILDEYWQNHPELHDIPIYYASSLAKKCMAVYQTYVNAMNDKIRKQININNPFVFKHISNLKSMDHFDDIGPSVVMASPGMMQSGLSRELFESWCTDKRNGVIIAGYCVEGTLAKHIMSEPEEITTMSGQKLPLKMSVDYISFSAHTDYQQTSEFIRALKPPHVILVHGEQNEMARLKAALIREYEDNDEVHIEVHNPRNTEAVTLNFRGEKLAKVMGFLADKKPEQGQRVSGILVKRNFNYHILSPCDLSNYTDLAMSTVKQTQAIPYTGPFNLLCYQLQKLTGDVEELEIQEKPALKVFKNITVIQEPGMVVLEWLANPSNDMYADTVTTVILEVQSNPKIRKGAVQKVSKKLEMHVYSKRLEIMLQDIFGEDCVSVKDDSILSVTVDGKTANLNLETRTVECEEGSEDDESLREMVELAAQRLYEALTPVH

SEQ ID NO: 6108 - DNA, 492 bp, Rattus norvegicus
  ref <308>: DATABASE ACCESSION NUMBER: EMBL / AA893690
  ref <309>: DATABASE ENTRY DATE: 2000-03-03
aataaggtgttctgaggaaccaggaaattaacagagaggggcgaataagtaatgcttcttaagccctgctcagtatttcgtcagtcatcttctggtaactggatcttgctgggatcaaaatagttggattccatgatggggaggccgttgagttctcggtatttcacaagtctctcagcttcccggcgggcccactcttgcatcctagattttgactttattttcaaatgaataattgtccttacctacttgtttgggagtactcgccctgtctgttaagctgcaccagaaagtgctatttataaaggttaaaaaatgtttggatgttggcaatttcctatgggttcacttaatctatagcaccctatacatttaagatcctcaactagaggttaggtacttatatattaggtcttttcaaatacacaaacctcctaatatgcccagtagagaggaaatggcaataataaacaccttataattctgagtatt

SEQ ID NO: 6109 - protein, 133 aa, Rattus norvegicus
  ref <308>: DATABASE ACCESSION NUMBER: Refseq / NP_062308
  ref <309>: DATABASE ENTRY DATE: 2002-01-07
MRGLPAARVRWESSRAVIAPSGVEKKRQREPTMQWQEDPEPEDENVYAKNPDFHGYDSDPVVDVWNMRAVFFFGFSIVLVFGTTFVAYVPDYRMQEWARREAERLVKYREVNGLPIMESNYFDPSKIQLPEDD

SEQ ID NO: 6110 - DNA, 386 bp, Homo sapiens
  ref <308>: DATABASE ACCESSION NUMBER: EMBL / AA286860
  ref <309>: DATABASE ENTRY DATE: 2000-03-03
ttcagactttcagcccctttaattaggtgctctgagaagaggtcagaatggcaggcagggggtggggaaggcggtgcttcttgagccccacttagcaactggtcactcatcctctggcagctggatcttgctggggtcgaagcagttggattccatgatgggaaggccattggctctcggtatttcacaagcctctcagcttcgcggcgggaccactctttcatcccatcccacgctcttggacaccctgtgcacctgtagtcaggcagataggccacaaaggtgctgccaaggaccaggatgatggagacgccaaagaagaagacaagtcgcatgttccagacgtccaaaacggggtccttgtcataaccatgggagtctgggtt

SEQ ID NO: 6111 - protein, 153 aa, Homo sapiens
  ref <308>: DATABASE ACCESSION NUMBER: SWISS-Prot / AAH10665
  ref <309>: DATABASE ENTRY DATE: 2002-10-01
MAAGLFGLSARRLLAAAATRGLPAARVRWESSFSRTVVAPSAVAGKRPPEPTTPWQEDPEPEDENLYEKNPDSHGYDKDPVLDVWNMRLVFFFGVSIILVLGSTFVAYLPDYRMKEWSRREAERLVKYREANGLPIMESNCFDPSKIQLPEDE

SEQ ID NO: 6112 - DNA, 472 bp, Rattus norvegicus
  ref <308>: DATABASE ACCESSION NUMBER: EMBL / AA893717
  ref <309>: DATABASE ENTRY DATE: 2000-03-03
ccacataatattccaaatacatgtcttacagataagggttagtatgagtatcagaaaacatcccagggaaggaagccattttagacactggaaaatgctaaccaaaaaaccaatgcttacatacacatgtctggaaaaagctcaccacctaaagtgcaaagacagaagcaactaacgttctcgctgtatgaaaatagacaatcttctgaactattagctggctttttaaataggctccactggacaaaggacaaagggtcagtcgtcagaatgaatcaggctttaaaccaatctggctttgaccccaatcaactgcaaacaaagtccaggttgaggctgactagagactacacgccacgtgggatcatagcctctagcactttctacaactcagacttaacccagttagaagtgagtatcctcagatcagtgcctcggcctacccgccgcacaaggctcccggacatgtgtc

SEQ ID NO: 6113 - protein, 628 aa, Rattus norvegicus
  ref <308>: DATABASE ACCESSION NUMBER: SWISS-Prot / AAH10715
  ref <309>: DATABASE ENTRY DATE: 2002-10-01
MDTTMVNLWTLFEQLVRRMEIINEGNESIEFIQVVKDFEDFRKKYQRTNQELEKFKDLLLKAETGRSALDVKLKHARNQVDVEIKRRQRAEAECAKLEQQIQLIRDILMCDTSGSIQLSEEQKSALAFLNRGQASSGHAGNNRLSTIDESGSILSDISFDKTDESLDWDSSLVKNFKMKKREKRRSNSRQFIDGPPGPVKKTCSIGSTVDQANESIVAKTTVTVPSDGGPIEAVSTIETLPSWTRSRGKSGPLQPVNSDSALNSRPLEPRTDTDNLGTPQNTGGMRLHDFVSKTVIKPESCVPCGKRIKFGKLSLKCRDCRLVSHPECRDRCPLPCIPPLVGTPVKIGEGMLADFVSQASPMIPAIVVSCVNEIEQRGLTEAGLYRISGCDRTVKELKEKFLKVKTVPLLSKVDDIHVICSLLKDFLRNLKEPLLTFWLSKAFMEAAEITDEDNSTAAMYQAVSELPQANRDTLAFLMIHLQRVSQSPDTKMDIANLAKVFGPTIVAHTVPNPDPVTMFQDIKRQLKVVERLLSLPLEYWNQFMMVDQENIDSQRGNGNSTPRTPDVKVSLLGPVTTPEFQLVKTPLSSSLSQRLYNLSKSTPRFGNKSKSATNLGQQGKFFPAPYLK

SEQ ID NO: 6114 - DNA, 3237 bp, Homo sapiens
  ref <308>: DATABASE ACCESSION NUMBER: EMBL / AL136794
  ref <309>: DATABASE ENTRY DATE: 2002-03-20
gcgaagtgaagggtggcccaggtggggccaggctgactgaatgtatctcctagctatggactaaataatacatggggggaaataaacaagtattcatgagggtgaaaatgtgacccagcaggaaaattacaactattttcaattgacgttgaataggatgagtcatggaatttaagtgatttactgaagattatactactggtagatagaagagctaaagaaagatggatactatgatgctgaatgtgcggaatctgtttgagcagcttgtgcgccgggtggagattctcagtgaaggaaatgaagtccaatttatccagttggcgaaggactttgaggatttccgtaaaaagtggcagaggactgaccatgagctggggaaatacaaggatcttttgatgaaagcagagactgagcgaagtgctctggatgttaagctgaagcatgcacgtaatcaggtggatgtagagatcaaacggagacagagagctgaggctgactgcgaaaagctggaacgacagattcagctgattcgagagatgctcatgtgtgacacatctggcagcattcaactaagcgaggagcaaaaatcagctctggcttttctcaacagaggccaaccatccagcagcaatgctgggaacaaaagactatcaaccattgatgaatctggttccattttatcagatatcagctttgacaagactgatgaatcactggattgggactcttctttggtgaagactttcaaactgaagaagagagaaaagaggcgctctactagccgacagtttgttgatggtccccctggacctgtaaagaaaactcgttccattggctctgcagtagaccaggggaatgaatccatagttgcaaaaactacagtgactgttcccaatgatggcgggcccatcgaagctgtgtccactattgagactgtgccatattggaccaggagccgaaggaaaacaggtactttacaaccttggaacagtgactccaccctgaacagcaggcagctggagccaagaactgagacagacagtgtgggcacgccacagagtaatggagggatgcgcctgcatgactttgtttctaagacggttattaaacctgaatcctgtgttccatgtggaaagcggataaaatttggcaaattatctctgaagtgtcgagactgtcgtgtggtctctcatccagaatgtcgggaccgctgtccccttccctgcattcctaccctgataggaacacctgtcaagattggagagggaatgctggcagactttgtgtcccagacttctccaatgatcccctccattgttgtgcattgtgtaaatgagattgagcaaagaggtctgactgagacaggcctgtataggatctctggctgtgaccgcacagtaaaagagctgaaagagaaattcctcagagtgaaaactgtacccctcctcagcaaagtggatgatatccatgctatctgtagccttctaaaagactttcttcgaaacctcaaagaacctcttctgacctttcgccttaacagagcctttatggaagcagcagaaatcacagatgaagacaacagcatagctgccatgtaccaagctgttggtgaactgccccaggccaacagggacacattagctttcctcatgattcacttgcagagagtggctcagagtccacatactaaaatggatgttgccaatctggctaaagtctttggccctacaatagtggcccatgctgtgcccaatccagacccagtgacaatgttacaggacatcaagcgtcaacccaaggtggttgagcgcctgctttccttgcctctggagtattggagtcagttcatgatggtggagcaagagaacattgaccccctacatgtcattgaaaactcaaatgccttttcaacaccacagacaccagatattaaagtgagtttactgggacctgtgaccactcctgaacatcagcttctcaagactccttcatctagttccctgtcacagagagtccgttccaccctcaccaagaacactcctagatttgggagcaaaagcaagtctgccactaacctaggacgacaaggcaacttttttgcttctccaatgctcaagtgaagtcacatctgcctgttacttcccagcattgactgactataagaaaggacacatctgtactctgctctgcagcctcctgtactcattactacttttagcattctccaggcttttactcaagtttaattgtgcatgagggttttattaaaactatatatatctccccttccttctcctcaagtcacataatatcagcactttgtgctggtcattgttgggagcttttagatgagacatctttccaggggtagaagggttagtatggaattggttgtgattctttttggggaagggggttattgttcctttggcttaaagccaaatgctgctcatagaatgatctttctctagtttcatttagaactgatttccgtgagacaatgacagaaaccctacctatctgataagattagcttgtctcagggtgggaagtgggagggcagggcaaagaaaggattagaccagaggatttaggatgcctccttctaagaaccagaagttctcattccccattatgaactgagctataatatggagctttcataaaaatgggatgcattgaggacagaactagtgatgggagtatgcgtagctttgatttggatgattaggtctttaatagtgttgagtggcacaaccttgtaaatgtgaaagtacaactcgtatttatctctgatgtgccgctggctgaactttgggttcatttggggtcaaagccagtttttcttttaaaattgaattcattctgatgcttggcccccatacccccaaccttgtccagtggagcccaacttctaaaggtcaatatatcatcctttggcatcccaactaacaataaagagtaggctataagggaagattgtcaatattttgtggtaagaaaagctacagtcattttttctttgcactttggatgctgaaatttttcccatggaacatagccacatctagatagatgtgagctttttcttctgttaaaattattcttaatgtctgtaaaaacgattttcttctgtagaatgtttgacttcgtattgacccttatctgtaaaacacctatttgggataatatttggaaaaaaagtaaatagctttttcaaaatgaaaaaaaaaa

SEQ ID NO: 6115 - protein, 632 aa, Homo sapiens
  ref <308>: DATABASE ACCESSION NUMBER: SWISS-Prot / CAB66728
  ref <309>: DATABASE ENTRY DATE: 2003-02-01
MDTMMLNVRNLFEQLVRRVEILSEGNEVQFIQLAKDFEDFRKKWQRTDHELGKYKDLLMKAETERSALDVKLKHARNQVDVEIKRRQRAEADCEKLERQIQLIREMLMCDTSGSIQLSEEQKSALAFLNRGQPSSSNAGNKRLSTIDESGSILSDISFDKTDESLDWDSSLVKTFKLKKREKRRSTSRQFVDGPPGPVKKTRSIGSAVDQGNESIVAKTTVTVPNDGGPIEAVSTIETVPYWTRSRRKTGTLQPWNSDSTLNSRQLEPRTETDSVGTPQSNGGMRLHDFVSKTVIKPESCVPCGKRIKFGKLSLKCRDCRVVSHPECRDRCPLPCIPTLIGTPVKIGEGMLADFVSQTSPMIPSIVVHCVNEIEQRGLTETGLYRISGCDRTVKELKEKFLRVKTVPLLSKVDDIHAICSLLKDFLRNLKEPLLTFRLNRAFMEAAEITDEDNSIAAMYQAVGELPQANRDTLAFLMIHLQRVAQSPHTKMDVANLAKVFGPTIVAHAVPNPDPVTMLQDIKRQPKVVERLLSLPLEYWSQFMMVEQENIDPLHVIENSNAFSTPQTPDIKVSLLGPVTTPEHQLLKTPSSSSLSQRVRSTLTKNTPRFGSKSKSATNLGRQGNFFASPMLK

SEQ ID NO: 6116 - DNA, 444 bp, Rattus norvegicus
  ref <308>: DATABASE ACCESSION NUMBER: EMBL / AA893733
  ref <309>: DATABASE ENTRY DATE: 2000-03-03
ggatgttgaaggcaaactctttattaggaaaaagaaaaaagggatgcacctggtctgctaaaaagggaggaccccatggttcgaacccatggagttctgagcaaaggtaactggctgcaaagaaaaaacaggtacttggccttatcaccagcccccaccctcaccctgctgtcattcttcctcttcctcttcctccaaaggtggtcgattccgcttgaagaagccagccttccacatggccaaaactagtagggtcagcagcagcagaccgcccagcacgcctaccagcacccaccagacagggatgtccctctcctccaaggcccgaagcagatgtgtctgcaccagaccttgcccgctgggcaagctgaccaccggcaccgagtacggtagggaggagacgttgaaccaggcgtgcgactgcagcacaaactgctcctgggg

SEQ ID NO: 6117 - DNA, 3333 bp, Homo sapiens
  ref <308>: DATABASE ACCESSION NUMBER: EMBL / M34480
  ref <309>: DATABASE ENTRY DATE: 1999-07-02
attcctgcctgggaggttgtggaagaaggaagatggccagagctttgtgtccactgcaagccctctggcttctggagtgggtgctgctgctcttgggagcttgtgctgcccctccagcctgggccttgaacctggacccagtgcagctcaccttctatgcaggccccaatggcagccagtttggattttcactggacttccacaaggacagccatgggagagtggccatcgtggtgggcgccccgcggaccctgggccccagccaggaggagacgggcggcgtgttcctgtgcccctggagggccgagggcggccagtgcccctcgctgctctttgacctccgtgatgagacccgaaatgtaggctcccaaactttacaaaccttcaaggcccgccaaggactgggggcgtcggtcgtcagctggagcgacgtcattgtggcctgcgccccctggcagcactggaacgtcctagaaaagactgaggaggctgagaagacgcccgtaggtagctgctttttggctcagccagagagcggccgccgcgccgagtactccccctgtcgcgggaacaccctgagccgcatttacgtggaaaatgattttagctgggacaagcgttactgtgaagcgggcttcagctcggtggtcactcaggccggagagctggtgcttggggctcctggcggctattatttcttaggtctcctggcccaggctccagttgcggatattttctcgagttaccgcccaggcatccttttgtggcacgtgtcctcccagagcctctcctttgactccagcaacccagagtacttcgacggctactgggggtactcggtggccgtgggcgagttcgacggggatctcaacactacagaatatgtcgtcggtgcccccacttggagctggaccctgggagcggtggaaattttggattcctactaccagaggctgcatcggctgcgcgcagagcagatggcgtcgtattttgggcattcagtcgctgtcactgacgtcaacggggatgggaggcatgatctgctggtgggcgctccactgtatatggacagccgggcagaccgaaaactggccgaagtggggcgtgtgtatttgttcctgcagccgcgaggcccccacgcgctgggtgcccccagcctcctgctgactggcacacagctctatgggcgattcggctctgccatcgcacccctgggcgacctcgaccgggatggctacaatgacattgcagtggctgccccctacgggggtcccagtggccggggccaagtgctggtgttcctgggtcagagtgaggggctgaggtcacgtccctcccaggtcctggacagccccttccccacaggctctgcctttggcttctcccttcgaggtgccgtagacatcgatgacaacggatacccagacctgatcgtgggagcttacggggccaaccaggtggctgtgtacagagctcagccagtggtgaaggcctctgtccagctactggtgcaagattcactgaatcctgctgtgaagagctgtgtcctacctcagaccaagacacccgtgagctgcttcaacatccagatgtgtgttggagccactgggcacaacattcctcagaagctatccctaaatgccgagctgcagctggaccggcagaagccccgccagggccggcgggtgctgctgctgggctctcaacaggcaggcaccaccctggacctggatctgggcggaaagcacagccccatctgccacaccaccatggccttccttcgagatgaggcagacttccgggacaagctgagccccattgtgctcagcctcaatgtgtccctaccgcccacggaggctggaatggcccctgctgtcgtgctgcatggagacacccatgtgcaggagcagacacgaatcgtcctggactgtggggaagatgacgtatgtgtgccccagcttcagctcactgccagcgtgacgggctccccgctcctagttggggcagataatgtcctggagctgcagatggacgcagccaacgagggcgagggggcctatgaagcagagctggcggtgcacctgccccagggcgcccactacatgcgggccctaagcaatgtcgagggctttgagagactcatctgtaatcagaagaaggagaatgagaccagggtggtgctgtgtgagctgggcaaccccatgaagaagaacgcccagataggaatcgcgatgttggtgagcgtggggaatctggaagaggctggggagtctgtgtccttccagctgcagatacggagcaagaacagccagaatccaaacagcaagattgtgctgctggacgtgccggtccgggcagaggcccaagtggagctgcgagggaactcctttccagcctccctggtggtggcagcagaagaaggtgagagggagcagaacagcttggacagctggggacccaaagtggagcacacctatgagctccacaacaatggccctgggactgtgaatggtcttcacctcagcatccaccttccgggacagtcccagccctccgacctgctctacatcctggatatacagccccaggggggccttcagtgcttcccacagcctcctgtcaaccctctcaaggtggactgggggctgcccatccccagcccctcccccattcacccggcccatcacaagcgggatcgcagacagatcttcctgccagagcccgagcagccctcgaggcttcaggatccagttctcgtaagctgcgactcggcgccctgtactgtggtgcagtgtgacctgcaggagatggcgcgcgggcagcgggccatggtcacggtgctggccttcctgtggctgcccagcctctaccagaggcctctggatcagtttgtgctgcagtcgcacgcatggttcaacgtgtcctccctcccctatgcggtgcccccgctcagcctgccccgaggggaagctcaggtgtggacacagctgctccgggccttggaggagagggccattccaatctggtgggtgctggtgggtgtgctgggtggcctgctgctgctcaccatcctggtcctggccatgtggaaggtcggcttcttcaagcggaaccggcacaccctggaagaagatgatgaagagggggagtgatggtgcagcctacactattctagcaggagggttgggcgtgctacctgcaccgccccttctccaacaagttgcctccaagctttgggttggagctgttccattgggtcctcttggtgtcgtttccctcccaacagagctgggctaccccccctcctgctgcctaataaagagactgagccct

SEQ ID NO: 6118 - protein, 1039 aa, Homo sapiens
  ref <308>: DATABASE ACCESSION NUMBER: SWISS-Prot / P08514
  ref <309>: DATABASE ENTRY DATE: 2002-06-15
MARALCPLQALWLLEWVLLLLGPCAAPPAWALNLDPVQLTFYAGPNGSQFGFSLDFHKDSHGRVAIVVGAPRTLGPSQEETGGVFLCPWRAEGGQCPSLLFDLRDETRNVGSQTLQTFKARQGLGASVVSWSDVIVACAPWQHWNVLEKTEEAEKTPVGSCFLAQPESGRRAEYSPCRGNTLSRIYVENDFSWDKRYCEAGFSSVVTQAGELVLGAPGGYYFLGLLAQAPVADIFSSYRPGILLWHVSSQSLSFDSSNPEYFDGYWGYSVAVGEFDGDLNTTEYVVGAPTWSWTLGAVEILDSYYQRLHRLRAEQMASYFGHSVAVTDVNGDGRHDLLVGAPLYMESRADRKLAEVGRVYLFLQPRGPHALGAPSLLLTGTQLYGRFGSAIAPLGDLDRDGYNDIAVAAPYGGPSGRGQVLVFLGQSEGLRSRPSQVLDSPFPTGSAFGFSLRGAVDIDDNGYPDLIVGAYGANQVAVYRAQPVVKASVQLLVQDSLNPAVKSCVLPQTKTPVSCFNIQMCVGATGHNIPQKLSLNAELQLDRQKPRQGRRVLLLGSQQAGTTLNLDLGGKHSPICHTTMAFLRDEADFRDKLSPIVLSLNVSLPPTEAGMAPAVVLHGDTHVQEQTRIVLDCGEDDVCVPQLQLTASVTGSPLLVGADNVLELQMDAANEGEGAYEAELAVHLPQGAHYMRALSNVEGFERLICNQKKENETRVVLCELGNPMKKNAQIGIAMLVSVGNLEEAGESVSFQLQIRSKNSQNPNSKIVLLDVPVRAEAQVELRGNSFPASLVVAAEEGEREQNSLDSWGPKVEHTYELHNNGPGTVNGLHLSIHLPGQSQPSDLLYILDIQPQGGLQCFPQPPVNPLKVDWGLPIPSPSPIHPAHHKRDRRQIFLPEPEQPSRLQDPVLVSCDSAPCTVVQCDLQEMARGQRAMVTVLAFLWLPSLYQRPLDQFVLQSHAWFNVSSLPYAVPPLSLPRGEAQVWTQLLRALEERAIPIWWVLVGVLGGLLLLTILVLAMWKVGFFKRNRPPLEEDDEEGE

SEQ ID NO: 6119 - DNA, 455 bp, Rattus norvegicus
  ref <308>: DATABASE ACCESSION NUMBER: EMBL / AA893742
  ref <309>: DATABASE ENTRY DATE: 2000-03-03
aagtctgcagtatgacatcatacatagagggaaaaagcttcttcctaaaagatagctattaataatcaaaccagatttgatgactgacctttcaaggtcttcttctgcattaacaagttaagttttagcaggtgtaaagcactgtacaaaaagtcgggtacattctcaaaattcaacacagggcttcccaaccaagagtttgctggatcagataccggagaagggtgtttcgttcaggtttaaatggtaaggaaatgagaaagcagacaaaacaagccaagcaaattcccttcccttggtgctcctctgtcgcctttccaaagtgtttcctggaggtcaggaagcctgggatgacaatcactgcagtcttttgacagcatgcacacaagtgcttcatgttcaaagacttaagggcagccctcttcaaatccttccttacgggctttacagagctt

SEQ ID NO: 6120 - protein, 251 aa, Rattus norvegicus
  ref <308>: DATABASE ACCESSION NUMBER: Refseq / NP_038944
  ref <309>: DATABASE ENTRY DATE: 2002-01-07
MDSRHLLTSQCITHLSSIEVRGNSIRILVMNVDVEAIQNTGSQSLHFLPCLICMWTISRSTRRHWAVLMDTSIFSGSCFFYFGVHSYSILLVAAVKDEVVGVGVRCAMKNRNLGFLTSVQMPILEGTFSCERLYISFWIFALFLYYRKVLCLRPTLNFMQYCWGITLFKAYGKVLKPDFPKIFNCFNPLTSVKVCSVLFYSTQLTMLRFISAENKIKHVKNGRLFVVTMQNKLWWEFGTFSLKKNMLVALP

SEQ ID NO: 6121 - DNA, 417 bp, Homo sapiens
  ref <308>: DATABASE ACCESSION NUMBER: EMBL / AI377110
  ref <309>: DATABASE ENTRY DATE: 2000-03-03
tttgtattggaatataatcttttattttaccactcaacgattaagccattcaactacacaacacagataaaacggaagttataacatataaaccagtacctgcccacactcatagcagtgaggggaataaaaatcaaggttgcactgtaattccatgactctaaaaatcaagtctatttgacattggtttgaagcaacagaacctttatagcagattcccctttttaaagaaaaacccaaggagagatgatcaagcacaaatgatcacttcatgcattttattgatagtctatattttaaatctgcagtatgacatcttacatagggaaaaaagcttcttcctaaaagataactattaataatcaaaccagctttaatatgattgacctttcaaggtcttgttttgctttaaacaag

SEQ ID NO: 6122 - DNA, 520 bp, Rattus norvegicus
  ref <308>: DATABASE ACCESSION NUMBER: EMBL / AA893743
  ref <309>: DATABASE ENTRY DATE: 2000-03-03
cagaaaacaagtgttgcttttaatatcaattattggagcatgcaacattgctaaatacaaaagtcatagaagctcacagatgacttcccaggctgtcgctagtcaatgaaggaacagttccgggcctctaagacatcattatggatcctttcttggtttaatttaacgactatactttcccccttactacggcaggtctcattcagaagcttgctgcccaacagttacattttttcttattcctctgagaaggataaagatgtcatttttaaaatctacattggttccatgctgtcatgtgtgcggaagactcagtggtaggctatcgacgggctatgttagtattccctgaaaaatgaagatcgtgatttctgttacagggcagaaagcatttctgtgagctcaggatgaatatgtactgacataaaatattctcagttaaaaaaaaaagttaaactcaacaaattcaacagcttctcattcattgttaatgtgttaaaaatggaaaattctgtgtttc

SEQ ID NO: 6123 - DNA, 389 bp, Homo sapiens
  ref <308>: DATABASE ACCESSION NUMBER: EMBL / AI092788
  ref <309>: DATABASE ENTRY DATE: 2000-03-03
tttttttttttttcaaaaaaatgggttacttttaattttcaattatgtgagcatgcaacattgctaaatacaaaagtcatacaagctcacaaatgacttcagagactgccactcttgtaattaaagaacaatttagggtctattaagacatcataaatcatagatcctttcctattttcacttgatgactacacattttctccctactactactgctactacaggtttcacttagaagctttgctgcccggcagttacatttctttatccattattgtttccctgaagagaaatagcagtatcattcatcttctaaaatggtgcattaccacagcatcttagtaagactcaagtatagggcatttaccattggctgttctgggagtatt

SEQ ID NO: 6124 - protein, 75 aa, Homo sapiens
  ref <308>: DATABASE ACCESSION NUMBER: SWISS-Prot / P04541
  ref <309>: DATABASE ENTRY DATE: 2002-06-15
TDVETTYADFIASGRTGRRNAIHDILVSSASGNSNELALKLAGLDINKTEGEEDAQRSSTEQSGEAQGEAAKSES

SEQ ID NO: 6125 - DNA, 520 bp, Rattus norvegicus; identical to SEQ ID NO: 6122
  ref <308>: DATABASE ACCESSION NUMBER: EMBL / AA893743
  ref <309>: DATABASE ENTRY DATE: 2000-03-03

SEQ ID NO: 6126 - DNA, 389 bp, Homo sapiens; identical to SEQ ID NO: 6123
  ref <308>: DATABASE ACCESSION NUMBER: EMBL / AI092788
  ref <309>: DATABASE ENTRY DATE: 2000-03-03

SEQ ID NO: 6127 - protein, 75 aa, Homo sapiens; identical to SEQ ID NO: 6124
  ref <308>: DATABASE ACCESSION NUMBER: SWISS-Prot / P04541
  ref <309>: DATABASE ENTRY DATE: 2002-06-15

SEQ ID NO: 6128 - DNA, 422 bp, Rattus norvegicus
  misc_feature (1)..(422): n=a, c, g or t
  ref <308>: DATABASE ACCESSION NUMBER: EMBL / AA893821
  ref <309>: DATABASE ENTRY DATE: 2000-03-03
agtcagcaaaatcaagtccacagcattttctagtctatctgtttcctaatcatttgacctaatatattttctaaaatcttccacattttaagaaaaacatgttttacctttctggcaacccacagtcaacttcccttattttccttcttagccagtagctaatgcactcaccttgaagtattaatgcccctcaaagggtagtggtaaacccaagctcaaagactgcaagatcagagtgtggggtaggagcacaggggcaaaccagcacccactgttctagaatccgaccagcaccaggatgtctctccctgtgtggttctgacctggctaagcacgtttcaagccctgtccgtggtacctaaggaggtccaccttgtttctgatcatggnctaactcacggatgacactanggcaggatcgg

SEQ ID NO: 6129 - protein, 108 aa, Rattus norvegicus
  ref <308>: DATABASE ACCESSION NUMBER: SWISS-Prot / BAB26137
  ref <309>: DATABASE ENTRY DATE: 2001-06-01
EPSPTAERTESLPGHHSGACGSAGAQVDSIVDPMLDLDIQELASLTTGGGDLENFERLFSKLKEMKDKAATLPHEQRKLHAEKVAKAFWMAIGGDRDEIEGLSSDDEH

SEQ ID NO: 6130 - DNA, 2105 bp, Homo sapiens
agcgcagctatggctgctggcgtaccctgtgcgttagtcaccagctgctcctccgtcttctcaggagaccagctggtccaacatatccttggaacagaagatcttattgtggaagtgacttccaatgatgctgtgagattttatccctggaccattgataataaatactattcagcagacatcaatctatgtgtggtgccaaacaaatttcttgttactgcagagattgcagaatctgtccaagcatttgtggtttactttgacagcacacaaaaatcgggccttgatagtgtctcctcatggcttccactggcaaaagcatggttacctgaggtgatgatcttggtctgcgatagagtgtctgaagatggtataaaccgacaaaaagctcaagaatggtgcatcaaacatggctttgaattggtagaacttagtccagaggagttgcctgaggaggatgatgacttcccagaatctacaggagtaaagcgaattgtccaagccctgaatgccaatgtgtggtccaatgtagtgatgaagaatgataggaaccaaggctttagccttctcaactcattgactggaacaaaccatagcattgggtcagcagatccctgtcacccagagcaaccccatttgccagcagcagatagtactgaatccctctctgatcatcggggtggtgcatctaacacaacagatgcccaggttgatagcattgtggatcccatgttagatctggatattcaagaattagccagtcttaccactggaggaggagatgtggagaattttgaaagactcttttcaaagttaaaggaaatgaaagacaaggctgcgacgcttcctcatgagcaaagaaaagtgcatgcagaaaaggtggccaaagcattctggatggcaatcgggggagacagagatgaaattgaaggcctttcatctgatgaagagcactgaattattcatactagggtttgaccaacaaagatgctagctgtctctgagatacctctctactcagcccagtcatattttgccaaaattgcccttatcatgttggctgcctgacttgtttatagggtccccttaattttagtttttagtaggaggttaaggagaaatcttttttttcctcagtatattgtaagagagtgaggaatacagtgatagtaatgagtgaggatttcttaaatatactttttttttgttctaggaatgagggtaggataaatctcagaggtctgtgtgatttactcaagttgaagacaacctccaggccattcctggtcaaccttttaagtagcatttccagcattcacacttgatactgcacatcaggagttgtgtcacctttcctgggtgatttgggttttctccattcaaggagcttgtagctctgagctatgatgcttttattgggaggaaaggaggcagctgcagaattgatgtgagctatgtggggccgaagtctcagcccgcagctaagtctctacctaagaaaatgcctctgggcattcttttgaagtatagtgtctgagctcatgctagaaagaatcaaaaagccagtgtggatttttagactgtaataaatgaggcaaaggatttctattccagtgggaagaaaacctctctactgagttgtgggggatatgttgtatgttagagagaaccttaaggagtccttgtatgggccatggagacagtatgtgataacataccgtgattttcatgaagaaattcttctgtcttagagttctcccctgctgcttgagatgccagagctgtgttgttgcacacctgcaaaacaaggcacatttccccctttctctttaaagccaaagagagatcactgccaaagtgggagcactaaggggtgggtggggaagtgaaatgttaggcgatgaattcctgagcaccttgtttttcttccaaggttcgtagctcctctctgcccttccaagcctgtaacctcggaggactatcttttgttctttatcctttgtcttgtttgagtgggtcagccccagaggaactgataagcaaatggcaagtttttaaaggaagagtggaaagtactgcaaataaaaatccttatttgtttttgt

SEQ ID NO: 6131 - protein, 315 aa, Homo sapiens
MAAGVPCALVTSCSSVFSGDQLVQHILGTEDLIVEVTSNDAVRFYPWTIDNKYYSADINLCVVPNKFLVTAEIAESVQAFVVYFDSTQKSGLDSVSSWLPLAKAWLPEVMILVCDRVSEDGINRQKAQEWCIKHGFELVELSPEELPEEDDDFPESTGVKRIVQALNANVWSNVVMKNDRNQGFSLLNSLTGTNHSIGSADPCHPEQPHLPAADSTESLSDHRGGASNTTDAQVDSIVDPMLDLDIQELASLTTGGGDVENFERLFSKLKEMKDKAATLPHEQRKVHAEKVAKAFWMAIGGDRDEIEGLSSDEEH

SEQ ID NO: 6132 - DNA, 417 bp, Rattus norvegicus
  ref <308>: DATABASE ACCESSION NUMBER: EMBL / AA893870
  ref <309>: DATABASE ENTRY DATE: 2000-03-03
cctactcaggctttattcaaagaccaagaggtataggtgcaagggagggaagaagggcctggtcagaaggcaagcccggcaggaggcggcttaaaacccaaaaggtcagaaggatcgtgaggccccgctttcacggtctgtattcgtactgaaaatcaagatcaagcgagcttttgcccttctgctccacgggaggtttctgtcctccctgagctcgccttaggacacctgcgttaccgtttgacaggtgtaccgccccagtcaaactccccacctggcactgtccccggagcgggtcgcgcccgcccgcacgcgcggacgggcgcttggagccagaagcgagagcccctcggggctcgcccccccgcctcaccgggtcagtgaaaaaacgatgagagtagtggtatttcaccggcg

SEQ ID NO: 6133 - DNA, 5025 bp, Homo sapiens
  ref <308>: DATABASE ACCESSION NUMBER: EMBL / M11167
  ref <309>: DATABASE ENTRY DATE: 2000-03-04
cgcgacctcagatcagacgtggcgacccgctgaatttaagcatattagtcagcggaggaaaagaaactaaccaggattccctcagtaacggcgagtgaacagggaagagcccagcgccgaatccccgccccgcggggcgcgggacatgtggcgtacggaagacccgctccccggcgccgctcgtggggggcccaagtccttctgatcgaggcccagcccgtggacggtgtgaggccggtagcggccggcgcgcgcccgggtcttcccggagtcgggttgcttgggaatgcagcccaaagcgggtggtaaactccatctaaggctaaataccggcacgagaccgatagtcaacaagtaccgtaagggaaagttgaaaagaactttgaagagagagttcaagagggcgtgaaaccgttaagaggtaaacgggtggggtccgcgcagtccgcccggaggattcaacccggcggcgggtccggccgtgtcggcggcccggcggatctttcccgccccccgttcctcccgacccctccacccgccctcccttcccccgccgcccctcctcctcctccccggagggggcgggctccggcgggtgcgggggtgggcgggcggggccgggggtggggtcggcgggggaccgtcccccggaccggcgaccggccgccgccgggcgcatttccaggcggtgcgccgcgaccggctccgggacggctgggaaggcccggcggggaaggtggctcggggggccccgtccgtccgtccgtcctcctcctcccccgtctccgccccccggccccgcgtcctccctcgggagggcgcgcgggtcggggcggcggcggcggcggcggtggcggcggcggcgggggcggcgggaccgaaaccccccccgagtgttacagcccccccggcagcagcactcgccgaatcccggggccgagggagcgagacccgtcgccgcgctctcccccctcccggcgcccacccccgcgggaatccccgcgaggggggtctcccccggcgcggcgccggcgtctcctcgtgggggggccgggccacccctcccacggcgcgaccgctctcccacccctcctccccgcgcccccgccccggcgacggggggggtgccgcgcgcgggtcggggggcggggcggactgtccccagtgcgccccgggcgggtcgcgccgtcgggcccgggggaggttctctcggggccacgcgcgcgtcccccgaagagggggacggcggagcgagcgcacggggtcggcggcgacgtcggctacccacccgacccgtcttgaaacacggaccaaggagtctaacacgtgcgcgagtcgggggctcgcacgaaagccgccgtggcgcaatgaaggtgaaggccggcgcgctcgccggccgaggtgggatcccgaggcctctccagtccgccgaggggcaccaccggcccgtctcgcccgccgcgccggggaggtggagcacgagcgcacgtgttaggacccgaaagatggtgaactatgcctgggcagggcgaagccagaggaaactctggtggaggtccgtagcggtcctgacgtgcaaatcggtcgtccgacctgggtataggggcgaaagactaatcgaaccatctagtagctggttccctccgaagtttccctcaggatagctggcgctctcgcagacccgacgcacccccgccacgcagttttatccggtaaagcgaatgattagaggtcttggggccgaaacgatctcaacctattctcaaactttaaatgggtaagaagcccggctcgctggcgtggagccggggtggaatgcgagtgcctagtgggccacttttggtaagcagaactggcgctgcgggatgaaccgaacgccgggttaaggcgcccgatgccgacgctcatcagaccccagaaaaggtgttggttgatatagacagcaggacggtggccatggaagtcggaatccgctaaggagtgtgtaacaactcacctgccgaatcaactagccctgaaaatggatggcgctggagcgtcgggcccatacccggccgtcgccggcagtcgagagtggacgggagcggcgggggcggcggcgcgcgcgcgcgtgtggtgtgcgtcggagggcggcggcggcggcggcggcgggggtgtggggtccttcccccgcccccccccccacgcctcctcccctcctcccgcccacgccccgctccccgcccccggagccccgcggagctacgccgcgacgagtaggagggccgctgcggtgagccttgaagcctagggcgcgggcccgggtggaggccgccgcaggtgcagatcttggtggtagtagcaaatattcaaacgagaactttgaaggccgaagtggagaagggttccatgtgaacagcagttgaacatgggtcagtcggtcctgagagatgggcgagcgccgttccgaagggacgggcgatggcctccgttgccctcggccgatcgaaagggagtcgggttcagatccccgaatccggagtggcggagatgggcgccgcgaggcgtccagtgcggtaacgcgaccgatcccggagaagccggcgggagccccggggagagttctcttttctttgtgaagggcagggcgccctggaatgggttcgccccgagagaggggcccgtgccttggaaagcgtcgcggttccggcggcgtccggtgagctctcgctggcccttgaaaatccgggggagagggtgtaaatctcgcgccgggccgtacccatatccgcagcaggtctccaaggtgaacagcctctggcatgttggaacaatgtaggtaagggaagtcggcaagccggatccgtaacttcgggataaggattggctctaagggctgggtcggtcgggctggggcgcgaagcggggctgggcgcgcgccgcggctggacgaggcgcgcgccccccccacgcccggggcacccccctcgcggccctcccccgccccacccgcgcgcgccgctcgctccctccccaccccgcgccctctctctctctctctcccccgctccccgtcctcccccctccccgggggagcgccgcgtgggggcgcggcggggggagaagggtcggggcggcaggggccgcgcggcggccgccggggcggccggcgggggcaggtccccgcgaggggggccccggggacccggggggccggcggcggcgcggactctggacgcgagccgggcccttcccgtggatcgccccagctgcggcgggcgtcgcggccgcccccggggagcccggcggcggcgcggcgcgccccccacccccaccccacgtctcggtcgcgcgcgcgtccgctgggggcgggagcggtcgggcggcggcggtcggcgggcggcggggcggggcggttcgtccccccgccctacccccccggccccgtccgccccccgttcccccctcctcctcggcgcgcggcggcggcggcggcaggcggcggaggggccgcgggccggtcccccccgccgggtccgcccccggggccgcggttccgcgcgcgcctcgcctcggccggcgcctagcagccgacttagaactggtgcggaccaggggaatccgactgtttaattaaaacaaagcatcgcgaaggcccgcggcgggtgttgacgcgatgtgatttctgcccagtgctctgaatgtcaaagtgaagaaattcaatgaagcgcgggtaaacggcgggagtaactatgactctcttaaggtagccaaatgcctcgtcatctaattagtgacgcgcatgaatggatgaacgagattcccactgtccctacctactatccagcgaaaccacagccaagggaacgggcttggcggaatcagcggggaaagaagaccctgttgagcttgactctagtctggcacggtgaagagacatgagaggtgtagaataagtgggaggcccccggcgcccccccggtgtccccgcgaggggcccggggcggggtccgcggccctgcgggccgccggtgaaataccactactctgatcgttttttcactgacccggtgaggcgggggggcgagcccgaggggctctcgcttctggcgccaagcgcccgcccggccgggcgcgacccgctccggggacagtgccaggtggggagtttgactggggcggtacacctgtcaaacggtaacgcaggtgtcctaaggcgagctcagggaggacagaaacctcccgtggagcagaagggcaaaagctcgcttgatcttgattttcagtacgaatacagaccgtgaaagcggggcctcacgatccttctgaccttttgggttttaagcaggaggtgtcagaaaagttaccacagggataactggcttgtggcggccaagcgttcatagcgacgtcgctttttgatccttcgatgtcggctcttcctatcattgtgaagcagaattcgccaagcgttggattgttcacccactaatagggaacgtgagctgggtttagaccgtcgtgagacaggttagttttaccctactgatgatgtgttgttgccatggtaatcctgctcagtacgagaggaaccgcaggttcagacatttggtgtatgtgcttggctgaggagccaatggggcgaagctaccatctgtgggattatgactgaacgcctctaagtcagaatcccgcccaggcgaacgatacggcagcgccgcggagcctcggttggcctcggatagccggtcccccgcctgtccccgccggcgggccgcccccccctccacgcgccccgccgcgggagggcgcgtgccccgccgcgcgccgggaccggggtccggtgcggagtgcccttcgtcctgggaaacggggcgcggccggaaaggcggccgccccctcgcccgtcacgcaccgcacgttcgtggggaacctggcgctaaaccattcgtagacgacctgcttctgggtcggggtttcgtacgtagcagagcagctccctcgctgcgatctattgaaagtcagccctcgacacaagggtttgtc

SEQ ID NO: 6134 - DNA, 417 bp, Rattus norvegicus; identical to SEQ ID NO: 6132
  ref <308>: DATABASE ACCESSION NUMBER: EMBL / AA893870
  ref <309>: DATABASE ENTRY DATE: 2000-03-03

SEQ ID NO: 6135 - DNA, 5025 bp, Homo sapiens; identical to SEQ ID NO: 6133
  ref <308>: DATABASE ACCESSION NUMBER: EMBL / M11167
  ref <309>: DATABASE ENTRY DATE: 2000-03-04

SEQ ID NO: 6136 - DNA, 417 bp, Rattus norvegicus; identical to SEQ ID NO: 6132
  ref <308>: DATABASE ACCESSION NUMBER: EMBL / AA893870
  ref <309>: DATABASE ENTRY DATE: 2000-03-03

SEQ ID NO: 6137 - DNA, 5025 bp, Homo sapiens; identical to SEQ ID NO: 6133
  ref <308>: DATABASE ACCESSION NUMBER: EMBL / M11167
  ref <309>: DATABASE ENTRY DATE: 2000-03-04

SEQ ID NO: 6138 - DNA, 417 bp, Rattus norvegicus; identical to SEQ ID NO: 6132
  ref <308>: DATABASE ACCESSION NUMBER: EMBL / AA893870
  ref <309>: DATABASE ENTRY DATE: 2000-03-03

SEQ ID NO: 6139 - DNA, 5025 bp, Homo sapiens; identical to SEQ ID NO: 6133
  ref <308>: DATABASE ACCESSION NUMBER: EMBL / M11167
  ref <309>: DATABASE ENTRY DATE: 2000-03-04

SEQ ID NO: 6140 - DNA, 510 bp, Rattus norvegicus
  ref <308>: DATABASE ACCESSION NUMBER: EMBL / AA893871
  ref <309>: DATABASE ENTRY DATE: 2000-03-03
gaaaaaccaaaatactttattgcaacaagaacaaaagaatcacatgcgtgacaaaagcatccatataacattatattccaaataaaacatctaaagcttggcattataattccagcagctaatataagtcactatttaagaaacattcccaaagaattaaaagtcaacacaaaaaaggttatcattaagttttccaaacacctttaatttaattggttttctataaagtacacatgaaaggagtcacaaatctaaaactccaaggatcagttgctacccggctcatccctttctcagtttgtttatgttgagggacacaatcaatctaggggagtctttaaattcaatcgaggggcctagagagaaagaagcagctgatcaaaataactgttatagtataaagatgctatttaaataaaagagaggaattggctatacatcttaagagggcttcaggttaatcctaaactctgtgcctcccactagcatttactaagcttatgttgaatg

SEQ ID NO: 6141 - DNA, 453 bp, Rattus norvegicus
  ref <308>: DATABASE ACCESSION NUMBER: EMBL / AA893924
  ref <309>: DATABASE ENTRY DATE: 2000-03-03
gccctcgggccggggttcaggtccttcccgcggctcgtgcacgactgcgcggctggacatggacacgaggcactcggcggcaaagtggtccacataggcggcggctgccatgctgcgggctcgggcgcgcggtgctctcgcaggagtcgtcagcggcgcatccgcacccacggcctccggagagcggcggggggcgggggcgcggcgcgccctcttctccggctgggctgggctaggctgggcgcgtagccgcttctgccgtcacccgcgcggctccgcgtcctcctggccgggcactggagggtgagcgcatggggggctccagtgaggtgggtccgcgtgcggcgtcagaaccggcctgtcctacggacgtcgagcggcggcgacgttaggcacgacccctgcaagttgcggtcgcagttccaccgtgcattgtggcaagcgggacagcct

SEQ ID NO: 6142 - protein, 289 aa, Rattus norvegicus
  ref <308>: DATABASE ACCESSION NUMBER: SWISS-Prot / AAF73964
  ref <309>: DATABASE ENTRY DATE: 2002-06-15
MAAAAYVDHFAAECLVSMSSRAVVHEPREGPEPRPEGAAAAAPTLPRVDERRDGKDSASLFVVARILADLNQQAPAPAPAERREGAAARKARTPCRLPPAPPAPPPGPEPASPGQAGAPAAPPSPAWSEPEAALEQEPGPAGSGEPGLRQRGRRGRSRADLESPQRKHKCHYAGCEKVYGKSSHLKAHLRTHTGERPFACSWQECNKKFARSDELARHYRTHTGEKKFSCPICEKRFMRSDHLTKHARRHANFHPGMLQRRGGGSRTGSLSDYSRSDASSPTISPASSP

SEQ ID NO: 6143 - DNA, 1360 bp, Homo sapiens
  ref <308>: DATABASE ACCESSION NUMBER: EMBL / BC013946
  ref <309>: DATABASE ENTRY DATE: 2001-09-11
ggcacgaggcgacttggcgaggtggtccctaacgttgccgctcggcatccttagaaccggccgcccctgacgccgcgcggggaccccagtcgcccgcgcgccccatgcgctcactcttcggtgcccggccgggccggcgcctcgcagacgcggagccgcgcgggtgacggcacaggcggctgcgcgcccagcccagcccagcccagcccgaggagagggcgcgccgcgcccccgccccccgcccgctctcccgaggccgtgggtgcggatgcgcggctgacgactcgcagcaagagcaccgccgccggccccagcccgcagcatggcagccgccgcctatgtggaccacttcgccgccgagtgcctcgtgtccatgtcgagccgcgcggtcgtgcacgggccgcgggaggggccggagtcccggcccgagggcgcggccgtggccgccacccccacgctgccccgcgtcgaggagcgccgcgacggtaaggacagcgcctcgctcttcgtggtggcgcggatcctagcggacctcaaccagcaagcgccggcgcccgccccggcggagcgcagggagggcgccgcggcccggaaggcgaggaccccctgccgcctgccgccgcccgcccccgagcccacctcccccggcgccgaaggcgcggcggccgcgccccccagcccggcgtggagcgagccggagcccgaggcggggctggagcccgagcgggagccggggcccgcggggagcggcgagcccggcctcagacaaagggtccggcggggccgaagtcgcgccgacctcgagtccccgcagaggaagcacaagtgccactacgcgggctgcgagaaagtttacgggaaatcttcgcacctcaaggcgcacctgagaactcacacaggtgagaggcccttcgcctgcagctggcaggactgcaacaagaagttcgcgcgctccgacgagctggcgcggcactaccgcacacacacgggcgagaagaagttcagctgccccatctgcgagaagcgcttcatgcgcagcgaccacctgaccaagcacgcgcgccgccacgccaacttccacccgggaatgctgcagcggcgcggcgggggctcgcggaccggctccctcagcgactacagccgctccgacgccagcagccccaccatcagcccggccagctcgccctgagcccgccacagccatgagcagccgctcccaccccctcgtgagtccctggcctttccttttgtaataagaaagaagagagagaacttgatgcaaagtccacgaaaaaacaatttttttcacctcaggtgtcaaagtaaatttgttaaaaaaaaaaaaaaaaaaaaaaaaaaa

SEQ ID NO: 6144 - protein, 288 aa, Homo sapiens
  ref <308>: DATABASE ACCESSION NUMBER: SWISS-Prot / Q9Y2Y9
  ref <309>: DATABASE ENTRY DATE: 2002-06-15
MAAAAYVDHFAAECLVSMSSRAVVHGPREGPESRPEGAAVAATPTLPRVEERRDGKDSASLFVVARILADLNQQAPAPAPAERREGAAARKARTPCRLPPPAPEPTSPGAEGAAAAPPSPAWSEPEPEAGLEPEREPGPAGSGEPGLRQRVRRGRSRADLESPQRKHKCHYAGCEKVYGKSSHLKAHLRTHTGERPFACSWQDCNKKFARSDELARHYRTHTGEKKFSCPICEKRFMRSDHLTKHARRHANFHPGMLQRRGGGSRTGSLSDYSRSDASSPTISPASSP

SEQ ID NO: 6145 - DNA, 416 bp, Rattus norvegicus
  ref <308>: DATABASE ACCESSION NUMBER: EMBL / AA893939
  ref <309>: DATABASE ENTRY DATE: 2000-03-03
acaaacaaaaataaatcccagagataatgaaataaacatattctctaaagtatcccatgctggtttctctgtccgagaatgtggtagagtccatgtttaagttcctggaacattcctggatgctatgaagtctccatcttgtaaccatgcttctccagctcagcgcgtaactgattggagaagtcgtcttctacattgtcatcatcccaattatcctcccagacatgtgcatcttcatcttcatctaagccggcccagtcttccgcgggaaactcctcgaactcgtcgtcctcttcaccacattctggataacaacaaaggaaacaacaggtcacatatcttacggaccatttcctcaccatcaaaaacatctggattcccctcagccagttacaggctagatgctcttgctgttt

SEQ ID NO: 6146 - protein, 70 aa, Rattus norvegicus
  ref <308>: DATABASE ACCESSION NUMBER: Refseq / NP_033195
  ref <309>: DATABASE ENTRY DATE: 2002-01-07
MSEKKQPVDLGLLEEDDEFEEFPAEDWAGLDEDEDAHVWEDNWDDDNVEDDFSNQLRAELEKHGYKMETS

SEQ ID NO: 6147 - DNA, 421 bp, Rattus norvegicus
  misc_feature (1)..(421): n=a, c, g or t
  ref <308>: DATABASE ACCESSION NUMBER: EMBL / AA893946
  ref <309>: DATABASE ENTRY DATE: 2000-03-03
aaaaaaatcaatttattgtaaatagagacatgcactcatactctccgtgcttccaggcacccacagggaagtctggcagttgtgtgggttctccatagggtgggtaatgaggctgagagtccctggttaaagaactaagttagagcaaaccagctatggatatttggtgctgcctgaagtgcagctccttggcatggggtgcacgtctacaggctccacaggacacattcccactggatccaacataaaggaacctctggggtcgggggtacatgtgttcatcctgaaatccttccggctggccaagacctcaccctgacagctgtacaaggggttgctgctcttttccacttcatcaggggccaccanggccatgggcacaaggggaatgataagcagttcactggatgcctggtcattt

SEQ ID NO: 6148 - DNA, 421 bp, Rattus norvegicus; identical to SEQ ID NO: 6147
  misc_feature (1)..(421): n=a, c, g or t
  ref <308>: DATABASE ACCESSION NUMBER: EMBL / AA893946
  ref <309>: DATABASE ENTRY DATE: 2000-03-03

SEQ ID NO: 6149 - DNA, 520 bp, Rattus norvegicus
  ref <308>: DATABASE ACCESSION NUMBER: EMBL / AA893970
  ref <309>: DATABASE ENTRY DATE: 2000-03-03
aacaatgaatccctttgataagattatgcttcaggaggctttaatgcccttaacataaactgtacacattatacaaaaacattacaaccacaataacagtaacaacaacaaaaatcaaagtgagcaaaaccatttggggacaaatcttatttaaattatacacaactcaatgaaatattcttaaggaaaatatataaatactttttctttctatgttacagttatacaatataaatcagatttcaatgtctgttcagtgacctacaaataccagaacctccaaaaatgtagcagcgtattactaaataaaaacacgttatgtggtcggagagcattagctgagatcctctctatgatcccttaccactcttcaaagctaactgaacttacatcatttgtctcacaatgcatccttagggtttctgacaggccagcaatggaacatttttcaacaatcatacattaaaaatttttaccactcccgctctgccccaagactgcattttgtgctacatcaact

SEQ ID NO: 6150 - DNA, 1579 bp, Homo sapiens
  ref <308>: DATABASE ACCESSION NUMBER: EMBL / AK024327
  ref <309>: DATABASE ENTRY DATE: 2002-08-06
tatacttttatttcctgtttattcttaggtagattggaagggggaaacagtctgttctccctaattaaattttttctaataacgattagtagaatatggacattctatatgacagtgacattaaaagaggctctttggaagtatatacattattaacataatgtgtacaagtccttttgaaatgacaactttaatgggtttcagctcttttatctagagcttgagataattcaagctgagtttttcagggcatatcacaacggcaaagtgttcagcagtgggatatcaatgcttatttacattttcctactgctatttatataaaatgttattccattcagaggatgccttttatccccacattaaagcacagatcattaagcaataaaaaccaaattgtctgtcattcaaattataactgcagttatttttgcatggtaagagtgaggtgctaattttgtgtgagatgaactttgtaaactactttgggaaatgttctttggaagtaaggttttttctcctttagtcttatgcttccacttttgtctcagattcacaatccattaaaacatggggaaaaaagaaaaggtaaaattgagagacttttgttagaggagctatttggaatgaaccaacatttcagattttccaaaatgtaagttaggaagtctccattgtctctgcattaacaaaatacactgttactatcttaatctcaagagtgtcattacagtgagaatctcatttaaaagcataccagtgaaattaatagcagtgcttatcaaagaacactgaaatctgtgagaatctttctaggagcattcttttcttcttttagttccaagttccagggtatttttcattcctagtaggtttatatgactcacagaatgtggacttttttcctgtttggagtatttttgtaatgtaagtatcggatagctgcaccacagcatgcataaattgcacattttgttttactttctttatagaatatttaatttcaaaaatataatttatgccaaaaaaagcatacctttcaattttgctacttggttgatttagcacaaaatgcaaagtcttggggcagagagggggagtgaaaaaaattttataggtaattgttacaaaaatacctgtcagaaaccctaaagctgcattgtaaaacaaatggtgtaaactagttttgaaaagtggtaaggaattgtgaaaaaaatctcagacttaatgctctctaaccacatgagtttcttcttttttatttagtaatacgctgctacatatttggaggttctggtgtttgtaggtcactgaacagacattgaaatctgatttatattgtataactgtaacatagaaagaaaaagtatttatattttttctgtaagaatatttcattgagttgtgtataatttaaataagatttgtccccaaatggttttgctcaccttgattttttttgttgtgattttcttgtttttgtataatgtgtatagtttatgtcaagggcattaaaagcctcctgaagcataatcttatcaaagggatacattgttaataaaatgtacttaaaattctt

SEQ ID NO: 6151 - DNA, 484 bp, Rattus norvegicus
  ref <308>: DATABASE ACCESSION NUMBER: EMBL / AA893980
  ref <309>: DATABASE ENTRY DATE: 2000-03-03
aaaataactgcatcctttaatggcagtaatacaattactggattaagagaccacatgagaaggcaggtgaggtttctggaagacagatactgagtacaaaaggggcgggagagccatgcgacgatcattgtaaaaatacagtacgttatatacatatttgcaccatcgactttcaactcagaaatactatttacacgtttgttacaatcctggttagagaacaatctttctttacgagtgtggcctgacggcaagtggggattcaagcggatgtccttgttccatgagggccttcagttaactgttccggaggaaggctccagactccacctcacccacagatttcagccttaaaaattcatttaattttttctttagcaaaaggacagcttttttctaatatagaccaggctggctttgaacctgtgatcctcctgcccctcctcctgagtgccgggatgacaggcgcactaccaagcctggc

SEQ ID NO: 6152 - DNA, 3174 bp, Homo sapiens
  ref <308>: DATABASE ACCESSION NUMBER: EMBL / AL050155
  ref <309>: DATABASE ENTRY DATE: 2000-02-18
aggacgcagtgccccccgtgcccgcggccctgcaatccatgcccaccctggacccccggctgcaccgcgctgccacggcagggccccccaacgcccggcagcgcccgggcgcctccacggattccagcacacagggcgccaacctccccgactttgaacttctgtctcgcatcctcaagacagtcaatgccaccggctcctcggccgcccccggttccagcgacaaacccagtgacccccgggtgcggaaggcccccaccgaccctcggctgcagaaacccacagactctacggcctcctcccgggctgccaagcccggccctgctgaggcgccctctcccaccgccagcccgagtggggatgcctccccaccagccaccgctccctacgacccccgcgtgctggcggccggtggactgggccagggcggagggggcgggcagagcagtgtgctgagcggtatcagcctctacgacccgaggactcccaacgcggggggcaaagccacagagccggctgctgacacgggtgcccagcccaagggtgctgagggcaatggcaagagctcggcctccaaggctaaggagcccccgttcgtccgcaagtctgccctggaacagccagagacagggaaggccggtgctgatgggggcacccccacggacagatacaacagctacaaccggccccggcccaaggctgctgcagcccccgctgccaccaccgccaccccaccccccgagggtgccccaccccagcccggggtgcacaacctgcccgtgcccaccctcttcgggacggtgaagcagacacccaagacgggctcaggaagcccatttgctgggaacagtccggcccgcgagggtgagcaggatgcggcatccctgaaggatgtttttaaaggcttcgaccccacggcctcccccttttgccagtagtgtccagccagagctgcggctccagccacccttcctagggtggcattcagggcagcacccagggtagggaacttgggggcaaggggaggcaggctgggtgttccttttttcttttctttttcttttgctttccgtctcttttatttttttttaaagtagtactttctttgagatttgtaaattgtatataaccatcttaagttctggtcagtgtggcgggctcaggggctcctgctgagcaaaccgactcatgcccgcaaacctgtgaactttcgccagtgcctggcctcagactctgtgggctctgcgtggccgggccttgctggaggcccagtgggttttctgggcaaagcatggccccttttccccaggacaaagggaacagttggtgtctgggaaggtattgaacgctcctcaccctgtgcccgaagagacccggaaccaagaccatggcagggcctgcgtggaagcaggtccaggcgtttctagaaccctagggtgcaccatcactgtcttttcagtgcaggctgtaacagcccactcaggagacagtgagagtgaaaaggtattaaggaaaaagcccccagcggcactatgggggctccctggtgcatgcctgctcctgtccctggattaccacacgtgccctccctgccaccctccgtctagagcaagcggatgccccccagcctgcagcagaagcctccacagtgagaactggacccaaaggtagtgggggccggtgtggggcagagtcctgaagagccacctctaggaggcagcccctaggagcacgcacgttctgtcagtattaccccacctgtcctatcaggtgggccacaccctgcttgcccacaccagggtctgtcctggtcctcaagccacgcacccgctatgcctgcactgcagcccagccccggacagctccaggatccgtgcagtggctgcgccgccaggccccaacaatggggaccctggggtggctcctggccaagtgttctctgttttcctcgcacctccttacactgtgtgacctgcagggcatgaggtattgatgtgttcgggtttcctttcccaagccagcagatgcaggtgttccaaggtgtgttgctctgtgggatttgtggacacttaagaaacggactgagtgggaaccctgcagccaggggatggggagcctctgctccccccatgctcccaccctggctgagggccagcctcatctgcagagccctggaggaggcccacctatggacacagcccgagagatgggcgcaaggggtgctgggggaggcctgctatcctgcctctgggccacttgaggggcctcaggaagtgtgtgcttgtggctgcatctgcccgtctccctggcccaccatgtggctgcaggccaagctcttcattgctgaccatgaagagacctagttacctgccaagggattccccttccctcctcctcagggtggggtgaacaaggctcctatcccaccccaccccaaaaagagaaaaatgaaaaactcatagtttggagccaggaggcagggtgtcctacagggctgcacagccctgaggggtcagtgctgggatctggttggttggtttgtctttttgtctttttttttttttttttttttttacacaatcattaatgagatttgtcttcagccaccagtgttggccttgaagcagagggcacagcccttggtgtttgtaaaataagtatgaatacacagtgtggcagtgttgtggtttttgttgttgtttttcctctccttttgagaattttcttttgtaaaagaaaaatattttttaaaccgaaatctgtggatgaaatagaagctggagccctcctcttggaatattcagcctaagaacctcataggactatgaattcacccgaaattctcatttgccatcaggccgagcttttaaagaaaaattgttctctaaccaggattgtaacaaaagtgtaaatactgtttcagagttgagagttggtggtgcaaatatgtatataatgaactgtatttttacaatgatcgccgcatgactatttcacaccctttttatactccatatctgtcttccagaaacgtcacctgcctttctcctgtggtctcttaatccagtaattgtattactgccattaaaggatgcagttattttaaaaaaaaaaaaaaaaaaaaaaaaaaaaaaaaaaaaaaaaaaaaaaaaaaaaaaaaaaaaaaaaaaaaaa

SEQ ID NO: 6153 - DNA, 484 bp, Rattus norvegicus; identical to SEQ ID NO: 6151
  ref <308>: DATABASE ACCESSION NUMBER: EMBL / AA893980
  ref <309>: DATABASE ENTRY DATE: 2000-03-03

SEQ ID NO: 6154 - DNA, 3174 bp, Homo sapiens; identical to SEQ ID NO: 6152
  ref <308>: DATABASE ACCESSION NUMBER: EMBL / AL050155
  ref <309>: DATABASE ENTRY DATE: 2000-02-18

SEQ ID NO: 6155 - DNA, 484 bp, Rattus norvegicus; identical to SEQ ID NO: 6151
  ref <308>: DATABASE ACCESSION NUMBER: EMBL / AA893980
  ref <309>: DATABASE ENTRY DATE: 2000-03-03

SEQ ID NO: 6156 - DNA, 3174 bp, Homo sapiens; identical to SEQ ID NO: 6152
  ref <308>: DATABASE ACCESSION NUMBER: EMBL / AL050155
  ref <309>: DATABASE ENTRY DATE: 2000-02-18

SEQ ID NO: 6157 - DNA, 484 bp, Rattus norvegicus; identical to SEQ ID NO: 6151
  ref <308>: DATABASE ACCESSION NUMBER: EMBL / AA893980
  ref <309>: DATABASE ENTRY DATE: 2000-03-03

SEQ ID NO: 6158 - DNA, 3174 bp, Homo sapiens; identical to SEQ ID NO: 6152
  ref <308>: DATABASE ACCESSION NUMBER: EMBL / AL050155
  ref <309>: DATABASE ENTRY DATE: 2000-02-18

SEQ ID NO: 6159 - DNA, 443 bp, Rattus norvegicus
  ref <308>: DATABASE ACCESSION NUMBER: EMBL / AA893984
  ref <309>: DATABASE ENTRY DATE: 2000-03-03
gactggtttggaagcagttttaatggagatgaaaatgttttatcaactcaacacaggtacccccaaaatacaaatcaaaatatcatcttcagctgcatagcaaatatgatttaagaatttaacatcattattcgatcacaagcgtaaatataagttcaccataaataatgtaaattcattgtacaaaaaatccccaacaactcttaatacaaatatggtacacatttgacagtctctgaaacagaattctttttaaaacattttaaaatctaagcttttttcttgatttttaaatacattaaaaaaaatcaaagaggggtgtggggtgggaaacaaggatcactagagaggaaagagcattaaagttgttcagtgtctgtagacaagtgctgcagaaatggaatctctgtcctcaaagtgaggaccttggtttattgggatca

SEQ ID NO: 6160 - DNA, 1634 bp, Homo sapiens
  ref <308>: DATABASE ACCESSION NUMBER: Refseq / NM_030778
  ref <309>: DATABASE ENTRY DATE: 2002-05-14
acgatgaagtcagtgaggaggaggaatagtaattgtcaatgagcttttaataccaagatacaccccctgcccccaaagaagagtcctcttttagggaatcagaaccttcattgtcctagaagctgaaagattcttggaacattttagcttttactctcaacttgctgttctctttacattccttaagttagactttcgggtgtggcttctctctcaggggtaacatttacttccattttctagaccgaaccaaaagtcttctgcagaatctcccaccgagtgtggtaagaaggaaggacaaaaggctttaggatataaatttcatgttacagagcatgtcattgtcaaaggaaatctgtggccctgagattttaagaacataaaatgtgacatttgatatttctccagcccagggaagtaagatggttagcaatggttgccttaatcaaatggtcccatttttaaccccaaaggaagtgcccacagcaagaggtttgtgtgatgcacttatgtcctccggtgaggaaagggggccacatatgaaaggccccttaggtcagatcctgagagtagcacatttgagtgcagattcctgggccccacctcaaacctactaattctgaatctctgggaatagggccaggaaatctgccctttctacaaactacccaagttgttctgttgcacatcaatgtttgggaaccactgctgtaagggaatcattctggtcaccttgagctttgagctaccactaagccatgaaagaaaatacatcatacagggaagagagaagggaggaggttccaagtagtaactggcagatcctcctgtctggaggtaccaccttctattctggtttctgacttttccttcttgatgaccatagatgtgttccagaggcaaaagagacacattatcccagatggcagaacatgctttcaaaacatataaaatgtcaaagttccagatccttctacatctttagtcctgtctgaggatggtagctggctctctgtagctgatagatggctagagttccatccaaatccttgaccacgacttcatggagatttgaataatctatttgatgagatttctatttcaataacccacctctctcaccccacattcatatccctaaatttgaccctctgggccgagtcacattaccttcaggagacttgatcccagtagactgaggtcttccctttcagcagaaagatttcatttccctggcttgccagtggcactgatttccgaacacccaatgagtttaatattctttcctccttggcattactgccccagccgctttttttttttttttgtgtgtgtctaataaccaggaaaaaaataaagcttaggttttaaaaagttttaaaaataatctgtttcagaaactgtcaaatgtaccatatttgtattaagagttgttgggaatttttgtacaatgaatttacatttatttatggtgacatatttacgcttgtgatcaaataatgatgttaaattcttaaatcatatttgctatgcagctgaagatgatattttgatttgtattttgggggtacctgtgttgagttgataaacatttccatcttcattaaaactgcttccaaactaaaaaaaaaaaa

SEQ ID NO: 6161 - protein, 64 aa, Homo sapiens
MVSNGCLNQMVPFLTPKEVPTARGLCDALMSSGEERGPHMKGPLGQILRVAHLSADSWAPPQTY

SEQ ID NO: 6162 - DNA, 498 bp, Rattus norvegicus
  ref <308>: DATABASE ACCESSION NUMBER: EMBL / AA894029
  ref <309>: DATABASE ENTRY DATE: 2000-03-03
cagcatcaaagcaagctttaatagttatttctaaaaattgtctccagatcatcttctaccccagactattcatatacaatggctgcaagaattcaaattccataaacatgatactgcaaaagcggaaaaacccaggaaaatcgtttctagacttatattctcattttatatttgttactaaagacagatctcagtatctgttactaaattctaagaactaactgtggagagagttgtgctggcagctggtggctgggagccaggaacttgggaggaaaaagaaggaagttctcaaacaagaagcacatgcgcactgcactcattttccatctcataaccagaataactcagtgtagatctctattttgggaactatgttgatatcaactattgcctgcttatgggatccttttcctcctactgggttgcctcatccagacttgataagagggtttgtgcctgttcttattgcatcttgttatgctgtgttcagctgat

SEQ ID NO: 6163 - DNA, 621 bp, Rattus norvegicus
  misc_feature (1)..(621): n=a, c, g or t
  ref <308>: DATABASE ACCESSION NUMBER: EMBL / AA894084
  ref <309>: DATABASE ENTRY DATE: 2000-03-03
ggcaagagatctgaatttatttacagctaggcatctatgtcttagacattcgtttaaaaacaacaaaaacaaaaagaagaggcaatacctagtcgataaagaaaaaatggtataatctatagcttaacagagtatgtatgtgctggaaatgactgtttcaatattcagcagataccggcaatacagtattaaaagaaacacttttttttccctttcctttagcagtacctcatgtagctcaggctaactgaatctgctatgtcaccaacgctggtcctgatccaccagcctgcctcccaagggctaggattccaggcataagccaccagacagggctaaacaataattcctgatttagaaatctaaagtctctagtggaagtttgacacttccagaatcccgtaggtctccgggcggggaagtggtgtggttggtggtatttgcctagcacacgtacaatgttctgggtggctcctgagctactgggaagggtagtgcacacccgtcaccaggaatcaggaagacgaacaggttcaatgtcaccttcaggctggcccactgggtaaaggtgcttgatgaggacatacattgacaanagaacataacatggaccccccatgc

SEQ ID NO: 6164 - DNA, 647 bp, Rattus norvegicus
  ref <308>: DATABASE ACCESSION NUMBER: EMBL / AA894088
  ref <309>: DATABASE ENTRY DATE: 2000-03-03
aactcaaaagaaaagctttttattctgatatgtacaacaaaaaaatttaatatataatgacagattatttgaaagaagaaataaaatggtaagagtagagttctgtttagaaaaatactctcaggcatctgctaaacacatgtaattcctcacagacaacagcttacaaagcttagacctctttgctttaaaaaatgttttgaattaattgattcacatctaccaaacaacttgggcatggcgagaaacatcacttcctttcttggtagcaaaaacagcgttgtttaacacggaataccaagcgacagtgtagccgagaacaagtcttgtaggaactgagtagcagttttttttggttctgtaatatctgtcttagtaaaacccattccagatcgctgcagcagcacagaaacaaaacaactgctcttagcgatttggaagccatggatctgggtgtctggattctcaccgagacccacggagggagcatcttgctctccttgtgtggatgacgctcagcacataactgagaaacagacacaggccgagagaatgatccttagccagagcagcttctgcctggtaaacagttccccgaaagaaaagaaactatctgactggattcattctggacaaaggacaatgca

SEQ ID NO: 6165 - DNA, 580 bp, Rattus norvegicus
  ref <308>: DATABASE ACCESSION NUMBER: EMBL / AA894099
  ref <309>: DATABASE ENTRY DATE: 2000-03-03
caagaagggaaagggtttattagacatctccaggacaggaccagcagaggctgggctcagttctcagttctcagtgaaggcagcgataaagacctgcctgtctgccgtctctcctgatagaaacggcattgtgctcacagaagccatcagctcctgcaaggaggacctgaagctccagatgcaagcttaggagggtgggatggcttttcctactttaccacagtcagctcacaagtagccaaagttaagaggaaaggagtgagagcaggggcctggtggctcccactccttaacactttccagatgattttcctctttatttataaacaagacagaaatcaaagcagcattaatttaggggaacaaaagttagacaaaaacagatcagggcagagtgtgagcatccagtagtgaagtgtgcagagccagtgtcacgtgtcctacatggtgaagcatctctgcagctgccgaggcccctccttcatcctactaggtcggcagccaggcagtagagggaatactattgacttcacgacttcaggccctgcctggccactggtgtgggaagtcccatgaattt

SEQ ID NO: 6166 - protein, 112 aa, Rattus norvegicus
  ref <308>: DATABASE ACCESSION NUMBER: SWISS-Prot / BAB31873
  ref <309>: DATABASE ENTRY DATE: 2001-06-01
TEGYSGADISIIVRDSLMQPVRKVQSATHFKKVCGPSRTNPSVMIDDLLTPCSPGDPGAIEMTWMDVPGDKLLEPVVCMSDMLRSLATTRPTVNADDLLKVKKFSEDFGQES

SEQ ID NO: 6167 - DNA, 1981 bp, Homo sapiens
  ref <308>: DATABASE ACCESSION NUMBER: Refseq / NM_005606
  ref <309>: DATABASE ENTRY DATE: 2002-11-05
ggcacgagggaggctgcgagccgccgcgagttctcacggtcccgccggcgccaccaccgcggtcactcaccgccgccgccgccaccactgccaccacggtcgcctgccacaggtgtctgcaattgaactccaaggtgcagaatggtttggaaagtagctgtattcctcagtgtggccctgggcattggtgccattcctatagatgatcctgaagatggaggcaagcactgggtggtgatcgtggcaggttcaaatggctggtataattataggcaccaggcagacgcgtgccatgcctaccagatcattcaccgcaatgggattcctgacgaacagatcgttgtgatgatgtacgatgacattgcttactctgaagacaatcccactccaggaattgtgatcaacaggcccaatggcacagatgtctatcagggagtcccgaaggactacactggagaggatgttaccccacaaaatttccttgctgtgttgagaggcgatgcagaagcagtgaagggcataggatccggcaaagtcctgaagagtggcccccaggatcacgtgttcatttacttcactgaccatggatctactggaatactggtttttcccaatgaagatcttcatgtaaaggacctgaatgagaccatccattacatgtacaaacacaaaatgtaccgaaagatggtgttctacattgaagcctgtgagtctgggtccatgatgaaccacctgccggataacatcaatgtttatgcaactactgctgccaaccccagagagtcgtcctacgcctgttactatgatgagaagaggtccacgtacctgggggactggtacagcgtcaactggatggaagactcggacgtggaagatctgactaaagagaccctgcacaagcagtaccacctggtaaaatcgcacaccaacaccagccacgtcatgcagtatggaaacaaaacaatctccaccatgaaagtgatgcagtttcagggtatgaaacgcaaagccagttctcccgtccccctacctccagtcacacaccttgacctcacccccagccctgatgtgcctctcaccatcatgaaaaggaaactgatgaacaccaatgatctggaggagtccaggcagctcacggaggagatccagcggcatctggatgccaggcacctcattgagaagtcagtgcgtaagatcgtctccttgctggcagcgtccgaggctgaggtggagcagctcctgtccgagagagccccgctcacggggcacagctgctacccagaggccctgctgcacttccggacccactgcttcaactggcactcccccacgtacgagtatgcgttgagacatttgtacgtgctggtcaacctttgtgagaagccgtatccacttcacaggataaaattgtccatggaccacgtgtgccttggtcactactgaagagctgcctcctggaagcttttccaagtgtgagcgccccaccgactgtgtgctgatcagagactggagaggtggagtgagaagtctccgctgctcgggccctcctggggagcccccgctccagggctcgctccaggaccttcttcacaagatgacttgctcgctgttacctgcttccccagtcttttctgaaaaactacaaattagggtgggaaaagctctgtattgagaagggtcatatttgctttctaggaggtttgttgttttgcctgttagttttgaggagcaggaagctcatgggggcttctgtagcccctctcaaaaggagtctttattctgagaatttgaagctgaaacctctttaaatcttcagaatgattttattgaagagggccgcaagccccaaatggaaaactgtttttagaaaatatgatgatttttgattgcttttgtatttaattctgcaggtgttcaagtcttaaaaaataaagatttataacagaacccaaaaaaaaaaaaaaaaaaaaaaaaaaaaaaa

SEQ ID NO: 6168 - protein, 433 aa, Homo sapiens
  ref <308>: DATABASE ACCESSION NUMBER: SWISS-Prot / Q99538
  ref <309>: DATABASE ENTRY DATE: 2002-06-15
MVWKVAVFLSVALGIGAVPIDDPEDGGKHWVVIVAGSNGWYNYRHQADACHAYQIIHRNGIPDEQIVVMMYDDIAYSEDNPTPGIVINRPNGTDVYQGVPKDYTGEDVTPQNFLAVLRGDAEAVKGIGSGKVLKSGPQDHVFIYFTDHGSTGILVFPNEDLHVKDLNETIHYMYKHKMYRKMVFYIEACESGSMMNHLPDNINVYATTAANPRESSYACYYDEKRSTYLGDWYSVNWMEDSDVEDLTKETLHKQYHLVKSHTNTSHVMQYGNKTISTMKVMQFQGMKRKASSPVPLPPVTHLDLTPSPDVPLTIMKRKLMNTNDLEESRQLTEEIQRHLDARHLIEKSVRKIVSLLAASEAEVEQLLSERAPLTGHSCYPEALLHFRTHCFNWHSPTYEYALRHLYVLVNLCEKPYPLHRIKLSMDHVCLGHY

SEQ ID NO: 6169 - DNA, 350 bp, Rattus norvegicus
  ref <308>: DATABASE ACCESSION NUMBER: EMBL / AA894104
  ref <309>: DATABASE ENTRY DATE: 2000-03-03
aaagtcagagctggctgagcttcaggggtacagcaacagctcaaggaagggtgaagctgtctgttggtccccaccaccgcgagttggggagggggtttcatgccaacagctgaggctcctcgcagctcccgggcgatgctcaagcagggagagggtggtcacggggagagggaagctcctgacgctccgacactgctggcttcttctccccactcctgtcccttttcagcacagcctggctacccagctggcctggggcagagcaaaggcccacgaccagtggagggacgtggatggggacagagcaccaagggaaggggccctcggcccaagggaggagggaaatggcc

SEQ ID NO: 6170 - protein, 382 aa, Rattus norvegicus
  ref <308>: DATABASE ACCESSION NUMBER: SWISS-Prot / BAB62016
  ref <309>: DATABASE ENTRY DATE: 2003-02-01
MLRWTVHLEGGPRRVNHATVAVGHRVYSFGGYCSGEDYETLRQIDVHIFNAVSLRWTKLPPVRPAVRGQAPVVPYMRYGHSTVLIDDTVFLWGGRNDTEGACNVLYAFDVNTHKWSTPRVSGAVPGARDGHSACVLGKIMYIFGGYEQLADCFSNDIHKLDTSTMTWTLVCTKGNPARWRDFHSATMLGNHMYVFGGRADRFGPFHSNNEIYCNRIRVFDTRTEAWLDCPHTPVLPEGRRSHSAFGYNGELYIFGGYNARLNRHFHDLWKFNPGSFTWKKIEPKGKGPCPRRRQCCCIVGDKIVLFGGTSPSPEEGLGDEFDLIDHSDLHILDFSPSLKTLCKLAVIQYSLDQSCLPHDIRWELNAMTTNSNISRPIVSSHG

SEQ ID NO: 6171 - DNA, 362 bp, Rattus norvegicus
  ref <308>: DATABASE ACCESSION NUMBER: EMBL / AA894119
  ref <309>: DATABASE ENTRY DATE: 2000-03-03
caacgtttgcagctgtgtggctttgcagcacagcaattcataaaccacactgtacagaatcaccagcaagactggaatgatgttatacaaggcaccatcatgcttattacattaccagagaacaaaatacaggaaagacagtttctactgtacacagtttaaagaaaggaaaggggaggagtgtgttgagcagccattggtcacagggtgggcttcatagtaagcgctgttagcattctcttgcacaggttccggagatggctgcctgtcttcttgttcctcctccacttcatcttctgactcttcatcaagttctggttcggaatctccaaatacttcatcctcataacgaaacatatcat

SEQ ID NO: 6172 - DNA, 1501 bp, Homo sapiens; identical to SEQ ID NO: 5841
  ref <308>: DATABASE ACCESSION NUMBER: EMBL / AF070615
  ref <309>: DATABASE ENTRY DATE: 1999-07-05

SEQ ID NO: 6173 - protein, 482 aa, Homo sapiens [sequence omitted]

SEQ ID NO: 6174 - DNA, 494 bp, Rattus norvegicus
  ref <308>: DATABASE ACCESSION NUMBER: EMBL / AA894130
  ref <309>: DATABASE ENTRY DATE: 2000-03-03
aaaaggcccactttattaaacacattctttctttcagaatcctgatttttaaaaaacctttatctactaaaaaacagacatataaatcaagcaaacagttaagactacaggaatggggctcctagtgacgctgaaggaggcgataggtggggaagggcagagggctgtggggagggaggtcaggaagaggctctacgcagcccacaggctgggaaacaaagaccaaactccctaatgatctcaggcacaagcgttgctctgtcatggtgtcccccaggctctctgagaactggggcctctacaagacacaggtattcttcaccagctgctccttgtcatccgcagtgctccaaacagtgcggagagcacgctcctgctttctgcgaaccattcggatcaggaacaccatggaggatcccaggaggaggatcaggaccatgatgaacagccccaccaggatcaccgcttttgtgcccggagtcaggaaaggatac

SEQ ID NO: 6175 - protein, 252 aa, Rattus norvegicus
  ref <308>: DATABASE ACCESSION NUMBER: SWISS-Prot / AAD22174
  ref <309>: DATABASE ENTRY DATE: 2001-10-16
MAQLCELRRGRALLALVASLLLSGAQVASRELDVHESCGVSKVVGKCRASIPRWWYNITDGSCQPFVYGGCEGNGNNYQSKEECLDKCAGVTENTTDDMARNRNGADSSVLSVPRKQSAEDLSAEIFNYEEYCVPKAVTGPCRAAFPRWYYDTEKNSCISFIYGGCRGNKNSYLSQEACMQHCSGKQMHPFLTPGLKAVILVGLFLMVLILLLGTSMVCLIRVVRRKQERALRTVWSTADDKEQLVKNTCVL

SEQ ID NO: 6176 - DNA, 1544 bp, Homo sapiens
  misc_feature (1)..(1544): n=a, c, g or t
  ref <308>: DATABASE ACCESSION NUMBER: EMBL / U78095
  ref <309>: DATABASE ENTRY DATE: 1998-02-20
gcacgagttgggaggtgtagcgcggctctgaacgcgctgagggccgttgagtgtcgcaggcggcgagggcgcgagtgaggagcagacccaggcatcgcgcgccgagaaggccgggcgtccccacactgaaggtccggaaaggcgacttccgggggctttggcacctggcggaccctcccggagcgtcggcacctgaacgcgaggcgctccattgcgcgtgcgcgttgaggggcttcccgcacctgatcgcgagaccccaacggctggtggcgtcgcctgcgcgtctcggctgagctggccatggcgcagctgtgcgggctgaggcggagccgggcgtttctcgccctgctgggatcgctgctcctctctggggtcctggcggccgaccgagaacgcagcatccacgacttctgcctggtgtcgaaggtggtgggcagatgccgggcctccatgcctaggtggtggtacaatgtcactgacggatcctgccagctgtttgtgtatgggggctgtgacggaaacagcaataattacctgaccaaggaggagtgcctcaagaaatgtgccactgtcacagagaatgccacgggtgacctggccaccagcaggaatgcagcggattcctctgtcccaagtgctcccagaaggcaggattctgaagaccactccagcgatatgttcaactatgaagaatactgcaccgccaacgcagtcactgggccttgccgtgcatccttcccacgctggtactttgacgtggagaggaactcctgcaataacttcatctatggaggctgccggggcaataagaacagctaccgctctgaggaggcctgcatgctccgctgcttccgccagcaggagaatcctcccctgccccttggctcaaaggtggtggttctggcggggctgttcgtgatggtgttgatcctcttcctgggagcctccatggtctacctgatccgggtggcacggaggaaccaggagcgtgccctgcgcaccgtctggagctccggagatgacaaggagcagctggtgaagaacacatatgtcctgtgaccgccctgtcgccaagaggactggggaagggaggggagactatgtgtgagctttttttaaatagagggattgactcggatttgagtgatcattagggctgaggtctgtttctctgggaggtaggacggctgcttcctggtctggcagggatgggtttgctttggaaatcctctaggaggctcctcctcgcatggcctgcagtctggcagcagccccgagttgtttcctcgctgatcgatttctttcctccaggtagagttttctttgcttatgttgaattccattgcctccttttctcnatcacagaagtgatgttggaatcgtttcttttgtttgtctgatttatggtttttttaagtataaacaaaagttttttattagcattctgaaagaaggaaagtaaaatgtacaagtttaataaaaaggggccttcccctttagaataaatttccagcatgttgctttcaaaaaaaaaaaaaaaaaaa

SEQ ID NO: 6177 - protein, 252 aa, Homo sapiens
  ref <308>: DATABASE ACCESSION NUMBER: SWISS-Prot / O43291
  ref <309>: DATABASE ENTRY DATE: 2002-06-15
MAQLCGLRRSRAFLALLGSLLLSGVLAADRERSIHDFCLVSKVVGRCRASMPRWWYNVTDGSCQLFVYGGCDGNSNNYLTKEECLKKCATVTENATGDLATSRNAADSSVPSAPRRQDSEDHSSDMFNYEEYCTANAVTGPCRASFPRWYFDVERNSCNNFIYGGCRGNKNSYRSEEACMLRCFRQQENPPLPLGSKVVVLAGLFVMVLILFLGASMVYLIRVARRNQERALRTVWSSGDDKEQLVKNTYVL

SEQ ID NO: 6178 - DNA, 455 bp, Rattus norvegicus
  ref <308>: DATABASE ACCESSION NUMBER: EMBL / AA894131
  ref <309>: DATABASE ENTRY DATE: 2000-03-03
aaagatatatactggcatatctgtgagttaggtgcactgcccaagtccagcagtggaaagattacaaaagatacttaagaaatattcacatagaaagcatggtaggagaatgtcctttgtaaagaacaagtgcattccgtacaaatgagagggctgtgatagtgtttccaggctctagagcctcccacggggctgaggtatactgactgacaaggggcttgccggcttctttcttgtccaacactcactgaagtctcattcgcttctcagggggacctttagtgcttacagtctgctgagcgctctttgcgctctccttctcctcggactttacagtttctggcaggggctctgcctctttctttgcctggtccactgggacaggcttctctccagacttttgctgaacaaatctgggtggaagtttctgtctgaggtctatgagtaaagcatcc

SEQ ID NO: 6179 - DNA, 885 bp, Homo sapiens
  ref <308>: DATABASE ACCESSION NUMBER: EMBL / U78082
  ref <309>: DATABASE ENTRY DATE: 1999-07-05
ctcgaggccaagaattcggcacgagggaacctgtaaacgctctcggaattatggcggcggtggatatccgagacaatctgctgggaatttcttgggttgacagctcttggatccctattttgaacagtggtagtgtcctggattacttttcagaaagaagtaatcctttttatgacagaacatgtaataatgaagtggtcaaaatgcagaggctaacattagaacacttgaatcagatggttggaatcgagtacatccttttgcatgctcaagagcccattcttttcatcattcggaagcaacagcggcagtcccctgcccaagttatcccactagctgattactatatcattgctggagtgatctatcaggcaccagacttgggatcagttataaactctagagtgcttactgcagtgcatggtattcagtcagcttttgatgaagctatgtcatactgtcgatatcatccttccaaagggtattggtggcacttcaaagatcatgaagagcaaggtaagtagaacatccataccctcctaaaacactttttgatcctctgagaatgaagctgttttctttaggaaaatggctgttgatcttttctaagtgtgtttcactttttcatgggatgatggctttgttgcagctgagattcatgtaactagagtggtaataatagtttcacataggaacagatgcaagttcactctgttagttaactggtagtctttgttaaggtgattcaaggttttaaaatatttggggccaggtgtggtggctcactcctgtaatcccggcactttggaatgccaaggcaggtggatcacctgagcctaggagttcaagatcagcctgggcaacatagtgaaacctggtctctgc

SEQ ID NO: 6180 - protein, 158 aa, Homo sapiens
  misc_feature (1)..(158): Xaa=Unknown amino acid
MAAVDIRDNLLGISWVDSSWIPILNSGSVLDYFSERSNPFYDRTCNNEVVKMQRLTLEHLNQMVGIEYILLHAQEPILFIIRKQQRQSPAQVIPLADYYIIAGVIYQAPDLGSVINSRVLTAVHGIQSAFDEAMSYCRYHPSKGYWWHFKDHEEQGKX

SEQ ID NO: 6181 - DNA, 447 bp, Rattus norvegicus
  ref <308>: DATABASE ACCESSION NUMBER: EMBL / AA894148
  ref <309>: DATABASE ENTRY DATE: 2000-03-03
ctcagatgctttattgagtaacgagaggaggtatcgtcacccacaggacatgtgtcctcaagctggtacgagaagtgcttgggaacagagtgacagacaggtggtggggcagggcaggtgtctgctgctgtgatgggccgaggacaccagggacagctcagctctccagaggtttgggctgcacctgctcctggacctgttcctgaacctgctccgggagggggagggctaggggctggtctgggctcccctttttttgcagggtcttctttccccgctgattccgccaagcccgttcccttggctgtggtttcgctggatagtaggtagggacagtgggaatctcgttcatccattcatgcgcgtcactaattagatgacgaggcatttggctaccttaagagagtcatagttactctcgccgtttacccgcgcttcattgaattt

SEQ ID NO: 6182 - protein, 391 aa, Rattus norvegicus
  ref <308>: DATABASE ACCESSION NUMBER: SWISS-Prot / AAA40748
  ref <309>: DATABASE ENTRY DATE: 2002-06-15
MFLKAVVLTVALVAITGTQAEVTSDQVANVMWDYFTQLSNNAKEAVEQLQKTDVTQQLNTLFQDKLGNINTYADDLQNKLVPFAVQLSGHLTKETERVREEIQKELEDLRANMMPHANKVSQMFGDNVQKLQEHLRPYATDLQAQINAQTQDMKRQLTPYIQRMQTTIQDNVENLQSSMVPFANELKEKFNQNMEGLKGQLTPRANELKATIDQNLEDLRSRLAPLAEGVQEKLNHQMEGLAFQMKKNAEELQTKVSTNIDQLQKNLAPLVEDVQSKLKGNTEGLQKSLEDLNKQLDQQVEVFRRAVEPLGDKFNMALVQQMEKFRQQLGSDSGDVESHLSFLEKNLREKVSSFMSTLQKKGSPDQPLALPLPEQVQEQVQEQVQPKPLES

SEQ ID NO: 6183 - DNA, 3604 bp, Homo sapiens
  ref <308>: DATABASE ACCESSION NUMBER: EMBL / M14642
  ref <309>: DATABASE ENTRY DATE: 2000-03-04
gagatttaaagtatgtgggaggctgtgcttaggttatatgtaaatactatgccattttatatcaaggacttgaacatccatggattttggtatctgcagagggtcctggaatcaatttcccatggagactgagagatgaccgtactacccacttcgcaagcaatgtcttctttaatgtactgaaccatcccattgttcagaggagaaactgaagctcagggctttgaataactagaccaaggaggcacagcatgggagtgggacatgaagcactctacaattaaccctttcaggacaaggccctgtctcccacacccatctgcccaaaggctctccagggccccctcctcttgggtgtaccttgacaagagacctagattttagctcactatgctgtctgcagtcctggatggtcccactccagtgtctggtgctctgagatggagtcagcattagtggcggatgtggagactggggggacctgtcttcactggggtagacagaggagatgtggactttgccccccatgagcccggcacaaacccagagccgccagcagggcctcgaggcatcagtcccgggctctagggctccctgaggtgtttctcctactgttttccgttcccctcctcccttccatgctgaggttggtggggtgggggtggggggtcccacgcacggaacagccaccacttctaactatcgcctgagccctgatctgctgtcagcttccacgtagtctcagggtcacaaaagtccaagaggcctcttgggaatgtgtcaccttccagcgtggagtcacactgaggaaggaggaggggagggcagccaggggggtggcgatagggagagagtttaaatgtctggctggctctgagcttcagtcagttcccactgcagcgcaggtgagctctcctgaggacctctctgtcagctcccctgattgtagggaggatccagtgtggcaagaaactcctccagcccagcaagcagctcaggatgttcctgaaggccgtggtcctgaccctggccctggtggctgtcgccggtgagtagaagctgtctttggatggcactcctgggctgctgctctgagtagtgcaggatggaggctgagccaaagcaaaaggacacttctgagtgcccatcagcccccagctggacatgaggtctgcctggctgccaagtggctcacaggagagctggcccagtcccagtggtgggcccattggcattggtgctataccagtttcacatatccctgtggcttccaaaaagcctaagctcagacagggaaaatggcaggttgaggcacccccaccatcatccagtctgcagctcagagctggagcagaggggccacacaggagacggggcctcatgaattgctctctgttaccacccaggagccagggctgaggtcagtgctgaccaggtggccacagtgatgtgggactacttcagccagctgagcaacaatgccaaggaggccgtggaacatctccagaaatctgaactcacccagcaactcaagtaagagggactacagtgtgcggtggtgacggggaattcttaaaggccatgcaatgtactggcaagggttgagcttagagacaggagccctgagcttaggatacccactgccctgccactaactggccgggcctctgaacctaggatccacatatgtaaaccggaagtttggaccgaataatccctgccatgtccttttgctttgacgttctagagtttgacaaatggccacatcctatcattcaggctcatggaagagagggagggaggaaaatgtcatgtgagctgatttctaatacgtttcagaaagacaggccccagtggaatcaaggggagggaggtgggaatatttgggaggcccctgggcacaggcaaggaaagcagcaccttgtgccactggaagaccccagcagaggtcaagaagacaacattgtgttacacaatgtgatcctatggcccagaacactcctctgggaaggacctcaaagtcccaccctctgcagacaaggaggggaaagcaaactgctggaggtgacatggtgggtagattctgagacaaactatgtgggagatcctgagatagaaattcagcatcgtaacttagtctgtgacacccatcctctccaatctgcaccaccatagggagggtgaactcggtacctctgagcactcacctgtcttagcacgtgtgcataaggcgagtggtatacaagcagacaaagtcttgccgtgtaaatgccaaatgtaacgtggcctccttgtgcccttccccacagtgccctcttccaggacaaacttggagaagtgaacacttacgcaggtgacctgcagaagaagctggtgccctttgccaccgagctgcatgaacgcctggccaaggactcggagaaactgaaggaggagattgggaaggagctggaggagctgagggcccggctgctgccccatgccaatgaggtgagccagaagatcggggacaacctgcgagagcttcagcagcgcctggagccctacgcggaccagctgcgcacccaggtcaacacgcaggccgagcagctgcggcgccagctggaccccctagcacagcgcatggagagagtgctgcgggagaacgccgacagcctgcaggcctcgctgaggccccacgccgacgagctcaaggccaagatcgaccagaacgtggaggagctcaagggacgccttacgccctacgctgacgaattcaaagtcaagattgaccagaccgtggaggagctgcgccgcagcctggctccctatgctcaggacacgcaggagaagctcaaccaccagcttgagggcctgaccttccagatgaagaagaacgccgaggagctcaaggccaggatctcggccagtgccgaggagctgcggcagaggctggcgcccttggccgaggacgtgcgtggcaacctgaagggcaacaccgaggggctgcagaagtcactggcagagctgggtgggcacctggaccagcaggtggaggagttccgacgccgggtggagccctacggggaaaacttcaacaaagccctggtgcagcagatggaacagctcaggcagaaactgggcccccatgcgggggacgtggaaggccacttgagcttcctggagaaggacctgagggacaaggtcaactccttcttcagcaccttcaaggagaaagagagccaggacaagactctctccctccctgagctggagcaacagcaggaacagcagcaggagcagcagcaggagcaggtgcagatgctggcccctttggagagctgagctgcccctggtgcactggccccaccctcgtggacacctgccctgccctgccacctgtctgtctgtcccaaagaagttctggtatgaacttgaggacacatgtccagtgggaggtgagaccacctctcaatattcaataaagctgctgagaatctagcctcaactggttgccggatgaatcctccttgcagctggggaggtggggaggtaaccatgactgggcagagcttagcagcggcctggcaggagaccacccaggattggggagatgagactgcag

SEQ ID NO: 6184 - protein, 396 aa, Homo sapiens
  ref <308>: DATABASE ACCESSION NUMBER: SWISS-Prot / P06727
  ref <309>: DATABASE ENTRY DATE: 2002-06-15
MFLKAVVLTLALVAVAGARAEVSADQVATVMWDYFSQLSNNAKEAVEHLQKSELTQQLNALFQDKLGEVNTYAGDLQKKLVPFATELHERLAKDSEKLKEEIGKELEELRARLLPHANEVSQKIGDNLRELQQRLEPYADQLRTQVNTQAEQLRRQLTPYAQRMERVLRENADSLQASLRPHADELKAKIDQNVEELKGRLTPYADEFKVKIDQTVEELRRSLAPYAQDTQEKLNHQLEGLTFQMKKNAEELKARISASAEELRQRLAPLAEDVRGNLKGNTEGLQKSLAELGGHLDQQVEEFRRRVEPYGENFNKALVQQMEQLRQKLGPHAGDVEGHLSFLEKDLRDKVNSFFSTFKEKESQDKTLSLPELEQQQEQQQEQQQEQVQMLAPLES

SEQ ID NO: 6185 - DNA, 441 bp, Rattus norvegicus
  misc_feature (1)..(441): n=a, c, g or t
  ref <308>: DATABASE ACCESSION NUMBER: EMBL / AA894160
  ref <309>: DATABASE ENTRY DATE: 2000-03-03
aaaaggtacactgtttatatttaaacaacaaagaaaaaaagcatctacacacttaaaaaattaattcgatattcctaaatctattttaactcattttaaaatactacatacagaagccagaatgcagagttaagaatggaggaaggtggggaaaagaaagggaccacaaagaaaaacacttagacaattacttgtctgttgtgggtaaagcaacaggaatcctgggatacaagaaatcagtaacaagtttgctcataactgatattttcccctcctgtttgtttttaataacgtccatatgggtgctctctgtatgctcccttcactggcctagctggaggagccttcagtgatggcctggtcncattccagtcatcttgtccataggcttcataagaatcttgaagctccccatgtccatagtcataatactctgactcc

SEQ ID NO: 6186 - protein, 443 aa, Rattus norvegicus
  ref <308>: DATABASE ACCESSION NUMBER: SWISS-Prot / AAK77001
  ref <309>: DATABASE ENTRY DATE: 2003-02-01
MQRRDDPAARLTRSSGRSCSKDPSGAHPSVRLTPSRPSPLPHRSRGGGGGPRGGARASPATQPPPLLPPSNPGPDATVVGSAPTPLLPPSATAAAKMEPENKYLPELMAEKDSLDPSFTHAMQLLSVEIEKIQKGESKKDDEENYLDLFSHKNMKLKERVLIPVKQYPKFNFVGKILGPQGNTIKRLQEETGAKISVLGKGSMRDKAKEEELRKGGDPKYAHLNMDLHVFIEVFGPPCEAYALMAHAMEEVKKFLVPDMMDDICQEQFLELSYLNGVPEPSRGRGVSVRGRGAAPPPPPVPRGRGVGPPRGALVRGTPVRGSITRGATVTRGVPPPPTVRGAPTPRARTAGIQRIPLPPTPAPETYEDYGYDDSYAEQSYEGYEGYYSQSQGESEYYDYGHGELQDSYEAYGQDDWNGTRPSLKAPPARPVKGAYREHPYGRY

SEQ ID NO: 6187 - DNA, 1215 bp, Homo sapiens
  ref <308>: DATABASE ACCESSION NUMBER: EMBL / U78971
  ref <309>: DATABASE ENTRY DATE: 1999-07-02
atgcagcgccgggacgaccccgccgcgcgcatgagccggtcttcgggccgtagcggctccatggacccctccggtgcccacccctcggtgcgtcagacgccgtctcggcagccgccgctgcctcaccggtcccggggaggcggagggggatcccgcgggggcgcccgggcctcgcccgccacgcagccgccaccgctgctgccgccctcggccacgggtcccgacgcgacagtgggcgggccagcgccgaccccgctgctgcccccctcggccacagcctcggtcaagatggagccagagaacaagtacctgcccgaactcatggccgagaaggactcgctcgacccgtccttcactcacgccatgcagctgctgacggcagaaattgagaagattcagaaaggagactcaaaaaaggatgatgaggagaattacttggatttattttctcataagaacatgaaactgaaagagcgagtgctgatacctgtcaagcagtatcccaaggaggaagagctgcgcaaaggtggagaccccaaatatgcccacttgaatatggatctgcatgtcttcattgaagtctttggacccccatgtgaggcttatgctcttatggcccatgccatggaggaagtcaagaaatttctagtaccggatatgatggatgatatctgtcaggagcaatttctagagctgtcctacttgaatggagtacctgaaccctctcgtggacgtggggtgccagtgagaggccggggagctgcacctcctccaccacctgttcccaggggccgtggtgttggaccacctcggggggctttggtacgtggtacaccagtaaggggagccatcaccagaggtgccactgtgactcgaggcgtgccacccccacctactgtgaggggtgctccagcaccaagagcacggacagcgggcatccagaggatacctttgcctccacctcctgcaccagaaacatatgaagaatatggatatgatgatacatacgcagaacaaagttacgaaggctacgaaggctattacagccagagtcaaggggactcagaatattatgactatggacatggggaggttcaagattcttatgaagcttatggccaggacgactggaatgggaccaggccgtcgctgaaggcccctcctgctaggccagtgaagggagcatacagagagcacccatatggacgttattaa

SEQ ID NO: 6188 - protein, 443 aa, Homo sapiens
  ref <308>: DATABASE ACCESSION NUMBER: Refseq / NP_006550
  ref <309>: DATABASE ENTRY DATE: 2002-11-05
MQRRDDPAARMSRSSGRSGSMDPSGAHPSVRQTPSRQPPLPHRSRGGGGGSRGGARASPATQPPPLLPPSATGPDATVGGPAPTPLLPPSATASVKMEPENKYLPELMAEKDSLDPSFTHAMQLLTAEIEKIQKGDSKKDDEENYLDLFSHKNMKLKERVLIPVKQYPKFNFVGKILGPQGNTIKRLQEETGAKISVLGKGSMRDKAKEEELRKGGDPKYAHLNMDLHVFIEVFGPPCEAYALMAHAMEEVKKFLVPDMMDDICQEQFLELSYLNGVPEPSRGRGVPVRGRGAAPPPPPVPRGRGVGPPRGALVRGTPVRGAITRGATVTRGVPPPPTVRGAPAPRARTAGIQRIPLPPPPAPETYEEYGYDDTYAEQSYEGYEGYYSQSQGDSEYYDYGHGEVQDSYEAYGQDDWNGTRPSLKAPPARPVKGAYREHPYGRY

SEQ ID NO: 6189 - DNA, 670 bp, Rattus norvegicus
  ref <308>: DATABASE ACCESSION NUMBER: EMBL / AA894174
  ref <309>: DATABASE ENTRY DATE: 2000-03-03
ctgagaataattttaaaggaaggtgaaactttattatattttttattatagaattagaaaatgtcaaaaataattgtttggaatcacaaaaaattaaaaaggaatataataattgattcatcaaaaggcattctagctgctgttagcatattttctttctttggattatgaacttctatgatttcaactgaatacttttgacagtttccttaagatatgattttgacttattttttcttcagtatttctgtcatttcaggaaccaccttaaataaatctgcaactattccataatctgccacttggaaaattggagcttctgggtctttgttaatagccacaattgtcttgctgtccttcatcccagctaaatgctggatggctccagatattccaacagcaatataaagttctggagctactatttttcctgtctgaccaacttgcatgtcattgggaacaaagccagcatcaacagcagcacgggaagcaccaactgcagcatgcagctgatctgccaagtcatacagcagtttaaagttctctccactcttcaagccccgaccaccagataccaccactttggcaccagttagctctggtcggtcactttttgtcaatttctggtcaagccactctgatattcctgctgatgaaagaacttggtgcc

SEQ ID NO: 6190 - protein, 333 aa, Rattus norvegicus
  ref <308>: DATABASE ACCESSION NUMBER: SWISS-Prot / AAA41130
  ref <309>: DATABASE ENTRY DATE: 2001-10-16
MFRAAAPGQLRRAASLLRFQSTLVIAEHANDSLAPITLNTITAAGRLGGEVSCLVAGTKCDKVVQDLCKVAGVAKVLVAQHDAYKGLLPEELTPLILETQKQFSYTHIVAGASAFGKNLLPRVAAKLNVAPVSDIIEIKSPDTFVRTIYAANALCTVKCDEKVKVFSVRGTSFEAAAASGGSASSEKAPSSSSAGISEWLDQKLTKSDRPELTGAKVVVSGGRGLKSGENFKLQYDLADQLHAAVGASRAAVDAGFVPNDMQVGQTGKIVAPELYIAVGISGAIQHLAGMKDSKTIVAINKDPEAPIFQVADYGIVADLFKVVPEMTEILKKK

SEQ ID NO: 6191 - DNA, 911 bp, Homo sapiens
  ref <308>: DATABASE ACCESSION NUMBER: EMBL / BE535809
  ref <309>: DATABASE ENTRY DATE: 2000-08-11
tggtggctcagcatgatgtgtacaaaggcctacttccagaggaactgacaccattgatttggcaactcagaagcagttcaattacacacacatctgtgctggagcatctgccttcggaaagaaccttttgcccagagtagcagccaaacttgaggttgccccgatttctgacatcattgcaatcaagtcacctgacacatttgtgagaactatttatgcaggaaatgctctatgtacagtgaagtgtgatgagaaagtgaaagtgttttctgtccgtggaacatcctttgatgctgcagcaacaagtggcggtagtgccagttcagaaaaggcatcaagtacttcaccagtggaaatatcagagtggcttgaccagaaattaacaaaaagtgatcgaccagagctaacaggtgccaaagtggtggtatctggtggtcgaggcttgaagagtggagagaactttaagtgtgttatatgacttggcagatcaactacatgctgcagtgggtgcttcccgtgctgctgttgatgctggctttgttcccaatgacatgcaagttggcagacgggaaaaatagtagcaccagaactttatattgctgttggatatctgggagccatccaacattttagctggatgaacgacccgccagaccattgtggcaattgattaagaacccagaagttccaatttcccagtggccgatatgggtcgtgcgattatttaggggtccggatggctggctttgtgagaactgatcggtctgcttgaaggaactggtgggtcccgcgatcccattgtggggttttccccttggggcggggcgctcatgtgggcgcgtaccgcccgcgtggggcgggcctccttgtggccccttggccttcttcctctgcctaaaaggcggctgctg

SEQ ID NO: 6192 - protein, 333 aa, Homo sapiens
  ref <308>: DATABASE ACCESSION NUMBER: SWISS-Prot / P13804
  ref <309>: DATABASE ENTRY DATE: 2002-06-15
MFRAAAPGQLRRAASLLRFQSTLVIAEHANDSLAPITLNTITAATRLGGEVSCLVAGTKCDKVAQDLCKVAGIAKVLVAQHDVYKGLLPEELTPLILATQKQFNYTHICAGASAFGKNLLPRVAAKLEVAPISDIIAIKSPDTFVRTIYAGNALCTVKCDEKVKVFSVRGTSFDAAATSGGSASSEKASSTSPVEISEWLDQKLTKSDRPELTGAKVVVSGGRGLKSGENFKLLYDLADQLHAAVGASRAAVDAGFVPNDMQVGQTGKIVAPELYIAVGISGAIQHLAGMKDSKTIVAINKDPEAPIFQVADYGIVADLFKVVPEMTEILKKK

SEQ ID NO: 6193 - DNA, 670 bp, Rattus norvegicus; identical to SEQ ID NO: 6189
  ref <308>: DATABASE ACCESSION NUMBER: EMBL / AA894174
  ref <309>: DATABASE ENTRY DATE: 2000-03-03

SEQ ID NO: 6194 - protein, 333 aa, Rattus norvegicus; identical to SEQ ID NO: 6190
  ref <308>: DATABASE ACCESSION NUMBER: SWISS-Prot / AAA41130
  ref <309>: DATABASE ENTRY DATE: 2001-10-16

SEQ ID NO: 6195 - DNA, 911 bp, Homo sapiens; identical to SEQ ID NO: 6191
  ref <308>: DATABASE ACCESSION NUMBER: EMBL / BE535809
  ref <309>: DATABASE ENTRY DATE: 2000-08-11

SEQ ID NO: 6196 - protein, 333 aa, Homo sapiens; identical to SEQ ID NO: 6192
  ref <308>: DATABASE ACCESSION NUMBER: SWISS-Prot / P13804
  ref <309>: DATABASE ENTRY DATE: 2002-06-15

SEQ ID NO: 6197 - DNA, 670 bp, Rattus norvegicus; identical to SEQ ID NO: 6189
  ref <308>: DATABASE ACCESSION NUMBER: EMBL / AA894174
  ref <309>: DATABASE ENTRY DATE: 2000-03-03

SEQ ID NO: 6198 - protein, 333 aa, Rattus norvegicus; identical to SEQ ID NO: 6190
  ref <308>: DATABASE ACCESSION NUMBER: SWISS-Prot / AAA41130
  ref <309>: DATABASE ENTRY DATE: 2001-10-16

SEQ ID NO: 6199 - DNA, 911 bp, Homo sapiens; identical to SEQ ID NO: 6191
  ref <308>: DATABASE ACCESSION NUMBER: EMBL / BE535809
  ref <309>: DATABASE ENTRY DATE: 2000-08-11

SEQ ID NO: 6200 - protein, 333 aa, Homo sapiens; identical to SEQ ID NO: 6192
  ref <308>: DATABASE ACCESSION NUMBER: SWISS-Prot / P13804
  ref <309>: DATABASE ENTRY DATE: 2002-06-15

SEQ ID NO: 6201 - DNA, 670 bp, Rattus norvegicus; identical to SEQ ID NO: 6189
  ref <308>: DATABASE ACCESSION NUMBER: EMBL / AA894174
  ref <309>: DATABASE ENTRY DATE: 2000-03-03

SEQ ID NO: 6202 - protein, 333 aa, Rattus norvegicus; identical to SEQ ID NO: 6190
  ref <308>: DATABASE ACCESSION NUMBER: SWISS-Prot / AAA41130
  ref <309>: DATABASE ENTRY DATE: 2001-10-16

SEQ ID NO: 6203 - DNA, 911 bp, Homo sapiens; identical to SEQ ID NO: 6191
  ref <308>: DATABASE ACCESSION NUMBER: EMBL / BE535809
  ref <309>: DATABASE ENTRY DATE: 2000-08-11

SEQ ID NO: 6204 - protein, 333 aa, Homo sapiens; identical to SEQ ID NO: 6192
  ref <308>: DATABASE ACCESSION NUMBER: SWISS-Prot / P13804
  ref <309>: DATABASE ENTRY DATE: 2002-06-15

SEQ ID NO: 6205 - DNA, 670 bp, Rattus norvegicus; identical to SEQ ID NO: 6189
  ref <308>: DATABASE ACCESSION NUMBER: EMBL / AA894174
  ref <309>: DATABASE ENTRY DATE: 2000-03-03

SEQ ID NO: 6206 - protein, 333 aa, Rattus norvegicus; identical to SEQ ID NO: 6190
  ref <308>: DATABASE ACCESSION NUMBER: SWISS-Prot / AAA41130
  ref <309>: DATABASE ENTRY DATE: 2001-10-16

SEQ ID NO: 6207 - DNA, 911 bp, Homo sapiens; identical to SEQ ID NO: 6191
  ref <308>: DATABASE ACCESSION NUMBER: EMBL / BE535809
  ref <309>: DATABASE ENTRY DATE: 2000-08-11

SEQ ID NO: 6208 - protein, 333 aa, Homo sapiens; identical to SEQ ID NO: 6192
  ref <308>: DATABASE ACCESSION NUMBER: SWISS-Prot / P13804
  ref <309>: DATABASE ENTRY DATE: 2002-06-15

SEQ ID NO: 6209 - DNA, 670 bp, Rattus norvegicus; identical to SEQ ID NO: 6189
  ref <308>: DATABASE ACCESSION NUMBER: EMBL / AA894174
  ref <309>: DATABASE ENTRY DATE: 2000-03-03

SEQ ID NO: 6210 - protein, 333 aa, Rattus norvegicus; identical to SEQ ID NO: 6190
  ref <308>: DATABASE ACCESSION NUMBER: SWISS-Prot / AAA41130
  ref <309>: DATABASE ENTRY DATE: 2001-10-16

SEQ ID NO: 6211 - DNA, 911 bp, Homo sapiens; identical to SEQ ID NO: 6191
  ref <308>: DATABASE ACCESSION NUMBER: EMBL / BE535809
  ref <309>: DATABASE ENTRY DATE: 2000-08-11

SEQ ID NO: 6212 - protein, 333 aa, Homo sapiens; identical to SEQ ID NO: 6192
  ref <308>: DATABASE ACCESSION NUMBER: SWISS-Prot / P13804
  ref <309>: DATABASE ENTRY DATE: 2002-06-15

SEQ ID NO: 6213 - DNA, 644 bp, Rattus norvegicus
  ref <308>: DATABASE ACCESSION NUMBER: EMBL / AA894189
  ref <309>: DATABASE ENTRY DATE: 2000-03-03
gaaaaaggaatttagtagggaatggagcagtaaccatcaagaggaactggcacttgagatttgtagaaacatacctaggagagatggtcccctgacctaactaatttccgggtaggtgtgtaggaatttgggaagttgcctcagcacctgagtcatgtgctgcccctagctgaggcacttccccggccacccctccctgcaggcagctctctatgatgctgatgctggcacagtcgaacccacagctctttgcactcattggcactcaagcaaatgtcacaaaggagctggaacgtgtggagcatcagtcacggctggaacagctgagcccctctgaactgcagagcaagaacagagaccactgggaaacctggctacaggaatacaggtaggcagccctcagggtcatctgtactggcttcttgatacaatggccatcttacaaggtggctgcagatggccccgaattgggggcatggcacatgctgttctttggaaaaatttgattccagagagcgtctggacaaggagaaggagggtgtcggagacattgctgcctggcaggcagaacgtgtacgcatcatgcatgccaacaaccccaagtacgtcctaaagaactatattgcacagaaagccattgaagc

SEQ ID NO: 6214 - DNA, 4135 bp, Homo sapiens
  ref <308>: DATABASE ACCESSION NUMBER: EMBL / AL137665
  ref <309>: DATABASE ENTRY DATE: 2000-02-18
cacgagtacctcagcttccgagataagtcgtactggacacatggctacgtgctcatctccaaagaggtggaggactgtgttcccgtgtttctgaagcacattgcccacgacatatacgtctgcggaaagaccattaacctgctgaagctctgctgcccccggcattacctctgttggtccgacgtccctgtcccccggatctcggtgattttctcccttgaggagttgaaggagattgagaaggactgtgccgtctacgttgggcgcatggagagggtggcccgccacagctctgtcagcaaggaggagaaggaattacgtatggaaattgcaaaacaagaattaatcgctcatgcccgggaagcagcatccagggtcctgagtgcactgagtgaccggcagatgtcagaacggatggccttggatgcccggaagcgtgagcagtttcagaggctgaaagaacaatttgtgaaggaccaggagcgacgccaggcggccaggcaggaggagctggatgatgacttcagctacgcccgtgaactccgagacagggagagaaggctgaagtccctggaggaggagctggagaggaaggcgaggcaggcactggtcgaccactacagcaagctctctgcagaggcagctcgtcgggagcagaaggcactgtggagaatccagaggcaccgactggagagtgcacggcttcgttttctcttagaagatgagaaacacattcaggagatgctgaaagcagtgtctgaggctcaccagccccaggagccgccagacgtcctcttgagcgtgcacccccaggtcacgtctccgggccctgagcacccagagggaggccaaggctgtgattctgggtctgcagagcaacactcgcctgcctgggatggctggaacaggccaggcctgctgaccccacagccccttaagcctctagcagtgggggctggtggcagggggctgcagcaggcggagggggccagacccttctctgacagcctcagcattggagacttcctacctgtgggcccaggggctgagccgtccgtgcagactggcatggtccctctcctggaggtggcgctgcagaccattaacttggacctgcccccctcagctcctggggaggcacccgcagcagccagcactcagccctccaggccacaggagtacgactttagtactgtcctgaggccagctgtggccacctcacctgcaccagggcccctgcaggctgcagagtgcagcttgggcagctcagggctacagctgtgggaggacagttgtgggaagatggatgcctgtggctccgcctcgcgggagactctgctcccctcacacccacccaggcgtgctgctctggaggaggggagcagccagcccacagagcggctctttgggcaggtgtcagggggtggtcttcccacaggggactacgcttctgaaatagctcccacccggccacggtggaacacccacgggcacgtgtctgacgccagcatcagggtcggggagaatgtgtcagatgtggctcccacccagccacggtggaacacccacggacacgtatccaatgccagcatcagcttaggggagtctgtgtcagatgtggctcccactcggccacggtggaacatccatggacatgtgtccaacgccagcatcagggtcggggagaatgtgtcagatgtggctcccaccaggccacggtggaatacccacgggcacgtgtccaacgccagcatcagggttggggagaacgtgtcggacgtggctcccacccggccacggtggaacacccatggacacgtgtccgatgccagcatcagcttgggggagtctgtgtcagacatggctcccgcccggccacggtggaacacccatggacacgtgtctgatgccagcatcagcttgggggagtctgtgtcagacatggctcccacccggccacggtggaacacccacggacatgtgtctgacaccagcatcagggttggggagaacgtatcggacgtggctcccatccggtcacggtgcaacacccatggacacgtgtccgacgccagcatcagcttgggggagcctgtgtcggatgtggtttccacccggccacggtggaacacccatgtacccatccctccgccccacatggtgctgggggctctctcaccagaagctgagcccaacacacccaggccccaacagagcccccctggccacacgtcccagtcagcgctcagcctgggagcacagagcactgtgctggactgtgggccacggctgcctgtagaagtggggccatctctgtcctcccccagctcgggctgcggggaggggagcatcagcgtgggggagaacgtgtcagacgtggctcccacccaaccatggtggcccaacaccccgggagacagtgtctctgaagaactaggtcagagtagggtggctggtggtcaggagtgggactgtgggacgcacagagcctgggaggtaggcgggcagtggggttggtggcatgtgaagttcccctcaggcctcctcgtcagccaggacctgggctgctgtgggggacatgggaggggctgcttgagccagggccggctcggctccgtacccgccacaggcactcggccctgatgccctcgtgtccacttgtgtccacacaggccctgggaggagcggggacgctgaggacctctctccaaattggcctctcaactcacaggaagacacagctgcccagagcagcccaggccgtggtgaggaggcggaggcatcggcggcggaggctcagggtggggagcaggcctacctggcaggcctggcagggcagtaccacttggagcggtacccggacagttacgagtccatgtccgagccgcccattgctcatcttttgcgccccgtgcttccccgggccttcgccttccccgtggacccccaggtccagtctgccgctgatgagactgctgtgcagctgagcgagttgctgacgctgcccgtgctcatgaagcgctccatcacggcaccgctggccgcccacatctccttggtgaacaaggccgctgtcgactacttcttcgtggagctgcacctggaggcgcactatgaggcactgcggcacttcctgctgatggaggacggcgagttcgcccagtccctcagcgacctgctctttgagaagcttggagctgggcaaacgcccggagagctgctcaacccgctggtgctgaactctgtgctgagcaaggccctgcagtgcagcctgcatggggacaccccgcacgcctccaacctctccctcgctctcaagtacctgcccgaggtgtttgcccccaacgccccggatgtgctgagctgcctggagctcaggtacaaggtggactggcctctcaacattgtcatcaccgagggctgcctgagcaagtacagcggcgtcttctccttcctgctgcagctgaagctcatgatgtgggcgctcaaggacgtctgcttccacctcaagcgcacagccctgctgagccacatggccggctctgtgcagttccgtcagctgcagctgttcaagcacgagatgcagcatttcgtgaaggtcatccagggctacatcgccaaccagatcctgcacgtcacctggtgcgagttcagggccaggttggccaccgtgggcgacctggaggagatccagcgtgcgcacgcagagtacctgcacaaggccgtcttcaggggcctgctcacggagaaggcggcgcccgtcatgaacgtcatccacagcatcttcagcctcgtgctcaagttccgcagccagctcatctcccaggcctgggggccccctgggggcccgcggggtgcagagcaccccaactttgcactcatgcagcagtcctacaacaccttcaagtactactcccactttctcttcaaagtggtgaccaagctggtgaaccgcggctaccagccccacctggaggactttctgctgcgcatcaacttcaacaactactaccaggacgcctgaggctgctctgcgggggacgtgcacaataaaggtgttctcggaaaaaaaaaaaaaaaaaaaaaaaaaaaaaaaaaaaaaaaaaaaaaaaaaaaaaaaaaaaaaaaaaaaaaa

SEQ ID NO: 6215 - protein, 1819 aa, Homo sapiens
  ref <308>: DATABASE ACCESSION NUMBER: SWISS-Prot / Q96RT7
  ref <309>: DATABASE ENTRY DATE: 2002-06-15
MASITQLFDDLCEALLPAAKTHLGQRSVNRKRAKRSLKKVAYNALFTNLFQDETQQLQPDMSKLPARNKILMLSFDLRVGGLGPKADRLEELVEELEAAPCCPLLEVGSVLDLLVQLAGSGPPQVLPRKRDYFLNNKHVGRNVPYSGYDCDDLSVFEMDVQSLISREECLCHSMIQETLQVMEAAPGTGLPTVGLFSFGDPCGDRFERDTRVSLFGALVHSRTYDMDVRLGLPPVPDNADLSGLAIKVPPSVDQWEDEGFQSASNLTPDSQSEPSVTPDVDLWEAALTYEASKRRCWERVGCPPGHREEPYLTEAGRDAFDKFCRLHQGELQLLAGGVLQAPQPVLVKECELVKDVLNVLIGVVSATFSLCQPAQAFVVKRGVHVSGASPESISSLLSEVAEYGTCYTRLSHFSLQPVLDSLYSKGLVFQAFTSGLRRYLQYYRACVLSTPPTLSLLTIGFLFKKLGRQLRYLAELCGVGAVLPGTCGGGPRAAFPTGVKLLSYLYQEALHNCSNEHYPVLLSLLKTSCEPYTRFIHDWVYSGVFRDAYGEFMIQVNHEYLSFRDKSYWTHGYVLISKEVEDCVPVFLKHIAHDIYVCGKTINLLKLCCPRHYLCWSDVPVPRISVIFSLEELKEIEKDCAVYVGRMERVARHSSVSKEEKELRMEIAKQELIAHAREAASRVLSALSDRQMSERMALDARKREQFQRLKEQFVKDQERRQAARQEELDDDFSYARELRDRERRLKSLEEELERKARQALVDHYSKLSAEAARREQKALWRIQRHRLESARLRFLLEDEKHIQEMLKAVSEAHQPQEPPDVLLSVHPQVTSPGPEHPEGGQGCDSGSAEQHSPAWDGWNRPGLLTPQPLKPLAVGAGGRGLQQAEGARPFSDSLSIGDFLPVGPGAEPSVQTGMVPLLEVALQTINLDLPPSAPGEAPAAASTQPSRPQEYDFSTVLRPAVATSPAPGPLQAAECSLGSSGLQLWEDSCGKMDACGSASRETLLPSHPPRRAALEEGSSQPTERLFGQVSGGGLPTGDYASEIAPTRPRWNTHGHVSDASIRVGENVSDVAPTQPRWNTHGHVSNASISLGESVSDVAPTRPRWNIHGHVSNASIRVGENVSDVAPTRPRWNTHGHVSNASIRVGENVSDVAPTRPRWNTHGHVSDASISLGESVSDMAPARPRWNTHGHVSDASISLGESVSDMAPTRPRWNTHGHVSDTSIRVGENVSDVAPIRSRCNTHGHVSDASISLGEPVSDVVSTRPRWNTHVPIPPPHMVLGALSPEAEPNTPRPQQSPPGHTSQSALSLGAQSTVLDCGPRLPVEVGPSLSSPSSGCGEGSISVGENVSDVAPTQPWWPNTPGDSVSEELGPGRSGDAEDLSPNWPLNSQEDTAAQSSPGRGEEAEASAAEAQGGEQAYLAGLAGQYHLERYPDSYESMSEPPIAHLLRPVLPRAFAFPVDPQVQSAADETAVQLSELLTLPVLMKRSITAPLAAHISLVNKAAVDYFFVELHLEAHYEALRHFLLMEDGEFAQSLSDLLFEKLGAGQTPGELLNPLVLNSVLSKALQCSLHGDTPHASNLSLALKYLPEVFAPNAPDVLSCLELRYKVDWPLNIVITEGCLSKYSGVFSFLLQLKLMMWALKDVCFHLKRTALLSHMAGSVQFRQLQLFKHEMQHFVKVIQGYIANQILHVTWCEFRARLATVGDLEEIQRAHAEYLHKAVFRGLLTEKAAPVMNVIHSIFSLVLKFRSQLISQAWGPPGGPRGAEHPNFALMQQSYNTFKYYSHFLFKVVTKLVNRGYQPHLEDFLLRINFNNYYQDA

SEQ ID NO: 6216 - DNA, 584 bp, Rattus norvegicus
  ref <308>: DATABASE ACCESSION NUMBER: EMBL / AA894193
  ref <309>: DATABASE ENTRY DATE: 2000-03-03
tgattttattgagatttacttacaggagtatcaataagggattacttacaggaataagggtgactcaaagtcagttgcatcaccaaaaagtacactgagaaggggtgaccactcaaaaaacttcaaccctgtagctgctcctcacacaactttcaggccgtcataatagttaaaaaatttaagtacttcattatcttatgatttcttttatatacttattcatatgaataaagttagagcagaaaagagagagattataatacatagaaaatgaaatccagagaatgatctgaggattctttgaaaacatacaataaactggaaaatcgtgaagaatttcaagacatatatgaaatatcaaaattaggccaaagttggaggtttcacaagcctccccctccacatatcataggctattgcgattgttcttggttaccacacagaacttgacagtaagaccttattactgaaaacaccacacatcaagtcatagagcaattaggaaatcatagcttatactgccctagaagcttcatccttctggctagctgtcatagtgctagatgatgctgtgcatgctacca

SEQ ID NO: 6217 - DNA, 555 bp, Rattus norvegicus
  ref <308>: DATABASE ACCESSION NUMBER: EMBL / AA894199
  ref <309>: DATABASE ENTRY DATE: 2000-03-03
cggagctggggaccgaacccagggccttgcacttcctaggcaagcgctctaccgctgagctaaatccccaaccccatacctgtcacttttaagacaattcttatgttcatgaatccaaaagaccatcacacaaaacaccaggcacttgtaaaggccatcagtaaccagatccatgttggcatcttgcttctacctcagtttagttccttcaaaaaacaagctacattccgagataaagctgacataaacacactaggagcatctgtgcctctgcctctagtctagggagggagttttctctcaagcacaaagctcgctattctaactatccttctggataagtgttatcagatcatgtagggcagcataaacctaatcagagttagaatgaaattaagtggtgtggatttcttaatttacagtacttgtgtgacaatcaagtcacacaagtgactgtattattagtcttcctcaatgttgtgaaatgacatcgaacaagaaagatctgtttttatatgaacaatgccagaaatgcttcttcctctttcttccatc

SEQ ID NO: 6218 - DNA, 630 bp, Rattus norvegicus
  misc_feature (1)..(630): n=a, c, g or t
  ref <308>: DATABASE ACCESSION NUMBER: EMBL / AA894207
  ref <309>: DATABASE ENTRY DATE: 2000-03-03
aatggagtgtgctggatgtctctacagttttgttcagatgactacagaacctggaaaagctgttgctgctgttgatgcataacacactgctattattggtctttttatataaatataaatatatatatacagataaataatttgaattttttgaaactttacctgtgctgtcaactttggaaaaaagtatccccgtttactgtgttgagttggcactgtaaagaaattaacagccatattggtctagaaatgttgaacttgagttttttccatttgtacaggggtaacacactgtattaaatatgtaaggtcttatctacgtgggtttgattacaaaaactaataaagtattctctaaattaaaaaaaaagatgtatgtgtactaagggctgagtcacaccactagaaatagtttttttgtaaaataaataacttaatcgtggggttcacattgagatcaaatatcctacaacaggtcggtttccaataattcctcaagacgtcaagtagcgactagctcctttccagcaatccagctctgctctgatgccatgtacctagagaccacatcacagattcacagaagcagggtgagggttcagcctanaggagtgcccctctacctctgac

SEQ ID NO: 6219 - protein, 618 aa, Rattus norvegicus
  ref <308>: DATABASE ACCESSION NUMBER: SWISS-Prot / AAF17574
  ref <309>: DATABASE ENTRY DATE: 2003-02-01
MSQLSSTLKRYTESSRYTDAPYAKSGYGTYTPSSYGANLAASFLEKEKLGFKPVSPTSFLPRPRTYGPSSILDCDRGRPLLRSDITGGSKRSESQTRGNERPSGSGLNGGSGFPYGVTSNSLSYLPMNARDQGVTLGQKKSNSQSDLARDFSSLRTSDSYRTSDGYRASDGSRIDPGNLGRSPMLARTRKELCALQGLYQAASRSEYLTDYLENYGRKGSAPQVLTQAPPSRVPEVLSPTYRPSGRYTLWEKNKGQASGASRSTSPGRDTMNSKSAQGLAGLRNLGNTCFMNSILQCLSNTRELRDYCLQRLYMRDLGHTSSAHTALMEEFAKLIQTIWTSSPNDVVSPSEFKTQIQRYAPRFVGYNQQDAQEFLRFLLDGLHNEVNRVAARPKPSPESLDHLPDEEKGRQMWRKYLEREDSRIGDLFVGQLKSSLTCTDCGYCSTVFDPFWDLSLPIAKRGYPEVTLMDCMRLFTKEDVLDGDEKPTCCRCRARKRCIKKFSVQRFPKILVLHLKRFSESRIRTSKLTTFVNFPLRDLDLREFASENTNHAVYNLYAVSNHSGTTMGGHYTAYCRSPVTGEWHTFNDSSVTPMSSSQVRTSDAYLLFYELASPPSRM

SEQ ID NO: 6220 - DNA, 2307 bp, Homo sapiens; identical to SEQ ID NO: 5170
  misc_feature (1)..(2307): n=a, c, g or t
  ref <308>: DATABASE ACCESSION NUMBER: EMBL / AJ006470
  ref <309>: DATABASE ENTRY DATE: 2000-03-23

SEQ ID NO: 6221 - protein, 401 aa, Homo sapiens; identical to SEQ ID NO: 5171
  ref <308>: DATABASE ACCESSION NUMBER: SWISS-Prot / O75718
  ref <309>: DATABASE ENTRY DATE: 2002-06-15

SEQ ID NO: 6222 - DNA, 630 bp, Rattus norvegicus; identical to SEQ ID NO: 6218
  misc_feature (1)..(630): n=a, c, g or t
  ref <308>: DATABASE ACCESSION NUMBER: EMBL / AA894207
  ref <309>: DATABASE ENTRY DATE: 2000-03-03

SEQ ID NO: 6223 - protein, 618 aa, Rattus norvegicus; identical to SEQ ID NO: 6219
  ref <308>: DATABASE ACCESSION NUMBER: SWISS-Prot / AAF17574
  ref <309>: DATABASE ENTRY DATE: 2003-02-01

SEQ ID NO: 6224 - DNA, 2307 bp, Homo sapiens; identical to SEQ ID NO: 5170
  misc_feature (1)..(2307): n=a, c, g or t
  ref <308>: DATABASE ACCESSION NUMBER: EMBL / AJ006470
  ref <309>: DATABASE ENTRY DATE: 2000-03-23

SEQ ID NO: 6225 - protein, 401 aa, Homo sapiens; identical to SEQ ID NO: 5171
  ref <308>: DATABASE ACCESSION NUMBER: SWISS-Prot / O75718
  ref <309>: DATABASE ENTRY DATE: 2002-06-15

SEQ ID NO: 6226 - DNA, 630 bp, Rattus norvegicus; identical to SEQ ID NO: 6218
  misc_feature (1)..(630): n=a, c, g or t
  ref <308>: DATABASE ACCESSION NUMBER: EMBL / AA894207
  ref <309>: DATABASE ENTRY DATE: 2000-03-03

SEQ ID NO: 6227 - protein, 618 aa, Rattus norvegicus; identical to SEQ ID NO: 6219
  ref <308>: DATABASE ACCESSION NUMBER: SWISS-Prot / AAF17574
  ref <309>: DATABASE ENTRY DATE: 2003-02-01

SEQ ID NO: 6228 - DNA, 2307 bp, Homo sapiens; identical to SEQ ID NO: 5170
  misc_feature (1)..(2307): n=a, c, g or t
  ref <308>: DATABASE ACCESSION NUMBER: EMBL / AJ006470
  ref <309>: DATABASE ENTRY DATE: 2000-03-23

SEQ ID NO: 6229 - protein, 401 aa, Homo sapiens; identical to SEQ ID NO: 5171
  ref <308>: DATABASE ACCESSION NUMBER: SWISS-Prot / O75718
  ref <309>: DATABASE ENTRY DATE: 2002-06-15

SEQ ID NO: 6230 - DNA, 630 bp, Rattus norvegicus; identical to SEQ ID NO: 6218
  misc_feature (1)..(630): n=a, c, g or t
  ref <308>: DATABASE ACCESSION NUMBER: EMBL / AA894207
  ref <309>: DATABASE ENTRY DATE: 2000-03-03

SEQ ID NO: 6231 - protein, 618 aa, Rattus norvegicus; identical to SEQ ID NO: 6219
  ref <308>: DATABASE ACCESSION NUMBER: SWISS-Prot / AAF17574
  ref <309>: DATABASE ENTRY DATE: 2003-02-01

SEQ ID NO: 6232 - DNA, 2307 bp, Homo sapiens; identical to SEQ ID NO: 5170
  misc_feature (1)..(2307): n=a, c, g or t
  ref <308>: DATABASE ACCESSION NUMBER: EMBL / AJ006470
  ref <309>: DATABASE ENTRY DATE: 2000-03-23

SEQ ID NO: 6233 - protein, 401 aa, Homo sapiens; identical to SEQ ID NO: 5171
  ref <308>: DATABASE ACCESSION NUMBER: SWISS-Prot / O75718
  ref <309>: DATABASE ENTRY DATE: 2002-06-15

SEQ ID NO: 6234 - DNA, 461 bp, Rattus norvegicus
  ref <308>: DATABASE ACCESSION NUMBER: EMBL / AA894234
  ref <309>: DATABASE ENTRY DATE: 2000-03-03
ggctggtgacagtatggtggctcacacgacatggttccaaatctgtcactaccctccgtgaggcccctcaccggtctccagataccaaggctccagcaggcaaaggccgttcttgcatctgtgaccatggctgctacctgccttcatggcaggacctcactatctctccaccaacaggcttcacatttccagggttcctctcagacttgggccggaccccatctggaggtctgagcagcccgaggtgatggggcacaagtgtcagcagagtgtccgatgggcccaagtctagacattggccttacgggctgagctgagggggatctccttgagctccgtccgcatgcacaggtactccccgatgacggccatgagtgcaatgcacacagcttggaccagccaccaggtcagcgccgaggggaaacgggagctgtacagccagcagcccaggaggtgacaga

SEQ ID NO: 6235 - DNA, 679 bp, Homo sapiens
  ref <308>: DATABASE ACCESSION NUMBER: EMBL / BG715448
  ref <309>: DATABASE ENTRY DATE: 2001-05-09
agcggaggcgcggctcgtgtccctgcagggcatggcgggtcagttccgcagctacgtgtgggacccgctgctgatcctgtcgcagatcgtcctcatgcagaccgtgtattacggctcgctgggcctgtggctggcgctggtggacgggctagtgcgaagcagcccctcgctggaccagatgttcgacgccgagatcctgggcttttccacccctccaggccggctctccatgatgtccttcatcctcaacgccctcacctggcacttctccttgctgctgccacatgaagaaggacgtgtttgcttccccttccaccatgattgagctgacatggacccaaatcctcgggccgccctggagcgccagcagctccgccttcgggagcggcaaaaattcttcgaggacattttacagccagagacagagtttgtctttcctctgtcccatctgcatctcgagtcgcagagaccccccataggtagtatctcatccatggaagtgaactgtggacacactggagcacgtagaacttattgaccttggggacccggatgcagacagatgtgatcttgccttgcgaagatcctccaccaagccccagtcgtctggggtggacaaccattctggaggagctgacgcctgccggtgcctacatcagacacggaccacatctaggag

SEQ ID NO: 6236 - DNA, 672 bp, Rattus norvegicus
  ref <308>: DATABASE ACCESSION NUMBER: EMBL / AA894258
  ref <309>: DATABASE ENTRY DATE: 2000-03-03
ataatctttattgagcttctgttacagaaggggtgtgacatttgcccttatggtgagttagtctggatgcgtgttctcagcccgaatgagaagtaaaatcttaacagagcacagaatagaaaggaccttggggatcacttagcccagcccattattttcatggaggaaatgaaaccaaagaaaggagaacgatctagcgaaggtctcacagcaagggaggctggtccctgtcaatctccattcctaaccacagtactctgtgctaagctgtttccccaagcctttgggtttgctggcttgctttatgtggtcccactggttaaacaaccaaactatcaggtacctaacatgacggtagggacttttacttcagctttaaaatcagcatatcgaaatgattcctgagcctttagctacttcattattgagaatgcagtccacagtaaatcatggctatctacggtagtcatcttcaaatgtttgcacagacaccaaaagcactaatgacacttgtacgaaagcatccatgcgattccaggacgcttctcatggaatacagcggcaccatggtggtgaccagaagaggcttcagtctctcaaagtgcggtcatgagtttgtcccggtatgtgacactgtacgcccctcctaagttcctctggatctggtcgtgg

SEQ ID NO: 6237 - protein, 147 aa, Rattus norvegicus
  ref <308>: DATABASE ACCESSION NUMBER: SWISS-Prot / P47986
  ref <309>: DATABASE ENTRY DATE: 2002-06-15
MALKRINKELSDLARDPPAQCSAGPVGDDMFHWQATIMGPNDSPYQGGVFFLTIHFPTDYPFKPPKVAFTTRIYHPNINSNGSICLDILRSQWSPALTISKVLLSICSLLCDPNPDDPLVPEIARIYKTDRDKYNRISREWTQKYAM

SEQ ID NO: 6238 - DNA, 724 bp, Homo sapiens
  ref <308>: DATABASE ACCESSION NUMBER: EMBL / U39318
  ref <309>: DATABASE ENTRY DATE: 2000-03-04
gagcatacaccgagagagtgaggagccagacgacaagcacacactatggcgctgaaacggattaataaggaacttagtgatttggcccgtgaccctccagcacaatgttctgcaggtccagttggggatgatatgtttcattggcaagccacaattatgggacctaatgacagcccatatcaaggcggtgtattctttttgacaattcattttcctacagactaccccttcaaaccacctaaggttgcatttacaacaagaatttatcatccaaatattaacagtaatggcagcatttgtctcgatattctaagatcacagtggtcgcctgctttaacaatttctaaagttcttttatccatttgttcactgctatgtgatccaaacccagatgaccccctagtgccagagattgcacggatctataaaacagacagagataagtacaacagaatatctcgggaatggactcagaagtatgccatgtgatgctaccttaaagtcagaataacctgcattatagctggaataaactttaaattactgttccttttttgattttcttatccggctgctcccctgatcagacctcatcttttttaattttattttttgtttacctccctccattcattcacatgctcatctgagaagacttaagttcttccagctttgacaataactgcttttagaaactgtaaagtagttacaagagaacagttgg

SEQ ID NO: 6239 - protein, 147 aa, Homo sapiens; identical to SEQ ID NO: 6237

SEQ ID NO: 6240 - DNA, 573 bp, Rattus norvegicus
  ref <308>: DATABASE ACCESSION NUMBER: EMBL / AA894273
  ref <309>: DATABASE ENTRY DATE: 2000-03-03
ggcgaggtttattacggcgacctattacagagatctccgggccgacacgtatcccgcgcaggagacagaggtgtcgaccccgaaactcaaaagtcagagggttatatagagaaggctagggggttttggcgtggatacatacaattggctcatttaaacatagcagtgagaacaaagcagaaagagtacgtgttagaagtcaggggctttcagcaggggtcaatcagccagtcgcagaggtctttcctccacccatgtgtttctgtcagtgtttgacactcctgctgtggtggctccaggtccggattgggcagcaaggtgaccagattgtccccaaccggtggagaatctagtccatggcagctgaccagtggtcccatcttttgggacactctatcagccactctatcacagtttaagtcctggattgggtgataattgttagtgcccggctggcaagagtgatgtgttccaagcagaacagcgctaagccattcatctcccagcatcagttactggtgcactgagacaggtcttaagctctacatacacagtctatacatatgtatacac

SEQ ID NO: 6241 - protein, 284 aa, Rattus norvegicus
  ref <308>: DATABASE ACCESSION NUMBER: SWISS-Prot / O08557
  ref <309>: DATABASE ENTRY DATE: 2001-10-16
AGLSHPSVFGRATHAVVRAPPESLCRHALRRSQGEEVDFARAERQHQLYVGVLGSKLGLQVVQLPADESLPDCVFVEDVAVVCEETALITRPGAPSRRKEVDMMKEALEKLQLNIVEMKDENATLDGGDVLFTGREFFVGLSKRTNQRGAEILADTFKDYAVSTVPVADSLHLKSFCSMAGPNLIAIGSSESAQKALKIMQQMSDHRYDKLTVPDDMAANCIYLNIPSKGHVLLHRTPEEYPESAKVYEKLKDHLLIPVSNSEMEKVDGLLTCCSVFINKKTDS

SEQ ID NO: 6242 - DNA, 2494 bp, Homo sapiens
  ref <308>: DATABASE ACCESSION NUMBER: EMBL / AK001459
  ref <309>: DATABASE ENTRY DATE: 2002-08-06
agtagacctttctgcgagtacgagccaaccggcagacccgactgaatgctcggattgggaaaatgaaacggaggaagcaagatgaagggcagagggaaggctcctgcatggctgaggatgatgctgtggacatcgagcatgagaacaacaaccgctttgaggagtatgagtggtgtggacagaagcggatacgggccaccactctcctggaaggtggcttccgaggctctggcttcatcatgtgcagcggcaaagagaacccggacagtgatgctgacttggatgtggatggggatgacactctggagtatgggaagccacaatacacagaggctgatgtcatcccctgcacaggcgaggagcctggtgaagccaaggagagagaggcacttcggggcgcagtcctaaatggcggccctcccagcacgcgcatcacacctgagttctctaaatgggccagtgatgagatgccatccaccagcaatggtgaaagcagcaagcaggaggccatgcagaagacctgcaagaacagcgacatcgagaaaatcaccgaagattcagctgtgaccacgtttgaggctctgaaggctcgggtcagagaacttgaacggcagctatctcgtggggaccgttacaaatgcctcatctgcatggactcgtactcgatgcccctaacgtccatccagtgttggcacgtgcactgcgaggagtgctggctgcggaccctggtgaggtggcatgggggtcggggaatgggaggccgctccgggcactgcccagatgtctgtgcttatgcctgagcctgcctgggggaagtggggagcatggcgcaaaggagaacagagccaggagccaggatatttacccgcaggatatttacccccaggctcgctgcctctcctccccaactgcaggtttaggaacttctccccctccatgagttcactgcattctcccttccccgccccggtccccgaaggcccactgcatcacacagactggtgaggcctggggtcaggaggaggctggctgtaggtaaacaggaccagggccttggcccctccccctcccattactaagctccttctgctcctgcccctgttcttcgctcaggagcagccattaaaatgtcgcccggagacagtaataaaaggctcggacgtgggctctgtgtcctgatcaaaggccgcgtgtaatctcgttagggctgcggctgccacagctggacccagccttgttctcattactggggctcctgctgcggggctggccaggcggtttgatcctggcgtccccccaacacaggagcgtgcctgcctgctcacagaagctgcctatgcgtccccagcctgggctgacaggaccaaggtctcagcacacactggtgcagagagacatggctgcaggcccaggtgctcacatgcgcacacatggctcattgtgtagaccagagccctccctgttctccctgcagggtgccaagaagctctgccctcagtgcaacacgatcacagcgcccggagacctgcggaggatctacttgtgagctatctgccccaggcaggcctcgcctccagcagccccacctgcccccagcctctgtgacagtgaccgtctccctttgtacatacttgcacacaggttccccatgtacatacatgcacatactcaaacatgcgtacacacacacacatttacacacgcaggactctggagccagagtagaggctgtggcccaggcactacctgctggctcccacctatggtttgggggccatacctgttccagctctgttcccagggtggggcagggaggtgggggttgggggagtagtggggcacggctcctaagatccagcccccatactgacagacggacagacagacatgcaaacaccagactgaagcacatgtaatatagaccgtgtatgtttacaatgttgtgtataaatgggacaactcctcgccctctacctgtcccctccccctttggttgtatgattttcttcttttttaagaacccctggaagcagcgcctccttcagggttggctgggagctcggcccatccacctcttggggtacctgcctctctctctcctgtggtgtcccttccctctcccatgtgctcggtgttcagtggtgtatatttcttctcccagacatggggcacacgccccaagggacatgatcctctccttagtcttagctcatggggctctttataaggagttggggggtagaggcaggaaatgggaaccgagctgaagcagaggctgagttagggggctagaggacagtgctcctggccacccagcctctgctgagaaccattcctgggattagagctgcctttcccagggaaaaagtgtcgtctccccgaccctcccgtgggccctgtggtgtgatgctgtgtctgtatattctatacaaaggtacttgtcctttccctttgtaaactacatttgacatggattaaaccagtataaacagtt

SEQ ID NO: 6243 - protein, 246 aa, Homo sapiens
  misc_feature (1)..(246): Xaa=Unknown amino acid
MKRRKQDEGQREGSCMAEDDAVDIEHENNNRFEEYEWCGQKRIRATTLLEGGFRGSGFIMCSGKENPDSDADLDVDGDDTLEYGKPQYTEADVIPCTGEEPGEAKEREALRGAVLNGGPPSTRITPEFSKWASDEMPSTSNGESSKQEAMQKTCKNSDIEKITEDSAVTTFEALKARVRELERQLSRGDRYKCLICMDSYSMPLTSIQCWHVHCEECWLRTLVRWHGGRGMGGRSGHCPDVCAYAX

SEQ ID NO: 6244 - DNA, 572 bp, Rattus norvegicus
  ref <308>: DATABASE ACCESSION NUMBER: EMBL / AA894277
  ref <309>: DATABASE ENTRY DATE: 2000-03-03
aaaacggactccaatttatttattgaaaatatcacaatggctgggcatgtatcacacgcctttggtcccatcacttgggcggaagaggcaggaggatctctgtgagttcaaggccaacctggtgtacatggtgagttccaggccagccaaggctacacagtgagactctgtcttggaaaaccaaaagaaaaggaaagatcataacacacagaatgccaatatccctcctcataaataaaggtagtggataaaaagacaaaatgaaggaatgctataaaactggacagttcccagctgctttaagctctgggtttgggcctggaggaggacttgtgctctgggagaatacaacatactaagcctttcttactctggcttgtgctttgtaatggagaccctatgtcccctaaaaacattccagaaaaacacgggattctatttttttcagcaatgctggcccagagagtccctctgcctcctgcggtgggggaagatctacactcacagtctcacgtccatcatacctgagcacacccaagctccctccccctgtacgtgatctcattcgaagc

SEQ ID NO: 6245 - protein, 120 aa, Rattus norvegicus
  ref <308>: DATABASE ACCESSION NUMBER: SWISS-Prot / BAB25613
  ref <309>: DATABASE ENTRY DATE: 2002-06-01
MVRILANGEIVQDDDPRVRTTTQHRSSSSQQGFFNRGHGAPPGGPGPRQQQAGARLGAAQSPFSDLNRQLVNMGFPQWHLGNHVVEPVTSILLLFLLMMLGVRGLLLVGLVYLVSHLSQR

SEQ ID NO: 6246 - DNA, 572 bp, Rattus norvegicus; identical to SEQ ID NO: 6244
  ref <308>: DATABASE ACCESSION NUMBER: EMBL / AA894277
  ref <309>: DATABASE ENTRY DATE: 2000-03-03

SEQ ID NO: 6247 - protein, 120 aa, Rattus norvegicus; identical to SEQ ID NO: 6245
  ref <308>: DATABASE ACCESSION NUMBER: SWISS-Prot / BAB25613
  ref <309>: DATABASE ENTRY DATE: 2002-06-01

SEQ ID NO: 6248 - DNA, 552 bp, Rattus norvegicus
  ref <308>: DATABASE ACCESSION NUMBER: EMBL / AA894282
  ref <309>: DATABASE ENTRY DATE: 2000-03-03
tgtgttttttttttttttttttttttttactggggagaaagtttatttatcaatttcacttttcaaagtcagatcataatttttttaacttttcccttaggatggatactcaagtgtttgatttggacttctatctgctctgaacttaactgagaagactaatttgctatttggtctaattatataagaaacttttacataaatggaagggttgcacattaatcgggttacctaggattgataaagtcaaaatgagtctttgggtttattaaaatctcatatagcttaaatcttttcagctataaaaaacctaatacaacagattgactttgtgtagttcactagcatatcacttacattgattcactggcactttaagcataagggcaaccttttaaaaactggagacctttaaaattaggccataagatttttcaaaacagttcatggtcatacattcagcagattcatactaaaaatagtcttattttgtagaataaaggccaagagaacattatgttacaagcttattattacatgtatatacatggc

SEQ ID NO: 6249 - DNA, 530 bp, Rattus norvegicus
  ref <308>: DATABASE ACCESSION NUMBER: EMBL / AA894304
  ref <309>: DATABASE ENTRY DATE: 2000-03-03
taaagagctttatttggcttgtacagcatggactttcatacattctccattaatttgtcattaaagtgccagacatttctttaatcacgatgacatttgttaaagaaatcggaacttttctcaagacacatcggtcatgagtgaatacttttcttaccaaacccagaatgtaagccccctcacattgacctgatgggttggacaacttgcgaacagattcgaatcccctctcaccttgagcaccaaactaggctgggactaacacacctggggattaagaagccatgctatagagattgagaaacaaccaccccactggctgccgcctcgtcagggccatgccagggcttcacggtttgtacaggtccaacctttagagcaattaagacctcgcctcctctgccaccttttatctcaccctcccttactcacaaaagccgccaaagtcattacaatgaaaataaggagtgggtttcccgttacccaggtactaacgaggttcagtacaaatagggaagataaacgcaaaa

SEQ ID NO: 6250 - DNA, 4051 bp, Homo sapiens
  ref <308>: DATABASE ACCESSION NUMBER: EMBL / M80899
  ref <309>: DATABASE ENTRY DATE: 2000-03-04
ttacccttcctaaagtggaaggtgacctcaagggcccagaagctgacatcaagggcccaaaagtggacatcaacacccctgatgtggatgttcatggcccagactggcacctgaagatgcccaaggtgaaaatgcccaaattcagcatgcctggcttcaaaggagaaggtccagatgtggatgtgaacctgcccaaggctgacattgatgtctcaggacccaaagtggacgttgatgttcctgatgtgaatatcgaaggtccagatgcgaaactaaagggccccaagttcaagatgcctgagatgagcatcaaagcccccaagatctccatgcctgatattgacttaaacctgaaaggacccaaagtgaagggtgatgtggatgttacccttcctaaagtggaaggtgacctcaagggcccagaagctgacatcaagggcccaaaagtggacatcaacacccctgatgtggatgttcatggcccagactggcacctgaagatgcccaaggtgaaaatgcccaaattcagcatgcctggcttcaaaggagaaggtccagatgtggatgtgagcctgcccaaggccgacatcgatgtctcgggacccaaggtggacgttgatattccagatgtgaatatcgaaggtccagacccaaaactgaaggtccccaaggtcaagatgcctgaaataaatatcaaagctcccaagatctccatacctgatgttgacctggatttgaaaggacccaaagtaaaaggagattttgatgtgtctgtccctaaggttgaagggactttgaaaggcccagaagtagatcttaaaggtccacgtctggatttcgaaggccctgatgccaaactcagtggcccatctttgaagatgccatcgctggagatatctgctcctaaagtaactgctcctgatgttgatttgcatctcaaggcaccaaaaattggattttcaggtccgaagttagaaggtggtgaagtggacctcaagggacccaaagttgaagctccaagcttagatgtacacatggacagcccagatattaacatcgaagggccagatgttaaaatccccaaatttaagaaacccaagtttggatttgggccaaaaagccccaaagctgacatcaagtcaccttcactggatgtcactgttcctgaggcagagctgaaccttgagactcctgaaattagtgttggtggcaagggcaagaaaagtaagtttaaaatgcctaaaattcatatgagtggtcctaagattaaggccaaaaaacagggatttgacctgaatgttcctgggggtgaaattgatgccagcctcaaggctccggatgtagatgtcaacatcgcagggccggatgctgcactcaaagtcgacgtgaaatcgcccaaaaccaagaaaacgatgtttggaaaaatgtacttcccagatgtagagtttgacattaaatcacctaaatttaaagctgaggcccctctccctagccccaaactggagggtgaactccaggcacctgatctggaactttctttgccagcgattcacgtcgaaggtcttgacatcaaggcgaaggctcccaaggtcaagatgccagatgtggacatctcagtgccaaaaatagagggtgacctgaaaggccccaaagtgcaggcaaacttgggtgcacctgacatcaacatcgaaggcctagatgctaaagtcaaaacaccgtccttcggcatttctgcccctcaagtctccatccctgatgtgaatgtaaacttgaaaggaccaaagataaagggtgatgtccccagcgtgggactggaaggaccagatgtagatctgcaaggtccagaagcaaaaattaagttccccaagttttccatgcccaagatcggcatcccaggtgtgaaaatggagggtgggggagccgaggtccatgcccagctaccctctcttgaaggagacttgagaggaccagatgttaagctcgaagggcccgatgtttctctaaaggggccaggagtagacttaccttcagtgaacctctctatgccaaaagtctctgggcctgaccttgatctgaacttgaaaggaccaagtttgaagggagacctggatgcatctgttcccagcatgaaggtgcatgctccagggctcaacctcagtggtgtcggtggcaaaatgcaggtgggaggagacggtgtgaaagtgccagggatcgatgccacaacaaagcttaacgttggggcaccagatgtgacactgaggggaccaagcctgcagggagatctggctgtctctggtgacatcaaatgccctaaagtatccgtaggagctcctgatctaagcttggaggcatccgaaggcagcattaaacttcccaaaatgaagctgccccaatttggtatctctactccggggtccgacttgcacgtcaatgccaaggggccacaggtttctggcgaactgaaggggccaggtgtggatgtgaacctgaaagggtctcggatttcagcaccgaatgtggactttaacttggaaggaccaaaagtgaaagggagccttggggccactggtgagatcaaaggccccactgtcggaggaggtcttccaggcattggtgttcaaggcctagaaggaaacctccagatgcctggaattaagtcctctggatgtgatgtgaacctgccaggcgtgaatgtgaaactcccaactgggcagatttctgggcctgaaatcaaaggtggtctgaaaggttcagaagtaggtttccatggggctgctcctgatatcagtgtgaaggggcctgcctttaatatggcatctcctgagtcagattttggcatcaacttgaagggcccaaaaatcaaaggaggtgcggatgtttcagggggtgtcagtgccccagacatcagccttggtgaagggcatttgagtgttaaaggttccgggggtgagtggaagggaccccaagtctcctctgctctcaacttggacacatctaagtttgctgggggccttcatttctcaggaccaaaggtggaaggaggtgtgaaaggaggtcagattggactccaggctcctgggctgagtgtgtctgggcctcaaggtcacttggaaagtggatctggaaaagtaacattccctaaaatgaagatccccaaatttaccttctctggccgtgagctggttggcagagaaatgggggtggatgttcacttccctaaagcagaggccagcatccaagctggtgctggagacggcgagtgggaagagtctgaagtcaaactgaaaaagtccaagatcaaaatgcccaagtttaatttttccaaacctaaagggaaaggtggtgtcactggctcaccagaagcatcaatttctgggtccaaaggtgacctgaaaagttcaaaggccagcctgggctctctggaaggagaggcagaggccgaagcctcttcaccgaaaggcaaattctccttatttaaaagtaagaagccacggcaccgctcaaattcattcagtgatgaaagagagttctctggaccttccaccccgacggggacgctggagtttgaaggtggggaagtgtctctggaaggtgggaaagttaaagggaaacacgggaagctgaaattcggtacctttggtggattggggtcaaagagcaaaggtcattatgaggtgactgggagcgatgatgagacaggcaagttacaggggagtggggtgtccctggcctctaagaagtcccgactgtcctcctcttctagcaatgacagtgggaataaggttggcatccagcttcccgaggtggagctgtcagtttccacaaagaaagagtagcaggcctttgtatgtgtgtacatatatatatatataacaaaacatcagccttgggtggtgtgttcctatataaactccaaagggaaacacaccgactgcctcagcaatcatgcaaagaccttgcctggcccggtggcaagcgctgaaaaaccgaccgcctgtaggctcctggaactatacagataggtaaagagttccaagttcgtccggaattc

SEQ ID NO: 6251 - protein, 2960 aa, Homo sapiens
  ref <308>: DATABASE ACCESSION NUMBER: SWISS-Prot / Q09666
  ref <309>: DATABASE ENTRY DATE: 2001-10-16
MPGIKVGGSGVNVNAKGLDLGGRGGVQVPAVDISSSLGGRPVEVQGPSLESGDHAKIKFPTMKVPKFGVSTGREGQTPKAGLRVSAPEVSVGHKGGKPGLTIQAPQLEVSVPSANIEGLEGKLKGPQITGPSLEGDLGLKGAKPQGHIGVDASAPQIGGSITGPSVEVQAPDIDVQGPGSKLNVPKMKVPKFSVSGAKGEETGIDVTLPTGEVTVPGVSGDVSLPEIATGGLEGKMKGTKVKTPEMIIQKPKISMQDVDLSLGSPKLKGDIKVSAPGVQGDVKGPQVALKGSRVDIETPNLEGTLTGPRLGSPSGKTGTCRISMSEVDLNVAAPKVKGGVDVTLPRVEGKVKVPEVDVRGPKVDVSAPDVEAHGPEWNLKMPKMKMPTFSTPGAKGEGPDVHMTLPKGDISISGPKVNVEAPDVNLEGLGGKLKGPDVKLPDMSVKTPKISMPDVDLHVKGTKVKGEYDVTVPKLEGELKGPKVDIDAPDVDVHGPDWHLKMPKMKMPKFSVPGFKAEGPEVDVNLPKADVDISGPKIDVTAPDVSIEEPEGKLKGPKFKMPEMNIKVPKISMPDVDLHLKGPNVKGEYDVTMPKVESEIKVPDVELKSAKMDIDVPDVEVQGPDWHLKMPKMKMPKFSMPGFKAEGPEVDVNLPKADVDISGPKVGVEVPDVNIEGPEGKLKGPKFKMPEMNIKAPKISMPDVDLHMKGPKVKGEYDMTVPKLEGDLKGPKVDVSAPDVEMQGPDWNLKMPKIKMPKFSMPSLKGEGPEFDVNLSKANVDISAPKVDTNAPDLSLEGPEGKLKGPKFKMPEMHFRAPKMSLPDVDLDLKGPKMKGNVDISAPKIEGEMQVPDVDIRGPKVDIKAPDVEGQGLDWSLKIPKMKMPKFSMPSLKGEGPEVDVNLPKADVDVSGPKVDIEAPDVSLEGPEGKLKGPKFKMPEMHFKTPKISMPDVDLHLKGPKVKGDVDVSVPKVEGEMKVPDVEIKGPKMDIDAPDVEVQGPDWHLKMPKMKMPKFSMPGFKGEGREVDVNLPKADIDVSGPKVDVEVPDVSLEGPEGKLKGPKFKMPEMHFKAPKISMPDVDLNLKGPKLKGDVDVSLPEVEGEMKVPDVDIKGPKVDISAPDVDVHGPDWHLKMPKVKMPKFSMPGFKGEGPEVDVKLPKADVDVSGPKMDAEVPDVNIEGPDAKLKGPKFKMPEMSIKPQKISIPDVGLHLKGPKMKGDYDVTVPKVEGEIKAPDVDIKGPKVDINAPDVEVHGPDWHLKMPKVKMPKFSMPGFKGEGPEVDMNLPKADLGVSGPKVDIDVPDVNLEAPEGKLKGPKFKMPSMNIQTHKISMPDVGLNLKAPKLKTDVDVSLPKVEGDLKGPEIDVKAPKMDVNVGDIDIEGPEGKLKGPKFKMPEMHFKAPKISMPDVDLHLKGPKVKGDMDVSVPKVEGEMKVPDVDIKGPKVDIDAPDVEVHDPDWHLKMPKMKMPKFSMPGFKAEGPEVDVNLRKADIDVSGPSVDTDAPDLDIEGPEGKLKGSKFKMPKLNIKAPKVSMPDVDLNLKGPKLKGEIDASVPELEGDLRGPQVDVKGPLVEAEVPDVDLECPDAKLKGPKFKMPEMHFKAPKISMPDVDLHLKGPKVKGDADVSVPKLEGDLTGPSVGVEVPDVELECPDAKLKGPKFKMPDMHFKAPKISMPDVDLHTLPKVEGDLKGPEADIKGPKVDINTPDVDVHGPDWHLKMPKVKMPKFSMPGFKGEGPDVDVNLPKADIDVSGPKVDVDVPDVNIEGPDAKLKGPKFKMPEMSIKAPKISMPDIDLNLKGPKVKGDVDVTLPKVEGDLKGPEADIKGPKVDINTPDVDVHGPDWHLKMPKVKMPKFSMPGFKGEGPDVDVSLPKADIDVSGPKVDVDIPDVNIEGPDPKLKVPKVKMPEINIKAPKISIPDVDLDLKGPKVKGDFDVSVPKVEGTLKGPEVDLKGPRLDFEGPDAKLSGPSLKMPSLEISAPKVTAPDVDLHLKAPKIGFSGPKLEGGEVDLKGPKVEAPSLDVHMDSPDINIEGPDVKIPKFKKPKFGFGPKSPKADIKSPSLDVTVPEAELNLETPEISVGGKGKKSKFKMPKIHMSGPKIKAKKQGFDLNVPGGEIDASLKAPDVDVNIAGPDAALKVDVKSPKTKKTMFGKMYFPDVEFDIKSPKFKAEAPLPSPKLEGELQAPDLELSLPAIHVEGLDIKAKAPKVKMPDVDISVPKIEGDLKGPKVQANLGAPDINIEGLDAKVKTPSFGISAPQVSIPDVNVNLKGPKIKGDVPSVGLEGPDVDLQGPEAKIKFPKFSMPKIGIPGVKMEGGGAEVHAQLPSLEGDLRGPDVKLEGPDVSLKGPGVDLPSVNLSMPKVSGPDLDLNLKGPSLKGDLDASVPSMKVHAPGLNLSGVGGKMQVGGDGVKVPGIDATTKLNVGAPDVTLRGPSLQGDLAVSGDIKCPKVSVGAPDLSLEASEGSIKLPKMKLPQFGISTPGSDLHVNAKGPQVSGELKGPGVDVNLKGSRISAPNVDFNLEGPKVKGSLGATGEIKGPTVGGGLPGIGVQGLEGNLQMPGIKSSGCDVNLPGVNVKLPTGQISGPEIKGGLKGSEVGFHGAAPDISVKGPAFNMASPESDFGINLKGPKIKGGADVSGGVSAPDISLGEGHLSVKGSGGEWKGPQVSSALNLDTSKFAGGLHFSGPKVEGGVKGGQIGLQAPGLSVSGPQGHLESGSGKVTFPKMKIPKFTFSGRELVGREMGVDVHFPKAEASIQAGAGDGEWEESEVKLKKSKIKMPKFNFSKPKGKGGVTGSPEASISGSKGDLKSSKASLGSLEGEAEAEASSPKGKFSLFKSKKPRHRSNSFSDEREFSGPSTPTGTLEFEGGEVSLEGGKVKGKHGKLKFGTFGGLGSKSKGHYEVTGSDDETGKLQGSGVSLASKKSRLSSSSSNDSGNKVGIQLPEVELSVSTKKE

SEQ ID NO: 6252 - DNA, 621 bp, Rattus norvegicus
  ref <308>: DATABASE ACCESSION NUMBER: EMBL / AA894305
  ref <309>: DATABASE ENTRY DATE: 2000-03-03
gttgattacccattccatacacagttgtacaaagttcaagtgaaagggtgtgcaggggcgccatctctatgttggtttaaagtctatgggagtttgtcaaaggggcgagccacagctccgattctacaacagtgtctttcccctgtttctactagatcacagcaaaatgccccgctacctgaaagaccattgatacattataaactcttatttatatactcatctttttatttcttcatcatctttcttcctctgaagaagctgacagctgctgatgggaagcacaacatttgggtcccgtttaccgctgtttatgttattacttcttctttgggtgctcacaaacattgcatgctacatgttacaaatcacacatgggggactccagcacactgttatcttaatttgacaatgaacacaaaagggagaaatttcttgtcccggaaacaaaacactatggtccttctgtggaactttctggtataggacaaacctgatactatcactgagctccattcacactggcagacaagagagatgcgggaacaccagtatacaatagtggaaggagaactttcagggacgtgacatcccacgcgatgtcacaggtactgcctcagg

SEQ ID NO: 6253 - DNA, 423 bp, Homo sapiens
  ref <308>: DATABASE ACCESSION NUMBER: EMBL / AI221059
  ref <309>: DATABASE ENTRY DATE: 1998-11-30
ttttttttttttttttgttttgattttcaacgcctttattaaaaaatatcaaaagttgattacaggtccatatgcagttttacaaagttcaagtgaaaaaaactgtagggatgccatcaatgtgcgtgtctgaagactatggaagcttgtcaaaggggtaaccctacaactcctgtcactttaacaatggtccacagcaatgcttttcccccatttttactaggctaggccattgcacaataccttaagctacttaaaagagttttaatacgttataaatacgtacatatttgtccttctagtttgttaccatccttccctgaaagagcggagctgtttataggaagcacaacatttgagtcccattcactgctgtttgtattacattttcacaaagcctgctttgaaagctggcaaacactg

SEQ ID NO: 6254 - DNA, 479 bp, Rattus norvegicus
  ref <308>: DATABASE ACCESSION NUMBER: EMBL / AA894316
  ref <309>: DATABASE ENTRY DATE: 2000-03-03
gaatctagggcatctcagggatccccgggaacaatcttgcctcaggcccctcccccgcaactccctgcatctgcatcccccttgcctgaaagcccttctaagctcggaaactgtgagctaaggagacatagcacaaaatcataaatgagttgcggggagaggctggaaacagtgtgcaagaaatacaggccaggggttggggatttagctcagcggtagagcgcttgcctagcaaacacaaggccctgggttcggtccccagctccaaaaaaaagaaaaaaaagaaaaaagaaaaaaagaaaaacaggccaatgctacatgtgaggctttgtggctgggctgtgacccagcgatatgggcagtggaggggatcttttgtctttggggactctctggagcccaacgatccaggctgtggtgcaggggatagtaaagttaaaatgctacccaccttttggccggttcctttcccctcaacc

SEQ ID NO: 6255 - DNA, 569 bp, Rattus norvegicus
  ref <308>: DATABASE ACCESSION NUMBER: EMBL / AA894318
  ref <309>: DATABASE ENTRY DATE: 2000-03-03
tttttttttcaagtttccaaacaagaatttattctttattttttttcccttaaaaaatgtaccaggtacaatttttcctgttttttgttttgttttgtttttcaagtttcagcaaatgcttgttcccctcagccaagccccaagagttaagggttgaggctgggtcagagtcttaagtggggagtggagtaactgggaaccatatgactgaatgaggggcacccctcatcccagctgaggtaggtgggtcagagtctggtcaggtaagaggaggttccccagtccttaggcctgactctgtccctggacaccttcctcagtcaggacaccaaagcaaggagacaaaggcaggaggagagggacaactgagtctgagccctaggtaagaggtggttaaacccctgtgttacacatacactcaattctctctcgcgcaacacaccctacacaaacccaagtttgggtgcacacacacagttgtacacacacacactacacacacaccacacacacacatacacacactggctttcgaagatgggttgaagggcagggaagggaaaaggaat

SEQ ID NO: 6256 - DNA, 5771 bp, Homo sapiens
  ref <308>: DATABASE ACCESSION NUMBER: EMBL / AB040972
  ref <309>: DATABASE ENTRY DATE: 2002-05-12
aatggcctgtgagtcagaggggcagtggagtcggcggcgcggagccggggcggccccggggagggaccgtcgcagggaggggcgcggcagcggctggggggctgcgggcgccagggcccgctagtgttgcacacgaagctgaacagcgaagagcctagcagagcagggctcagcctgagccaccctttgtctgggttgggggcccgtggcagggaggaccggggaaccaaggggagggaccgggacgggacgggacggaagggaccggagcagcggccacctccgcggagccaatttgggagcggggtgagtgtgctagagggaaagagcaaatctccgaagctccagtatagtatggggcctgtcccaggctgtggggaggagaggagtgagaagggacctgggaggctgggcagggggtaagggatcgtccagaagaaggagtccaggagtcaggtgagtctgcctggcttagtttagagagtctgctaaggtctgctctctcccctctgaagatagagggctctaggctgggggccgaggggttggtaagagagaagaagtcgaccttcctacccacagtggtggtccgtgggaacagcccccctagcttgtgtggatgtatgtagggacaaaatagagagcagctggcagcagttctctttgcataggatgagggtggaaagcacatggataggaattcatcctgtcactctccttgatcatggtagaaatggaaatctttaatactgaagggaaggggagaatgagccttgaagctgatacctataccaatacccacctcacccacctcccaggcctcaaaagtgtctaaaggtacagacgtattctgggacttgttgtttttgctggccttgctccctcagcatgttgggagctgtagtccttgccagccacagcctggcacagctgtttgatgccagctgctgcccaccccctgaacgaagagtgaggcttggcctactctgccctgcccccctcccctgcagtcctgccccatgagtcagcttgaagccatggtctagagccagactggctgggtggcaggggagtgaatatagagcgtcttgttgacagggtgggaactgagagggctctggggttaataagcagatgccaggtatgctggggtcaagtagggcatcatgtcatcccctggcttccccagggcaaggggtcaagagggcaactgggatgacctggaagtggtggtgctagggaaaaggcccctcctgaatctgtatggcttgggtggaggaaagaagggtagaaattagtgcaggttgtaccttctgacaaggttggttgcaggtaggatagtgcaggttgcgattggtgttctgccctttccagccatcccgcccaccacagggaaccaggattttcttagggatcccaattcttaggagaatttggtgaaatgggatagtggggtacaatgatgggaacttggtgtaggagagcttttcagtccctgggtacaaatctctcctttctgcctgctccccacccccacctctgttcctgattttcccttgtacaattaatctctctgcttctctcatctgggaaatttttctctccactctcaggactgctgctcagatgtctgggacttgcattctactttttttgagccctgctgtgtgcttacccctgtacttggggttggatggaggggtgggacacagatctgtcctcaggaactctatggtcggtctagaagatgccttacccacaggagtgagcagaactgttagtgagcttacaggaagtagtaacactgccataggtgaggtctcagagaagggagagatgcttatggtctggggtggacagagcagactttctggaggagatggcatttgacctatccaaggaggaaaagtcttgggtaggcattcaaagggcacttcttgaaggggaaagagcaccgtgaatgtcagacagcaaaagagaaggctgaccctgggggcagttggctttcaacttgacattcccctcaccctagtatgggctggaatagttagtgaagaccatcttatgcaccagtggtttggggttttggtgttgggtgtgtgagcactgggggaggggcgtggagaggtactccctagttgcttccagctgactgactgctgcggccttatctctagtttgcagggccttgcgggagggccctggaaagtgccttctggcagtgaccccttccccttccccttcttgtttttggtcggatttgttgcctcttgttaaagagacaggctgctggaggcaatttggagttcagggctgaaaggccagctctgagctgacttgaaatttgtacctctgaggaccgctgatggggtataactgtgtgggagacctctgcccttagtgccctaggatggcacttgtccctttggagatagacatataagaaggagttgtgcaatttggtggctttgagtaagaaagctgaattcttcccctggccgcctctcagctgacacggtctcttggatcttgggggtctctcatcccttcctccatgtagggcaggagtcctcaaatggtggccctgacaagtagttattctacctcaactcacttgtcacatccttattatactgagccaagacctgcctctttgactccttaggtagcccaactctgccatctgtgccctggaccccaagcctaccctttctgttcctgaagagcctctcacatgggagaaggatgtcctggagtgtactattagcctataattggtgacaggccttaccgctggctccagtgatcctggcttacgtctgttcttctctcctcagggtcctgctgagctcaggagctgcacggaatggtggcagtcaccttgccagtgcagcaggcatggatcagactgcaagctaggggcacgaggcatcagttgggaagaggggacgcacagctaggcttgaggcctcttcatcgggatgtccccaggccccccagcccaggcccagcataaaggccgtgttggggggcccccctgacccaaggggggcttcatgcgccacgtgcaggcggagccgtctccatcctcagagccggaggctggcccttcacagcctccagtcaggcagggggccctccagggtggcctgctcatgggctacagcccagcagggggggcgacatcccccggggtctaccaggtatccatcttttcccctccggctggtacctctgagcctcatagggccctgaaacgacaagccccatccactgagggtccccgggagctgaagagaggccctgggctgggggccagagagggactaccccctgaagaaccatctactgtggggctcttaggcccagagggaccggggctgggactaggtgtggccagccagcatttctcccaccgtggcctctgtgttgtggaacagagaagtagtgtcacctcatcttggacttcaggggcctggagtcccccctgccccccatcaaatgcttcctgcaatactttgcacaccagagactgggcctccccagatccagggggacaggggtccctgggggagtccccagggccagcccctccaggccagctgcacacacttgacactgatttgcacagtcttgcacaaatagggggtaagagcccagtggctggggtgggcaatgggggtagcctctggcctagggagtcccctggcactgccaatgggcacagtcccgagcacacaccccctggccctggacccccaggcccctgccccaccaagcgaaggctgcttcctgctggagaagccccagatgtcagctctgaggaagaggggccagcccctcggaggcgccggggatccctgggccaccctactgctgccaacagttctgatgccaaagccacacccttctggagccacctgctgcctgggcccaaagagcctgttttggacccaacagactgcggtcccatggggcggaggctgaaaggagcccgtcgcctgaagctgagcccccttcgaagcctccggaaggggccaggcctgctgagcccccccagtgcctcccctgttcctacccctgctgtcagccgtaccctgctgggcaactttgaggaatcattgctgcgaggacgttttgcaccatctggccacattgagggcttcacagcagaaattggagctagtgggtcatactgcccccagcacgtcacgctgcctgtcactgtcacattctttgatgtttctgagcaaaatgccccggctcccttcctgggcatcgtggatctgaaccccttggggaggaagggttacagcgtgcccaaggtgggcaccgtccaagtgaccttatttaaccccaaccagactgtggtaaagatgttccttgtgacctttgacttctcggacatgcctgctgcccacatgaccttcctgcgccatcgcctctttttggtgcctgtgggtgaggagggaaatgctaaccccacccaccgcctcctctgctacttgctgcacctcaggttccggagctcccgctcaggccgcttaagcctgcatggagatatccgcctgcttttttcccgccggagcctggagctggacacagggctcccctacgaactgcaggctgtgaccgaggcccctcataatccacgttattcacctttgccctgattgccagcactctgaacccatgcgggctaatgacctgcccatcctgctccatcttagagaacatatatggagagacagcaagagacccttcaggcttgaattaaagccctcaccatgctcacgcccaaatggattatttgggtgtttaaagcttctgattcttactacaccctgccctacttcgggtactccatgtgcctgtcccctcccttgggtttcccaggccagcttaggtagtagggaggaactggagctaccctgagattttctcaagttcccaggcaagttatgccagcgttgcctccctgtcctgggcaggggccacttgttattttatttatttttaatttataatttattcaaattggattgccttggtaacctcccacacctgataattggcatcactcctccccgcttcccactctcagatattgctccaacctcaggagttgaagaggcttatgcggtgggggcaggaggagaactgctttccctcagctgagggaagaggggctattccagagggactgagtcagtagccaaagactcagcttcccctgtccttccccagtcccttcacttcccctaccctctgacctatctctgaaagccaagttatgcgtatgtgtgtgtgcacaagcttgtctttgtgtggtatgtgtgtgtgagtgtgcatgtatgcacacacacaggggttaaccacccctcacctagggctccagactccagttgtccctctcctcctacctgtgtctccttgttttggggtcctgactgaagaaggtgtccagggggcagagtcagggccaagcactggggtgcctcctctcacctggccagactctgacccacctacctcagctggggtgaggggcacccctcaaactcagtcatgtggttccaaactaccccattccccactccagactctgacccagcctcagtcctaactcctggggctgggctgaggggaacaagcatttgctgaaacttgaaaaaacaaagcaaatcaaaaacaggaaaaaattgtacctggtacttttttttagaaaaaaagattaaaaaagaaagaataaattcttgtttggaaacttg

SEQ ID NO: 6257 - DNA, 501 bp, Rattus norvegicus
  ref <308>: DATABASE ACCESSION NUMBER: EMBL / AA894330
  ref <309>: DATABASE ENTRY DATE: 2000-03-03
cagcagaaatcacaaatttattaactcttaaatatatcaattcgtcatttaccattacggcaagaattatatacagtgtcccatggtaaactgcagtgttttcaaaacaatagaagatgatgaaggtgtaattccactgtgctggagagaacaaatcacgatttcctcacatcttagtgcagaagacaaactggatctatggtaatacttcaacaccacatgctaagttaaaagtgtaaaaaaaaaacccattctaccactatttgtgtttttaaatacatgtatgccacgcagagctgcttcacagaaaggtaaaagaaattcaaagggaaaagtgaggccattacgtttttcacagatctcattggcaggttaacacggctcaatacatgtactgtatatatttgttttaaatatatattgttttaaatcatgtgctaattatcagaaaagcttcaacccatctatcatacattcactagcaacaatatatctaaagtg

SEQ ID NO: 6258 - protein, 533 aa, Rattus norvegicus; identical to SEQ ID NO: 2905
  ref <308>: DATABASE ACCESSION NUMBER: SWISS-Prot / P15791
  ref <309>: DATABASE ENTRY DATE: 2002-06-15

SEQ ID NO: 6259 - DNA, 1500 bp, Homo sapiens; identical to SEQ ID NO: 2906
  ref <308>: DATABASE ACCESSION NUMBER: EMBL / AF071569
  ref <309>: DATABASE ENTRY DATE: 2000-01-19

SEQ ID NO: 6260 - protein, 499 aa, Homo sapiens [sequence omitted]

SEQ ID NO: 6261 - DNA, 580 bp, Rattus norvegicus
  ref <308>: DATABASE ACCESSION NUMBER: EMBL / AA894340
  ref <309>: DATABASE ENTRY DATE: 2000-03-03
acaagagcaaaactgtctgatgcagtcaaacttattttgccttatacccagtggtatttgaataattgtaattcaaacatatcaagtcctcactcatttccttcttttaagtcagtcacagtataatcattttggtaaaatgtttgtattctctctcttttattcatactgaaataatacaatatttataaaccaaactatttgctgttcagaaagctaggaagattcttctacataataattttgatatgctaagaaaccacacaaaactggcattttcaaatggataaaaataggagattgctgaaagaaaacataaacaataatttgtatctaaataattttaactgagtgaatatattcatctgataatatagcctctatcttagaatatagaagtgctcagattacctgtaatagagtaacggaagtctcagagaactgaaaataatttaaataaagacggtacactgagagcaactacacagcaaggactgcgcggttttatctgaggcagactgatgatgtctgcatttctataatgtacctttctctaggcctgggaggattttaaatgact

SEQ ID NO: 6262 - DNA, 510 bp, Rattus norvegicus
  ref <308>: DATABASE ACCESSION NUMBER: EMBL / AA894345
  ref <309>: DATABASE ENTRY DATE: 2000-03-03
gacatggcagtgcgggtttaatatacatatatgtagaatatatatgtacacacagttagcacggtcaagatggggaagggcatcttgggacagggaggaggctgggttcactcactgtactctaatggcttggctgtgtggcattcacaaacccaaatgagaaaggtgaccagtcccttcctggattgaatggggtggtagtcagtgcaaaggaaacactgtcgttaacttatctcttgcttggagaattccgaactggaaagtggaaaggttgcctacaatacccattttgggactctgcaggttgcggttaaaacctaagggatctcattccccaattcctacgctccgggtcagtatatcccaacagtctgtatctagaaactgaggagcgagagtgggcctgtctctgcctgcatccctggctcaggctcagcagtgcatggtcccagcatagtctctccagagcagaagttggggacatcaaaagctggcttctccactggggtt

SEQ ID NO: 6263 - protein, 130 aa, Rattus norvegicus
  ref <308>: DATABASE ACCESSION NUMBER: SWISS-Prot / CAB51573
  ref <309>: DATABASE ENTRY DATE: 2003-02-01
MAEYGTLLQDLTNNITLEDLEQLKSACKEDIPSEKSEEITTGSAWFSFLESHNKLDKDNLSYIEHIFEISRRPDLLTMVVDYRTRVLKISEEDELDTKLTRIPSAKKYKDIIRQPSEEEIIKLAPPPKKA

SEQ ID NO: 6264 - DNA, 1312 bp, Homo sapiens
  ref <308>: DATABASE ACCESSION NUMBER: EMBL / L37385
  ref <309>: DATABASE ENTRY DATE: 1999-09-02
ggatcctttcctggtccctaagatcaaaccccatggagcagccagcgttagatgcccccacccacctgtactctggagagactgtgctgggaacatgtaccactgagcctgagatggggatgagggcagagagaggggagccccctcttccactcagttgttcctactcagactgttgcactctaaacctagggaggttgaagaatgagacccttaggttttaacacgaatcctgacaccaccatctatagggtccaacttggttattgtaggcaaccttccctctctccttggtgaagaacatcccaagccagaaagaagttaactacagtgttttcctttgcaccgatccccaccccaattcaatcccggaaggacttacttaggaaacccttctttactagatatcctggccccctgggcttgtgaacacctcctagccacatcactacagtacagtgagtgaccccagcctcctgcctaccccaagatgcccctccccaccctgaccgtgctaactgtgtgtacatatatattctacatatatgtatattaaaactgcactgccatgtctgcccttttttgtggtgtctagcattaacttattgtctaggccagagcgggggtgggaggggaatgccacagtgaagggagtgggcagaatcaaattgctacatagtccaaagcaaaaaagaagggctttttcaaaaaacattaaattcacatgcagtctcagagactatttagacaaagttcaagttaggagcttttaggatgtgggagtaaaactttaatgggaggggagggctggctgctggaagaaggaagaagccagactggttagacagtactcttaactcctagcccagcctagcgtgccctgcccctctggccactgctgcagacacctgccttaacacacacacctctaggactccacagttttgccttaaaggaccttcccaagtctccctttccctgtctggcttctcccttaagaagagagagatacttgtagaattgggtggggggaatgagcatgaactgtccttccatttgggatatgttacattagagtgagagagagaataaggagcctttcttatggaagaaatgggagaagagagacagggttcttttcagcagagtctagtagtttctctgtaaggcaaaataatctaaaaagactaacctgcccacccactccttatattgctgtgagattgcccctatcttgtgctcttctgtctgcagtgtgcacggccttgttctaacccggaataaaggtgattgattgtattgccgcggatcc

SEQ ID NO: 6265 - protein, 130 aa, Homo sapiens [sequence omitted]

SEQ ID NO: 6266 - DNA, 445 bp, Rattus norvegicus
  ref <308>: DATABASE ACCESSION NUMBER: EMBL / AA899320
  ref <309>: DATABASE ENTRY DATE: 2000-03-03
tttttttttttttttttaaataataaactttttttatttctccaataacttttaaaatgtgaacattctgtgatttaatccgtttttacttccaagtaacttcttcattgggcctcagttccctttgaaatagcatactcttattccggaaggcagtgagcttttcatcatccttcctgtctagataatatccaaaggcgaatcccatagggacgagtatatgaacccagtgctcacgcacaagctggagtaaggtcatcttgacttcagcccggtgtcaagcgcgaccaaggacagccgcagggagctaggccactggcgacggcggaagccgtgacccaaggagctgccactcgccgcgcccgccctgaggagaggggtggcgatggccaatcgacgcctctctctcccttctcacgagtgagtcctctacattttgagtttt

SEQ ID NO: 6267 - DNA, 292 bp, Homo sapiens
gttgcccttggtctcggggtcgctgtaggcgctgaggctgcagctatcatggtgaacttacttcagattgtgcgggaccactgggttcatgttcttgtccctatgggatttgtcattggatgttatttagacagaaagagtgatgaacggctaactgccttccggaacaagagtatgttatttaaaagggaattgcaacccagtgaagaagttacctggaagtaaagactggctagattatcgaatgttcacattttaaagttctgagagaaataaaaacatgaagaatctg

SEQ ID NO: 6268 - protein, 58 aa, Homo sapiens
MVNLLQIVRDHWVHVLVPMGFVIGCYLDRKSDERLTAFRNKSMLFKRELQPSEEVTWK

SEQ ID NO: 6269 - DNA, 392 bp, Rattus norvegicus
  ref <308>: DATABASE ACCESSION NUMBER: EMBL / AA900199
  ref <309>: DATABASE ENTRY DATE: 2000-03-03
tttttttttttttttttaaggacaggcataagttctaataattacctttctacgaaatagattcagtatgtacagcacttttggaacatacatgtgctgttagacaagttttttaccttttgaagagctcttcaatgatgttgatcaggaaaatctctcattggtggaattacttctccagtctccagaattgtatcacctgggaatagtctgggcttcgtgccaccaatggcatatggtttagtagccacatgatagttgacgtaatagtggacgaaccagagaggtatgatcacatgggaaacagtgaagagactggtgcagtacgccttgaagatcatgtacttccacatggcccggtcccgcaaaaagttattccacaatcgctccag

SEQ ID NO: 6270 - DNA, 577 bp, Homo sapiens
  ref <308>: DATABASE ACCESSION NUMBER: EMBL / AF035840
  ref <309>: DATABASE ENTRY DATE: 1998-10-28
cgcgcttaagtaactagtccgtagttcgagggtgcgccgtgtccttttgcgttggtaccagcggcgacatgacggggtacactccggatgagaaactgcggctgcagcagctgcgagagctgagaaggcgatggctgaaggaccaggagctgagccctcgggagccggtgctgcccccacagaagatggggcctatggagaaattctggaataaatttttggagaataaatccccttggaggaaaatggtccatggggtatacaaaaagagtatctttgttttcactcatgtacttgtacctgtctggattattcattattacatgaagtatcatgtttctgaaaaaccatatggcatagttgaaaagaagtccagaatattccctggtgatacaattctggagactggagaagtaattccaccaatgaaagaatttcctgatcaacatcattaaagattatgtaaaaagttaaaaggcttatgagcctaagtttgttcctatattaccatatttactgaattttctggaaaagtaactttaataaagtttaatctcagaaattgtcaaaaaaaaaa

SEQ ID NO: 6271 - protein, 127 aa, Homo sapiens
  ref <308>: DATABASE ACCESSION NUMBER: SWISS-Prot / O95139
  ref <309>: DATABASE ENTRY DATE: 2002-06-15
TGYTPDEKLRLQQLRELRRRWLKDQELSPREPVLPPQKMGPMEKFWNKFLENKSPWRKMVHGVYKKSIFVFTHVLVPVWIIHYYMKYHVSEKPYGIVEKKSRIFPGDTILETGEVIPPMKEFPDQHH

SEQ ID NO: 6272 - DNA, 466 bp, Rattus norvegicus
  ref <308>: DATABASE ACCESSION NUMBER: EMBL / AA900413
  ref <309>: DATABASE ENTRY DATE: 2000-03-03
tttttttttttttttttatttcttaaggcatatttaatgtaatccagttagcttaatgggaaataaaaacattgattaggattatatggggctgggggttgggggtggcttagcagtacagcattggcccagcatccacagggccttaggttctatctccacaacacaaaacaaatgtgtcttcccagccacccctccctaaagaaataattactcatagattgcaagccagcagaagtggtcttataaaatgcatccttttaggagaagcagtaggacttgggagcatcttcatgttagtctttcttttcatagacttcaaacttgtacttgatgcctttttcctcctggatctcagagaggacgcctgggtattctgggagaagtttatatttctccaaatcaatttctgggaagaatgtgtcactttcaaactcctgcatgatccttgtcacaaagagtctga

SEQ ID NO: 6273 - protein, 187 aa, Rattus norvegicus
  ref <308>: DATABASE ACCESSION NUMBER: SWISS-Prot / AAH05796
  ref <309>: DATABASE ENTRY DATE: 2002-11-28
MVRPLNCIVAVSQNMGIGKNGDLPWPPLRNEFKYFQRMTTTSSVEGKQNLVIMGRKTWFSIPEKNRPLKDRINIVLSRELKEPPRGAHFLAKSLDDALRLIEQPELASKVDMVWIVGGSSVYQEAMNQPGHLRLFVTRIMQEFESDTFFPEIDLGKYKLLPEYPGVLSEVQEEKGIKYKFEVYEKKD

SEQ ID NO: 6274 - DNA, 484 bp, Homo sapiens
  ref <308>: DATABASE ACCESSION NUMBER: EMBL / AW500760
  ref <309>: DATABASE ENTRY DATE: 2000-03-03
cacgaggcgggccagggccaaagcgactttcgctacttggattggtcggcgtagctttgggcggccggaccttataaagtcacacatctgcgcgcctgtgcggcccctgcttctgcggatgctgaggcacgtaaaaaaatttgaagaagggaatttcgcggcattcttggcctggcttcctggcgtagccagcaagttcggaggtgttaaccgctgctgtcatgtttcttttgctaaactgcatcgtcgctgtgtcccaaaacatgggcatcggcaagaacggggacctgcccaggccgccgctcaggaatgaattcaggtatttccagagaatgaccacaacttcttcagtagagggtaaacagaatctggtgattatgggtaggaagacctggttctccattcctgagaagaatcgacctttaaaggataaaattaatttagttctcagcagagaactcaaggaacctccacaaggagctca

SEQ ID NO: 6275 - DNA, 480 bp, Rattus norvegicus
  ref <308>: DATABASE ACCESSION NUMBER: EMBL / AA900476
  ref <309>: DATABASE ENTRY DATE: 2000-03-03
tttttttttttttttttgtttgtttttgattttttttaattcacaccgaagaagttgggggtgggggcagggagggtgatttctttcagccgcgaggttaaccgagtcaacagctgactctgctgggctgctgtttgcacacgaagtccgtcataaaatcaaactcattttggcccagccagagttctggcagctccttgatgcggtccaaacccatctctatcactaaggacataagcacttcctcgtcgatgaaatcagtgtctatgacattgggcggcagcattgccgcggggacgtgagccaccgaggcgggcatggtgctgccaccgccactgccgcccgcgctgctgccacccgcgccgcccgaggtgccgccggagccgccgggggtgccgctgccacccgcgccgccaggggtgctgctgcctccactgtgcttggggttgcaatctcggaagtgctggtttgtcccgttca

SEQ ID NO: 6276 - protein, 269 aa, Rattus norvegicus
  ref <308>: DATABASE ACCESSION NUMBER: SWISS-Prot / AAK30621
  ref <309>: DATABASE ENTRY DATE: 2002-10-01
MADHMMAMNHGRFPDGTNGLHHHPAHRMGMGQFPSPHHHQQQQPQHAFNALMGEHIHYGAGNMNATSGIRHAMGPGTVNGGHPPSALAPAARFNNSQFMGPPVASQGGSLPASMQLQKLNNQYFNHHPYPHNHYMPDLHPAAGHQMNGTNQHFRDCNPKHSGGSSTPGGAGGSGTPGGSGGTSGGAGGSSAGGSGGGSTMPASVAHVPAAMLPPNVIDTDFIDEEVLMSLVIEMGLDRIKELPELWLGQNEFDFMTDFVCKQQPSRVSC

SEQ ID NO: 6277 - DNA, 899 bp, Homo sapiens
  ref <308>: DATABASE ACCESSION NUMBER: EMBL / U65093
  ref <309>: DATABASE ENTRY DATE: 2000-03-04
gagggcaacggaggggaaataaaagggaacggctccgaatcggccccagcggccgctgcgagacctcggcgccgacatcgcgacagaagcgctttgcacgccaggaaggtcccctctatgtgctgctgagccggtcctggacgcgacgagcccgccctcggtcttcggagcagaaatcgcaaaaacggaaggactggaaatggcagaccatatgatggccatgaaccacgggcgcttccccgacggcaccaatgggctgcaccatcaccctgcccaccgcatgggcatggggcagttcccgagcccccatcaccaccagcagcagcagccccagcacgccttcaacgccctaatgggcgagcacatacactacggcgcgggcaacatgaatgccacgagcggcatcaggcatgcgatggggccggggactgtgaacggagggcaccccccgagcgcgctggcccccgcggccaggtttaacaactcccagttcatgggtcccccggtggccagccagggaggctccctgccggccagcatgcagctgcagaagctcaacaaccagtatttcaaccatcacccctacccccacaaccactacatgccggatttgcaccctgctgcaggccaccagatgaacgggacaaaccagcacttccgagattgcaaccccaatgtcatagacactgatttcatcgacgaggaagttcttatgtccttggtgatagaaatgggtttggaccgcatcaaggagctgcccgaactctggctggggcaaaacgagtttgattttatgacggacttcgtgtgcaaacagcagcccagcagagtgagctgttgactcgatcgaaaccccggcgaaagaaatcaaacccccaacttcttcggcgtgaattaaa

SEQ ID NO: 6278 - protein, 270 aa, Homo sapiens
  ref <308>: DATABASE ACCESSION NUMBER: SWISS-Prot / Q99967
  ref <309>: DATABASE ENTRY DATE: 2002-06-15
MADHMMAMNHGRFPDGTNGLHHHPAHRMGMGQFPSPHHHQQQQPQHAFNALMGEHIHYGAGNMNATSGIRHAMGPGTVNGGHPPSALAPAARFNNSQFMGPPVASQGGSLPASMQLQKLNNQYFNHHPYPHNHYMPDLHPAAGHQMNGTNQHFRDCNPKHSGGSSTPGGSGGSSTPGGSGSSSGGGAGSSNSGGGSGSGNMPASVAHVPAAMLPPNVIDTDFIDEEVLMSLVIEMGLDRIKELPELWLGQNEFDFMTDFVCKQQPSRVSC

SEQ ID NO: 6279 - DNA, 480 bp, Rattus norvegicus; identical to SEQ ID NO: 6275
  ref <308>: DATABASE ACCESSION NUMBER: EMBL / AA900476
  ref <309>: DATABASE ENTRY DATE: 2000-03-03

SEQ ID NO: 6280 - protein, 269 aa, Rattus norvegicus; identical to SEQ ID NO: 6276
  ref <308>: DATABASE ACCESSION NUMBER: SWISS-Prot / AAK30621
  ref <309>: DATABASE ENTRY DATE: 2002-10-01

SEQ ID NO: 6281 - DNA, 899 bp, Homo sapiens; identical to SEQ ID NO: 6277
  ref <308>: DATABASE ACCESSION NUMBER: EMBL / U65093
  ref <309>: DATABASE ENTRY DATE: 2000-03-04

SEQ ID NO: 6282 - protein, 270 aa, Homo sapiens; identical to SEQ ID NO: 6278
  ref <308>: DATABASE ACCESSION NUMBER: SWISS-Prot / Q99967
  ref <309>: DATABASE ENTRY DATE: 2002-06-15

SEQ ID NO: 6283 - DNA, 512 bp, Rattus norvegicus
  misc_feature (1)..(512): n=a, c, g or t
  ref <308>: DATABASE ACCESSION NUMBER: EMBL / AA900503
  ref <309>: DATABASE ENTRY DATE: 2000-03-03
tttttttttttttttgtacgacgtcaggtgttcaaacacttccttgatagcatcactttaagacacattctaaggactgactgaggcagattgagaattcgtctagaacaggtttttgtttttttctcttttctttttttattttttcctgctttagacttgaaaagagacaggcaggcgatctgtgacagagcagtttaagggaacaaactgagctatgtagtcagaatgtgactggttggatctcattaaaagtatcagattgtgtgaagttggaagcttaccaatcttactttgtaaattctgatttcttttcaccattcgtatgtaatgctgaaccacttgtagatttgatttcattgttgttgtctactgcatttagggagtattctaataagctagatgaatacttgaaccataaaatgtccagttagagcactgtttanattggccatagagtacactgcctgccttaagtgaggacatgaaagtgctattaccaagttcaagat

SEQ ID NO: 6284 - protein, 1219 aa, Rattus norvegicus; identical to SEQ ID NO: 3232
  ref <308>: DATABASE ACCESSION NUMBER: SWISS-Prot / Q63722
  ref <309>: DATABASE ENTRY DATE: 2002-06-15

SEQ ID NO: 6285 - DNA, 5896 bp, Homo sapiens
  ref <308>: DATABASE ACCESSION NUMBER: Refseq / NM_000214
  ref <309>: DATABASE ENTRY DATE: 2000-10-31
ctgcggccggcccgcgagctaggctgggtttttttttttctcccctccctcccccctttttccatgcagctgatctaaaagggaataaaaggctgcgcataatcataataataaaagaaggggagcgcgagagaaggaaagaaagccgggaggtggaagaggagggggagcgtctcaaagaagcgatcagaataataaaaggaggccgggctctttgccttctggaacgggccgctcttgaaagggcttttgaaaagtggtgttgttttccagtcgtgcatgctccaatcggcggagtatattagagccgggacgcggcggccgcaggggcagcggcgacggcagcaccggcggcagcaccagcgcgaacagcagcggcggcgtcccgagtgcccgcggcgcgcggcgcagcgatgcgttccccacggacgcgcggccggtccgggcgccccctaagcctcctgctcgccctgctctgtgccctgcgagccaaggtgtgtggggcctcgggtcagttcgagttggagatcctgtccatgcagaacgtgaacggggagctgcagaacgggaactgctgcggcggcgcccggaacccgggagaccgcaagtgcacccgcgacgagtgtgacacatacttcaaagtgtgcctcaaggagtatcagtcccgcgtcacggccggggggccctgcagcttcggctcagggtccacgcctgtcatcgggggcaacaccttcaacctcaaggccagccgcggcaacgaccgcaaccgcatcgtgctgcctttcagtttcgcctggccgaggtcctatacgttgcttgtggaggcgtgggattccagtaatgacaccgttcaacctgacagtattattgaaaaggcttctcactcgggcatgatcaaccccagccggcagtggcagacgctgaagcagaacacgggcgttgcccactttgagtatcagatccgcgtgacctgtgatgactactactatggctttggctgcaataagttctgccgccccagagatgacttctttggacactatgcctgtgaccagaatggcaacaaaacttgcatggaaggctggatgggccccgaatgtaacagagctatttgccgacaaggctgcagtcctaagcatgggtcttgcaaactcccaggtgactgcaggtgccagtatggctggcaaggcctgtactgtgataagtgcatcccacacccgggatgcgtccacggcatctgtaatgagccctggcagtgcctctgtgagaccaactggggcggccagctctgtgacaaagatctcaattactgtgggactcatcagccgtgtctcaacgggggaacttgtagcaacacaggccctgacaaatatcagtgttcctgccctgaggggtattcaggacccaactgtgaaattgctgagcacgcctgcctctctgatccctgtcacaacagaggcagctgtaaggagacctccctgggctttgagtgtgagtgttccccaggctggaccggccccacatgctctacaaacattgatgactgttctcctaataactgttcccacgggggcacctgccaggacctggttaacggatttaagtgtgtgtgccccccacagtggactgggaaaacgtgccagttagatgcaaatgaatgtgaggccaaaccttgtgtaaacgccaaatcctgtaagaatctcattgccagctactactgcgactgtcttcccggctggatgggtcagaattgtgacataaatattaatgactgccttggccagtgtcagaatgacgcctcctgtcgggatttggttaatggttatcgctgtatctgtccacctggctatgcaggcgatcactgtgagagagacatcgatgaatgtgccagcaacccctgtttgaatgggggtcactgtcagaatgaaatcaacagattccagtgtctgtgtcccactggtttctctggaaacctctgtcagctggacatcgattattgtgagcctaatccctgccagaacggtgcccagtgctacaaccgtgccagtgactatttctgcaagtgccccgaggactatgagggcaagaactgctcacacctgaaagaccactgccgcacgaccccctgtgaagtgattgacagctgcacagtggccatggcttccaacgacacacctgaaggggtgcggtatatttcctccaacgtctgtggtcctcacgggaagtgcaagagtcagtcgggaggcaaattcacctgtgactgtaacaaaggcttcacgggaacatactgccatgaaaatattaatgactgtgagagcaacccttgtagaaacggtggcacttgcatcgatggtgtcaactcctacaagtgcatctgtagtgacggctgggagggggcctactgtgaaaccaatattaatgactgcagccagaacccctgccacaatgggggcacgtgtcgcgacctggtcaatgacttctactgtgactgtaaaaatgggtggaaaggaaagacctgccactcacgtgacagtcagtgtgatgaggccacgtgcaacaacggtggcacctgctatgatgagggggatgcttttaagtgcatgtgtcctggcggctgggaaggaacaacctgtaacatagcccgaaacagtagctgcctgcccaacccctgccataatgggggcacatgtgtggtcaacggcgagtcctttacgtgcgtctgcaaggaaggctgggaggggcccatctgtgctcagaataccaatgactgcagccctcatccctgttacaacagcggcacctgtgtggatggagacaactggtaccggtgcgaatgtgccccgggttttgctgggcccgactgcagaataaacatcaatgaatgccagtcttcaccttgtgcctttggagcgacctgtgtggatgagatcaatggctaccggtgtgtctgccctccagggcacagtggtgccaagtgccaggaagtttcagggagaccttgcatcaccatggggagtgtgataccagatggggccaaatgggatgatgactgtaatacctgccagtgcctgaatggacggatcgcctgctcaaaggtctggtgtggccctcgaccttgcctgctccacaaagggcacagcgagtgccccagcgggcagagctgcatccccatcctggacgaccagtgcttcgtccacccctgcactggtgtgggcgagtgtcggtcttccagtctccagccggtgaagacaaagtgcacctctgactcctattaccaggataactgtgcgaacatcacatttacctttaacaaggagatgatgtcaccaggtcttactacggagcacatttgcagtgaattgaggaatttgaatattttgaagaatgtttccgctgaatattcaatctacatcgcttgcgagccttccccttcagcgaacaatgaaatacatgtggccatttctgctgaagatatacgggatgatgggaacccgatcaaggaaatcactgacaaaataatcgatcttgttagtaaacgtgatggaaacagctcgctgattgctgccgttgcagaagtaagagttcagaggcggcctctgaagaacagaacagatttccttgttcccttgctgagctctgtcttaactgtggcttggatctgttgcttggtgacggccttctactggtgcctgcggaagcggcggaagccgggcagccacacacactcagcctctgaggacaacaccaccaacaacgtgcgggagcagctgaaccagatcaaaaaccccattgagaaacatggggccaacacggtccccatcaaggattacgagaacaagaactccaaaatgtctaaaataaggacacacaattctgaagtagaagaggacgacatggacaaacaccagcagaaagcccggtttgccaagcagccggcgtatacgctggtagacagagaagagaagccccccaacggcacgccgacaaaacacccaaactggacaaacaaacaggacaacagagacttggaaagtgcccagagcttaaaccgaatggagtacatcgtatagcagaccgcgggcactgccgccgctaggtagagtctgagggcttgtagttctttaaactgtcgtgtcatactcgagtctgaggccgttgctgacttagaatccctgtgttaatttaagttttgacaagctggcttacactggcaatggtagtttctgtggttggctgggaaatcgagtgccgcatctcacagctatgcaaaaagctagtcaacagtaccctggttgtgtgtccccttgcagccgacacggtctcggatcaggctcccaggagcctgcccagccccctggtctttgagctcccacttctgccagatgtcctaatggtgatgcagtcttagatcatagttttatttatatttattgactcttgagttgtttttgtatattggttttatgatgacgtacaagtagttctgtatttgaaagtgcctttgcagctcagaaccacagcaacgatcacaaatgactttattatttatttttttaattgtatttttgttgttgggggaggggagactttgatgtcagcagttgctggtaaaatgaagaatttaaagaaaaaaatgtcaaaagtagaactttgtatagttatgtaaataattcttttttattaatcactgtgtatatttgatttattaacttaataatcaagagccttaaaacatcattcctttttatttatatgtatgtgtttagaattgaaggtttttgatagcattgtaagcgtatggctttatttttttgaactcttctcattacttgttgcctataagccaaaattaaggtgtttgaaaatagtttattttaaaacaataggatgggcttctgtgcccagaatactgatggaattttttttgtacgacgtcagatgtttaaaacaccttctatagcatcacttaaaacacgttttaaggactgactgaggcagtttgaggattagtttagaacaggtttttttgtttgtttgttttttgtttttctgctttagacttgaaaagagacaggcaggtgatctgctgcagagcagtaagggaacaagttgagctatgacttaacatagccaaaatgtgagtggttgaatatgattaaaaatatcaaattaattgtgtgaacttggaagcacaccaatctgactttgtaaattctgatttcttttcaccattcgtacataatactgaaccacttgtagatttgattttttttttaatctactgcatttagggagtattctaataagctagttgaatacttgaaccataaaatgtccagtaagatcactgtttagatttgccatagagtacactgcctgccttaagtgaggaaatcaaagtgctattacgaagttcaagatcaaaaaggcttataaaacagagtaatcttgttggttcaccattgagaccgtgaagatactttgtattgtcctattagtgttatatgaacatacaaatgcatctttgatgtgttgttcttggcaataaattttgaaaagtaatatttattaaatttttttgtatgaaaacatggaacagtgtggctcttctgagcttacgtagttctaccggctttgccgtgtgcttctgccaccctgctgagtctgttctggtaatcggggtataataggctctgcctgacagagggatggaggaagaactgaaaggcttttcaaccacaaaactcatctggagttctcaaagacctggggctgctgtgaagctggaactgcgggagccccatctaggggagccttgattcccttgttattcaacagcaagtgtgaatactgcttgaataaacaccactggattaatggaaaaaaaaaaaaaaaa

SEQ ID NO: 6286 - protein, 1218 aa, Homo sapiens
  ref <308>: DATABASE ACCESSION NUMBER: SWISS-Prot / P78504
  ref <309>: DATABASE ENTRY DATE: 2002-06-15
MRSPRTRGRSGRPLSLLLALLCALRAKVCGASGQFELEILSMQNVNGELQNGNCCGGARNPGDRKCTRDECDTYFKVCLKEYQSRVTAGGPCSFGSGSTPVIGGNTFNLKASRGNDRNRIVLPFSFAWPRSYTLLVEAWDSSNDTVQPDSIIEKASHSGMINPSRQWQTLKQNTGVAHFEYQIRVTCDDYYYGFGCNKFCRPRDDFFGHYACDQNGNKTCMEGWMGPECNRAICRQGCSPKHGSCKLPGDCRCQYGWQGLYCDKCIPHPGCVHGICNEPWQCLCETNWGGQLCDKDLNYCGTHQPCLNGGTCSNTGPDKYQCSCPEGYSGPNCEIAEHACLSDPCHNRGSCKETSLGFECECSPGWTGPTCSTNIDDCSPNNCSHGGTCQDLVNGFKCVCPPQWTGKTCQLDANECEAKPCVNAKSCKNLIASYYCDCLPGWMGQNCDININDCLGQCQNDASCRDLVNGYRCICPPGYAGDHCERDIDECASNPCLNGGHCQNEINRFQCLCPTGFSGNLCQLDIDYCEPNPCQNGAQCYNRASDYFCKCPEDYEGKNCSHLKDHCRTTPCEVIDSCTVAMASNDTPEGVRYISSNVCGPHGKCKSQSGGKFTCDCNKGFTGTYCHENINDCESNPCRNGGTCIDGVNSYKCICSDGWEGAYCETNINDCSQNPCHNGGTCRDLVNDFYCDCKNGWKGKTCHSRDSQCDEATCNNGGTCYDEGDAFKCMCPGGWEGTTCNIARNSSCLPNPCHNGGTCVVNGESFTCVCKEGWEGPICAQNTNDCSPHPCYNSGTCVDGDNWYRCECAPGFAGPDCRININECQSSPCAFGATCVDEINGYRCVCPPGHSGAKCQEVSGRPCITMGSVIPDGAKWDDDCNTCQCLNGRIACSKVWCGPRPCLLHKGHSECPSGQSCIPILDDQCFVHPCTGVGECRSSSLQPVKTKCTSDSYYQDNCANITFTFNKEMMSPGLTTEHICSELRNLNILKNVSAEYSIYIACEPSPSANNEIHVAISAEDIRDDGNPIKEITDKIIDLVSKRDGNSSLIAAVAEVRVQRRPLKNRTDFLVPLLSSVLTVAWICCLVTAFYWCLRKRRKPGSHTHSASEDNTTNNVREQLNQIKNPIEKHGANTVPIKDYENKNSKMSKIRTHNSEVEEDDMDKHQQKARFAKQPAYTLVDREEKPPNGTPTKHPNWTNKQDNRDLESAQSLNRMEYIV

SEQ ID NO: 6287 - DNA, 494 bp, Rattus norvegicus
  ref <308>: DATABASE ACCESSION NUMBER: EMBL / AA900582
  ref <309>: DATABASE ENTRY DATE: 2000-03-03
cggccgctccaacatcagccgaggtagcctggggttggtaccagaggcccactgacacgctgggtttctgaggtctggtccagtggacagaatcttcttcttttacagcctcctcatcgagtgatttcaggatctccttcttcgtgtcctggttaccagcaagggcaaatgcataggccaacagcgccttagtgtagacatggctgccaccagctcctccccttgctgacttccaggctgtgtccaggcaaaagagggcattgcggacaacaggatgagtgacaggaagagacatctccaggagagctatggtgatgtaggcagacaaggtgacttcatcttctactcctcccttcatggcattgttgagcagtgacccggagctcctgaaacaaccattgtccttctgctgctgagagagccataagaaggcttgggtgatgtgtacttcatcgatgaagatatattttcgagcctgagcaaaactcttcagt

SEQ ID NO: 6288 - protein, 1472 aa, Rattus norvegicus; identical to SEQ ID NO: 3447
  ref <308>: DATABASE ACCESSION NUMBER: SWISS-Prot / P06238
  ref <309>: DATABASE ENTRY DATE: 1991-02-01

SEQ ID NO: 6289 - DNA, 4576 bp, Homo sapiens
tacaatacagtctgttctcctccagctccttctttctgcaacatggggaagaacaaactccttcatccaagtctggttcttctcctcttggtcctcctgcccacagacgcctcagtctctggaaaaccgcagtatatggttctggtcccctccctgctccacactgagaccactgagaagggctgtgtccttctgagctacctgaatgagacagtgactgtaagtgcttccttggagtctgtcaggggaaacaggagcctcttcactgacctggaggcggagaatgacgtactccactgtgtcgccttcgctgtcccaaagtcttcatccaatgaggaggtaatgttcctcactgtccaagtgaaaggaccaacccaagaatttaagaagcggaccacagtgatggttaagaacgaggacagtctggtctttgtccagacagacaaatcaatctacaaaccagggcagacagtgaaatttcgtgttgtctccatggatgaaaactttcaccccctgaatgagttgattccactagtatacattcaggatcccaaaggaaatcgcatcgcacaatggcagagtttccagttagagggtggcctcaagcaattttcttttcccctctcatcagagcccttccagggctcctacaaggtggtggtacagaagaaatcaggtggaaggacagagcaccctttcaccgtggaggaatttgttcttcccaagtttgaagtacaagtaacagtgccaaagataatcaccatcttggaagaagagatgaatgtatcagtgtgtggcctatacacatatgggaagcctgtccctggacatgtgactgtgagcatttgcagaaagtatagtgacgcttccgactgccacggtgaagattcacaggctttctgtgagaaattcagtggacagctaaacagccatggctgcttctatcagcaagtaaaaaccaaggtcttccagctgaagaggaaggagtatgaaatgaaacttcacactgaggcccagatccaagaagaaggaacagtggtggaattgactggaaggcagtccagtgaaatcacaagaaccataaccaaactctcatttgtgaaagtggactcacactttcgacagggaattcccttctttgggcaggtgcgcctagtagatgggaaaggcgtccctataccaaataaagtcatattcatcagaggaaatgaagcaaactattactccaatgctaccacggatgagcatggccttgtacagttctctatcaacaccaccaatgttatgggtacctctcttactgttagggtcaattacaaggatcgtagtccctgttacggctaccagtgggtgtcagaagaacacgaagaggcacatcacactgcttatcttgtgttctccccaagcaagagctttgtccaccttgagcccatgtctcatgaactaccctgtggccatactcagacagtccaggcacattatattctgaatggaggcaccctgctggggctgaagaagctctccttctattatctgataatggcaaagggaggcattgtccgaactgggactcatggactgcttgtgaagcaggaagacatgaagggccatttttccatctcaatccctgtgaagtcagacattgctcctgtcgctcggttgctcatctatgctgttttacctaccggggacgtgattggggattctgcaaaatatgatgttgaaaattgtctggccaacaaggtggatttgagcttcagcccatcacaaagtctcccagcctcacacgcccacctgcgagtcacagcggctcctcagtccgtctgcgccctccgtgctgtggaccaaagcgtgctgctcatgaagcctgatgctgagctctcggcgtcctcggtttacaacctgctaccagaaaaggacctcactggcttccctgggcctttgaatgaccaggacaatgaagactgcatcaatcgtcataatgtctatattaatggaatcacatatactccagtatcaagtacaaatgaaaaggatatgtacagcttcctagaggacatgggcttaaaggcattcaccaactcaaagattcgtaaacccaaaatgtgtccacagcttcaacagtatgaaatgcatggacctgaaggtctacgtgtaggtttttatgagtcagatgtaatgggaagaggccatgcacgcctggtgcatgttgaagagcctcacacggagaccgtacgaaagtacttccctgagacatggatctgggatttggtggtggtaaactcagcaggtgtggctgaggtaggagtaacagtccctgacaccatcaccgagtggaaggcaggggccttctgcctgtctgaagatgctggacttggtatctcttccactgcctctctccgagccttccagcccttctttgtggagctcacaatgccttactctgtgattcgtggagaggccttcacactcaaggccacggtcctaaactaccttcccaaatgcatccgggtcagtgtgcagctggaagcctctcccgccttcctagctgtcccagtggagaaggaacaagcgcctcactgcatctgtgcaaacgggcggcaaactgtgtcctgggcagtaaccccaaagtcattaggaaatgtgaatttcactgtgagcgcagaggcactagagtctcaagagctgtgtgggactgaggtgccttcagttcctgaacacggaaggaaagacacagtcatcaagcctctgttggttgaacctgaaggactagagaaggaaacaacattcaactccctactttgtccatcaggtggtgaggtttctgaagaattatccctgaaactgccaccaaatgtggtagaagaatctgcccgagcttctgtctcagttttgggagacatattaggctctgccatgcaaaacacacaaaatcttctccagatgccctatggctgtggagagcagaatatggtcctctttgctcctaacatctatgtactggattatctaaatgaaacacagcagcttactccagagatcaagtccaaggccattggctatctcaacactggttaccagagacagttgaactacaaacactatgatggctcctacagcacctttggggagcgatatggcaggaaccagggcaacacctggctcacagcctttgttctgaagacttttgcccaagctcgagcctacatcttcatcgatgaagcacacattacccaagccctcatatggctctcccagaggcagaaggacaatggctgtttcaggagctctgggtcactgctcaacaatgccataaagggaggagtagaagatgaagtgaccctctccgcctatatcaccatcgcccttctggagattcctctcacagtcactcaccctgttgtccgcaatgccctgttttgcctggagtcagcctggaagacagcacaagaaggggaccatggcagccatgtatataccaaagcactgctggcctatgcttttgccctggcaggtaaccaggacaagaggaaggaagtactcaagtcacttaatgaggaagctgtgaagaaagacaactctgtccattgggagcgccctcagaaacccaaggcaccagtggggcatttttacgaaccccaggctccctctgctgaggtggagatgacatcctatgtgctcctcgcttatctcacggcccagccagccccaacctcggaggacctgacctctgcaaccaacatcgtgaagtggatcacgaagcagcagaatgcccagggcggtttctcctccacccaggacacagtggtggctctccatgctctgtccaaatatggagcagccacatttaccaggactgggaaggctgcacaggtgactatccagtcttcagggacattttccagcaaattccaagtggacaacaacaaccgcctgttactgcagcaggtctcattgccagagctgcctggggaatacagcatgaaagtgacaggagaaggatgtgtctacctccagacatccttgaaatacaatattctcccagaaaaggaagagttcccctttgctttaggagtgcagactctgcctcaaacttgtgatgaacccaaagcccacaccagcttccaaatctccctaagtgtcagttacacagggagccgctctgcctccaacatggcgatcgttgatgtgaagatggtctctggcttcattcccctgaagccaacagtgaaaatgcttgaaagatctaaccatgtgagccggacagaagtcagcagcaaccatgtcttgatttaccttgataaggtgtcaaatcagacactgagcttgttcttcacggttctgcaagatgtcccagtaagagatctgaaaccagccatagtgaaagtctatgattactacgagacggatgagtttgcaattgctgagtacaatgctccttgcagcaaagatcttggaaatgcttgaagaccacaaggctgaaaagtgctttgctggagtcctgttctcagagctccacagaagacacgtgtttttgtatctttaaagacttgatgaataaacactttttctggtc

SEQ ID NO: 6290 - protein, 1474 aa, Homo sapiens
MGKNKLLHPSLVLLLLVLLPTDASVSGKPQYMVLVPSLLHTETTEKGCVLLSYLNETVTVSASLESVRGNRSLFTDLEAENDVLHCVAFAVPKSSSNEEVMFLTVQVKGPTQEFKKRTTVMVKNEDSLVFVQTDKSIYKPGQTVKFRVVSMDENFHPLNELIPLVYIQDPKGNRIAQWQSFQLEGGLKQFSFPLSSEPFQGSYKVVVQKKSGGRTEHPFTVEEFVLPKFEVQVTVPKIITILEEEMNVSVCGLYTYGKPVPGHVTVSICRKYSDASDCHGEDSQAFCEKFSGQLNSHGCFYQQVKTKVFQLKRKEYEMKLHTEAQIQEEGTVVELTGRQSSEITRTITKLSFVKVDSHFRQGIPFFGQVRLVDGKGVPIPNKVIFIRGNEANYYSNATTDEHGLVQFSINTTNVMGTSLTVRVNYKDRSPCYGYQWVSEEHEEAHHTAYLVFSPSKSFVHLEPMSHELPCGHTQTVQAHYILNGGTLLGLKKLSFYYLIMAKGGIVRTGTHGLLVKQEDMKGHFSISIPVKSDIAPVARLLIYAVLPTGDVIGDSAKYDVENCLANKVDLSFSPSQSLPASHAHLRVTAAPQSVCALRAVDQSVLLMKPDAELSASSVYNLLPEKDLTGFPGPLNDQDNEDCINRHNVYINGITYTPVSSTNEKDMYSFLEDMGLKAFTNSKIRKPKMCPQLQQYEMHGPEGLRVGFYESDVMGRGHARLVHVEEPHTETVRKYFPETWIWDLVVVNSAGVAEVGVTVPDTITEWKAGAFCLSEDAGLGISSTASLRAFQPFFVELTMPYSVIRGEAFTLKATVLNYLPKCIRVSVQLEASPAFLAVPVEKEQAPHCICANGRQTVSWAVTPKSLGNVNFTVSAEALESQELCGTEVPSVPEHGRKDTVIKPLLVEPEGLEKETTFNSLLCPSGGEVSEELSLKLPPNVVEESARASVSVLGDILGSAMQNTQNLLQMPYGCGEQNMVLFAPNIYVLDYLNETQQLTPEIKSKAIGYLNTGYQRQLNYKHYDGSYSTFGERYGRNQGNTWLTAFVLKTFAQARAYIFIDEAHITQALIWLSQRQKDNGCFRSSGSLLNNAIKGGVEDEVTLSAYITIALLEIPLTVTHPVVRNALFCLESAWKTAQEGDHGSHVYTKALLAYAFALAGNQDKRKEVLKSLNEEAVKKDNSVHWERPQKPKAPVGHFYEPQAPSAEVEMTSYVLLAYLTAQPAPTSEDLTSATNIVKWITKQQNAQGGFSSTQDTVVALHALSKYGAATFTRTGKAAQVTIQSSGTFSSKFQVDNNNRLLLQQVSLPELPGEYSMKVTGEGCVYLQTSLKYNILPEKEEFPFALGVQTLPQTCDEPKAHTSFQISLSVSYTGSRSASNMAIVDVKMVSGFIPLKPTVKMLERSNHVSRTEVSSNHVLIYLDKVSNQTLSLFFTVLQDVPVRDLKPAIVKVYDYYETDEFAIAEYNAPCSKDLGNA

SEQ ID NO: 6291 - DNA, 503 bp, Rattus norvegicus
  ref <308>: DATABASE ACCESSION NUMBER: EMBL / AA900848
  ref <309>: DATABASE ENTRY DATE: 2000-03-03
cggccgcaatggtcgcaactgaggccttggacatgggggaggcatgggcactgcccagtgcttgggtcacaatggcacaggtctgtagatgggcaccgctggggatctgtgcccagaaggttgcaggtacagcggtgacagctctgtcgggcagcttgcccatggaagccaggcttgcaatggccacagtggggcccctccgtgtggtgtaaacagcgcaagcattgccccgtgtggggatcacaggcaccgggatccgtggggtcaatgttcccactgcactcacacagttggcacctgccatctggcttggattggtccccaaagtgcccgtgggcacaatcctcacaccgaagccctgtgtagcctgctcgacagtggcacacaatttgctgggaatatccatcccggtgacatgaagtaccaaagtgtcgctggctcccggggccttccgttcagccaacgccctcacagtttggtactggtcacctacttgttcccgt

SEQ ID NO: 6292 - protein, 1801 aa, Rattus norvegicus
  ref <308>: DATABASE ACCESSION NUMBER: SWISS-Prot / P15800
  ref <309>: DATABASE ENTRY DATE: 2002-06-15
MEWASGKPGRGRQGQPVPWELRLGLLLSVLAATLAQVPSLDVPGCSRGSCYPATGDLLVGRADRLTASSTCGLHSPQPYCIVSHLQDEKKCFLCDSRRPFSARDNPNSHRIQNVVTSFAPQRRTAWWQSENGVPMVTIQLDLEAEFHFTHLIMTFKTFRPAAMLVERSADFGRTWRVYRYFSYDCGADFPGIPLAPPRRWDDVVCESRYSEIEPSTEGEVIYRVLDPAIPIPDPYSSRIQNLLKITNLRVNLTRLHTLGDNLLDPRREIREKYYYALYELVIRGNCFCYGHASQCAPAPGAPAHAEGMVHGACICKHNTRGLNCEQCQDFYQDLPWHPAEDGHTHACRKCECNGHSHSCHFDMAVYLASGNVSGGVCDGCQHNTAGRHCELCRPFFYRDPTKDMRDPAACRPCDCDPMGSQDGGRCDSHDDPVLGLVSGQCRCKEHVVGTRCQQCRDGFFGLSASNPRGCQRCQCNSRGTVPGGTPCDSSSGTCFCKRLVTGDGCDRCLPGHWGLSHDLLGCRPCDCDVGGALDPQCDEATGQCPCRPHMIGRRCEQVQPGYFRPFLDHLTWEAEGAHGQVLEVVERLVTNRETPSWTGVGFVRLREGQEVEFLVTSLPRAMDYDLLLRWEPQVPEQWAELELVVQRPGPVSAHSPCGHVLPRDDRIQGMLHPNTRVLVFPRPVCLEPGLSYKLKLKLTGTGGRAHPETPYSGSGILIDSLVLQPHVLMLEMFSGGDAAALERRTTFERYRCHEEGLMPSKTPLSEACVPLLISASSLVYNGALPCQCDPQGSLSSECNPHGGQCRCKPGVVGRRCDACATGYYGFGPAGCQACQCSPDGALSALCEGTSGQCLCRTGAFGLRCDHCQRGQWGFPNCRPCVCNGRADECDAHTGACLGCRDYTGGEHCERCIAGFHGDPRLPYGGQCRPCPCPEGPGSQRHFATSCHRDGYSQQIVCHCRAGYTGLRCEACAPGHFGDPSKPGGRCQLCECSGNIDPTDPGACDPHTGQCLRCLHHTEGPHCGHCKPGFHGQAARQSCHRCTCNLLGTDPQRCPSTDLCHCDPSTGQCPCLPHVQGLSCDRCAPNFWNFTSGRGCQPCACHPSRARGPTCNEFTGQCHCHAGFGGRTCSECQELHWGDPGLQCRACDCDPRGIDKPQCHRSTGHCSCRPGVSGVRCDQCARGFSGVFPACHPCHACFGDWDRVVQDLAARTRRLEQWAQELQQTGVLGAFESSFLNLQGKLGMVQAIVAARNTSAASTAKLVEATEGLRHEIGKTTERLTQLEAELTDVQDENFNANHALSGLERDGLALNLTLRQLDQHLDILKHSNFLGAYDSIRHAHSQSTEAERRANASTFAIPSPVSNSADTRRRAEVLMGAQRENFNRQHLANQQALGRLSTHTHTLSLTGVNELVCGAPGDAPCATSPCGGAGCRDEDGQPRCGGLGCSGAAATADLALGRARHTQAELQRALVEGGGILSRVSETRRQAEEAQQRAQAALDKANASRGQVEQANQELRELIQNVKDFLSQEGADPDSIEMVATRVLDISIPASPEQIQRLASEIAERVRSLADVDTILAHTMGDVRRAEQLLQDAQRARSRAEGERQKAETVQAALEEAQRAQGAAQGAIRGAVVDTKNTEQTLQQVQERMAGTEQSLNSASERARQLHALLEALKLKRAGNSLAASTAEETAGSAQSRAREAEKQLREQVGDQYQTVRALAERKAEGVLAAQARAEQLRDEARGLLQAAQDKLQRLQELEGTYEENERELEVKAAQLDGLEARMRSVLQAINLQVQIYNTCQ

SEQ ID NO: 6293 - DNA, 5683 bp, Homo sapiens
  ref <308>: DATABASE ACCESSION NUMBER: EMBL / X79683
  ref <309>: DATABASE ENTRY DATE: 1995-12-05
ccgcccggtgttgcgctccttcccagaatccgctccggcctttccttcctgccgcgattcccaactttgctcaaagtcgccggactctaagctgtcggagggaccgctggacagacctgggaactgacagagggcctggagggaaataggccaaagacccacaggatggagctgacctcaaccgaaagagggaggggacagcctctgccctgggaacttcgactgcccctactgctaagcgtgctggctgccacactggcacaggcccctgccccggatgtccctggctgttccaggggaagctgctaccccgccacggccgacctgctggtgggccgagctgacagactgactgcctcatccacttgtggcctgaatggccgccagccctactgcatcgtcagtcacctgcaggacgaaaagaagtgcttcctttgtgactcccggcgccccttctctgctagagacaacccacacacccatcgcatccagaatgtagtcaccagctttgcaccacagcggcgggcagcttggtggcagtcacagaatggtatccctgcggtcaccatccagctggacctggaggctgagtttcatttcacacacctcattatgaccttcaagacatttcgccctgctgccatgctggtcgaacgctcagcagactttggccgcacctggcatgtgtaccgatatttctcctatcactgtggggctgacttcccaggagtcccactagcacccccacggcactgggatgatgtagtctgtgagtcccgctactcagagattgagccatccactgaaggcgaggtcatctatcgtgtgctggaccctgccatccctatcccagacccctacagctcacggattcagaacctgttgaagatcaccaacctacgggtgaacctgactcgtctacacacgttgggagacaacctactcgacccacggagggagatccgagagaagtactactatgccctctatgagctggttgtacgtggcaactgcttctgctacggacacgcctcagagtgtgcacccgccccaggggcaccagcccatgctgagggcatggtgcacggagcttgcatctgcaaacacaacacacgtggcctcaactgcgagcagtgtcaggatttctatcgtgacctgccctggcgtccggctgaggacggccatagtcatgcctgtaggaagtgtgatcggcatgggcacacccacagctgccacttcgacatggccgtatacctcggatctggcaatgtgagtggaggtgtgtgtgatggatgtcagcataacacagcgtggcgccactgtgagctctgtcggcccttcttctaccgtgacccaaccaaggacctgcgggatccggctgtgtgccgctcctgtgattgtgaccccatgggttctcaagacggtggtcgctgtgattcccatgatgaccctgcactgggactggtctccggccagtgtcgctgcaaagaacacgtggtgggcactcgctgccagcaatgccgtgatggcttctttgggctcagcatcagtgacccgtctgggtgccggcgatgtcaatgtaatgcacggggcacagtgcctgggagcactccttgtgaccccaacagtggatcctgttactgcaaacgtctagtgactggacgtggatgtgaccgctgcctgcctggccactggggcctgagcctcgacctgctcggctgccgcccctgtgactgcgacgtgggtggtgctttggatccccagtgtgatgagggcacaggtcaatgccactgccgccagcacatggttgggcgacgctgtgagcaggtgcaacctggctacttccggcccttcctggaccacctaatttgggaggctgagaacacccgagggcaggtgctcgatgtggtggagcgcctggtgacccccggggaaactccatcctggactggctcaggcttcgtgcgactacaggaaggtcagaccctggagttcctggtggcctctgtgccgaacgcgatggactatgacctgctgctgcgcttagagccccaggtccctgagcaatgggcagagttggaactgattgtgcagcgtccagggcctgtgcctgcccacagcctgtgtgggcatttggtgcccagggatgatcgcatccaagggactctgcaaccacatgccaggtacttgatatttcctaatcctgtctgccttgagcctggtatctcctacaagctgcatctgaagctggtacggacagggggaagtgcccagcctgagactccctactctggacctggcctgctcattgactcgctggtgctgctgccccgtgtcctggtgctagagatgtttagtgggggtgatgctgctgccctggagcgccaggccacctttgaacgctaccaatgccatgaggagggtctggtgcccagcaagacttctccctctgaggcctgcgcacccctcctcatcagcctgtccaccctcatctacaatggtgccctgccatgtcagtgcaaccctcaaggttcactgagttctgagtgcaaccctcatggtggtcagtgcctgtgcaagcctggagtggttgggcgccgctgtgacacgtgtgcccctggctactatggctttggccccacaggctgtcaagcctgccagtgcagcccacgaggggcactcagcagtctctgtgaaaggaccagtgggcaatgtctctgtcgaactggtgcctttgggcttcgctgtgacgcctgccagcgtggccagtggggattccctagctgccggccatgtgtctgcaatgggcatgcagatgagtgcaacacccacacaggcgcttgcctgggctgccgtgatctcacagggggtgagcactgtgaaaggtgcattgctggtttccacggggacccacggctgccatatggggcgcagtgccggccctgtccctgtcctgaaggccctgggagccaacggcactttgctacttcttgccaccaggatgaatattcccagcagattgtgtgccactgccgggcaggctatacggggctgcgatgtgaagcttgtgcccctgggcagtttggggacccatcaaggccaggtggccggtgccaactgtgtgagtgcagtgggaacattgacccaatggatcctgatgcctgtgacccacaccccgggcaatgcctgcgctgtttacaccacacagagggtccacactgtgcccactcgaagcctggcttccatggccaggctgcccggcagagctgtcaccgctgcacatgcaacctgctgggcacaaatccgcagcagtgcccatctcctgaccagtgccactgtgatccaagcagtgggcagtgcccatgcctccccaatgtccaggccctagctgtagaccgctgtgcccccaacttctggaacctcaccagtggccatggttgccagccttgtgcctgcctcccaagcccggaagaaggccccacctgcaacgagttcacagggcagtgccactgcctgtgcggctttggagggcggacttgttctgagtgccaagagctccactggggagaccctgggttgcagtgccatgcctgtgattgtgactctcgtggaatagatacacctcagtgtcaccgcttcacaggtcactgcacgtgccgcccaggggtgtctggtgtgcgctgtgaccagtgtgcccgtggcttctcaggaatctttcctgcctgccatccctgccatgcatgcttcggggattgggaccgagtggtgcaggacttggcagcccgtacacagcgcctagagcagcgggcgcaggagttgcaacagacgggtgtgctgggtgcctttgagagcagcttctggcacatgcaggagaagctgggcattgtgcagggcatcgtaggtgcccgcaacacctcagccgcctccactgcacagcttgtggaggccacagaggagctgcggcgtgaaattggggaggccactgagcacctgactcagctcgaggcagacctgacagatgtgcaagatgagaacttcaatgccaaccatgcactaagtggtctggagcgagataggcttgcacttaatctcacactgcggcagctcgaccagcatcttgacttgctcaaacattcaaacttcctgggtgcctatgacagcatccggcatgcccatagccagtctgcagaggcagaacgtcgtgccaatacctcagccctggcagtacctagccctgtgagcaactcggcaagtgctcggcatcggacagaggcactgatggatgctcagaaggaggacttcaacagcaaacacatggccaaccagcgggcacttggcaagctctctgcccatacccacaccctgagcctgacagacataaatgagctggtgtgtggggcccagggattgcatcatgatcgtacaagcccttgtgggggtgccggctgtcgagatgaggatgggcagccgcgctgtgggggcctcagctgcaatggggcagcggctacagcagacctagcactgggccgggcccggcacacacaggcagagctgcagcgggcactggcagaaggtggtagcatcctcagcagagtggctgagactcgtcggcaggcaagcgaggcacagcagcgggcccaggcagccctggacaaggctaatgcttccaggggacaggtggaacaggccaaccaggaacttcaagaacttatccagagtgtgaaggacttcctcaaccaggagggggctgatcctgatagcattgaaatggtggccacacgggtgctagagctctccatcccagcttcagctgagcagatccagcacctggcgggcgcgattgcagagcgagtccggagcctggcagatgtggatgcgatcctggcacgtactgtaggagatgtgcgtcgtgccgagcagctactgcaggatgcacggcgggcaaggagctgggctgaggatgagaaacagaaggcagagacagtacaggcagcactggaggaggcccagcgggcacagggtattgcccagggtgccatccggggggcagtggctgacacacgggacacagagcagaccctgtaccaggtacaggagaggatggcaggtgcagagcgggcactgagctctgcaggtgaaagggctcggcagttggatgctctcctggaggctctgaaattgaaacgggcaggaaatagtctggcagcctctacagcagaagaaacggcaggcagtgcccagggtcgtgcccaggaggctgagcagctgctacgcggtcctctgggtgatcagtaccagacggtgaaggccctagctgagcgcaaggcccaaggtgtgctggctgcacaggcaagggcagaacaactgccggatgaggctcgggacctgttgcaagccgctcaggacaagctgcagcggctacaggaattggaaggcacctatgaggaaaatgagcgggcactggagagtaaggcagcccagttggacgggttggaggccaggatgcgcagcgtgcttcaagccatcaacttgcaggtgcagatctacaacacctgccagtgacccctgcccaaggcctaccccagttcctagcactgccccacatgcatgtctgcctatgcactgaagagctcttggcccggcagggcccccaataaaccagtgtgaacccccaaaaaaaaaa

SEQ ID NO: 6294 - protein, 1798 aa, Homo sapiens
  ref <308>: DATABASE ACCESSION NUMBER: SWISS-Prot / P55268
  ref <309>: DATABASE ENTRY DATE: 2002-06-15
MELTSRERGRGQPLPWELRLGLLLSVLAATLAQAPAPDVPGCSRGSCYPATGDLLVGRADRLTASSTCGLNGPQPYCIVSHLQDEKKCFLCDSRRPFSARDNPHSHRIQNVVTSFAPQRRAAWWQSENGIPAVTIQLDLEAEFHFTHLIMTFKTFRPAAMLVERSADFGRTWHVYRYFSYDCGADFPGVPLAPPRHWDDVVCESRYSEIEPSTEGEVIYRVLDPAIPIPDPYSSRIQNLLKITNLRVNLTRLHTLGDNLLDPRREIREKYYYALYELVVRGNCFCYGHASECAPAPGAPAHAEGMVHGACICKHNTRGLNCEQCQDFYRDLPWRPAEDGHSHACRKCECHGHTHSCHFDMAVYLASGNVSGGVCDGCQHNTAGRHCELCRPFFYRDPTKDLRDPAVCRSCDCDPMGSQDGGRCDSHDDPALGLVSGQCRCKEHVVGTRCQQCRDGFFGLSISDRLGCRRCQCNARGTVPGSTPCDPNSGSCYCKRLVTGRGCDRCLPGHWGLSHDLLGCRPCDCDVGGALDPQCDEGTGQCHCRQHMVGRRCEQVQPGYFRPFLDHLIWEAEDTRGQVLDVVERLVTPGETPSWTGSGFVRLQEGQTLEFLVASVPKAMDYDLLLRLEPQVPEQWAELELIVQRPGPVPAHSLCGHLVPKDDRIQGTLQPHARYLIFPNPVCLEPGISYKLHLKLVRTGGSAQPETPYSGPGLLIDSLVLLPRVLVLEMFSGGDAAALERQATFERYQCHEEGLVPSKTSPSEACAPLLISLSTLIYNGALPCQCNPQGSLSSECNPHGGQCLCKPGVVGRRCDLCAPGYYGFGPTGCQACQCSHEGALSSLCEKTSGQCLCRTGAFGLRCDRCQRGQWGFPSCRPCVCNGHADECNTHTGACLGCRDHTGGEHCERCIAGFHRDPRLPYGGQCRPCPCPEGPGSQRHFATSCHQDEYSQQIVCHCRAGYTGLRCEACAPGHFGDPSRPGGRCQLCECSGNIDPMDPDACDPHTGQCLRCLHHTEGPHCAHCKPGFHGQAARQSCHRCTCNLLGTNPQQCPSPDQCHCDPSSGQCPCLPNVQGPSCDRCAPNFWNLTSGHGCQPCACHPSRARGPTCNEFTGQCHCRAGFGGRTCSECQELHWGDPGLQCHACDCDSRGIDTPQCHRFTGHCSCRPGVSGVRCDQCARGFSGIFPACHPCHACFGDWDRVVQDLAARTQRLEQRAQELQQTGVLGAFESSFWHMQEKLGIVQGIVGARNTSAASTAQLVEATEELRREIGEATEHLTQLEADLTDVQDENFNANHALSGLERDRLALNLTLRQLDQHLDLLKHSNFLGAYDSIRHAHSQSAEAERRANTSALAVPSPVSNSASARHRTEALMDAQKEDFNSKHMANQRALGKLSAHTHTLSLTDINELVCGAPGDAPCATSPCGGAGCRDEDGQPRCGGLSCNGAAATADLALGRARHTQAELQRALAEGGSILSRVAETRRQASEAQQRAQAALDKANASRGQVEQANQELQELIQSVKDFLNQEGADPDSIEMVATRVLELSIPASAEQIQHLAGAIAERVRSLADVDAILARTVGDVRRAEQLLQDARRARSWAEDEKQKAETVQAALEEAQRAQGIAQGAIRGAVADTRDTEQTLYQVQERMAGAERALSSAGERARQLDALLEALKLKRAGNSLAASTAEETAGSAQGRAQEAEQLLRGPLGDQYQTVKALAERKAQGVLAAQARAEQLRDEARDLLQAAQDKLQRLQELEGTYEENERALESKAAQLDGLEARMRSVLQAINLQVQIYNTCQ

SEQ ID NO: 6295 - DNA, 457 bp, Rattus norvegicus
  ref <308>: DATABASE ACCESSION NUMBER: EMBL / AA924084
  ref <309>: DATABASE ENTRY DATE: 2000-03-03
tttttttttttttttttggcaaaccagctaagttttattgggctgctgacagaaaggagtatggcgggttctaaggcagctgtatcactgttaagtcccctgcaccttgagagtggctatgccaccagcagcgctgccatctgtgcacgttcagccaaggtgcttatgtaatcttgtgacatgccctccaccccctcgaaaagaaaggcaagggtcttgcacaggtgatcatggctgctctaattcaagccggcagttaccacagatggccatctaagacatctctaccgctggttctaaagggtaaagaaaaactatttactctttaaagagagggtggtgacacatcaatccacaggcaactaactgataagatgttttatttcacttttgagtttttacatcgtcctgattactctgtgtaaggagaaactagaatgtttaaaagacatacacg

SEQ ID NO: 6296 - protein, 245 aa, Rattus norvegicus
  ref <308>: DATABASE ACCESSION NUMBER: SWISS-Prot / P35213
  ref <309>: DATABASE ENTRY DATE: 2002-06-15
TMDKSELVQKAKLAEQAERYDDMAAAMKAVTEQGHELSNEERNLLSVAYKNVVGARRSSWRVISSIEQKTERNEKKQQMGKEYREKIEAELQDICSDVLELLDKYLILNATHAESKVFYLKMKGDYFRYLSEVASGDNKQTTVSNSQQAYQEAFEISKKEMQPTHPIRLGLALNFSVFYYEILNSPEKACSLAKTAFDEAIAELDTLNEESYKDSTLIMQLLRDNLTLWTSENQGDEGDAGEGEN

SEQ ID NO: 6297 - DNA, 389 bp, Rattus norvegicus
  ref <308>: DATABASE ACCESSION NUMBER: EMBL / AA924772
  ref <309>: DATABASE ENTRY DATE: 2000-03-03
tttttttttttttttttgctgtgcatgggatttattcacacccccggagcaggaagccagggaggggggcaacagccacgccccaccagggacacgcagcactattcacataggctgtgtgggagtcctcactggcagcagctgcatttctcggccttggccccctcttcgcctttgcaaacacagtccttggcacacttctcacatcctgcagggcaacaggagcagcagctcttcttgcagttcgtgcatttgcagcccttgcatttgcatttgtccgagcaggtgcaggaaccaccagtaggacaggggcaggtctcagggtccatatccaggccagcagccgcgagagactgtagcttagttcctccaggcaagccctcgtgccg

SEQ ID NO: 6298 - protein, 66 aa, Rattus norvegicus
  ref <308>: DATABASE ACCESSION NUMBER: SWISS-Prot / P37361
  ref <309>: DATABASE ENTRY DATE: 2002-06-15
MDPETCPCPTGGSCTCSDKCKCKGCKCTNCKKSCCSCCPAGCEKCAKDCVCKGEEGAKAEKCSCCQ

SEQ ID NO: 6299 - DNA, 556 bp, Rattus norvegicus
  ref <308>: DATABASE ACCESSION NUMBER: EMBL / AA924909
  ref <309>: DATABASE ENTRY DATE: 2000-03-03
cggccgcttttacatcactggagtcttccaaatccttgctggtctgtgtgtgatgagtgcagcggccatctacacagtgagacacagtgagtggcatgtcaacaacgactactcctatggctttgcttacatcctggcctgggtggctttcccgctggccctccttagtggcatcatctacgtgatcctgcggaaacgcgaatgaggcgcccgacgcaccatccgtctaggctctgagcgtgcatagggtacacagggagggaggaaggaaaccagaaaaccaaaccaaccaacccaaaagagctagcccccaaacccaaacgcaagccaaaccaaacagaacacagttgagtggggattgctgtcgattgaagatgtatataatatctatggtttataaaacctatttataacactttttacatacatgtacataggattgtttgctttttatgttgaccgtcagcctcgtgttgaatcttaaacgactctacatcctaacactataaccaagctcagtattttcgttttgtttcgtttttttcatctttttgtt

SEQ ID NO: 6300 - protein, 160 aa, Rattus norvegicus
  ref <308>: DATABASE ACCESSION NUMBER: SWISS-Prot / P25094
  ref <309>: DATABASE ENTRY DATE: 2001-10-16
MLLLLLGILFLHIAVLVLLFVSTIVSQWLVGNGHRTDLWQNCTTSALGAVQHCYSSSVSEWLQSVQATMILSVIFSVLSLFLFFCQLFTLTKGGRFYITGVFQILAGLCVMSAAAIYTVRHSEWHVNNDYSYGFAYILAWVAFPLALLSGIIYVILRKRE

SEQ ID NO: 6301 - DNA, 1661 bp, Homo sapiens
  ref <308>: DATABASE ACCESSION NUMBER: EMBL / M94048
  ref <309>: DATABASE ENTRY DATE: 1993-01-27
gcgctctcctcgcaggcagaaactccgctgagcagaacttgccgccagaatgctcctcctgttgctgagtatcatcgtcctccacgtcgcggtgctggtgctgctgttcgtctccacgatcgtcagccaatggatcgtgggcaatggacacgcaactgatctctggcagaactgtagcacctcttcctcaggaaatgtccaccactgtttctcatcatcaccaaacgaatggctgcagtctgtccaggccaccatgatcctgtcgatcatcttcagcattctgtctctgttcctgttcttctgccaactcttcaccctcaccaaggggggcaggttttacatcactggaatcttccaaattcttgctggtctgtgcgtgatgagtgctgcggccatctacacggtgaggcacccggagtggcatctcaactcggattactcctacggtttcgcctacatcctggcctgggtggccttccccctggcccttctcagcggtgtcatctatgtgatcttgcggaaacgcgaatgaggcgcccagacggtctgtctgaggctctgagcgtacatagggaagggaggaagggaaaacagaaagcagacaaagaaaaaagagctagcccaaaatcccaaactcaaaccaaaccaaacagaaagcagtggaggtgggggttgctgttgattgaagatgtatataatatctccggtttataaaacctatttataacactttttacatatatgtacatagtattgtttgctttttatgttgaccatcagcctcgtgttgagccttaaagaagtagctaaggaactttacatcctaacagtataatccagctcagtatttttgttttgttttttgtttgtttgttttgttttacccagaaataagataactccatctcgccccttccctttcatctgaaagaagatacctccctcccagtccacctcatttagaaaaccaaagtgtgggtagaaaccccaaatgtccaaaagcccttttctggtgggtgacccagtgcatccaacagaaacagccgctgcccgaacctctgtgtgaagctttacgcgcacacggacaaaatgcccaaaccggagccctcgaaaaacgcggcttgtggcattggcatacttgccttacaggtggagtatcttcgtcacacatctaaatgagaaatcagtgacaacaagtctttgaaatggtgctatggatttaccattccttattatcactaatcatctaaacaactcactggaaatccaattaacaattttataacataagatagaatggagacctgaataattctgtgtaatataaatggtttataactgcttttgtacctagctaggctgctattattactataatgagtaaatcataaagccttcgtcactcccacagttttcttacggtcggagcatcacaacaagcgtctagactccttgggaccgtgagttcctagagcttggctgggtctaggctgttctgtgcctccaaggactgtctggcaatgacttgtattggccaccaactgtagatgtatatatggtgcccttctgatgctaagactccagaccttttgtttttgctttgcattttctgattttataccaactgtgtggactaagatgcattaaaataaacatcagag

SEQ ID NO: 6302 - protein, 160 aa, Homo sapiens
  ref <308>: DATABASE ACCESSION NUMBER: SWISS-Prot / Q01453
  ref <309>: DATABASE ENTRY DATE: 2002-06-15
MLLLLLSIIVLHVAVLVLLFVSTIVSQWIVGNGHATDLWQNCSTSSSGNVHHCFSSSPNEWLQSVQATMILSIIFSILSLFLFFCQLFTLTKGGRFYITGIFQILAGLCVMSAAAIYTVRHPEWHLNSDYSYGFAYILAWVAFPLALLSGVIYVILRKRE

SEQ ID NO: 6303 - DNA, 530 bp, Rattus norvegicus
  ref <308>: DATABASE ACCESSION NUMBER: EMBL / AA925246
  ref <309>: DATABASE ENTRY DATE: 2000-03-03
tttttttttttttttttcaaattgtaaacgagatactttatttcaaatgcaaagaaggaaacattttttacatcatgtaagtttgtcaaagaatcatgaatagatttgtgcatctcagtggaagactgaaatctgcactggtgtatatagaagacaggggcttgggaaggtcaccttagtcctccagcctgctggaggactccagcgtctatcagcacagaggccacaactctcagaaaatgcccagttgtgtccacaaagaaaagggccttgggtggagagaagggaagcagaggtgtcactccaaagccaccgttcgcttgcactgttgaggaaggaatgtgagaacagatgggctggctggcttgaatcacatcttggggaagctggccaggttggtaatgccacaggcattgttcttattccgagccaagagaacatagcctttgtttccccagctttctccccagctgtttttaattatccagtacttatttcccttctgggtgccatagcccaccaccaacacg

SEQ ID NO: 6304 - protein, 329 aa, Rattus norvegicus
  ref <308>: DATABASE ACCESSION NUMBER: SWISS-Prot / O35186
  ref <309>: DATABASE ENTRY DATE: 2002-06-15
MWVFKFLLLPVVSFALSPEETLDTQWELWKKTHGKQYNSKVDEISRRLIWEKNLKKISVHNLEASLGAHTYELAMNHLGDMTSEEVVQKMTGLRVPPSRSFSNDTLYTPEWEGRVPDSIDYRKKGYVTPVKNQGQCGSCWAFSSAGALEGQLKKKTGKLLALSPQNLVDCVSENYGCGGGYMTTAFQYVQQNGGIDSEDAYPYVGQDESCMYNATAKAAKCRGYREIPVGNEKALKRAVARVGPVSVSIDASLTSFQFYSRGVYYDENCDRDNVNHAVLVVGYGTQKGNKYWIIKNSWGESWGNKGYVLLARNKNNACGITNLASFPKM

SEQ ID NO: 6305 - DNA, 1669 bp, Homo sapiens
  ref <308>: DATABASE ACCESSION NUMBER: EMBL / X82153
  ref <309>: DATABASE ENTRY DATE: 1995-04-18
gaaacaagcactggattccatatcccactgccaaaaccgcatggttcagattatcgctattgcagctttcatcataatacacacctttgctgccgaaacgaagccagacaacagatttccatcagcaggatgtgggggctcaaggttctgctgctacctgtggtgagctttgctctgtaccctgaggagatactggacacccactgggagctatggaagaagacccacaggaagcaatataacaacaaggtggatgaaatctctcggcgtttaatttgggaaaaaaacctgaagtatatttccatccataaccttgaggcttctcttggtgtccatacatatgaactggctatgaaccacctgggggacatgaccagtgaagaggtggttcagaagatgactggactcaaagtacccctgtctcattcccgcagtaatgacaccctttatatcccagaatgggaaggtagagccccagactctgtcgactatcgaaagaaaggatatgttactcctgtcaaaaatcagggtcagtgtggttcctgttgggcttttagctctgtgggtgccctggagggccaactcaagaagaaaactggcaaactcttaaatctgagtccccagaacctagtggattgtgtgtctgagaatgatggctgtggagggggctacatgaccaatgccttccaatatgtgcagaagaaccggggtattgactctgaagatgcctacccatatgtgggacaggaagagagttgtatgtacaacccaacaggcaaggcagctaaatgcagagggtacagagagatccccgaggggaatgagaaagccctgaagagggcagtggcccgagtgggacctgtctctgtggccattgatgcaagcctgacctccttccagttttacagcaaaggtgtgtattatgatgaaagctgcaatagcgataatctgaaccatgcggttttggcagtgggatatggaatccagaagggaaacaagcactggataattaaaaacagctggggagaaaactggggaaacaaaggatatatcctcatggctcgaaataagaacaacgcctgtggcattgccaacctggccagcttccccaagatgtgactccagccagccaaatccatcctgctcttccatttcttccacgatggtgcagtgtaacgatgcactttggaagggagttggtgtgctatttttgaagcagatgtggtgatactgagattgtctgttcagtttccccatttgtttgtgcttcaaatgatccttcctactttgcttctctccacccatgacctttttcactgtggccatcaggactttccctgacagctgtgtactcttaggctaagagatgtgactacagcctgcccctgactgtgttgtcccagggctgatgctgtacaggtacaggctggagattttcacataggttagattctcattcacgggactagttagctttaagcaccctagaggactagggtaatctgacttctcacttcctaagttcccttctatatcctcaaggtagaaatgtctatgttttctactccaattcataaatctattcataagtctttggtacaagtttacatgataaaaagaaatgtgatttgtcttcccttctttgcacttttgaaataaagtatttatc

SEQ ID NO: 6306 - protein, 329 aa, Homo sapiens
  ref <308>: DATABASE ACCESSION NUMBER: SWISS-Prot / P43235
  ref <309>: DATABASE ENTRY DATE: 2002-06-15
MWGLKVLLLPVVSFALYPEEILDTHWELWKKTHRKQYNNKVDEISRRLIWEKNLKYISIHNLEASLGVHTYELAMNHLGDMTSEEVVQKMTGLKVPLSHSRSNDTLYIPEWEGRAPDSVDYRKKGYVTPVKNQGQCGSCWAFSSVGALEGQLKKKTGKLLNLSPQNLVDCVSENDGCGGGYMTNAFQYVQKNRGIDSEDAYPYVGQEESCMYNPTGKAAKCRGYREIPEGNEKALKRAVARVGPVSVAIDASLTSFQFYSKGVYYDESCNSDNLNHAVLAVGYGIQKGNKHWIIKNSWGENWGNKGYILMARNKNNACGIANLASFPKM

SEQ ID NO: 6307 - DNA, 518 bp, Rattus norvegicus
  ref <308>: DATABASE ACCESSION NUMBER: EMBL / AA925248
  ref <309>: DATABASE ENTRY DATE: 2000-03-03
tttttttttttttttttgactctgaaattacgtttacttgattgtccaaggcaagttggtaaattcattgagtttctgaggatcgaaagtagataacaagagttaaggctcgagtccatgcgttcattacaaaatacagtctcgagaatacaatggcattgagtatcataaaacccatttaaagcttcttatttaagccagtagaatatatatatatatatattttttttttcttttcaattctggagggcttcataggcacggtgtaatcagtctttatacaaatggagaaaatatcagattctcaaactacatgagtggaagtaaacaactatgtgaagaaatcaaaaccaactatttatattaacaaaaataatatcagtagttaaaactaatgtttgttattttatagattctcaaatataaaacatttgcatgagtatgtatgagaagatataaaagaaataagggaaacataagtgagctaatttgcatataatgatgttataaaatgccaa

SEQ ID NO: 6308 - protein, 1702 aa, Rattus norvegicus
  ref <308>: DATABASE ACCESSION NUMBER: SWISS-Prot / CAA70364
  ref <309>: DATABASE ENTRY DATE: 2003-02-01
MLTSPEPKGLVPFTAESLELIKNHIAKKCNEEHEEEDLKPSRDIEAGKKLPFAYGTLPQGTVSEPLEDVDPYYYVKRNTFMVLNRNRVIFRFNAVSILCTLSPLSSLRRAVIKVLVHPLLRLLILISVLTDSILMCMSNLPEWILAVENTCLGIYTFEILVKVIARGIWAGSFSFLGDLWNWLDFSVTLFELITRSSPLSSLPMFKTIRTLRILKIIPLNHGLQSIVVTLVQCLKKLLGAIALALFFLTVSSLFGMGLFMGNLKHKCVRWPQEDGNDVMYSGTGSQYHILERENFYYMEGARYALLCGNKTDAGLCPEGYMCVKEGSNPDNGFTSFDNFGWALLAMFRLMTQDYPELLYHQILYASGKIYMIFFVLISFWFAFYMASLFLGILTMAYEQEKQRASEESRDMDSKCHQTVKEFEEEHEGAELQCIWFYEEVLDLLGLELCIKEMETTQIEMKKRSPTSINTTLDILEDTALGHKEEPETSRKECPLCWYKFTKTCFIWKCSPCWIKLNEFADRIITHPLFDLFLVICIILNICFLALEHFPMSEELMSLLAIGNLVFIGIYTIEMILKIIAMHPYGYFQISWHIFDSILVVLGLTEMLLADIEEITVFILVPLIFIKLGKYAPPFKNLMRILGRALVALKDLVLLVSIFIYFSAVFGMKLFGRSYKDCVCHVDQDCQRQRWHMSDFLHAYVTVFRILCGEWIETLWECMEVAGEAWCIPFYMMVILIGNLLILYLFVGLVSSFASYDATTEVSKEAKNLQLAVAWIKMVINCVLLKILCKEKTVSTEATDQTCDPSVKENISGHTLSELSNTQTFLRYKDQSSGTEKTPVTESESQSLIASPSVSETVPIASGESDIENLDNKETRSKSANGSSKEKMKQSSSSECSTVDIAISEEEEMVYEHEKSKLHKNGYERKSSAGQVSRESRNGKIWRNIRKTCCKIVENSWFECFIGLVTLLCTGTLALEDIYIHQRKTIKIFLEYGDMIFAYIFILEMLLKWVAYGFKAYFSNNWYKLDFMVVIVLCLSLKGKTREDLNPLPSIKFLRALRVLSQFERMKVVLRALIKTTLPAVSVFLVCLMIWLLFSVMGVFLFAGKFYECIDPTRGERFSVFEVMNKSQCENLVFNESMPWENAKLNFDNVGNGFLSLFQVATFNGWISIMNSAIDSVGVYMQPSFEHSLHMYTYFIIFVVFGLFLPLCMLIGVIIRNFNKQKIKQGGSNIFITVKQKKQYRALKKLLYADSQKPAARPRNKFQGFICDVVTHRVFNVVVVLLICFQATTIMIQNDEQSPQIETAVFWMNSLFTMLFTLECILKLTAFRCHYFTSAWNVHDFMVVVFSITGLLLPLSIGQYFVPPSLVQLLLLSRIIHVLRPGKGPKVFHDLMLPLMLSLPALLNIGLLIFLVMFIYAIFGMYNFAYVKKEAGINDVSNFETFGSSMLCLFQVTTFSGWDGMLDAIFNSQWSDCDPDKINPGTQVRGDCGSPSVGIFYFVSYILISWLIIVNMYVVLIMEFLSIPSKRKNRTLSEDDFRRFFKVWNRFDPDRTQYIDSTKLSDFAAALDPPLFMAKPNKGQLVAMDLPMAAGDRIHCLDILLAFTKRVMGKDERVEKILSEIESGFMLANPFKITYEPITTTLKRKQEAVSATIIQRAYKSYRLRQSDKKIQDIPEIDDGREDPNSKGVHSGQIEEKASIQTQI

SEQ ID NO: 6309 - DNA, 5389 bp, Homo sapiens
  ref <308>: DATABASE ACCESSION NUMBER: EMBL / M91556
  ref <309>: DATABASE ENTRY DATE: 2000-03-04
gcggccgcgcaagtcctccaccatgtgaatgccaacatggccaggtcattagagctgagggaaaactagtgcccaaagatatgaaaagagtgtggatcttctggagaagtgctgttgttcaacaggtacaaaattggaaatgttggcttcaccagaacctaagggccttgttcccttcactaaagagtcttttgaacttataaaacagcatattgctaaaacacataatgaagaccatgaagaagaagacttaaagccaaatcctgatttggaagttggcaaaaagcttccatttatttatggaaacctttctcaaggaatggtgtcagagcccttggaagatgtggacccatattactacaagaaaaaaaatactttcatagtattaaataaaaatagaacaatcttcagattcaatgcggcttccatcttgtgtacattgtctcctttcaattgtattagaagaacaactatcaaggttttggtacatccctttttccaactgtttattctaattagtgtcctgattgattgcgtattcatgtccctgactaatttgccaaaatggagaccagtattagagaatactttgcttggaatttacacatttgaaatacttgtaaaactctttgcaagaggtgtctgggcaggatcattttccttcctcggtgatccatggaactggctcgatttcagcgtaactgtgtttgaggttattataagatactcacctctggacttcattccaacgcttcaaactgcaagaactttgagaattttaaaaattattcctttaaatcaaggtctgaaatcccttgtaggggtcctgatccactgcttgaagcagcttattggtgtcattatcctaactctgttttttctgagcatattttctctaattgggatggggctcttcatgggcaacttgaaacacaaatgttttcgatggccccaagagaatgaaaatgaaaccctgcacaacagaactggaaacccatattatattcgagaaacagaaaacttttattatttggaaggagaaagatatgctctcctttgtggcaacaggacagatgctggtcagtgtcctgaaggatatgtgtgtgtaaaagctggcataaatcctgatcaaggcttcacaaattttgacagttttggctgggccttatttgccctatttcggttaatggctcaggattaccctgaagtactttatcacctgatactttatgcttctgggaaggtctacatgatattttttgtggtggtaagttttttgttttccttttatatggcaagtttgttcttaggcatacttgccatggcctatgaagaagaaaagcagagagttggtgaaatatctaagaagattgaaccaaaatttcaacagactggaaaagaacttcaagaaggaaatgaaacagatgaggccaagaccatacaaatagaaatgaagaaaaggtcaccaatttccacagacacatcattggatgtgttggaagatgctactctcagacataaggaagaacttgaaaaatccaagaagatatgcccattatactggtataagtttgctaaaactttcttgatctggaattgttctccctgttggttaaaattgaaagagtttgtccataggattataatggcaccatttactgatcttttccttatcatatgcataattttaaacgtatgttttctgaccttggagcattatccaatgagtaaacaaactaacactcttctcaacattggaaacctggttttcattggaattttcacagcagaaatgatttttaaaataattgcaatgcatccatatgggtatttccaagtaggttggaacatttttgatagcatgatagtgttccatggtttaatagaactttgtctagcaaatgttgcaggaatggctcttcttcgattattcaggatgttaagaattttcaagttgggaaagtattggccaacattccagattttgatgtggtctcttagtaactcatgggtggccctgaaagacttggtcctgttgttgttcacattcatcttcttttctgctgcattcggcatgaagctgtttggtaagaattatgaagaatttgtctgccacatagacaaagactgtcaactcccacgctggcacatgcatgactttttccactccttcctgaatgtgttccgaattctctgtggagagtgggtagagaccttgtgggactgtatggaggttgcaggccaatcctggtgtattcctttttacctgatggtcattttaattggaaatttactggtactttacctgtttctggcattggtgagctcatttagttcatgcaaggatgtaacagctgaagagaataatgaagcaaaaaatctccagcttgcagtggcaagaattaaaaaaggaataaactatgtgcttcttaaaatactatgcaaaacacaaaatgtcccaaaggacacaatggaccatgtaaatgaggtatatgttaaagaagatatttctgaccataccctttctgaattgagcaacacccaagattttctcaaagataaggaaaaaagcagtggcacagagaaaaacgctactgaaaatgagagccaatcacttatccccagtcctagtgtctcagaaactgtaccaattgcttcaggagaatctgatatagaaaatctggataataaggagattcagagtaagtctggtgatggaggcagcaaagagaaaataaagcaatctagctcatctgaatgcagtactgttgatattgctatctctgaagaagaagaaatgttctatggaggtgaaagatcaaagcatctgaaaaatggttgcagacgcggatcttcacttggtcaaatcagtggagcatccaagaaaggaaaaatctggcagaacatcaggaaaacctgctgcaagattgtagagaacaattggtttaagtgttttattgggcttgttactctgctcagcactggcactctggcttttgaagatatatatattgatcagagaaagacaattaaaattttattagaatatgctgacatgatctttacttatatcttcattctggaaatgcttctaaaatggatggcatatggttttaaggcctatttctctaatggctggtacaggctggacttcgtggttgttattgtgttttgtcttagcttaataggcaaaactcgggaagaactaaaacctcttatttccatgaaattccttcggcccctcagagttctatctcaatttgaaagaatgaaggtggttgtgagagctttgatcaaaacaaccttacccactttgaatgtgtttcttgtctgcctgatgatctggctgatttttagtatcatgggagtagacttatttgctggcagattctatgaatgcattgacccaacaagtggagaaaggtttccttcatctgaagtcatgaataagagtcggtgtgaaagccttctgtttaacgaatccatgctatgggaaaatgcaaaaatgaactttgataatgttggaaatggtttcctttctctgcttcaagtagcaacatttaatggatggatcactattatgaattcagcaattgattctgttgctgttaatatacagcctcattttgaagtcaacatctacatgtattgttactttatcaactttattatatttggagtatttctccctctgagtatgctgattactgttattattgataatttcaacaagcataaaataaagctgggaggctcaaatatctttataacggttaaacagagaaaacagtaccgcaggctgaagaagctaatgtatgaggattctcaaagaccagtacctcgcccattaaacaagctccaaggattcatctttgatgtggtaacaagccaagcttttaatgtcattgttatggttcttatatgtttccaagcaatagccatgatgatagacactgatgttcagagtctacaaatgtccattgctctctactggattaactcaatttttgttatgctatatactatggaatgtatactgaagctcatcgctttccgttgtttttatttcaccattgcgtggaacatttttgattttatggtggttattttctccatcacaggactatgtctgcctatgacagtaggatcctaccttgtgcctccttcacttgtgcaactgatacttctctcacggatcattcacatgctgcgtcttggaaaaggaccaaaggtgtttcataatctgatgcttcctttgatgctgtccctcccagcattattgaacatcattcttctcatcttcctggtcatgttcatctatgccgtatttggaatgtataattttgcctatgttaaaaaagaagctggaattaatgatgtgtctaattttgaaacctttggcaacagtatgctctgtctttttcaagttgcaatatttgctggttgggatgggatgcttgatgcaattttcaacagtaaatggtctgactgtgatcctgataaaattaaccctgggactcaagttagaggagattgtgggaacccctctgttgggattttttattttgtcagttatatcctcatatcatggctgatcattgtaaatatgtacattgttgttgtcatggagtttttaaatattgcttctaagaagaaaaacaagaccttgagtgaagatgattttaggaaattctttcaggtatggaaaaggtttgatcctgataggacccagtacatagactctagcaagctttcagattttgcagctgctcttgatcctcctcttttcatggcaaaaccaaacaagggccagctcattgctttggacctccccatggctgttggggacagaattcattgcctcgatatcttacttgcttttacaaagagagttatgggtcaagatgtgaggatggagaaagttgtttcagaaatagaatcagggtttttgttagccaacccttttaagatcacatgtgagccaattacgactactttgaaacgaaaacaagaggcagtttcagcaaccatcattcaacgtgcttataaaaattaccgcttgaggcgaaatgacaaaaatacatcagatattcatatgatagatggtgacagagatgttcatgctactaaagaaggtgcctattttgacaaagctaaggaaaagtcacctattcaaagccagatctaataccacttaccacctcttttcatatttcttcacatatctgaaaaatgttgaaagcctaagccaggaataaaagaaaagtagagataataatcagttctttacaaccgatggtaattaagcttgtattcacaagacttcatgccaaattcactttttagcattatatctaacaaatcaagagaatccttaatattgctgcag

SEQ ID NO: 6310 - protein, 1682 aa, Homo sapiens
  ref <308>: DATABASE ACCESSION NUMBER: SWISS-Prot / Q01118
  ref <309>: DATABASE ENTRY DATE: 2002-06-15
MLASPEPKGLVPFTKESFELIKQHIAKTHNEDHEEEDLKPNPDLEVGKKLPFIYGNLSQGMVSEPLEDVDPYYYKKKNTFIVLNKNRTIFRFNAASILCTLSPFNCIRRTTIKVLVHPFFQLFILISVLIDCVFMSLTNLPKWRPVLENTLLGIYTFEILVKLFARGVWAGSFSFLGDPWNWLDFSVTVFEVIIRYSPLDFIPTLQTARTLRILKIIPLNQGLKSLVGVLIHCLKQLIGVIILTLFFLSIFSLIGMGLFMGNLKHKCFRWPQENENETLHNRTGNPYYIRETENFYYLEGERYALLCGNRTDAGQCPEGYVCVKAGINPDQGFTNFDSFGWALFALFRLMAQDYPEVLYHLILYASGKVYMIFFVVVSFLFSFYMASLFLGILAMAYEEEKQRVGEISKKIEPKFQQTGKELQEGNETDEAKTIQIEMKKRSPISTDTSLDVLEDATLRHKEELEKSKKICPLYWYKFAKTFLIWNCSPCWLKLKEFVHRIIMAPFTDLFLIICIILNVCFLTLEHYPMSKQTNTLLNIGNLVFIGIFTAEMIFKIIAMHPYGYFQVGWNIFDSMIVFHGLIELCLANVAGMALLRLFRMLRIFKLGKYWPTFQILMWSLSNSWVALKDLVLLLFTFIFFSAAFGMKLFGKNYEEFVCHIDKDCQLPRWHMHDFFHSFLNVFRILCGEWVETLWDCMEVAGQSWCIPFYLMVILIGNLLVLYLFLALVSSFSSCKDVTAEENNEAKNLQLAVARIKKGINYVLLKILCKTQNVPKDTMDHVNEVYVKEDISDHTLSELSNTQDFLKDKEKSSGTEKNATENESQSLIPSPSVSETVPIASGESDIENLDNKEIQSKSGDGGSKEKIKQSSSSECSTVDIAISEEEEMFYGGERSKHLKNGCRRGSSLGQISGASKKGKIWQNIRKTCCKIVENNWFKCFIGLVTLLSTGTLAFEDIYIDQRKTIKILLEYADMIFTYIFILEMLLKWMAYGFKAYFSNGWYRLDFVVVIVFCLSLIGKTREELKPLISMKFLRPLRVLSQFERMKVVVRALIKTTLPTLNVFLVCLMIWLIFSIMGVDLFAGRFYECIDPTSGERFPSSEVMNKSRCESLLFNESMLWENAKMNFDNVGNGFLSLLQVATFNGWITIMNSAIDSVAVNIQPHFEVNIYMYCYFINFIIFGVFLPLSMLITVIIDNFNKHKIKLGGSNIFITVKQRKQYRRLKKLMYEDSQRPVPRPLNKLQGFIFDVVTSQAFNVIVMVLICFQAIAMMIDTDVQSLQMSIALYWINSIFVMLYTMECILKLIAFRCFYFTIAWNIFDFMVVIFSITGLCLPMTVGSYLVPPSLVQLILLSRIIHMLRLGKGPKVFHNLMLPLMLSLPALLNIILLIFLVMFIYAVFGMYNFAYVKKEAGINDVSNFETFGNSMLCLFQVAIFAGWDGMLDAIFNSKWSDCDPDKINPGTQVRGDCGNPSVGIFYFVSYILISWLIIVNMYIVVVMEFLNIASKKKNKTLSEDDFRKFFQVWKRFDPDRTQYIDSSKLSDFAAALDPPLFMAKPNKGQLIALDLPMAVGDRIHCLDILLAFTKRVMGQDVRMEKVVSEIESGFLLANPFKITCEPITTTLKRKQEAVSATIIQRAYKNYRLRRNDKNTSDIHMIDGDRDVHATKEGAYFDKAKEKSPIQSQI

SEQ ID NO: 6311 - DNA, 454 bp, Rattus norvegicus
  ref <308>: DATABASE ACCESSION NUMBER: EMBL / AA925300
  ref <309>: DATABASE ENTRY DATE: 2000-03-03
tttttttttttttttttgcttcattcatctttggtaagacaggactgacacagcatacctggaagcttagtggggcagcccaaacctctacctcctgttgctgggggacgctgggctttacctcaggcttgtgtgggctcatgcagcccagagattctctggtggtctccaaacattgggagagaaacaaagtaacactctggatgaagtaacactattcatacccttgagtaggtcctgtgcctagtccctcttgacttcagtgctgtctgcagtgttaggacacatctgagggcaggcaggacccatggcagtcttacatactggtcccagcccttcctgccacactgagcttaggatgtcaaagctcttgggtcttacaggctggagctcccagtcttgatgccagatcctggctttgagtcccagcggcagatggggcaccctcgtgccg

SEQ ID NO: 6312 - protein, 626 aa, Rattus norvegicus
  ref <308>: DATABASE ACCESSION NUMBER: SWISS-Prot / AAB03535
  ref <309>: DATABASE ENTRY DATE: 2000-05-30
MDEQEALDSIMKDLVALQMSRRTRLSGYETMKNKDTGHPNRQSDVRIKFEHNGERRIIAFSRPVRYEDVEHKVTTVFGQPLDLHYMNNELSILLKNQDDLDKAIDILDRSSSMKSLRILLLSQDRNHTSSSPHSGVSRQVRIKPSQSAGDINTIYQAPEPRSRHLSVSSQNPGRSSPPPGYVPERQQHIARQGSYTSINSEGEFIPETSEQCMLDPLSSAENSLSGSCQSLDRSADSPSFRKSQMSRARSFPDNRKECSDRETQLYDKGVKGGTYPRRYHVSVHHKDYNDGRRTFPRIRRHQGNLFTLVPSSRSLSTNGENMGVAVQYLDPRGRLRSADSENALTVQERNVPTKSPSAPINWRRGKLLGQGAFGRVYLCYDVDTGRELASKQVQFDPDSPETSKEVSALECEIQLLKNLQHERIVQYYGCLRDRAEKILTIFMEYMPGGSVKDQLKAYGALTESVTRKYTRQILEGMSYLHSNMIVHRDIKGANILRDSAGNVKLGDFGASKRLQTICMSGTGIRSVTGTPYWMSPEVISGEGYGRKADVWSLGCTVVEMLTEKPPWAEYEAMAAIFKIATQPTNPQLPSHISEHGRDFLRRIFVEARQRPSAEELLTHHFAQLVY

SEQ ID NO: 6313 - DNA, 536 bp, Rattus norvegicus
  ref <308>: DATABASE ACCESSION NUMBER: EMBL / AA925473
  ref <309>: DATABASE ENTRY DATE: 2000-03-03
tttttttttttttttttcaaacaggatggttttattcctttgttttaaatgatctttctacagtagtgggacaggaagcagcagcaaaggggggaaggagaaaacggtttagaatatacagcacttccttttgggttgagtttccggaggctcgagggcagctaggatagcctcatcaaacacattcttcagacctctctgtgtgagggcggaacactccacatacttgacagccttcagatcccgcgccagcttttcagcagtctctggagtaataggcttctgtttgttcttggcaagtttctcaatagtagaagggtcatctctgagatcaatttgggtcccgacaagcaagaaaggagtctttggacagtggtgagttatctcaggcacccacttttctttcacattttcaaatgaggatggagagaccactgagaaacatactagaaaaacatctgtctgtggataacttaacggtcgtagtctgtcataatcctcttgccctgcagtatcaaaaagtccaagagtgtatg

SEQ ID NO: 6314 - protein, 191 aa, Rattus norvegicus
  ref <308>: DATABASE ACCESSION NUMBER: SWISS-Prot / AAF15538
  ref <309>: DATABASE ENTRY DATE: 2001-12-13
MQTIKCVVVGDGAVGKTCLLISYTTNKFPSEYVPTVFDNYAVTVMIGGEPYTLGLFDTAGQEDYDRLRPLSYPQTDVFLVCFSVVSPSSFENVKEKWVPEITHHCPKTPFLLVGTQIDLRDDPSTIEKLAKNKQKPITPETAEKLARDLKAVKYVECSALTQRGLKNVFDEAILAALEPPETQPKRKCCIF

SEQ ID NO: 6315 - DNA, 488 bp, Homo sapiens
  ref <308>: DATABASE ACCESSION NUMBER: EMBL / BG180991
  ref <309>: DATABASE ENTRY DATE: 2001-02-08
agaaaagtgggtgcctgagataactcaccactgtccaaagactcctttcttgcttgttgggactcaaattgatctcagagatgacccctctactattgagaaacttacctgcaggtacaggcaccaacctctttgcacagtgagcagcaggactcgctacttctctccacctactcacaacagccagggaccctgggctacccccaaccacccccagcacagccccagcccctacgtcctccccgaagggtcagcagtctgtctgagtcgtcaggcctccagcagccgccccagataatgccccggcactgaagtcgggacacaatcagctttaaccaactggatgacggggggtggccacaggagatggggagaggagtctgaactacaacccctggctcttgtgcacactgcatacgtttcagaactcctggatggtaaccatctctggagtgcagcgcttgctgcagtggacatgatcaggaata

SEQ ID NO: 6316 - DNA, 536 bp, Rattus norvegicus; identical to SEQ ID NO: 6313
  ref <308>: DATABASE ACCESSION NUMBER: EMBL / AA925473
  ref <309>: DATABASE ENTRY DATE: 2000-03-03

SEQ ID NO: 6317 - protein, 191 aa, Rattus norvegicus; identical to SEQ ID NO: 6314
  ref <308>: DATABASE ACCESSION NUMBER: SWISS-Prot / AAF15538
  ref <309>: DATABASE ENTRY DATE: 2001-12-13

SEQ ID NO: 6318 - DNA, 488 bp, Homo sapiens; identical to SEQ ID NO: 6315
  ref <308>: DATABASE ACCESSION NUMBER: EMBL / BG180991
  ref <309>: DATABASE ENTRY DATE: 2001-02-08

SEQ ID NO: 6319 - DNA, 432 bp, Rattus norvegicus
  ref <308>: DATABASE ACCESSION NUMBER: EMBL / AA925506
  ref <309>: DATABASE ENTRY DATE: 2000-03-03
tttttttttttttttttaagagtaaaaacatatccatattttatttaatttaatcaggggttaggggaaggtcagagatgaatctcccaatgaaggagtgcagaaaatggccacagtccacacattgagggacttgggttctagttagttaaaaaatagtttgacccaggaagggggatctggaggcacatcacgtgtgggatggagaatcccatcggtccttctcaatcacctcaagataattaaatctgcacttctgccctcacaaccatctgtgtaactgggagaaaaacgaggagtcaccaatgaacacatggatctcaggcttcggagacaaagttacacactcggccataccagcaagtgcttcctttgtatggagacccaaatgcccgtttctaaaatgggccaactctctggagaaagggcatc

SEQ ID NO: 6320 - protein, 69 aa, Rattus norvegicus; identical to SEQ ID NO: 3037
  ref <308>: DATABASE ACCESSION NUMBER: SWISS-Prot / P43425
  ref <309>: DATABASE ENTRY DATE: 2002-06-15

SEQ ID NO: 6321 - DNA, 992 bp, Homo sapiens; identical to SEQ ID NO: 3038
  ref <308>: DATABASE ACCESSION NUMBER: EMBL / BC014466
  ref <309>: DATABASE ENTRY DATE: 2002-09-02

SEQ ID NO: 6322 - protein, 68 aa, Homo sapiens; identical to SEQ ID NO: 3039
  ref <308>: DATABASE ACCESSION NUMBER: SWISS-Prot / O60262
  ref <309>: DATABASE ENTRY DATE: 2002-06-15

SEQ ID NO: 6323 - DNA, 501 bp, Rattus norvegicus
  ref <308>: DATABASE ACCESSION NUMBER: EMBL / AA925752
  ref <309>: DATABASE ENTRY DATE: 2000-03-03
tttttttttttttttttgatggacttaacaaaatacaagattttattaaaaatataggcttagtgacatattaatcttttcgaaatatgctgtggcttattgcaatatataaataaatatatatctgcaataagagagagagcgcgcacaccaccgtttcttcaactacagataggtgtgttttataaaaacaagcatgtcttaagtcttcgttttggagattggttttaccaaaaatgtagctagtgcataatgtaggctcatccactacttattttccattcttagatctgcaagcacagtatgaaatcataaaagcaacaaacatcactactccaacaccaagtaagaccatctcaaccaggcccaggagctttattttcccggtcacttgggttctgaacatttctgctttctcatcgccgatggtcccagtctcatttagccacagtataggtacaatgtaaggtctcttcagattcttcagtgcttctatttttc

SEQ ID NO: 6324 - protein, 471 aa, Rattus norvegicus; identical to SEQ ID NO: 1059
  ref <308>: DATABASE ACCESSION NUMBER: SWISS-Prot / Q07969
  ref <309>: DATABASE ENTRY DATE: 1999-07-15

SEQ ID NO: 6325 - DNA, 1749 bp, Homo sapiens; identical to SEQ ID NO: 1060
  ref <308>: DATABASE ACCESSION NUMBER: EMBL / BC008406
  ref <309>: DATABASE ENTRY DATE: 2001-07-13

SEQ ID NO: 6326 - protein, 471 aa, Homo sapiens; identical to SEQ ID NO: 1061
  ref <308>: DATABASE ACCESSION NUMBER: SWISS-Prot / P16671
  ref <309>: DATABASE ENTRY DATE: 2002-06-15

SEQ ID NO: 6327 - DNA, 401 bp, Rattus norvegicus
  ref <308>: DATABASE ACCESSION NUMBER: EMBL / AA925762
  ref <309>: DATABASE ENTRY DATE: 2000-03-03
tttttttttttttttttaaatctgggtattggtgtttttaattcttttctttttccttcttattcaaaacgtgtagtgttgtaaacctgcctcacaaaatacaccgtaataactttctttaaaaaaaaaaaaaaaggaaagaaggaaacccctaagcctttacaccgtcgtttttagtggcatattatcttggcaatgttatgcactgtttcaatttcccatagtggcccctatcacttcatttgatattcctttttgacccaaccatctccttcatatatgggtacgtccatagatttgacaaagaaagtttacatttttttaataaagatgcaaagtatgcaaaaaacattaatactgatgcaaaaaaaaaaagagtaaaagtaaagaaaaaaaaaaac

SEQ ID NO: 6328 - protein, 308 aa, Rattus norvegicus
  ref <308>: DATABASE ACCESSION NUMBER: SWISS-Prot / P30009
  ref <309>: DATABASE ENTRY DATE: 2002-06-15
GAQFSKTAAKGEAAAERPGEAAVASSPSKANGQENGHVKVNGDASPAAAEPGAKEELQANGSAPAADKEEPASGGAATPAAADKDEAAAAPEPGAATADKEAAEAEPAEPGSPSAETEGASASSTSSPKAEDGAAPSPSSETPKKKKKRFSFKKSFKLSGFSFKKSKKEAGEGAEAEGATADGAKDEAAAAAGGDAAAAPGEQAGGAGAEGAEGGESREAEAAEPEQPEQPEQPAAEEPRAEEPSEAVGEKAEEPAPGATADDAPSAAGPEQEAPAATDEPAASAAPSASPEPQPECSPEAPPAPVAE

SEQ ID NO: 6329 - DNA, 865 bp, Homo sapiens
  misc_feature (1)..(865): n=a, c, g or t
  ref <308>: DATABASE ACCESSION NUMBER: EMBL / AU141403
  ref <309>: DATABASE ENTRY DATE: 2002-08-06
cccatttttgtaaaactgcagtcatcttggaccttttaaaacacaaattttaaactcaaccaagctgtgataagtggaatggttactgtttatactgtggtatgtttttgattacagcagataatgctttcttttccagtcgtctttgagaataaaggaaaaaaaatcttcagatgcaatggttttgtgtagcatcttgtctatcatgttttgtaaatactggagaagctttgaccaatttgacttagagatggaatgtaactttgcttacaaaaattgctattaaactcctgcttaaggtgttctaattttctgtgagcacactaaaagcgaaaaataaatgtgaataaaatgtacaaatttgttgtgtttttttatgttctaataatactgagacttctaggtcttaggttaatttttaggaagatcttgcatgccatcaggagtaaattttattgtggttcttaatctgaagttttcaagctctgaaattcataatccgcagtgtcagattacgtagaggaagatcttacaacattccatgtcaaatctgttaccatttattggcatttagttttcatttaagaattgaacataattatttttattgtagctatatagcatgtcagattaaatcatttacaacaaaaggggtgtgaacctaagactatttaaatgtcttatgagaaaatttcataaagccattctcttgncattcaggtccagaaacaaattttaaactgagtgagagtctatagaatcctactgcagatgggcatgaaatgtgaccaaatgtgttcaaaaattgatggggattacctgctattgnaattgcttaatgcttggctaattnccaaatatggct

SEQ ID NO: 6330 - protein, 406 aa, Homo sapiens
  ref <308>: DATABASE ACCESSION NUMBER: SWISS-Prot / P50458
  ref <309>: DATABASE ENTRY DATE: 2002-06-15
MLFHSLSGPEVHGVIDEMDRRAKSEAPAISSAIDRGDTETTMPSISSDRAALCAGCGGKISDRYYLLAVDKQWHMRCLKCCECKLNLESELTCFSKDGSIYCKEDYYRRFSVQRCARCHLGISASEMVMRARDLVYHLNCFTCTTCNKMLTTGDHFGMKDSLVYCRLHFEALLQGEYPAHFNHADVAAAAAAAAAAKSAGLGAAGANPLGLPYYNGVGTVQKGRPRKRKSPGPGADLAAYNAALSCNENDAEHLDRDQPYPSSQKTKRMRTSFKHHQLRTMKSYFAINHNPDAKDLKQLAQKTGLTKRVLQVWFQNARAKFRRNLLRQENTGVDKSTDAALQTGTPSGPASELSNASLSPSSTPTTLTDLTSPTLPTVTSVLTSVPGNLEGHEPHSPSQTTLTNLF

SEQ ID NO: 6331 - DNA, 401 bp, Rattus norvegicus; identical to SEQ ID NO: 6327
  ref <308>: DATABASE ACCESSION NUMBER: EMBL / AA925762
  ref <309>: DATABASE ENTRY DATE: 2000-03-03

SEQ ID NO: 6332 - protein, 308 aa, Rattus norvegicus; identical to SEQ ID NO: 6328
  ref <308>: DATABASE ACCESSION NUMBER: SWISS-Prot / P30009
  ref <309>: DATABASE ENTRY DATE: 2002-06-15

SEQ ID NO: 6333 - DNA, 865 bp, Homo sapiens; identical to SEQ ID NO: 6329
  misc_feature (1)..(865): n=a, c, g or t
  ref <308>: DATABASE ACCESSION NUMBER: EMBL / AU141403
  ref <309>: DATABASE ENTRY DATE: 2002-08-06

SEQ ID NO: 6334 - protein, 406 aa, Homo sapiens; identical to SEQ ID NO: 6330
  ref <308>: DATABASE ACCESSION NUMBER: SWISS-Prot / P50458
  ref <309>: DATABASE ENTRY DATE: 2002-06-15

SEQ ID NO: 6335 - DNA, 341 bp, Rattus norvegicus
  misc_feature (1)..(341): n=a, c, g or t
  ref <308>: DATABASE ACCESSION NUMBER: EMBL / AA926137
  ref <309>: DATABASE ENTRY DATE: 2000-03-03
tttttttttttttttttccagaaaatacttgagtgtaataaggatttctgcctgacattagactctcccgacatgcaagtgttgggagctcaaaggattcttgagctgggaaatcctcaagggagatgacgtagagggagccaggcgtccaaggcgtacgaacaaggtttaatgctgcacccgtcaaggcaggagctccccagatcgatgcagacttcttcctccgtgtcctccacaggactaagctgtttctgaggcctcagcgcatgctaccatcgaggcctgtggtggggganggggctgcctaatcgtccttcttaaacttgccattgatgtacggc

SEQ ID NO: 6336 - DNA, 466 bp, Rattus norvegicus
  ref <308>: DATABASE ACCESSION NUMBER: EMBL / AA926149
  ref <309>: DATABASE ENTRY DATE: 2000-03-03
tttttttttttttttttccatgaagatcattttattgtaaaaatgtaagcaaatacaaatcaccctatgtgaaatcactgtgtatcagcataaacataatttcaaggggaaaaggaatccgatcaactacacaggaataaacattaagtttcaacagtgctaaagttatttttggaagacatgatccaagtatggtttttcttataaggaccttagaaaaataaaaaaaaaattctgggtgggccatctttataatcccttcattcatgtgtgtgtgtgtgaaattttaaattttttaaaaatattaataaaaacaaacaatgagaatggaatatggaaaggataagagaaatcactaaactttttcaaattctttctctagtgaacataggctcgccactaattactaagtgtggtagcaaacaaagttgtttacatttcaaattctctaagggtcatttcgggt

SEQ ID NO: 6337 - protein, 526 aa, Rattus norvegicus; identical to SEQ ID NO: 5617
  ref <308>: DATABASE ACCESSION NUMBER: SWISS-Prot / P04762
  ref <309>: DATABASE ENTRY DATE: 2002-06-15

SEQ ID NO: 6338 - DNA, 2264 bp, Homo sapiens; identical to SEQ ID NO: 5618
  ref <308>: DATABASE ACCESSION NUMBER: EMBL / X04076
  ref <309>: DATABASE ENTRY DATE: 1993-09-12

SEQ ID NO: 6339 - protein, 526 aa, Homo sapiens; identical to SEQ ID NO: 5619
  ref <308>: DATABASE ACCESSION NUMBER: SWISS-Prot / P04040
  ref <309>: DATABASE ENTRY DATE: 2002-06-15

SEQ ID NO: 6340 - DNA, 407 bp, Rattus norvegicus
  ref <308>: DATABASE ACCESSION NUMBER: EMBL / AA926242
  ref <309>: DATABASE ENTRY DATE: 2000-03-03
tttttttttttttaaatatggtgatgattattgaactgaaccagtgtgttcttgcatacagtcaccccaataggaacttcctggaaagaagcaggtttatgccttgtggaagaaaacacatagggctttggtatacaggaaagagtttctcacagtcagttttgctttcatggtctgcagtaggtaagatagacatttagaaactccgtgcgttctccacattcctccacactgtttaagatgccagggaatgagtaatatctttcctatcctgtcatagctactcatgaaattgtaagaaaccaagtaggttccctgagataaccaaagatgtcttggattatgctgtgtctaaagttttattccagtctatatggttacacctaaagagagaaaactcttaacta

SEQ ID NO: 6341 - protein, 357 aa, Rattus norvegicus
  ref <308>: DATABASE ACCESSION NUMBER: SWISS-Prot / P19814
  ref <309>: DATABASE ENTRY DATE: 2001-10-16
MQFLVALLLLSVAVARALPSASKPNNTSSENNPPIQPSTPLPPGVDISQQVKTNRPTDQRLESDKEGQDKTVARTSASVSSGVESATNLNLDDSKKHPETADAKLKETLQQLLPVDPKQEKSGQKFTKDSGSPTGGDSDNTTGGDSNKTTGVDSDKTSGGDSNKPTGSDNDKPTGGDSNKPTSKVPSNTETPKIDKVQLTEKGQKPTLISKTESGEKLAGDSDFSLKPEKGDKSSEPTEDVETKEIEEGDTEPEEGSPLEEENEKVLGPSSSENQEGTLTDSMKDEKDDHYKDNSGNTSAESSHFFAYLVTAAVLVAVLYIAYHNKRKIIAFALEGKRSKVTRRPKASDYQRLNLKL

SEQ ID NO: 6342 - DNA, 1494 bp, Homo sapiens
  ref <308>: DATABASE ACCESSION NUMBER: EMBL / BC008461
  ref <309>: DATABASE ENTRY DATE: 2001-07-13
agagggcggaagcgctatccgagcaggatgcggttcgtagttgccttggtcctcctgaacgtcgcagcggcgggagccgtgccgctcttggccaccgaaagcgtcaagcaagaagatgctggagtacggccttctgcaggaaacgtctccacccaccccagcttgagccaacggcctggaggctctaccaagtcgcatccggagccgcagactccaaaagacagccctagcaagtcgagtgcggaggcgcagaccccagaagacacccccaacaagtcgggtgcggaggcaaagacccaaaaagacagctccaacaagtcgggtgcggaggcaaagacccaaaaaggcagcactagcaagtcgggttcggaggcgcagaccacaaaagacagcactagtaagtcgcatccggagctgcagactccaaaagacagcactggcaaatcgggtgcggaggcgcagaccccagaagacagccccaacaggtcgggtgcggaggcaaagacccaaaaagacagccctagcaagtcaggttcggaggcgcagaccacaaaagatgtccctaataagtcgggtgcggacggccagaccccaaaagacggctccagcaagtcgggtgcggaggatcagaccccaaaagacgtccctaacaagtcgggtgcggagaagcagactccaaaagacggctctaacaagtccggtgcagaggagcagggcccaatagacgggcccagcaagtcgggtgcggaggagcagacctcaaaagacagccctaacaaggtggttccagagcagccttcccggaaagaccattccaagcccatctccaacccttctgataacaaggagctccccaaggctgacacaaaccagcttgctgacaaagggaagctttctcctcatgctttcaaaaccgaatctggggaggaaactgacctcatttctcccccgcaggaggaagttaagtcttcagagcctactgaggatgtggagcccaaagaggctgaagatgatgatacaggacccgaggagggctcaccgcccaaagaagagaaagaaaagatgtccggttctgcctccagtgagaaccgtgaagggacactttcggattccacgggtagcgagaaggatgacctttatccgaacggttctggaaatggcagcgcggagagcagccacttctttgcatatctggtgactgcagccattcttgtggctgtcctctatatcgctcatcacaacaagcggaagatcattgcttttgtcctggaaggaaaaagatctaaagtcacccggcggccaaaggccagtgactaccaacgtttggaccagaagtcctaacagaatggtatattcctctggaaaaagatgaacgtcaccaatggattgtgctgctctcgtttcagctttgatttttttgtccttgagaaccttgtcctccctgctgatttgtttctaaagcaaaaaaaaaaaaaaaaaaaaaaaaaaaaaaaa

SEQ ID NO: 6343 - protein, 480 aa, Homo sapiens
  ref <308>: DATABASE ACCESSION NUMBER: SWISS-Prot / O43493
  ref <309>: DATABASE ENTRY DATE: 2002-06-15
MRFVVALVLLNVAAAGAVPLLATESVKQEEAGVRPSAGNVSTHPSLSQRPGGSTKSHPEPQTPKDSPSKSSAEAQTPEDTPNKSGGEAKTLKDSSNKSGAEAQTPKGSTSKSGSEAQTTKDSTSKSHPELQTPKDSTGKSGAEAQTPEDSPNRSGAEPKTQKDSPSKSGSEAQTTKDVPNKSGADGQTPKDGSSKSGAEDQTPKDVPNKSGAEKQTPKDGSNKSGAEEQGPIDGPSKSGAEEQTSKDSPNKVVPEQPSRKDHSKPISNPSDNKELPKADTNQLADKGKLSPHAFKTESGEETDLISPPQEEVKSSEPTEDVGPKEAEDDDTGPEEGSPPKEEKEKMSGSASSENREGTLSDSTGSEKDDLYPNGSGNGSAESSHFFAYLVTAAILVAVLYIAHHNKRKIIAFVLEGKRSKVTRRPKASDYQRLDQKYVLILNVFPAPPKRSFLPQVLTEWYIPLEKDERHQWIVLLSFQL

SEQ ID NO: 6344 - DNA, 400 bp, Rattus norvegicus
  ref <308>: DATABASE ACCESSION NUMBER: EMBL / AA933158
  ref <309>: DATABASE ENTRY DATE: 2000-03-03
tttttttttttttttttgctctgtagtttttgttttttatttttatagttttaagtttttcaaaacatagtttcttcatgtagccctggctgtcccggagctaagctctgtagagcaggctggcctccgtctcaggtctgccggctgttatgcttttatccacacatcctttactgggtatagaggctggctgcgaagacgatgtccctccggagcaaggtggctgccgtctccatcttggcccctaacacaggctctcctaccaaacgggccgcccctcgaagtgagcggcacatctcagccaggcgctggatacagcggacaaccaagccttcgggggtccccgagagccctgccaactcggagaagggcataccccgagcccactcataaacaactt

SEQ ID NO: 6345 - protein, 1236 aa, Rattus norvegicus
  ref <308>: DATABASE ACCESSION NUMBER: Refseq / NP_067312
  ref <309>: DATABASE ENTRY DATE: 2002-09-19
MMETERLDPLNLPLRALEVGCTGRWELLNVPGPPESTLPHGLPPCAPDLCQEAEQLFLSSPAWLPLHGVEHSARKWQRKTDPWSLLAAVETPVPSDLQAQRHPTTGHILGYKEVLLENTNLSATTSLSLRRPPGPASQSLWGNPTQYPFWPGGMDEPSITDLHTREEAEEEIDFEKDLLTVPPGFKKGVDFAPKAPVPGLLSLSRLLEPLDLSGGDEDEGEAAGGPRGDNASPSPSGTPLVRASSLEDLVLKEAATVVSTPEPPKPPPQEQWAVPVDVTSPVGDFYRLIPQPAFQWAFEPDVFQKQAILHLEQHDSVFVAAHTSAGKTVVAEYAIALAQKHMTRTIYTSPIKALSNQKFRDFRNTFGDVGLLTGDVQLHPEASCLIMTTEILRSMLYSGSDVIRDLEWVIFDEVHYINDAERGVVWEEVLIMLPEHVSIILLSATVPNALEFADWIGRLKRRQIYVISTVARPVPLEHYLFTGNSPKTQGELFLLLDSRGAFHTQGYYAAVEAKKERMSKHAQTFGAKQPTHQGGPAQDRGVYLSLLASLRTRAQLPVVVFTFSRGRCDEQASGLTSLDLTTSSEKSEIHLFLQRCLARLRGSDRQLPQVLHMSELLRRGLGVHHSGILPILKEIVEMLFSRGLVKVLFATETFAMGVNMPARTVVFDSMRKHDGSTFRDLLPGEYVQMAGRAGRRGLDPTGTVILLCKGRVPEMADLHRMMMGKPSQLQSQFRLTYTMILNLLRVDALRVEDMMKRSFSEFPSRKDSKAHEQALADLTKRLGALEEPDVTGQLADLPEYYSWAEELTETQNMIQRRIMESVNGLKSLSVGRVVVVKNEEHHNALGVILQVSSNSTSRVFTTLVLCDKPVVSDNPRDKGPATPDVPHPDDLIGFKLFLPEGPCEHTVAKLQPGDVAAISTKVLRVNGEKISEDFSKRQQPKFRKDPPLAAVTTAVQELLRLAQSYPAGPPTLDPINDLQLKDVAVVEGGLRARKLEELIRGAQCVHSPRFPAQYVKLRERMQIQKEMERLRFLLSDQSLLLLPEYHQRVEVLRTLGYVDEAGTVKLAGRVACAMSSHELLLTELMFDNALSALRPEEIAALLSGLVCQSPGDPGDQLPSTLKQGVERVKAVAKRIGEVQVACGLNQTVEEFVGELNFGLVEVVYEWARGMPFSELAGLSGTPEGLVVRCIQRLAEMCRSLRGAARLVGEPVLGAKMETAATLLRRDIVFAASLYTQ

SEQ ID NO: 6346 - DNA, 435 bp, Rattus norvegicus
  ref <308>: DATABASE ACCESSION NUMBER: EMBL / AA943555
  ref <309>: DATABASE ENTRY DATE: 2000-03-03
aagcttgcccctctggcagagcttctgtccaaagctaagagtagaagcaggattatgaagtgtccatcgcctgtgacatgggacttagacttgccacagaatgaagctacagggaaggacaccatgtgagaatccagggactgttagggttttgtgcttcccgatgaccctacctggtaagaagtctgtcatcagctctgtcagtttccactgccagctctgggcctgcagccccgcctcctctgggttgggaacgaggccttgggtgccagctagtggcacctgtgcacaagaactacatctacagacagtgggaagaagccagggctagctgtggctgacaggaagcctgtgacagccttgtgtgtggtggaagcagggcacatctgagctggggaaggctgacagcagcaacctgtagttctctggagggaa

SEQ ID NO: 6347 - protein, 368 aa, Rattus norvegicus
  ref <308>: DATABASE ACCESSION NUMBER: SWISS-Prot / P50745
  ref <309>: DATABASE ENTRY DATE: 2001-10-16
MAGRTQGKHRPRVRTCPSLVPFDNPCWPPSHQPLPLQVGAPGHRVTSFLSGRAWPSYIPKGKHGLPGPRYVPDPWSLGVLGHVAPLRVTTTIFLPGASPGVMLDPACQKTDHFLSCYPWFHGPISRVRAAQLVQLQGPDAHGVFLVRQSESRRGEYVLTFNLQGRAKHLRLVLTERGQCRVQHLHFPSVVDMLRHFQRSPIPLECGAACDVRLSGYVVVVSQAPGRKPKVVSRGGVTASTARTKLPSWLRLLHGVIHVISPGSSNTVLFPFSLPHWDSELGHPHLSSAGCPPGHGAEALRGQVTPPEQIFHLVPSPEELANSLRQLELESVSSARDSDYEMDSSSRSHLRAIDNQYTPLSQLCREANL

SEQ ID NO: 6348 - DNA, 5423 bp, Homo sapiens
  ref <308>: DATABASE ACCESSION NUMBER: Refseq / NM_005475
  ref <309>: DATABASE ENTRY DATE: 2000-11-01
cccgggccaccgcctccgcccggctgcccgcccggactgtcgcggcccgcggtggcgacggcggccgctgcaaagtttccccggcggcggcggcccgggggcgcatcctcccgcaactgtcaagcgctggcggcggaaatgatgaggcgctggccattttccgagcccgggtttcctgcctgagccccgctcgagcgagccgcgagcgaggagccggcgggcgggagaggacgcgcccagggcgggggcccgcccgccccctcgggatttcgagggcccgggggcgcgcgacgccatgggccggccgggcccagagctcctgtctctcagcccggccgcaccacctgggtctccgccatgaacgggcctgccctgcagccctcctcgccctcttccgcgccctcagcctccccggcggcggccccgcggggctggagcgagttctgtgagttgcacgccgtagcggcggcccgggagctggcccgccagtactggctgttcgcccgggagcatccgcagcacgcgccgctgcgcgccgagctggtgtcgctgcagttcaccgacctcttccagcgctacttctgccgcgaggtgcgcgacggacgggcgccgggccgcgactaccgggacacaggccgtgggcccccagccaaggccgaggcgtccccggagccaggccccggccccgccgcccctggcctgcccaaggcccgcagctctgaggagctggccccgccgcggccgcccgggccctgctccttccagcactttcgccgcagcctccgccacatcttccgccgccgctcggccggggagctgccagcggcccacaccgctgccgcccccgggacccccggagaggctgctgagacccccgcccggcctggcctggccaagaagttcctgccctggagcctggcccgggagccgccacccgaggcgctgaaggaggcggtgctgcgctacagcctggccgacgaggcctccatggacagcggggcacgctggcagcgcgggaggctggcgctgcgccgggccccgggccccgatggccccgaccgcgtgctggagctcttcgacccacccaagagttcaaggcccaagctacaagcagcttgctccagcatccaggaggtccggtggtgcacacggcttgagatgcctgacaacctttacacctttgtgctgaaggtgaaggaccggacagacatcatctttgaggtgggagacgagcagcagctgaattcatggatggctgagctctcggagtgcacaggccgagggctggagagcacagaagcagagatgcatattccctcagccctagagcctagcacgtccagctccccaaggggcagcacagattcccttaaccaaggtgcttctcctggggggctgctggacccggcctgccagaagacggaccatttcctgtcctgctacccctggttccacggccccatctccagagtgaaagcagctcagctggttcagctgcagggccctgatgctcatggagtgttcctggtgcggcagagcgagacgcggcgtggggaatacgtgctcactttcaactttcaggggatagccaagcacctgcgcctgtcgctgacagagcggggccagtgccgtgtgcagcacctccactttccctcggtcgtggacatgctccaccacttccagcgctcgcccatcccactcgagtgcggcgccgcctgtgatgtccggctctccagctacgtggtagtcgtctcccaaccaccaggttcctgcaacacggtcctcttccctttctcccttcctcactgggattcagagtcccttcctcactggggttcagagttgggccttccccaccttagttcttctggctgtccccgggggctcagcccagagggtctcccagggcgatcctcaccccccgagcagatcttccacctggtgccttcgcccgaagaactggccaacagcctgcagcacctggagcatgagcctgtgaatcgagcccgggactcggactacgaaatggactcatcctcccggagccacctgcgggccatagacaatcagtacacacctctctgaccagtgaggaattccaggcctcaacagctgcccttgaggagcacaggcagaagtgtgaacttgtgaatgtaattgatctttccttccttccagagaaagatttaagggacactgttaactgctcgtgccagtttggaagtgacccttctattaggcctgttgaagggccctcctgtaggtttcatctatccacctggctttctccttattgtttacagatgtagttcttgttagaggatgccgctagctcctgcccggggtccctatgcccagtccccgttactcttagagaaaggagttggggtgagggccagagctggcagtggaaacttgttctctttttcactgacactgtcacagcggatgacagactttctacggggaggagggggggatcatcaggaagcccagaacactaacaagcggttctcccatctaccgtcagtccacatggcaggtctgctgtgtccacaccacagatgaccacatctaatcctgcttctactctcagctttaggacaaaagctctgtcagaggcacaagctgaaggtcaaaaatgatttaaaacattttacctcagactaatttctttaaaggattcaggttcaaaacttaaccactgcttatttcagtgcactgtttcaactaacacccatgctatttttgtagtcagaaacagctatgcaaaccctacctaatttacagtctgagccagcatgctggcttgtctactgcatcctcgggacagtcacctgccactgagtggccactgtccttcctaaatgtcaagaagtgaagtatgtcaccctttcagggaaattcaggcaattactgaaataggaaggtggcaagaacagttctatcctggtgccttacgaataaaaaactggattctggtttacagcagctttacagtgatagttaaattaactggggctaggggaaaagcaaccaaaaagggaaaaaggactcctaggccctttctattaaatccttcagcaacaaggctggcttggtgccctccaagcatctaatggcttattaaattatcccacaattgggttttaggctccttttttgacccaaaatggaagctgggaatctggtgccataactaatgagaaactcctttaataccccacaatcagtgttctgttctacctggctactgcttcactggattgaaaatctatctatctccttgcacacatgggcacacacaatctccaccatccagggaggtcctgaattcaaatctctatctatccaagtgatacaattcatagggggctggctcctcccagaacctgtctggaggctcagaaacgggggcagtgacagtggagtcagctgctcttgggtgccagcagagccattcagtacaacccccaggctcacagcagtggcttctaggaaactgggagtttagatcagctttacagatacatcgatcagaggctaaaatgaaacctcagcctaaaactcataggactgactgcctgggaggagggttaggtctgcttcttccacttatacttagtctctgtgctccaagaggtcaaatttttgcttctagaatttccttggggtctttcagagggtgggggaacaaacccctatgcacttttcttttttttttttgagatggagtttctcttgtcaaccgggctggagtgcagtggtgcaatcttggctcactgcaacctccaccttcctggttcaagcgattctgcctcgacctctcaagtagctgggattacaagcaccagccaccatgcctggctaattttgtatttttagtagagacagggtttcaccatgttggccaggctggtctcgaatgtctgacctcaggtgatccacccgccttggcctcccaaagtgctgggattacaggcgcgagccaccgcgcccagcctacaccacttttagtaccaacactcttgggtgatttcatggaccctaaagcagacctgacactgatccagatttgcagtccatttttaaggacacctgtctttatttcctcaaagtcaagcagctttctctggaaaatgaatgctaattagtgtgaaccaaaagagtaagtaagagtctgaagtttttttaaaggagaaagcttattatggaaagtcactggtcctcccctccgcacaggaaaggtacccagtagataatgaaccaaattaagttccctccctccagccagaagttaaacatctgggatatgacgtcttcatgccaggggcactcatttcttagcagcctctctacatacatctctcaggtggtgccaagaggcacaccaggtagagcaaacttagcagctctgactaacaggctgcaaagtgcaagttcagattctgtggcagagatttggagggcacccacgtccagactgcttcccgtccaagttaccaggacagctcaaaaacatgctgacagaaaactcccatggctctaggaaaaagtgacactaagccaacacctttctttatgtgggagcaaaatcagctgatgaaggggtgggcaccattgtggggcaggcaccccactggctgcagctagcccaccataggcacagcacatcccaccactctccttccagtcctgaccaggccccagccggcaacttctaccgagagccatggctcaacaccaaactggacagtagacatcatgatccctccagttagctctaattacagaccccaccagtacagcttgacagctcccggcaccatcccttccttcatctgacttattgaacttttacaaactaacagtcaccagcaccaaagaattaagtcaactaacctgccttgaattttaaaccagcaatccatatggctttatctggtataaatcttctgcctttgatcatttctggaccgtaggaaaaaggaatagcaatcattaaaatcttgggccagagaacactatttttacataacagtttcttaacctaaagtcaaggccttggactcttccctgagggttgcctgaaattccttcatgctttctattcaggactaattcccttactgcaaatgtgttagctctaacatctcccacaagctaaaggaacttgcaagtatattaacaaggacacatctgacatcctgtgtttggttaaaatatacagcacattgtgataacataaagtggatccatcttgtatcattataggcaaaaggtatttggcaaatttttatgtatggttttatgtactgtacaagtaacttattcttgaataatgcaaattttgctataatgtacaaattgctatatgtgaattaaaaagtttccaaaatcttgaaaaaaaaaaaaaaaaaaaa

SEQ ID NO: 6349 - protein, 575 aa, Homo sapiens
  ref <308>: DATABASE ACCESSION NUMBER: SWISS-Prot / Q9UQQ2
  ref <309>: DATABASE ENTRY DATE: 2001-10-16
MNGPALQPSSPSSAPSASPAAAPRGWSEFCELHAVAAARELARQYWLFAREHPQHAPLRAELVSLQFTDLFQRYFCREVRDGRAPGRDYRDTGRGPPAKAEASPEPGPGPAAPGLPKARSSEELAPPRPPGPCSFQHFRRSLRHIFRRRSAGELPAAHTAAAPGTPGEAAETPARPGLAKKFLPWSLAREPPPEALKEAVLRYSLADEASMDSGARWQRGRLALRRAPGPDGPDRVLELFDPPKSSRPKLQAACSSIQEVRWCTRLEMPDNLYTFVLKVKDRTDIIFEVGDEQQLNSWMAELSECTGRGLESTEAEMHIPSALEPSTSSSPRGSTDSLNQGASPGGLLDPACQKTDHFLSCYPWFHGPISRVKAAQLVQLQGPDAHGVFLVRQSETRRGEYVLTFNFQGIAKHLRLSLTERGQCRVQHLHFPSVVDMLHHFQRSPIPLECGAACDVRLSSYVVVVSQPPGSCNTVLFPFSLPHWDSESLPHWGSELGLPHLSSSGCPRGLSPEGLPGRSSPPEQIFHLVPSPEELANSLQHLEHEPVNRARDSDYEMDSSSRSHLRAIDNQYTPL

SEQ ID NO: 6350 - DNA, 520 bp, Rattus norvegicus
  ref <308>: DATABASE ACCESSION NUMBER: EMBL / AA943677
  ref <309>: DATABASE ENTRY DATE: 2000-03-03
aaaattacaaatgtgatgagggtggggctggcagttttaaagaacacagtttcatcaatgtagtaaccattaacaaactatttagcattgctttgtgtaagttttgcctcgagagcatttcttcacagtgatattttagaaaggttaggaactggtcagcataaaatatttcccaccttttctattgtaatttgtatgcaaaaatcatcacaatatatctgcaactataaaattacaaactttctagaagttgctgcatttctaagtgtggtagaaaactggatctgcagggtgtctacaataaggtaaggctgaacggaacagaagaagttcagtcaaaaatgctttctgataggtcgctctaaattaatctaacaaagacaaccaatggacaaactcaagaatgtattttagttttcttcatggagaagaaattggtaatgagaagaacattgtaaaagattaccttgatatttcactttacatcataattttggcacttcatggaacatttatttct

SEQ ID NO: 6351 - DNA, 2088 bp, Homo sapiens
  ref <308>: DATABASE ACCESSION NUMBER: EMBL / AK054981
  ref <309>: DATABASE ENTRY DATE: 2002-08-06
ccaaactactgatgccttgataaagaaattcatagatactcaaacctcacagagtcgttcctccaaagatgccgtgggtcagatatctgttcatgtggacatcactgccaccccaggaacgggagatcataaagtcactgtaaaagtgattgctattaatgacctaaactggcagaccacagcaatgttccgcccctttgtggaagtttgtatactgggacccaaccttggagacaagaagagaaaacaaggcacaaaaacaaaaagcaacacatggtcaccaaagtacaatgaaacatttcagttcattctcggaaaggaaaatcggccaggggcttatgaacttcatctctcagttaaggattactgctttgccagagaagatcgaattatcggaatgacagtcattcagctacagaacatagcagaaaagggaagctatggggcatggtatcctcttctgaaaaatatctctatggatgaaactggtttgactatccttagaatactctctcagaggaccagtgatgatgtggctaaagaatttgtaagacttaaatctgaaacaagatctactgaagagagtgcttgaaacaaacactgcaagctaaatacataactataattgtttgactactgcatgcatgtgcaaatacatgggaatgtttagttcactacatttcaatgtttgccagtactcatgtacgatgtctacaaggtatgtaaaaaacctgctgaacttttataccaattctggtctttgggaaatcagtgttccatgaagtgccaaaattatgatgtaaagtgaaatatcaagaataccttttaacatgtttattttgtttctttacccatttcacattcattaaacataatttttaaaaactagtcttttgagtttgcccatcagttgtctttgttaaatgagattatattgcccatagatcagaaaacatttattactcaatttccattttatttacttacctcattatagatgtcttacaaatacccttttctaccataactagaaatgcagtcacttctagaaagcatttgtaattttatagtcgcagatattgtgatttttgcatacacattaaaatagaaaaggtgggaaatattttctgctgaccagtttccaacctttctgaaatatcactgtgaagaaatgctgttaaagcaaacttacataaagcaatgctagagtttgttaacaatgtttgatatatattgacaaaactttgttctctaaaactgccaagatcacatcacatttgtaaaaatggtaagttaatgcatttgtcatatagtgttatgtcttggctttaccatatttcattctttaaaaagtcattaatggtttagaaatgggatggaaagtttactgaaaatacctgtaagtaactatattgttaatatcttccctctgacagttatgactctataatcagttcaatgctttatttttaaaaatattcaatgattagtattgaatgcagcattactatatattgtactgatgccaaaagtcatgttttcatccacttagtgaaaaaatagtaaaattaagtcggaagaaattgcttaaaattttgtaatttgtatttataagccccaaatgcatcaaatgcagtaggagaacaatgtaatacagcttggtacctaaaaatatagctaagttggtttttgaatataaaacagtttatgaatatgtgcattttctgtattgttatgatttgactttttagagtctatgccaaaatatatggctgtaaaacagtactttgtaattataacttatggtcataactgttagtggactacttacagaagcagaaacaagagcctgttatgattgtgctttgtgaacaagctgatctaatacgttaagtaaagtacagaagtgcttagtatcatgactgtcagaaccattctgcaactgagtatgaaatcacagaccagtgaggtgagctaattcatgttaaactgttaggccactgctttgttaatgactcctctaaatgcatagtgtgatgcgatcctctggcatatgctttaataaatggatgtatattgagcacatgc

SEQ ID NO: 6352 - protein, 136 aa, Homo sapiens
  misc_feature (1)..(136): Xaa=Unknown amino acid
MFRPFVEVCILGPNLGDKKRKQGTKTKSNTWSPKYNETFQFILGKENRPGAYELHLSVKDYCFAREDRIIGMTVIQLQNIAEKGSYGAWYPLLKNISMDETGLTILRILSQRTSDDVAKEFVRLKSETRSTEESAX

SEQ ID NO: 6353 - DNA, 596 bp, Rattus norvegicus
  ref <308>: DATABASE ACCESSION NUMBER: EMBL / AA944177
  ref <309>: DATABASE ENTRY DATE: 2000-03-03
cgggcggagccagcccccatttcgagcggggcttctccttgcgccgcggccgacaaaatgggggcggcggcgcgagcctgcggccttccgggcgcacgtggcggcctcgggcccgcccggagccgcagcccccctctacctcaggccaagttcggagggcggggaatcctccccgcgcgcgccaggaaaatcaactaaacatgggcaaaggagatcctaagaagccgagaggcaaaatgtcctcatatgcattctttgtgcaaacctgccgggaggagcacaagaagaagcacccggatgcttctgtcaacttctcagagttctccaagaagtgctcagagaggtggaagaccatgtctgctaaagaaaaggggaaatttgaagatatggcaaaggctgacaaggctcgttatgaaagagaaatgaaaacctacatcccccccaaaggggagaccaaaaagaagttcaaggaccccaatgcccccaagaggcctccttcggccttcttcttgttctgttctgagtaccgcccaaaaatcaaaggcgagcatcctggcttatccattggtgatgttgcgaagaaactaggagagatg

SEQ ID NO: 6354 - protein, 214 aa, Rattus norvegicus; identical to SEQ ID NO: 3846
  ref <308>: DATABASE ACCESSION NUMBER: SWISS-Prot / P07155
  ref <309>: DATABASE ENTRY DATE: 2002-06-15

SEQ ID NO: 6355 - DNA, 578 bp, Homo sapiens; identical to SEQ ID NO: 3847
  ref <308>: DATABASE ACCESSION NUMBER: EMBL / AV701053
  ref <309>: DATABASE ENTRY DATE: 2000-10-03

SEQ ID NO: 6356 - protein, 214 aa, Homo sapiens; identical to SEQ ID NO: 3848
  ref <308>: DATABASE ACCESSION NUMBER: SWISS-Prot / P09429
  ref <309>: DATABASE ENTRY DATE: 2002-06-15

SEQ ID NO: 6357 - DNA, 559 bp, Rattus norvegicus
  ref <308>: DATABASE ACCESSION NUMBER: EMBL / AA944324
  ref <309>: DATABASE ENTRY DATE: 2000-03-03
agcaataattttcagtttactagatgaaacagacttggaacatagtctgcatgaatgcaaaataagccatctacagcaagtgataagaaactgggcaaaaaggaaaaaggcatacatggggggagattctctcgaaataaaaaaaaaaaatcaaaccattattataaaggactttaccaagagttgctattaccccaccccgtttgctggaagtcacaagagcatatagcactgtattcgtgtcaaatgtcagatcagagcatcctaacgcaaagccgaaaggaaatagaagagggggggtaaggggaacaaagaaaacccccaaccccactaaacggtagaacagtaactcgagttcagtttcaaaaaagagagtggcaattgaaagaggtgatgatggtggcgataatcctatgaatgggtttttgatttctctccttccgggggctgggtggagggcgctcattaggatttgtagttagaggttaaccatgtgagcccctcatagagtccgtccccggaggtggcacaggagggctgcacataccagttcctgtcc

SEQ ID NO: 6358 - protein, 174 aa, Rattus norvegicus
  ref <308>: DATABASE ACCESSION NUMBER: SWISS-Prot / P26438
  ref <309>: DATABASE ENTRY DATE: 2002-06-15
GKVLSKIFGNKEMRILMLGLDAAGKTTILYKLKLGQSVTTIPTVGFNVETVTYKNVKFNVWDVGGQDKIRPLWRHYYTGTQGLIFVVDCADRDRIDEARQELHRIINDREMRDAIILIFANKQDLPDAMKPHEIQEKLGLTRIRDRNWYVQPSCATSGDGLYEGLTWLTSNYKS

SEQ ID NO: 6359 - DNA, 1194 bp, Homo sapiens
  ref <308>: DATABASE ACCESSION NUMBER: EMBL / M57763
  ref <309>: DATABASE ENTRY DATE: 1999-07-02
ggccggagggagcccgcgctcggggcggcggctggaggcagcgcaccgagttcccgcgaggatccatgacctgacggggccccggagccgcgctgcctctcgggtgtcctgggtcggtggggagcccagtgctcgcaggccggcgggcgggccggagggctgcagtctccctcgcggtgagaggaaggcggaggagcgggaaccgcggcggcgctcgcgcggcgcctgcggggggaagggcagttccgggccgggccgcgcctcagcagggcggcggctcccagcgcagtctcagggcccgggtggcggcggcgactggagaaatcaagttgtgcggtcggtgatgcccgagtgagcggggggcctgggcctctgcccttaggaggcaactcccacgcaggccgcaaagggctctcgcggccgagaggcttcgtttcggtttcgcggcggcggcggcgttgttggctgaggggacccgggacacctgaatgcccccggccccggctcctccgacgcgatggggaaggtgctatccaaaatcttcgggaacaaggaaatgcggatcctcatgttgggcctggacgcggccggcaagacaacaatcctgtacaagttgaagctgggccagtcggtgaccaccattcccactgtgggtttcaacgtggagacggtgacttacaaaaatgtcaagttcaacgtatgggatgtgggcggccaggacaagatccggccgctctggcggcattactacactgggacccaaggtctcatcttcgtagtggactgcgccgaccgcgaccgcatcgatgaggctcgccaggagctgcaccgcattatcaatgaccgggagatgagggacgccataatcctcatcttcgccaacaagcaggacctgcccgatgccatgaaaccccacgagatccaggagaaactgggcctgacccggattcgggacaggaactggtatgtgcagccctcctgtgccacctcaggggacggactctatgaggggctcacatggttaacctctaactacaaatcttaatgagcattctccacccatcccctggaaggagagaaatcaaaaacccattcataggattatcgccaccatcacctctttcaattgccactttctcttcttttgaatttgaactctggagttactgttctacagtttggcggggacggggc

SEQ ID NO: 6360 - protein, 174 aa, Homo sapiens; identical to SEQ ID NO: 6358

SEQ ID NO: 6361 - DNA, 542 bp, Rattus norvegicus
  ref <308>: DATABASE ACCESSION NUMBER: EMBL / AA944397
  ref <309>: DATABASE ENTRY DATE: 2000-03-03
cagcctcatcatcactgacttccttgtcacgttccttctccacaaagagagtaatggggtagccaataaactgagaatgtttcttcacaatttcttttattctcctttcctccaaatactcagtttggtcttcttttagatgcaagataacctttgttccacgacccattggttcacctgtgtctgtcctcacagtgaaggatcctccagctgaggactcccaggcgtactgctcgtcatcattatgcttggtgatgacagtcactttctcagcaaccaaatacgcagagtaaaaaccaacaccaaactggccaatcatagagatatctgcaccagcctgcaaagcctccatgaaggctttggtgcctgacttggcaatagtgccaaggttattgatcaagtcagccttggtcattccaatgccagtatccacaatagtgagggttcggtcttgcttgttgggaatgagattaatgtgcagctccttccccgagtccagtttactagggtcggtcaagctctcgtatctgatcttatccaga

SEQ ID NO: 6362 - protein, 733 aa, Rattus norvegicus
  ref <308>: DATABASE ACCESSION NUMBER: Refseq / NP_034610
  ref <309>: DATABASE ENTRY DATE: 2002-01-07
MPEETQTQDQPMEEEEVETFAFQAEIAQLMSLIINTFYSNKEIFLRELISNSSDALDKIRYESLTDPSKLDSGKELHINLIPSKQDRTLTIVDTGIGMTKADLINNLGTIAKSGTKAFMEALQAGADISMIGQFGVGFYSAYLVAEKVTVITKHNDDEQYAWESSAGGSFTVRTDTGEPMGRGTKVILHLKEDQTEYLEERRIKEIVKKHSQFIGYPITLFVEKERDKEVSDDEAEEKEEKEEEKEKEEKESDDKPEIEDVGSDEEEEEKKDGDKKKKKKIKEKYIDQEELNKTKPIWTRNPDDITNEEYGEFYKSLTNDWEEHLAVKHFSVEGQLEFRALLFVPRRAPFDLFENRKKKNNIKLYVRRVFIMDNCEELIPEYLNFIRGVVDSEDLPLNISREMLQQSKILKVIRKNLVKKCLELFTELAEDKENYKKFYEQFSKNIKLGIHEDSQNRKKLSELLRYYTSASGDEMVSLKDYCTRMKENQKHIYFITGETKDQVANSAFVERLRKHGLEVIYMIEPIDEYCVQQLKEFEGKTLVSVTKEGLELPEDEEEKKKQEEKKTKFENLCKIMKDILEKKVEKVVVSNRLVTSPCCIVTSTYGWTANMERIMKAQALRDNSTMGYMAAKKHLEINPDHSIIETLRQKAEADKNDKSVKDLVILLYETALLSSGFSLEDPQTHANRIYRMIKLGLGIDEDDPTVDDTSAAVTEEMPPLEGDDDTSRMEEVD

SEQ ID NO: 6363 - DNA, 1063 bp, Homo sapiens
  ref <308>: DATABASE ACCESSION NUMBER: EMBL / BE786120
  ref <309>: DATABASE ENTRY DATE: 2000-10-22
actgaactggcggaagataaagagaactacaagaaattctatgagcagttctctaaaaacataaagcttggaatacacgaagactctcaaaatcggaagaagctttcagagctgttaaggtactacacatctgcctctggtgatgagatggtttctctcaaggactactgcaccagaatgaaggagaaccagaaacatatctattatatcacaggtgagaccaaggaccaggtagctaactcagcctttgtggaacgtcttcggaaacatggcttagaagtgatctatatgattgagcccattgatgagtactgtgtccaacagctgaaggaatttgaggggaagactttagtgtcagtcaccaaagaaggcctggaacttccagaggatgaagaagagaacaaagaagcaggaagagaacaaaacaaagtttgagaacctctgcaaaatcatgaaagacatatcggagaaaaaagttgaaaaggtggtcgtgtcaaaccgattggtgacatctccatgctgtattgtcacaagcacatatggctggacagcaaacactggagagaatcatgaaagctcaagccctaagagacaactcaacaatgggttacatggccagcaagacacacctggcagataaaccctgaccattcatcatcgagaccttaggcacaaggcagacggctgatcacaacgaccagcctgacaacgcacagggccaacctggcctcgatgaacactgcgcccactgaacagcagcgcatcaagactggaagaatcccaagacacagctacccaggacctcaccgggcacaccccactcgggaccgcgaacatgatagacagaaacgcctacacggatctgacaacaaaggcgaccatgacaccaacaacaggcacaccagtaccaagcatacagacacgatcacaagtgaagaaaaaataaaacacaccgcgagccagcacaccccagacacacgcacacaagccacgaaacacaaaccagccgacacccatccaccacacgacacatcagcagcgccacaacaacgaccgctacaca

SEQ ID NO: 6364 - protein, 731 aa, Homo sapiens
  ref <308>: DATABASE ACCESSION NUMBER: SWISS-Prot / CAA30255
  ref <309>: DATABASE ENTRY DATE: 2002-06-15
PEETQTQDQPMEEEEVETFAFQAEIAQLMSLIINTFYSNKEIFLRELISNSSDALDKIRYETLTDPSKLDSGKELHINLIPNKQDRTLTIVDTGIGMTKADLINNLGTIAKSGTKAFMEALQAGADISMIGQFGVGFYSAYLVAEKVTVITKHNDDEQYAWESSAGGSFTVRTDTGEPMGRGTKVILHLKEDQTEYLEERRIKEIVKKHSQFIGYPITLFVEKERDKEVSDDEAEEKEDKEEEKEKEEKESEDKPEIEDVGSDEEEEKKDGDKKKKKKIKEKYIDQEELNKTKPIWTRNPDDITNEEYGEFYKSLTNDWEDHLAVKHFSVEGQLEFRALLFVPRRAPFDLFENRKKKNNIKLYVRRVFIMDNCEELIPEYLNFIRGVVDSEDLPLNISREMLQQSKILKVIRKNLVKKCLELFTELAEDKENYKKFYEQFSKNIKLGIHEDSQNRKKLSELLRYYTSASGDEMVSLKDYCTRMKENQKHIYYITGETKDQVANSAFVERLRKHGLEVIYMIEPIDEYCVQQLKEFEGKTLVSVTKEGLELPEDEEEKKKQEEKKTKFENLCKIMKDILEKKVEKVVVSNRLVTSPCCIVTSTYGWTANMERIMKAQALRDNSTMGYMAAKKHLEINPDHSIIETLRQKAEADKNDKSVKDLVILLYETALLSSGFSLEDPQTHANRIYRMIKLGLGIDEDDPTADDTSAAVTEEMPPLEGDDDTSRMEEVD

SEQ ID NO: 6365 - DNA, 542 bp, Rattus norvegicus; identical to SEQ ID NO: 6361
  ref <308>: DATABASE ACCESSION NUMBER: EMBL / AA944397
  ref <309>: DATABASE ENTRY DATE: 2000-03-03

SEQ ID NO: 6366 - protein, 733 aa, Rattus norvegicus; identical to SEQ ID NO: 6362
  ref <308>: DATABASE ACCESSION NUMBER: Refseq / NP_034610
  ref <309>: DATABASE ENTRY DATE: 2002-01-07

SEQ ID NO: 6367 - DNA, 1063 bp, Homo sapiens; identical to SEQ ID NO: 6363
  ref <308>: DATABASE ACCESSION NUMBER: EMBL / BE786120
  ref <309>: DATABASE ENTRY DATE: 2000-10-22

SEQ ID NO: 6368 - protein, 731 aa, Homo sapiens; identical to SEQ ID NO: 6364
  ref <308>: DATABASE ACCESSION NUMBER: SWISS-Prot / CAA30255
  ref <309>: DATABASE ENTRY DATE: 2002-06-15

SEQ ID NO: 6369 - DNA, 445 bp, Rattus norvegicus
  ref <308>: DATABASE ACCESSION NUMBER: EMBL / AA945054
  ref <309>: DATABASE ENTRY DATE: 2000-03-03
actttacaagccagatatattttaaaaagatcatgtttacaataggtaaattacgtagtgaagaaatgtcaaaatgaagttgagtaacaaaggcacatttgaaagtttaagagtacaaagagtcccatgtttgttctccgagcataggaggaaagggagacagatatattacaattacattctcagggggagggtttctgtcagtggaagtgattaacactggcttcttttctcccctctctggggcagtcttttccttccttggcttcggacagacaggttaaccttctgccatgtagaggcgatacatcagagctaccaccatggctgagatggctgggatcacccagttggtccaccaactggaattagactcgacagtagtgataagggtttctgtactttgccaagacagcttgggaatttggcttctgacagactccca

SEQ ID NO: 6370 - protein, 133 aa, Rattus norvegicus
  ref <308>: DATABASE ACCESSION NUMBER: SWISS-Prot / P00173
  ref <309>: DATABASE ENTRY DATE: 2002-06-15
AEQSDKDVKYYTLEEIQKHKDSKSTWVILHHKVYDLTKFLEEHPGGEEVLREQAGGDATENFEDVGHSTDARELSKTYIIGELHPDDRSKIAKPSETLITTVESNSSWWTNWVIPAISALVVALMYRLYMAED

SEQ ID NO: 6371 - DNA, 445 bp, Rattus norvegicus; identical to SEQ ID NO: 6369
  ref <308>: DATABASE ACCESSION NUMBER: EMBL / AA945054
  ref <309>: DATABASE ENTRY DATE: 2000-03-03

SEQ ID NO: 6372 - protein, 133 aa, Rattus norvegicus; identical to SEQ ID NO: 6370
  ref <308>: DATABASE ACCESSION NUMBER: SWISS-Prot / P00173
  ref <309>: DATABASE ENTRY DATE: 2002-06-15

SEQ ID NO: 6373 - DNA, 472 bp, Rattus norvegicus
  ref <308>: DATABASE ACCESSION NUMBER: EMBL / AA945583
  ref <309>: DATABASE ENTRY DATE: 2000-03-03
agatttgagaatttattaggcacagagggtgaatggagcagagttacaaagtggctgttaggtttccttcaaactgaaaaggagccggtgtttttcctgccttggccttttaaggctgcattcgaatggccccatccagccggatgacctctccattcaagaatgggttctcgattaccatctgtaccagatgagcatattccgcggggtcacctaatcggctggggaacggtacctgtctggccaagaagttgcgcactttgtctggcacagtggtaagcaatggggtggcaaacagacctggagcaattgttaccacacgggtgcctaaaggagccagatctccagcaatgggcagtgtcatgcccactaagccccctttggatgcaaagtatgcagcttgtccaacctggccctcaaaagcagccacactgggaatgttaatgataactccacgttgacctccctggtc

SEQ ID NO: 6374 - protein, 260 aa, Rattus norvegicus
  ref <308>: DATABASE ACCESSION NUMBER: SWISS-Prot / O70351
  ref <309>: DATABASE ENTRY DATE: 2002-06-15
AAAVRSVKGLVAVITGGASGLGLSTAKRLVGQGATAVLLDVPNSEGETEAKKLGGNCIFAPANVTSEKEVQAALTLAKEKFGRIDVAVNCAGIAVAIKTYHEKKNQVHTLEDFQRVINVNLIGTFNVIRLVAGVMGQNEPDQGGQRGVIINTASVAAFEGQVGQAAYSASKGGIVGMTLPIARDLAPIGIRVVTIAPGLFATPLLTTLPDKVRNFLASQVPFPSRLGDPAEYAHLVQMVIENPFLNGEVIRLDGAIRMQP

SEQ ID NO: 6375 - DNA, 965 bp, Homo sapiens
  ref <308>: DATABASE ACCESSION NUMBER: EMBL / BC008708
  ref <309>: DATABASE ENTRY DATE: 2001-07-13
ccggcgacaagatggcagcagcgtgtcggagcgtgaagggcctggtggcggtaataaccggaggagcctcgggcctgggcctggccacggcggagcgacttgtggggcagggagcctctgctgtgcttctggacctgcccaactcgggtggggaggcccaagccaagaagttaggaaacaactgcgttttcgccccagccgacgtgacctctgagaaggatgtgcaaacagctctggctctagcaaaaggaaagtttggccgtgtggatgtagctgtcaactgtgcaggcatcgcggtggctagcaagacgtacaacttaaagaagggccagacccataccttggaagacttccagcgagttcttgatgtgaatctcatgggcaccttcaatgtgatccgcctggtggctggtgagatgggccagaatgaaccagaccagggaggccaacgtggggtcatcatcaacactgccagtgtggctgccttcgagggtcaggttggacaagctgcatactctgcttccaaggggggaatagtgggcatgacactgcccattgctcgggatctggctcccataggtctgtttggcaccccactgctgaccagcctcccagagaaagtgtgcaacttcttggccagccaagtgcccttccctagccgactgggtgaccctgctgagtatgctcacctcgtacaggccatcatcgagaacccattcctcaatggagaggtcatccggctggatggggccattcgtatgcagccttgaagggagaaggcagagaaaacacacgctcctctgcccttcctttccctggggtactactctccagcttgggaggaagcccagtagccattttgtaactgcctaccagtcgccctctgtgcctaataaagtctctttttctcacaaaaaaaaaaaaaaaaaaaaaaaaaaaaaaaaaaaaaaaaaaaaaaaaaaaac

SEQ ID NO: 6376 - protein, 261 aa, Homo sapiens
  ref <308>: DATABASE ACCESSION NUMBER: SWISS-Prot / Q99714
  ref <309>: DATABASE ENTRY DATE: 2002-06-15
MAAACRSVKGLVAVITGGASGLGLATAERLVGQGASAVLLDLPNSGGEAQAKKLGNNCVFAPADVTSEKDVQTALALAKGKFGRVDVAVNCAGIAVASKTYNLKKGQTHTLEDFQRVLDVNLMGTFNVIRLVAGEMGQNEPDQGGQRGVIINTASVAAFEGQVGQAAYSASKGGIVGMTLPIARDLAPIGIRVMTIAPGLFGTPLLTSLPEKVCNFLASQVPFPSRLGDPAEYAHLVQAIIENPFLNGEVIRLDGAIRMQP

SEQ ID NO: 6377 - DNA, 472 bp, Rattus norvegicus; identical to SEQ ID NO: 6373
  ref <308>: DATABASE ACCESSION NUMBER: EMBL / AA945583
  ref <309>: DATABASE ENTRY DATE: 2000-03-03

SEQ ID NO: 6378 - protein, 260 aa, Rattus norvegicus; identical to SEQ ID NO: 6374
  ref <308>: DATABASE ACCESSION NUMBER: SWISS-Prot / O70351
  ref <309>: DATABASE ENTRY DATE: 2002-06-15

SEQ ID NO: 6379 - DNA, 965 bp, Homo sapiens; identical to SEQ ID NO: 6375
  ref <308>: DATABASE ACCESSION NUMBER: EMBL / BC008708
  ref <309>: DATABASE ENTRY DATE: 2001-07-13

SEQ ID NO: 6380 - protein, 261 aa, Homo sapiens; identical to SEQ ID NO: 6376
  ref <308>: DATABASE ACCESSION NUMBER: SWISS-Prot / Q99714
  ref <309>: DATABASE ENTRY DATE: 2002-06-15

SEQ ID NO: 6381 - DNA, 520 bp, Rattus norvegicus
  ref <308>: DATABASE ACCESSION NUMBER: EMBL / AA945704
  ref <309>: DATABASE ENTRY DATE: 2000-03-03
caggtttagcatcagtctttaatgctgtcacactgcataatgacaagtcacacactttggtcttgtgttggtagtggcaacttacaatgagtcgaatggtcagagcaccaggctagctccaaagaacagatccattccctccccaggtctgactcatcacagccctggacaggcagtagttgacagggactgctttcatccaagtgcacaccagctttgcatggaattataaaaacatatttacatacgttccacggtgctcctttcatcagaagcaaaggcccttttatcaaaagggattatatctagggctgtgcaaaattcaaaaggactgtatccttttgagaaagttgagtccattacacacacacatacacacacacaaaaaaagtcacctgcacctctgagaagtgccaggtgtggccaagggctacctctggaccagcaagtactgtgactgtaaggcagccatctgatttcaagagagccacaggtccaggggatctcctggctgtccagg

SEQ ID NO: 6382 - protein, 340 aa, Rattus norvegicus
  ref <308>: DATABASE ACCESSION NUMBER: SWISS-Prot / BAA95672
  ref <309>: DATABASE ENTRY DATE: 2002-06-15
MGKDYYQTLGLARGASDDEIKRAYRRQALRYHPDKNKEPGAEEKFKEIAEAYDVLSDPRKREIFDRYGEEGLKGGSPSGGSSGGANGTSFSYTFHGDPHAMFAEFFGGRNPFDTFFGQRNGEEGMDIDDTFSSFPMGMGGFTNMNFGRSRPSQEPTRKKQDPPVTHDLRVSLEEIYSGCTKKMKISHKRLNPDGKSIRNEDKILTIEVKRGWKEGTKITFPKEGDQTSNNIPADIVFVLKDKPHNIFKRDGSDVIYPARISLREALCGCTVNVPTLDGRTIPVVFKDVIRPGMRRKVPGEGLPLPKTPEKRGDLVIEFEVIFPERIPVSSRTILEQVLPI

SEQ ID NO: 6383 - DNA, 454 bp, Rattus norvegicus
  ref <308>: DATABASE ACCESSION NUMBER: EMBL / AA946040
  ref <309>: DATABASE ENTRY DATE: 2000-03-03
aacctttccagtgagtttttattagtagttgcatcatgattcagggtcccagggtagggaccatcatatactgaggtcccccttttctatcggggagaaggtcaaagagcagaggagaggtgggcggagccaggtcagatcttcccaggaaatgtgccttctgctatgcggtcatcccaggctgagacccatgagacggggcagagggacttgtacactcgccggtaccactcgcacacggagacgtcaccgccctttgccgtcattgccttctcacagcggtggaagtccaggtagttctgccagcagttcttagtctggttctggtttgggaagcggctgtcaaagggggcggttttgtagttcttgattttagtcttgatgtcttcggccatcctgactcctaaagactgtcccggagcagcgttacttcaatgtgaccctttgcaaagac

SEQ ID NO: 6384 - protein, 85 aa, Rattus norvegicus
  ref <308>: DATABASE ACCESSION NUMBER: SWISS-Prot / P56391
  ref <309>: DATABASE ENTRY DATE: 2002-06-15
AEDIKTKIKNYKTAPFDSRFPNQNQTKNCWQNYLDFHRCEKAMTAKGGDVSVCEWYRRVYKSLCPVSWVSAWDDRIAEGTFPGKI

SEQ ID NO: 6385 - DNA, 1007 bp, Homo sapiens
  misc_feature (1)..(1007): n=a, c, g or t
  ref <308>: DATABASE ACCESSION NUMBER: EMBL / AL528775
  ref <309>: DATABASE ENTRY DATE: 2001-02-11
agggtcacattgagctgcaggttgaatccggggtgcctttaggattcagcaccatggcggaagacatggagaccaaaatcaagaactacaagaccgccccttttgacagccgcttccccaaccagaaccagactagaaactgctggcagaactacctggacttccaccgctgtcagaaggaggtgacagcggtggtctcattcctggaaaatctcttgtgtttgcaactatggagctgctgatgttcattttagtacggcatatgccacatctcagtaccaaggtgtcagactctccaagtcacatagccactaanactcgactatcagaagaaagtgctcgtttggtggcagccacagttaccatactctctgatttaccatccctttgttcacccgctggatgtatgacaatcctgcccacaattctgttcttaattgcnagaatattganagacacagcaataaagtctgcagataatcaggttcctccaccagtcagtgcagctcttcaagggattaadagtattgtgacactttcaatggccaaaactgaggctggcgttcaaaaacagtggacagctctgattcgtagcacgcttgcttgcatcctggaatattctcaaccagactctgtacctacacctgatgaagtaagcatgctaacagcaattgcactcttcctgtggtctgctagtaatgaaataataggagtccagtcattacagaatggctgcatgaacagatttaaaaatgcattaaattcatgcgacccatgggttcaagccaaatgttaccagcttctcctctcagtcttccagcattccaatcgtgccctttcaactccttatattcattcattagctccaatagtggttgaaaagctaaaagctgttgaaagaaacagaccagccagtaacatagagcttttagcggttcaagaaggaataaaagttcttgaaacactggttgctcttggtgangacaaacagagtcagctacttgctc

SEQ ID NO: 6386 - DNA, 454 bp, Rattus norvegicus; identical to SEQ ID NO: 6383
  ref <308>: DATABASE ACCESSION NUMBER: EMBL / AA946040
  ref <309>: DATABASE ENTRY DATE: 2000-03-03

SEQ ID NO: 6387 - protein, 85 aa, Rattus norvegicus; identical to SEQ ID NO: 6384
  ref <308>: DATABASE ACCESSION NUMBER: SWISS-Prot / P56391
  ref <309>: DATABASE ENTRY DATE: 2002-06-15

SEQ ID NO: 6388 - DNA, 1007 bp, Homo sapiens; identical to SEQ ID NO: 6385
  misc_feature (1)..(1007): n=a, c, g or t
  ref <308>: DATABASE ACCESSION NUMBER: EMBL / AL528775
  ref <309>: DATABASE ENTRY DATE: 2001-02-11

SEQ ID NO: 6389 - DNA, 658 bp, Rattus norvegicus
  misc_feature (1)..(658): n=a, c, g or t
  ref <308>: DATABASE ACCESSION NUMBER: EMBL / AA946368
  ref <309>: DATABASE ENTRY DATE: 2000-03-03
gaatttaagaacatctttaatgttagaaaccagttatttctgggtgattataaaagcagaatatattaccacaaatacatatttaaagccaattctagcttttgtaagattctatatcataatccatttattataaattacatcttttaacactataacagctctctgaagttacattagttgtggctgagcagaaagagaaaaacctactcagttttcaaaagagctaggcagcctggaacttgacaacatacttaaaataaagagctaaaatgtgctaaaaatagttcatttcatggcgaggaacagaacatataagctctgtgtaagaaagtaaaaagaaaaaaatatctgtgatacctggccttgttgttgccaaggacaccagagagggagaggcttaaacaatatattagcaatggttcatatgtgaattgttcatttttcatccttaaatctttaaaatgatgtaatacttatgacatatcatgtgctgacagtcacaaggaacatttgctataaatgaaagggtcaccccagacatgataacagtttacttcgatgaggaacaaagcgtttcttagaatatatacattcttgaaatttgccaacangaaaaaaaaatcagtaaatcagaaccaaagaagataattagttc

SEQ ID NO: 6390 - protein, 471 aa, Rattus norvegicus; identical to SEQ ID NO: 1059
  ref <308>: DATABASE ACCESSION NUMBER: SWISS-Prot / Q07969
  ref <309>: DATABASE ENTRY DATE: 1999-07-15

SEQ ID NO: 6391 - DNA, 1749 bp, Homo sapiens; identical to SEQ ID NO: 1060
  ref <308>: DATABASE ACCESSION NUMBER: EMBL / BC008406
  ref <309>: DATABASE ENTRY DATE: 2001-07-13

SEQ ID NO: 6392 - protein, 471 aa, Homo sapiens; identical to SEQ ID NO: 1061
  ref <308>: DATABASE ACCESSION NUMBER: SWISS-Prot / P16671
  ref <309>: DATABASE ENTRY DATE: 2002-06-15

SEQ ID NO: 6393 - DNA, 616 bp, Rattus norvegicus
  ref <308>: DATABASE ACCESSION NUMBER: EMBL / AA946439
  ref <309>: DATABASE ENTRY DATE: 2000-03-03
atgttgcatggtgactttattgtgggtttccaaacctgaacaccagtcctcattcaggtccgctttgtcctataggaacacgaagcttcaactttaacttgaagagcatccgaggctgtaccctacaacgcctaatgggacccttgcagcctggcacgcaacattaaacgcctccgttaacataatcagcttggcatacaagaaaattcattcgcacagaccgaccagacacagcattcagagcgcttaccagttggtgggtggagccaccacacctagccctccaatgagaaagtgcacagaagagacttagtttgcatacgagacaatgcaacgctaataattgtagaccgtaacctagccagcataataagagttcacagctcatttttgatggtttgggggccctgaaaagggcctttgtgagtgggggagggggccaaggagaaggcctatacacacgaggacgccgatcaaccgccggagccatagagcgtgcggccctggcgcttgagcgcatacaccacgtccatagccgtgaccgtattgcgcttggcgtgctcggtgtaggtgacagcatcgcgaatcacattttcaaggaaaacctttatgacgc

SEQ ID NO: 6394 - protein, 102 aa, Rattus norvegicus
  ref <308>: DATABASE ACCESSION NUMBER: SWISS-Prot / P02304
  ref <309>: DATABASE ENTRY DATE: 2002-06-15
SGRGKGGKGLGKGGAKRHRKVLRDNIQGITKPAIRRLARRGGVKRISGLIYEETRGVLKVFLENVIRDAVTYTEHAKRKTVTAMDVVYALKRQGRTLYGFGG

SEQ ID NO: 6395 - DNA, 367 bp, Homo sapiens
  ref <308>: DATABASE ACCESSION NUMBER: Refseq / NM_003539
  ref <309>: DATABASE ENTRY DATE: 2002-05-22
atgtctggccgcggtaagggcggaaagggtctaggtaagggtggcgccaagcgtcaccgtaaggtattgcgtgacaatatccaaggaatcaccaagcccgctatccgccgcctggctcgccgcggcggcgtcaagcgtatttctggcctcatttatgaggaaactcgcggagtgctgaaagttttcctggaaaatgtaatccgcgatgctgtcacctacacggaacacgccaaacgcaagacagtcacagccatggacgtggtgtacgcgctcaagcgccagggacgcactctttatggcttcggcggctgagcttacctctacagtacactaccgcaaaaccaacggcccttttcagggccaccta

SEQ ID NO: 6396 - protein, 102 aa, Homo sapiens; identical to SEQ ID NO: 6394

SEQ ID NO: 6397 - DNA, 535 bp, Rattus norvegicus
  ref <308>: DATABASE ACCESSION NUMBER: EMBL / AA946532
  ref <309>: DATABASE ENTRY DATE: 2000-03-03
cttgcggccgcatgtgttttttttttttttttttttttttttgtgccccatggtagtgggaaccaaaccaatcacaatgttttattggaacatattccatcatcacaggatagcatttattaaacagtggcggatttctctagctgctacatttattctcattcctcatacataccttgaggtgcatttgattccaggagagccatttgggttttctttagctaaataataaatgtacccgtctcagtcttttggactgagtcgttctgaaggctctcgtgtggacagcagtgtgtgcagtcgtgcttacagcccgtgcctgctccacatggtaccagtcttaccagtgcttgagagctcagacacaccctgctgcatgaagttggaggtctcgggagggttttagattttgtgacgggaaccggaaaggctcgtcagagtgtggctgtgtcatggtgagcaccacgtggctgtagaggcctgacatgaggtaatgcactgagcacacaacgccactgctgctgtctgtggctgt

SEQ ID NO: 6398 - protein, 658 aa, Rattus norvegicus; identical to SEQ ID NO: 2323
  ref <308>: DATABASE ACCESSION NUMBER: SWISS-Prot / P16970
  ref <309>: DATABASE ENTRY DATE: 2001-10-16

SEQ ID NO: 6399 - DNA, 949 bp, Homo sapiens; identical to SEQ ID NO: 2324
  ref <308>: DATABASE ACCESSION NUMBER: EMBL / BC009712
  ref <309>: DATABASE ENTRY DATE: 2001-10-25

SEQ ID NO: 6400 - protein, 659 aa, Homo sapiens; identical to SEQ ID NO: 2325
  ref <308>: DATABASE ACCESSION NUMBER: SWISS-Prot / P28288
  ref <309>: DATABASE ENTRY DATE: 2002-06-15

SEQ ID NO: 6401 - DNA, 442 bp, Rattus norvegicus
  ref <308>: DATABASE ACCESSION NUMBER: EMBL / AA955167
  ref <309>: DATABASE ENTRY DATE: 2000-03-03
cggccgcgtcgccgccggctgcagctgcggcctcgtccttggcgccgtcggcggtcgcgccttccgcctcagcgccctcgccggcctccttcttgctcttcttgaaggagaagccgctcagcttgaaggacttcttgaaggaaaagcgcttctttttttttttcggggtctcgctgctgggagacggcgcggccccgtcctccgccttgggggacgacgtggaggaggcggacgcgccctcggtctccgcggagggggagccgggctcggcgggctcggcctccgcagcctccttgtcggccgtggcagcgcccggctcgggggccgcggctgcctcatccttatcggccgcggccggggtcgcggcgccgccgctcgcaggctcctccttgtcggcggccggggcgctgccgttgggctgcaactcctccttggcgcccgg

SEQ ID NO: 6402 - protein, 308 aa, Rattus norvegicus; identical to SEQ ID NO: 6328
  ref <308>: DATABASE ACCESSION NUMBER: SWISS-Prot / P30009
  ref <309>: DATABASE ENTRY DATE: 2002-06-15

SEQ ID NO: 6403 - DNA, 865 bp, Homo sapiens; identical to SEQ ID NO: 6329
  misc_feature (1)..(865): n=a, c, g or t
  ref <308>: DATABASE ACCESSION NUMBER: EMBL / AU141403
  ref <309>: DATABASE ENTRY DATE: 2002-08-06

SEQ ID NO: 6404 - DNA, 411 bp, Rattus norvegicus
  ref <308>: DATABASE ACCESSION NUMBER: EMBL / AA955477
  ref <309>: DATABASE ENTRY DATE: 2000-03-03
tttttttttttttttttaacgttaaaaatgtgtttattaatatctgaatataaaacccagcagcactgttgtggctgacaagatctaaggtttcccagccagtgagaaaggccaggatctaggatcatctaggaaggagactgggtgccaggcacttgttaggtcaccaatcaaccactcagcacctggatgttaccctgcgcaggatagggcagagctggctaagtctgggctccgccaaggaaaaccctctctgctccactcagggcactggtcatctcttccttgacgtcatcccagtggtctttgtcttcctccagcactcgggctgtatggagtggggtctgtgggacctccatcgattgattgatccaaggatggttcataaactgcatgatggtcagcctctcg

SEQ ID NO: 6405 - protein, 385 aa, Rattus norvegicus
  ref <308>: DATABASE ACCESSION NUMBER: SWISS-Prot / CAA54183
  ref <309>: DATABASE ENTRY DATE: 2001-10-16
IRGSPGQTPPAPFPSPPPPAPAQPPPPFPQFHVKSGLQIRKNAITDDYKVTSQVLGLGINGKVLRIFDKRTQQKFALKMLQDCPKARREVELTWRASQCPHIVHIVDVYENLYAGRKCLLIVMECLDGGELFSRIQDRGDQAFTEREASEIMKSIGEAIQYLHSINIAHRDVKPENLLYTSKRPNAILKLTDFGFAKETTSHNSLTTPCYTPYYVAPEVLGPEKYDKSCDMWSLGVIMYILLCGYPPFYSNHGLAISPGMKTRIRMGQYEFPNPEWSEVSEEVKMLIRNLLKTEPTQRMTITEFMNHPWIMQSTKVPQTPLHTSRVLKEDKERWEDVKEEMTSALATMRVDYEQIKIKKIEDASNPLLLKRRKKARAVEDAALAH

SEQ ID NO: 6406 - DNA, 2481 bp, Homo sapiens
  ref <308>: DATABASE ACCESSION NUMBER: EMBL / U09578
  ref <309>: DATABASE ENTRY DATE: 2000-03-04
gcccctcgccggtacctcagcaaggtgcgttgccgccaggtgccactagaagcgccaggctggggccgcctctgagcgccccgcgggggccatggatggtgaaacagcagaggagcaggggggccctgtgcccccgccagttgcacccggcggacccggcttgggcggtgctccgggggggcggcgggagcccaagaagtacgcagtgaccgacgactaccagttgtccaagcaggtgctgggcctgggtgtgaacggcaaagtgctggagtgcttccatcggcgcactggacagaagtgtgccctgaagctcctgtatgacagccccaaggcccggcaggaggtagaccatcactggcaggcttctggcggcccccatattgtctgcatcctggatgtgtatgagaacatgcaccatggcaagcgctgtctcctcatcatcatggaatgcatggaaggtggtgagttgttcagcaggattcaggagcgtggcgaccaggctttcactgagagagaagctgcagagataatgcgggatattggcactgccatccagtttctgcacagccataacattgcccaccgagatgtcaagcctgaaaacctactctacacatctaaggagaaagacgcagtgcttaagctcaccgattttggctttgctaaggagaccacccaaaatgccctgcagacaccctgctatactccctattatgtggcccctgaggtcctgggtccagagaagtatgacaagtcatgtgacatgtggtccctgggtgtcatcatgtacatcctcctttgtggcttcccacccttctactccaacacgggccaggccatctccccggggatgaagaggaggattcgcctgggccagtacggcttccccaatcctgagtggtcagaagtctctgaggatgccaagcagctgatccgcctcctgttgaagacagaccccacagagaggctgaccatcactcagttcatgaaccacccctggatcaaccaatcgatggtagtgccacagaccccactccacacggcccgagtgctgcaggaggacaaagaccactgggacgaagtcaaggaggagatgaccagtgccttggccactatgcgggtagactacgaccaggtgaagatcaaggacctgaagacctctaacaaccggctcctcaacaagaggagaaaaaagcaggcaggcagctcctctgcctcacagggctgcaacaaccagtagctcatggggccttggaggagcctggcctctcagcctgcataacagactgaaatgtgctcaggccctggccaggagggcccagggtcattcttttaacaaaggattattttgttgtgttttaatttgtcactcggaacttcaggatggaggaccctgaccctaagcctccttcagatctctggcccaggctcaagccctagagatgggcagggcctaggggctgggagctgcctgctgccatagcagcacctttagctaggttggcccgagtgaggcctctgtgctgtcctgccctggtgcatggccttagctttctaggccactgggagttgtggctgggcttcccatcttccacagagacatctccctgtgggatgggcagatgggcctggccttgagaaaggcattggccattggttgccatggtgaccagggaccacgttgctgcctgtgaatgctgagtgagcgagtaagggaggaggggcgattgagggttcacctctgccttggggaggctgatttctcacacactggctggccctctcattctcactcctccttgggccctgaggctgctggatccagtctgcctgcctccctgtgcagtccagccctgccttgctgcagccccagcccagatggcactcagcgctctcccctgagggagtccctgggcctagccatcccctcactattcccgacccaaagggtgacttttcatctgaacttaaagtgggagatatttttaacttttttccactttggaaaatgtcactgtgacaaaagccagcatactttccctgcacccatctgctcaccagatctcaggcaggaaagcccctctctgttgaagtcaggggctatcttttggtatacttgtgtgaaagtggctggttgggagcagagctaagtggcttcccattaacctgaggtctctttctttactctgggtcagacctgaggttggggaaggcgactgagccatgctcagaatgtctggtcctggcttgggcctgagtagggcagagagggcctttcatggctgatcagagcttaccagccccaccccaccatggtagccttagggtgctgagtgcctgatactgcctgacaagtgcctgacacgcagcctagttccttcctggcccctctctcactggctgggaaaccctagaccatgtcagataggacaacactgctgggttttacatccagatagtaataaacaccatttcatcatt

SEQ ID NO: 6407 - protein, 382 aa, Homo sapiens
  ref <308>: DATABASE ACCESSION NUMBER: SWISS-Prot / AAH10407
  ref <309>: DATABASE ENTRY DATE: 2003-02-01
MDGETAEEQGGPVPPPVAPGGPGLGGAPGGRREPKKYAVTDDYQLSKQVLGLGVNGKVLECFHRRTGQKCALKLLYDSPKARQEVDHHWQASGGPHIVCILDVYENMHHGKRCLLIIMECMEGGELFSRIQERGDQAFTEREAAEIMRDIGTAIQFLHSHNIAHRDVKPENLLYTSKEKDAVLKLTDFGFAKETTQNALQTPCYTPYYVAPEVLGPEKYDKSCDMWSLGVIMYILLCGFPPFYSNTGQAISPGMKRRIRLGQYGFPNPEWSEVSEDAKQLIRLLLKTDPTERLTITQFMNHPWINQSMVVPQTPLHTARVLQEDKDHWDEVKEEMTSALATMRVDYDQVKIKDLKTSNNRLLNKRRKKQAGSSSASQGCNNQ

SEQ ID NO: 6408 - DNA, 553 bp, Rattus norvegicus
  misc_feature (1)..(553): n=a, c, g or t
  ref <308>: DATABASE ACCESSION NUMBER: EMBL / AA955808
  ref <309>: DATABASE ENTRY DATE: 2000-03-03
tttttttttttttttttgggttttaagaatattttattaaaaaatacaagatttttgaaaaaagatcagtacaattatcttaatgtacaaagtcatagctgtagcagtttttaactaaaatttaaaaacacaacaaggagggcagccctttagaccaatttattttatacccttttaaaacatcaaattatcatccaacaaaggacagtggagtttacagcttggacaagggtacatgactcaggcatatgcagtccatcctgcccactggacaactttgctgctgaaatttcttaaatcctaccaaacaaaaacaaaaggctanctgatacaaatgaggaggatttccatgtaattgtcaattggctttttaaaaaagaaatgcttcctgtctccccagaacagcanacaagcaagagctacatgcagcaatgtgagtattaagacatttctcaagtcttctcaaacgagtccatgtggggatangatgagtgacaaaactgatagaaaaacactgctattgacaccataacaaacaataaagttagataat

SEQ ID NO: 6409 - protein, 305 aa, Rattus norvegicus
  misc_feature (1)..(305): Xaa=Unknown amino acid
  ref <308>: DATABASE ACCESSION NUMBER: SWISS-Prot / Q64620
  ref <309>: DATABASE ENTRY DATE: 1998-07-15
MAPLDLDKYVEIARQCKYLPENDLKRLCDYVCDLLLEESNVQPVSTPVTVCGDIHGQFYDLCELFRTGGQVLDTNYIFMGDFVDRGHYXXVTFTYLLALKAKWPDRITLLRGNHESRQITQVYGFYDECQTKYGNANAWRYCTKVFDMLTVAALIDEQILCVHGGLSPDIKTLDQIRTIERNQEIPHKGAFCDLVWSDPEDVDTWAISPRGAGWLFGAKVTNEFVHINNLKLICRAHQLVHEGYKFMFDEKLVTVWSAPNYCYRCGNIASIMVFKDVNTREPKLNRAVPDSERVIPPRTTTPYFL

SEQ ID NO: 6410 - DNA, 1563 bp, Homo sapiens
  ref <308>: DATABASE ACCESSION NUMBER: EMBL / BC006990
  ref <309>: DATABASE ENTRY DATE: 2001-07-13
ctccgccgctgccgccgccgctgctacagccgccgccgccgctgttgccgcggcttgttattcttaaaatggcgccgctagacctggacaagtatgtggaaatagcgcggctgtgcaagtacctgccagagaacgacctgaagcggctatgtgactacgtttgtgacctcctcttagaagagtcaaatgttcagccagtatcaacaccagtaacagtgtgtggagatatccatggacagttttatgacctttgtgaactgttcagaactggaggtcaggttcctgacacaaactacatatttatgggtgattttgtagacagaggttactatagtttggagaccttcacttaccttcttgcattaaaggctaaatggcctgatcgtattacacttttgcgaggaaatcatgagagtagacagataacacaggtctatggattttatgatgagtgccaaaccaaatatggaaatgctaatgcctggagatactgtaccaaagtttttgacatgctcacagtagcagctttaatagatgagcagattttgtgtgtccatggtggtttatctcctgatatcaaaacactggatcaaattcgaaccatcgaacggaatcaggaaattcctcataaaggagcattttgtgatctggtttggtcagatcctgaagatgtggatacctgggctatcagtccccgaggagcaggttggctttttggagcaaaggtcacaaatgagtttgttcatatcaacaacttaaaactcatctgcagagcacatcaactagtgcacgaaggctataaatttatgtttgatgagaagctggtgacagtatggtctgctcctaattactgctatcgttgtggaaatattgcttcgatcatggtcttcaaagatgtaaatacaagagaaccaaagttattccgggcagttccagattcagaacgtgttattcctcccagaacgacaacgccatatttcctttgaggccttcgcccatcctgctgacccatttttctgccctcttcttaccccaattttcttgtattaccctctacaatatactttttattgagcactttgctgctgaaatgctgcctcttgccttttttttttttaaattttaaattatctaaatttattgtttgttgtggtgtctatagcaaagtttttctatcaattttcccccatcccatccccaccctggactcatttgagaagacttgagaaatgtcttaatactcacactgctgcatgtagctcttgcttatttactggtctgggaaacaggatgtgtttccttttttttaaaagccaattgacagattacacctaaatactcctccttttgtatcattcagccttttgttttagtttggtaagttttaagaaatttcagcagcaaagttgttattcagtgggcacgatggactccaaatgcctcaagttatgtatacctgtcccagatgtaaacttcattgtcctttgttggatgatattttaaatggatataaaataaattggtctaaaggacaaaaaaaaaaaaaaaaaaaaaaaaaaaaaa

SEQ ID NO: 6411 - protein, 305 aa, Homo sapiens
  ref <308>: DATABASE ACCESSION NUMBER: SWISS-Prot / O00743
  ref <309>: DATABASE ENTRY DATE: 2002-06-15
MAPLDLDKYVEIARLCKYLPENDLKRLCDYVCDLLLEESNVQPVSTPVTVCGDIHGQFYDLCELFRTGGQVPDTNYIFMGDFVDRGYYSLETFTYLLALKAKWPDRITLLRGNHESRQITQVYGFYDECQTKYGNANAWRYCTKVFDMLTVAALIDEQILCVHGGLSPDIKTLDQIRTIERNQEIPHKGAFCDLVWSDPEDVDTWAISPRGAGWLFGAKVTNEFVHINNLKLICRAHQLVHEGYKFMFDEKLVTVWSAPNYCYRCGNIASIMVFKDVNTREPKLFRAVPDSERVIPPRTTTPYFL

SEQ ID NO: 6412 - DNA, 553 bp, Rattus norvegicus; identical to SEQ ID NO: 6408
  misc_feature (1)..(553): n=a, c, g or t
  ref <308>: DATABASE ACCESSION NUMBER: EMBL / AA955808
  ref <309>: DATABASE ENTRY DATE: 2000-03-03

SEQ ID NO: 6413 - protein, 305 aa, Rattus norvegicus; identical to SEQ ID NO: 6409
  misc_feature (1)..(305): Xaa=Unknown amino acid
  ref <308>: DATABASE ACCESSION NUMBER: SWISS-Prot / Q64620
  ref <309>: DATABASE ENTRY DATE: 1998-07-15

SEQ ID NO: 6414 - DNA, 1563 bp, Homo sapiens; identical to SEQ ID NO: 6410
  ref <308>: DATABASE ACCESSION NUMBER: EMBL / BC006990
  ref <309>: DATABASE ENTRY DATE: 2001-07-13

SEQ ID NO: 6415 - protein, 305 aa, Homo sapiens; identical to SEQ ID NO: 6411
  ref <308>: DATABASE ACCESSION NUMBER: SWISS-Prot / O00743
  ref <309>: DATABASE ENTRY DATE: 2002-06-15

SEQ ID NO: 6416 - DNA, 386 bp, Rattus norvegicus
  ref <308>: DATABASE ACCESSION NUMBER: EMBL / AA957003
  ref <309>: DATABASE ENTRY DATE: 2000-03-03
tttttttttttttttttaagatatgacgactttattctgtaaacatatccaagggcccaaccccaggccaaaagctctgttaccccttgtggctgtctttatgaactgccaagcccacccttatcaccaacacaaggaactcttcgaagttaattgcgttgtcactattgacgtccaattctttgaacaagctttcggtatttttattctgcacaaactgagggcactcagtagtgaccattttcctgaagtcatccctgtaaagggcatggtgattcccttttataccaaaataattgtggtaaacttcaatgacgttgctcaaggccttctccaattcaattgccattgtcgataaaaatttcctttcacacaaggtctggacc

SEQ ID NO: 6417 - protein, 88 aa, Rattus norvegicus
  ref <308>: DATABASE ACCESSION NUMBER: SWISS-Prot / P50115
  ref <309>: DATABASE ENTRY DATE: 2001-10-16
ATELEKALSNVIEVYHNYSGIKGNHHALYRDDFRKMVTTECPQFVQNKNTESLFKELDVNSDNAINFEEFLVLVIRVGVAAHKDSHKE

SEQ ID NO: 6418 - DNA, 418 bp, Homo sapiens
  ref <308>: DATABASE ACCESSION NUMBER: EMBL / X06234
  ref <309>: DATABASE ENTRY DATE: 1993-09-12
atgtctcttgtcagctgtctttcagaagacctggtggggcaagttccgtgggcatcatgttgaccgagctggagaaagccttgaactctatcatcgacgtctaccacaagtactccctgataaaggggaatttccatgccgtctacagggatgacctgaagaaattgctagagaccgagtgtcctcagtatatcaggaaaaagggtgcagacgtctggttcaaagagttggatatcaacactgatggtgcagttaacttccaggagttcctcattctggtgataaagatgggcgtggcagcccacaaaaaaagccatgaagaaagccacaaagagtagctgagttactgggcccagaggctgggcccctggacatgtacctgcagaataataaagtcatcaatacctcaaaaaaaaaa

SEQ ID NO: 6419 - protein, 93 aa, Homo sapiens
  ref <308>: DATABASE ACCESSION NUMBER: SWISS-Prot / P05109
  ref <309>: DATABASE ENTRY DATE: 2002-06-15
MLTELEKALNSIIDVYHKYSLIKGNFHAVYRDDLKKLLETECPQYIRKKGADVWFKELDINTDGAVNFQEFLILVIKMGVAAHKKSHEESHKE

SEQ ID NO: 6420 - DNA, 377 bp, Rattus norvegicus
  ref <308>: DATABASE ACCESSION NUMBER: EMBL / AA957640
  ref <309>: DATABASE ENTRY DATE: 2000-03-03
tttttttttttttttttactgaatagctgctcaagaggttcattgacgatagtccatgggaagcacagagaagaggcaatcacctaaaacacccaacccttacatagcaaaggttaagcaataacttaggactcctcgtgggataggcctggggtggggcaggcgtcattcactcctgtccttgggctcccggtagcgccactggatgtaatcgaaaatgtcctgctcgctgtccaccggaaggggctccccagcaaccccagtgacccccagggggcggatggtgtactcattgattgtgaagcccttttccagggcatgcgctctcatattcttattaaagatgtcacttccagtgaagtagagaacaccacagt

SEQ ID NO: 6421 - protein, 334 aa, Rattus norvegicus; identical to SEQ ID NO: 2420
  ref <308>: DATABASE ACCESSION NUMBER: SWISS-Prot / P06766
  ref <309>: DATABASE ENTRY DATE: 2002-06-15

SEQ ID NO: 6422 - DNA, 1259 bp, Homo sapiens; identical to SEQ ID NO: 2421
  ref <308>: DATABASE ACCESSION NUMBER: EMBL / M13140
  ref <309>: DATABASE ENTRY DATE: 2000-03-04

SEQ ID NO: 6423 - protein, 334 aa, Homo sapiens; identical to SEQ ID NO: 2422
  ref <308>: DATABASE ACCESSION NUMBER: SWISS-Prot / P06746
  ref <309>: DATABASE ENTRY DATE: 2002-06-15

SEQ ID NO: 6424 - DNA, 419 bp, Rattus norvegicus
  ref <308>: DATABASE ACCESSION NUMBER: EMBL / AA957917
  ref <309>: DATABASE ENTRY DATE: 2000-03-03
tttttttttttttttttgccttaaaattttcatcctaaccacattggactggtgcacatttcacctgtaccactgtgtcaataaaagcattccacacaccaaaatgagctgaaggaatggaccgttcactctccccccaggagcctcacgtacaatcttctcacgaggaggccaaacagacaggacggtttgaactccataaaataaccgcacataacatacattcaccgctgactttgacttctgtagcagttccatggctcatgtattctctgttggccactcacttggctacctcaaccatacctggactcaagtatcctggcactgagatccccactaagattctttagtgtttgggtaccaagaaaacagtaagcttttattagaatgaaataagtttctgcctcgtgccgaat

SEQ ID NO: 6425 - protein, 624 aa, Rattus norvegicus
  ref <308>: DATABASE ACCESSION NUMBER: SWISS-Prot / P30823
  ref <309>: DATABASE ENTRY DATE: 2001-10-16
MGCKNLLSLGQQMLRRKVVDCSREESRLSRCLNTYDLVALGVGSTLGAGVYVLAGAVARENAGPAIVISFLIAALASVLAGLCYGEFGARVPKTGSAYLYSYVTVGELWAFITGWNLILSYIIGTSSVARAWSATFDELIGKPIGEFSRQHMALNAPGVLAQTPDIFAVIIIIILTGLLTLGVKESAMVNKIFTCINVLVLCFIMVSGFVKGSIENWQLTENKSSPLCGNNDTNVKYGEGGFMPFGFSGVLSGAATCFYAFVGFDCIATTGEEVKNPQKAIPVGIVASLLICFIAYFGVSAALTLMMPYFCLDTDSPLPGAFKYRGWEEAKYAVAVGSLCALSTSPLGSMFPMPRVIYAMAEDGLLFKFLAKINDRTKTPIIATVTSGAIAAVMAFLFELKDLVDLMSIGTLLAYSLVAACVLVLRYQPEQPNLVYQMARTTDELDQVDQNEMVSASESQTGFLPAAEKFSLKTILSPKNMEPSKFSGLIVNISAGLLAVLIITVCIVAVLGREALAEGTLWAVFVMTGSVLLCMLVTGIIWRQPESKTKLSFKVPFVPVLPVLSIFVNIYLMMQLDQGTWVRFAVWMLIAFAIYFGYGVWHSEEASLAAGQAKTPDSNLDQCK

SEQ ID NO: 6426 - DNA, 2157 bp, Homo sapiens
  ref <308>: DATABASE ACCESSION NUMBER: EMBL / X59155
  ref <309>: DATABASE ENTRY DATE: 1991-11-05
cgatcctgccggagccccgccgccgccggcttggattctgaaaccttccttgtatccctcctgagacatctttgctgcaagatcgaggctgtcctctggtgagaaggtggtgaggcttcccgtcatattccagctctgaacagcaacatggggtgcaaagtcctgctcaacattgggcagcagatgctgcggcggaaggtggtggactgtagccgggaggagacgcggctgtctcgctgcctgaacacttttgatctggtggccctcggggtgggcagcacactgggtgctggtgtctacgtcctggctggagctgtggcccgtgagaatgcaggccctgccattgtcatctccttcctgatcgctgcgctggcctcagtgctggctggcctgtgctatggcgagtttggtgctcgggtccccaagacgggctcagcttacctctacagctatgtcaccgttggagagctctgggccttcatcaccggctggaacttaatcctctcctacatcatcggtacttcaagcgtagcgagggcctggagcgccaccttcgacgagctgataggcagacccatcggggagttctcacggacacacatgactctgaacgcccccggcgtgctggctgaaaaccccgacatattcgcagtgatcataattctcatcttgacaggacttttaactcttggtgtgaaagagtcggccatggtcaacaaaatattcacttgtattaacgtcctggtcctgggcttcataatggtgtcaggatttgtgaaaggatcggttaaaaactggcagctcacggaggaggattttgggaacacatcaggccgtctctgtttgaacaatgacacaaaagaagggaagcccggtgttggtggattcatgcccttcgggttctctggtgtcctgtcgggggcagcgacttgcttctatgccttcgtgggctttgactgcatcgccaccacaggtgaagaggtgaagaacccacagaaggccatccccgtggggatcgtggcgtccctcttgatctgcttcatcgcctactttggggtgtcggctgccctcacgctcatgatgccctacttctgcctggacaataacagccccctgcccgacgcctttaagcacgtgggctgggaaggtgccaagtacgcagtggccgtgggctccctctgcgctctttccgccagtcttctaggttccatgtttcccatgcctcgggttatctatgccatggctgaggatggactgctatttaaattcttagccaacgtcaatgataggaccaaaacaccaataatcgccacattagcctcgggtgccgttgctgctgtgatggccttcctctttgacctgaaggacttggtggacctcatgtccattggcactctcctggcttactcgttggtggctgcctgtgtgttggtcttacggtaccagccagagcagcctaacctggtataccagatggccagtacttccgacgagttagatccagcagaccaaaatgaattggcaagcaccaatgattcccagctggggtttttaccagaggcagagatgttctctttgaaaaccatactctcacccaaaaacatggagccttccaaaatctctgggctaattgtgaacatttcaaccagccttatagctgttctcatcatcaccttctgcattgtgaccgtgcttggaagggaggctctcaccaaaggggcgctgtgggcagtctttctgctcgcagggtctgccctcctctgtgccgtggtcacgggcgtcatctggaggcagcccgagagcaagaccaagctctcatttaaggttcccttcctgccagtgctccccatcctgagcatcttcgtgaacgtctatctcatgatgcagctggaccagggcacctgggtccggtttgctgtgtggatgctgataggcttcatcatctactttggctatggcctgtggcacagcgaggaggcgtccctggatgccgaccaagcaaggactcctgacggcaacttggaccagtgcaagtgacgcacagccccgccccccggaggtggcagcagccccgagggacgcccccagaggaccgggaggcaccccaccctccccaccagtgcaacagaaaccacctgcgtccacaccctcactgca

SEQ ID NO: 6427 - protein, 629 aa, Homo sapiens
  ref <308>: DATABASE ACCESSION NUMBER: SWISS-Prot / P30825
  ref <309>: DATABASE ENTRY DATE: 2001-10-16
MGCKVLLNIGQQMLRRKVVDCSREETRLSRCLNTFDLVALGVGSTLGAGVYVLAGAVARENAGPAIVISFLIAALASVLAGLCYGEFGARVPKTGSAYLYSYVTVGELWAFITGWNLILSYIIGTSSVARAWSATFDELIGRPIGEFSRTHMTLNAPGVLAENPDIFAVIIILILTGLLTLGVKESAMVNKIFTCINVLVLGFIMVSGFVKGSVKNWQLTEEDFGNTSGRLCLNNDTKEGKPGVGGFMPFGFSGVLSGAATCFYAFVGFDCIATTGEEVKNPQKAIPVGIVASLLICFIAYFGVSAALTLMMPYFCLDNNSPLPDAFKHVGWEGAKYAVAVGSLCALSASLLGSMFPMPRVIYAMAEDGLLFKFLANVNDRTKTPIIATLASGAVAAVMAFLFDLKDLVDLMSIGTLLAYSLVAACVLVLRYQPEQPNLVYQMASTSDELDPADQNELASTNDSQLGFLPEAEMFSLKTILSPKNMEPSKISGLIVNISTSLIAVLIITFCIVTVLGREALTKGALWAVFLLAGSALLCAVVTGVIWRQPESKTKLSFKVPFLPVLPILSIFVNVYLMMQLDQGTWVRFAVWMLIGFIIYFGYGLWHSEEASLDADQARTPDGNLDQCK

SEQ ID NO: 6428 - DNA, 419 bp, Rattus norvegicus; identical to SEQ ID NO: 6424
  ref <308>: DATABASE ACCESSION NUMBER: EMBL / AA957917
  ref <309>: DATABASE ENTRY DATE: 2000-03-03

SEQ ID NO: 6429 - protein, 624 aa, Rattus norvegicus; identical to SEQ ID NO: 6425
  ref <308>: DATABASE ACCESSION NUMBER: SWISS-Prot / P30823
  ref <309>: DATABASE ENTRY DATE: 2001-10-16

SEQ ID NO: 6430 - DNA, 2157 bp, Homo sapiens; identical to SEQ ID NO: 6426
  ref <308>: DATABASE ACCESSION NUMBER: EMBL / X59155
  ref <309>: DATABASE ENTRY DATE: 1991-11-05

SEQ ID NO: 6431 - protein, 629 aa, Homo sapiens; identical to SEQ ID NO: 6427
  ref <308>: DATABASE ACCESSION NUMBER: SWISS-Prot / P30825
  ref <309>: DATABASE ENTRY DATE: 2001-10-16

SEQ ID NO: 6432 - DNA, 479 bp, Rattus norvegicus
  ref <308>: DATABASE ACCESSION NUMBER: EMBL / AA957961
  ref <309>: DATABASE ENTRY DATE: 2000-03-03
tttttttttttttttttccttcctgggatggggggcaaataactttactacaattagtatgtatggtgcagaatttcatgcaaatgaagtgtgccagcagtgtgataatttaaacatatttaaacaaaagacgaatgcacaaaattgctgctgcttagatcactgcagcttctaggacccagtttcttttactgatttaaaaacaaaatgaaaaaaaaaataataaaaaagttgtgcctgaaatgaatcctgttttttttataagtagccccctggttccagtgccctgttgaatacaggcacttgatccttggtgcagcttctgttcaactttgtatcacgggaacggattggcctgatttcttggccttcctcttgaattggccccaaacagggtccctggcaagtggagtgaaggctttttgtctaaagatgacaagggtcagctcaggggttgtggcggagggcgttttcatctt

SEQ ID NO: 6433 - protein, 798 aa, Rattus norvegicus
  ref <308>: DATABASE ACCESSION NUMBER: SWISS-Prot / P18395
  ref <309>: DATABASE ENTRY DATE: 2001-10-16
MSFDPNLLHNNGHNGYPNGTSAALRETGVIEKLLTSYGFIQCSERQARLFFHCSQYNGNLQDLKVGDDVEFEVSSDRRTGKPIAIKLVKIKPEIHPEERMNGQVVCAVPHNLESKSPAAPGQSPTGSVCYERNGEVFYLTYTSEDVEGNVQLETGDKINFVIDNNKHTGAVSARNIMLLKKKQARYQGVVCAMKEAFGFIERGDVVKEIFFHYSEFKGDLETLQPGDDVEFTIKDRNGKEVATDVRLLPQGTVIFEDISIEHFEGTVTKVIPKVPSKNQNDPLPGRIKVDFVIPKELPFGDKDTKSKVTLLEGDHVRFNISTDRRDKLERATNIEVLSNTFQFTNEAREMGVIAAMRDGFGFIKCVDRDARMFFHFSEILDGNQLHIADEVEFTVVPDMLSAQRNHAIRIKKLPKGTVSFHSHSDHRFLGTVEKEATFSNPKTTSPNKGKDKEAEDGIIAYDDCGVKLTIAFQAKDVEGSTSPQIGDKVEFSISDKQRPGQQIATCVRLLGRNSNSKRLLGYVATLKDNFGFIETANHDKEIFFHYSEFSGDVDSLELGDMVEYSLSKGKGNKVSAEKVNKTHSVNGITEEANPTIYSGKVIRPLRGVDPTQIEYQGMIEIVEEGDMKGEVYPFGIVGMANKGDCLQKGESVKFQLCVLGQNAQTMAYNITPLRRATVECVKDQFGFINYEVGDSKKLFFHVKEVQDGIELQAGDEVEFSVILNQRTGKCSACNVWRVCEGPKAVAAPRPDRLVNRLKNITLDDASAPRLMVLRQPRGPDNSMGFGAERKIRQAGVID

SEQ ID NO: 6434 - DNA, 2537 bp, Homo sapiens
  ref <308>: DATABASE ACCESSION NUMBER: EMBL / AY049788
  ref <309>: DATABASE ENTRY DATE: 2001-10-27
gagtatcactgcgagatgagctttgatccaaaccttctccacaacaatggacataatgggtaccctaatggtacttcagcagcactgcgtgaaactggggttattgaaaaactgttaacctcttacggatttattcagtgttcagaacgtcaagctagacttttcttccactgttcacagtataatggcaacctgcaagacttaaaagtaggagatgatgttgaatttgaagtatcatcggaccgacggactgggaaacccattgctgttaaactggtgaagataaaacaagaaatcctccctgaagaacgaatgaatggacaagaagtgttttatctgacttacacccctgaagatgtcgaagggaacgttcagctggaaactggagataaaataaactttgtaattgataacaataaacatactggtgctgtaagtgctcgcaacattatgctgttgaaaaagaaacaagcccgctgtcagggagtagtttgtgccatgaaggaggcatttggctttattgaaagaggtgatgttgtaaaagagatattctttcactatagcgaatttaagggtgacttagaaaccttacagcctggcgatgatgtggaattcacaatcaaggacagaaatggtaaagaagttgcaacagatgtcagactattgcctcaaggaacagtcatttttgaagatatcagcattgaacattttgaaggaactgtaaccaaagttatcccaaaagtacccagtaaaaaccagaatgacccattgccaggacgcatcaaagttgactttgtgatccctaaagaacttccctttggagacaaagatacgaaatccaaggtgaccctgctggaaggtgaccatgttaggtttaatatttcaacagaccgacgtgacaaattagagcgagcaaccaatatagaagttctgtcaaatacatttcagttcactaatgaagcccgagaaatgggtgtgattgctgccatgagagatggttttggtttcatcaagtgtgtggatcgtgatgttcgtatgttcttccacttcagtgaaattctggatgggaaccagctccatattgcagatgaagtagagtttactgtggttcctgatatgctctctgctcaaagaaatcatgctattaggattaaaaaacttcccaagggcacggtttcatttcattcccattcagatcaccgttttctgggcacggtagaaaaagaagccactttttccaatcctaaaaccactagcccaaataaaggcaaagagaaggaggctgaggatggcattattgcttatgatgactgtggggtgaaactgactattgcttttcaagccaaggatgtggaaggatctacttctcctcaaataggagataaggttgaatttagtattagtgacaaacagaggcctggacagcaggttgcaacttgtgtgcgacttttaggtcgtaattctaactccaagaggctcttgggttatgtggcaactctgaaggataattttggatttattgaaacagccaatcatgataaggaaatctttttccattacagtgagttctctggtgatgttgatagcctggaactgggggacatggtcgagtatagcttgtccaaaggcaaaggcaacaaagtcagtgcagaaaaagtgaacaaaacacactcagtgaatggcattactgaggaagctgatcccaccatttactctggcaaagtaattcgccccctgaggagtgttgatccaacacagactgagtaccaaggaatgattgagattgtggaggagggcgatatgaaaggtgaggtctatccatttggcatcgttgggatggccaacaaaggggattgcctgcagaaaggggagagcgtcaagttccaattgtgtgtcctgggccaaaatgcacaaactatggcttacaacatcacacccctgcgcagggccacagtggaatgtgtgaaagatcagtttggcttcattaactatgaagtaggagatagcaagaagctctttttccatgtgaaagaagttcaggatggcattgagctacaggcaggagatgaggtggagttctcagtgattcttaatcagcgcactggcaagtgcagcgcctgtaatgtttggcgagtctggtgagggccccaaggctgttgcagctcctcgacctgatcggttggtcaatcgcttgaagaatatcactctggatgatgccagtgctcctcgcctaatggttcttcgtcagccaaggggaccagataactcaatggggtttggtgcagaaagaaagatccgtcaagctggtgtcattgactaaccacatccacaaagcacaccattaatccactatgatcaagttggggggaatctggtgaagggttctgaatatctccctcttcatccctcccgaaatctggaatacttattctattgagctattacaccagttttaacaccttcctcgtgttatgtttaaaaaaataaataaatttaagaaaaccattttaaataatgcacagttgcagcctggaaaa

SEQ ID NO: 6435 - protein, 798 aa, Homo sapiens
  ref <308>: DATABASE ACCESSION NUMBER: SWISS-Prot / O75534
  ref <309>: DATABASE ENTRY DATE: 2001-10-16
MSFDPNLLHNNGHNGYPNGTSAALRETGVIEKLLTSYGFIQCSERQARLFFHCSQYNGNLQDLKVGDDVEFEVSSDRRTGKPIAVKLVKIKQEILPEERMNGQVVCAVPHNLESKSPAAPGQSPTGSVCYERNGEVFYLTYTPEDVEGNVQLETGDKINFVIDNNKHTGAVSARNIMLLKKKQARCQGVVCAMKEAFGFIERGDVVKEIFFHYSEFKGDLETLQPGDDVEFTIKDRNGKEVATDVRLLPQGTVIFEDISIEHFEGTVTKVIPKVPSKNQNDPLPGRIKVDFVIPKELPFGDKDTKSKVTLLEGDHVRFNISTDRRDKLERATNIEVLSNTFQFTNEAREMGVIAAMRDGFGFIKCVDRDVRMFFHFSEILDGNQLHIADEVEFTVVPDMLSAQRNHAIRIKKLPKGTVSFHSHSDHRFLGTVEKEATFSNPKTTSPNKGKEKEAEDGIIAYDDCGVKLTIAFQAKDVEGSTSPQIGDKVEFSISDKQRPGQQVATCVRLLGRNSNSKRLLGYVATLKDNFGFIETANHDKEIFFHYSEFSGDVDSLELGDMVEYSLSKGKGNKVSAEKVNKTHSVNGITEEADPTIYSGKVIRPLRSVDPTQTEYQGMIEIVEEGDMKGEVYPFGIVGMANKGDCLQKGESVKFQLCVLGQNAQTMAYNITPLRRATVECVKDQFGFINYEVGDSKKLFFHVKEVQDGIELQAGDEVEFSVILNQRTGKCSACNVWRVCEGPKAVAAPRPDRLVNRLKNITLDDASAPRLMVLRQPRGPDNSMGFGAERKIRQAGVID

SEQ ID NO: 6436 - DNA, 473 bp, Rattus norvegicus
  ref <308>: DATABASE ACCESSION NUMBER: EMBL / AA963447
  ref <309>: DATABASE ENTRY DATE: 2000-03-03
tttttttttttttttttgaaagtgccatcttttatttatcctaattgaattttaaatgtccttttgacacaaaaaggtatatacatgacacagctacacaaccttttttaactggacaacaagtgtcaaaaccctgtggatgtatagggtgaaacaagattggtcaggagaagagaattgttcctataactgcaatctgacacaatgtcctattgccattaacaaagcaaaaaaaaaaggtccatttcagtttattcaagttttttttcttggtattttatccctcttgataagaaaaaaaaaatcagacttttgtaatttgtgaatgctgatcttcatcaaaaggttcattctctggatcagagtcagtggtgtcagaatatctataatgatcaggttcattgtcactaacgtctggagtcacagaagttgaactgctagcctctggatttgatggttcctctactgttttt

SEQ ID NO: 6437 - protein, 403 aa, Rattus norvegicus
  ref <308>: DATABASE ACCESSION NUMBER: Refseq / NP_113794
  ref <309>: DATABASE ENTRY DATE: 2002-11-05
MTAIIKEIVSRNKRRYQEDGFDLDLTYIYPNIIAMGFPAERLEGVYRNNIDDVVRFLDSKHKNHYKIYNLCAERHYDTAKFNCRVAQYPFEDHNPPQLELIKPFCEDLDQWLSEDDNHVAAIHCKAGKGRTGVMICAYLLHRGKFLKAQEALDFYGEVRTRDKKGVTIPSQRRYVYYYSYLLKNHLDYRPVALLFHKMMFETIPMFSGGTCNPQFVVCQLKVKIYSSNSGPTRREDKLMYFEFPQPLPVCGDIKVEFFHKQNKMLKKDKMFHFWVNTFFIPGPEETSEKVENGSLCDQEIDSICSIERADNDKEYLVLTLTKNDLDKANKDKANRYFSPNFKVKLYFTKTVEEPSNPEASSSTSVTPDVSDNEPDHYRYSDTTDSDPENEPFDEDQHSQITKV

SEQ ID NO: 6438 - DNA, 804 bp, Homo sapiens
  ref <308>: DATABASE ACCESSION NUMBER: EMBL / BI823499
  ref <309>: DATABASE ENTRY DATE: 2001-10-08
ccgacgagcgctgcactaacgcaggatccggctgccgaaggtcctcgccagcaggatgaagttaaaggaagtagatcgtacagccatgcaggcatggagccctgcccagaatcaccccatttacctagcaacaggaacatctgctcagcaattggatgcaacatttagtacgaatgcttcccttgagatatttgaattagacctctctgatccatccttggatatgaaatcttgtgccacattctcctcttctcacaggtaccacaagttgatttgggggccttataaaatggattccaaaggagatgtctctggagttctgattgcaggtggtgaaaatggaaatattattctctatgatccttctaaaattatagctggagacaaggaagttgtgattgcccagaatgacaagcatactggcccagtgagagccttggatgtgaacattttccaggtgaagctgtacttcacaaaaacagtagaggagccgtcaaatccagaggctagcagttcaacttctgtaacaccagatgttagtgacaatgaacctgatcattatagatattctgacgaccactgactctgatccagagaatgaaccttttgatgaagatcagcatacacaaattacaaaagtctgaatttttttttatcaagagggataaaacaccatgaaaatcaacttgaataacctgaaaatggaccttttttttttttaatggcaataggacatggtgtcagattaccagttatcggaacaattctcttttcctgaccaaatcttgttttaccctatacatc

SEQ ID NO: 6439 - protein, 403 aa, Homo sapiens [sequence omitted]

SEQ ID NO: 6440 - DNA, 386 bp, Rattus norvegicus
  misc_feature (1)..(386): n=a, c, g or t
  ref <308>: DATABASE ACCESSION NUMBER: EMBL / AA963682
  ref <309>: DATABASE ENTRY DATE: 2000-03-03
ttttttttttaatgcagaaggataaagaaaatcaccttttttttttatttagcatgagccaatttacagagcatggagactcactttcattcccggcgctgacacgcgtgcactaagcaagtgcaatgtaagatacaagaagccatgttgttcagactcagcctcaagtaatttggtgtcactttcggagaagacagacagacaacgacacctgtgccaccggaaggagggacagcacacgatggagcgatcaaatccagaagacacactgaaattactaaatccacaacagctcgccttagttttcttggacccanactaactgtcagggtataaacactgtttgtttgggtccanaaaaaacctttgcgggcctcgtgccgaat

SEQ ID NO: 6441 - protein, 751 aa, Rattus norvegicus; identical to SEQ ID NO: 1043
  ref <308>: DATABASE ACCESSION NUMBER: SWISS-Prot / P97570
  ref <309>: DATABASE ENTRY DATE: 2002-06-15

SEQ ID NO: 6442 - DNA, 3470 bp, Homo sapiens; identical to SEQ ID NO: 1044
  ref <308>: DATABASE ACCESSION NUMBER: EMBL / AL136710
  ref <309>: DATABASE ENTRY DATE: 2002-03-20

SEQ ID NO: 6443 - protein, 812 aa, Homo sapiens; identical to SEQ ID NO: 1045
  misc_feature (1)..(812): Xaa=Unknown amino acid

SEQ ID NO: 6444 - DNA, 386 bp, Rattus norvegicus; identical to SEQ ID NO: 6440
  misc_feature (1)..(386): n=a, c, g or t
  ref <308>: DATABASE ACCESSION NUMBER: EMBL / AA963682
  ref <309>: DATABASE ENTRY DATE: 2000-03-03

SEQ ID NO: 6445 - protein, 751 aa, Rattus norvegicus; identical to SEQ ID NO: 1043
  ref <308>: DATABASE ACCESSION NUMBER: SWISS-Prot / P97570
  ref <309>: DATABASE ENTRY DATE: 2002-06-15

SEQ ID NO: 6446 - DNA, 3470 bp, Homo sapiens; identical to SEQ ID NO: 1044
  ref <308>: DATABASE ACCESSION NUMBER: EMBL / AL136710
  ref <309>: DATABASE ENTRY DATE: 2002-03-20

SEQ ID NO: 6447 - protein, 812 aa, Homo sapiens; identical to SEQ ID NO: 1045
  misc_feature (1)..(812): Xaa=Unknown amino acid

SEQ ID NO: 6448 - DNA, 407 bp, Rattus norvegicus
  ref <308>: DATABASE ACCESSION NUMBER: EMBL / AA963857
  ref <309>: DATABASE ENTRY DATE: 2000-03-03
cggccgcaaaggtttttttttcctggtgcactgacttgccagtgtcccagtgcctgtgctgccctgcagcaccttgtggccctcctacataaagggagccaccttcttttttcttttcttttttttttttttaccttgtatgcctcctctcaccgccattaagtaggagactaaccacgtgttatgttttcgaaaatcaaatggtatctttatgaggaaggtaaattttagtggtaggatagattgtcttttttgcaaaaaaaaaaaacaaaaaaaattcaagttgtgccaaattattttcttacatttgactgctggaacatggttgtcatgtttccctcttttctctttctctgcatggatttctttgacaaaaaaaataaataaacattcaaatcctcgtgccg

SEQ ID NO: 6449 - protein, 597 aa, Rattus norvegicus; identical to SEQ ID NO: 3443
  ref <308>: DATABASE ACCESSION NUMBER: SWISS-Prot / P13265
  ref <309>: DATABASE ENTRY DATE: 1996-10-01

SEQ ID NO: 6450 - DNA, 2130 bp, Homo sapiens; identical to SEQ ID NO: 3444
  ref <308>: DATABASE ACCESSION NUMBER: EMBL / L47125
  ref <309>: DATABASE ENTRY DATE: 1999-07-02

SEQ ID NO: 6451 - protein, 580 aa, Homo sapiens; identical to SEQ ID NO: 3445
  ref <308>: DATABASE ACCESSION NUMBER: SWISS-Prot / P51654
  ref <309>: DATABASE ENTRY DATE: 2002-06-15

SEQ ID NO: 6452 - DNA, 450 bp, Rattus norvegicus
  ref <308>: DATABASE ACCESSION NUMBER: EMBL / AA965154
  ref <309>: DATABASE ENTRY DATE: 2000-03-03
tttttttttttttactgctcggacgcggagcgagaagctgagagagtcggagacgctatccgcttccatccgtcgtgcagaccctgccggagccgctgccgctatggatgatcgggaggatctggtgtaccaggcgaagctggcagagcaggccgagcgatacgacgaaatggtggaatcaatgaagaaagtagcaggaatggacgtggagctgacagttgaagaacgaaaccttttatctgttgcatataaaaatgtgattggagccagaagaacatcctggagaataatcagcagcattgaacagaaggaagaaaacaagggaggagaggacaaattaaagatgattccggagtaccggcaaatggttgaaactgagctcaagttaatctgttgtgacattctggatgtactggacaagcacctcattccagcagctaacactggcga

SEQ ID NO: 6453 - protein, 255 aa, Rattus norvegicus; identical to SEQ ID NO: 1950
  ref <308>: DATABASE ACCESSION NUMBER: SWISS-Prot / P42655
  ref <309>: DATABASE ENTRY DATE: 2002-06-15

SEQ ID NO: 6454 - DNA, 1723 bp, Homo sapiens
  ref <308>: DATABASE ACCESSION NUMBER: EMBL / BC000179
  ref <309>: DATABASE ENTRY DATE: 2001-07-13
gtcgcgcagaccctgccggagccgctgccgctatggatgatcgagaggatctggtgtaccaggcgaagctggccgagcaggctgagcgatacgacgaaatggtggagtcaatgaagaaagtagcagggatggatgtggagctgacagttgaagaaagaaacctcctatctgttgcatataagaatgtgattggagctagaagagcctcctggagaataatcagcagcattgaacagaaagaagaaaacaagggaggagaagacaagctaaaaatgattcgggaatatcggcaaatggttgagactgagctaaagttaatctgttgtgacattctggatgtactggacaaacacctcattccagcagctaacactggcgagtccaaggttttctattataaaatgaaaggggactaccacaggtatctggcagaatttgccacaggaaacgacaggaaggaggctgcggagaacagcctagtggcttataaagctgctagtgatattgcaatgacagaacttccaccaacgcatcctattcgcttaggtcttgctctcaatttttccgtattctactacgaaattcttaattcccctgaccgtgcctgcaggttggcaaaagcagcttttgatgatgcaattgcagaactggatacgctgagtgaagaaagctataaggactctacacttatcatgcagttgttacgtgataatctgacactatggacttcagacatgcagggtgacggtgaagagcagaataaagaagcgctgcaggacgtggaagacgaaaatcagtgagacataagccaacaagagaaaccatctctgaccaccccctcctccccatcccaccctttggaaactccccattgtcactgagaaccaccaaatctgacttttacatttggtctcagaatttaggttcctgccctgttggtttttttttttttttttttaaacagttttcaaaagttcttaaaggcaagagtgaatttctgtggattttactggtcccagcttttaggttctttaagacactaacaggactacatagaggctttttcagcattactgtgtcgtctccgtgccagatgtggcaagatcaccattagcaaatggaaattacatttgaaagccattagacttacaggtgatgcaagcatctaagagagaggttaatcacactatagaggcataagtggtatcagttttcatttttctaattgtttaaactgtgttttataccagtgtttgcaagtaattgggtgttagcttgagatggttaaaggtggtttggggagggacttcgttgtaatggttttgctgtaaaaaatgtttccaactccgctgaaatgttgctgaaaagcatggtgctggtaacagttcaacaatccgtggctgctcattcttgcctactttactctcccactgaagcaggttagcgttgaaggtggtatggaaaagcctgcatgcctgttcaattcttttgtttcttctccttccccctccccctacctccttcccctcactcctcccctccttcgctcgctcaacctcttttgttcagtatgtgtaacttgaagctaatttgtactactggatatctgactggagccacagatacagaatctgtattgttcttactgaaacacagcatggaattaacattaaacttaaataaaacaaacctaaattaaaaatgccaaaaaaaaaaaaaaaaa

SEQ ID NO: 6455 - protein, 255 aa, Homo sapiens; identical to SEQ ID NO: 1950

SEQ ID NO: 6456 - DNA, 365 bp, Rattus norvegicus
  ref <308>: DATABASE ACCESSION NUMBER: EMBL / AA997614
  ref <309>: DATABASE ENTRY DATE: 2000-03-03
tttttttttttttttttccaggaaaactgcatttggcacgtcgtatgcaactcccttcccaaacacgggcgttgtcagccgaccgtagacctcttccgcattcaggtcttcgttcttactgttgaagagcagggcggctgcgtcactccccaaaaggtaagtgaaagtcttgcccaccatggtaaagctaaacacaggtccgtacttctcatatgcattttccaggaactcaattggacttttcccaaatgctatcgcgtggccaaggaacggaattggagagtaaatatatggcggacttttcgctccagcgggcagctggaccatgtggcccactgcgaggcggaacaggtagacaaggctaa

SEQ ID NO: 6457 - protein, 503 aa, Rattus norvegicus [sequence omitted]

SEQ ID NO: 6458 - DNA, 798 bp, Homo sapiens
  ref <308>: DATABASE ACCESSION NUMBER: EMBL / BG567904
  ref <309>: DATABASE ENTRY DATE: 2001-04-11
gttcaaattaagacaatttggtccactatgcttcgtttatatgaatttgatctcattgatggatactttcccactgtgaattatacaactatgattcacacccctgaaaacccagttatccgttacaaacgaagatcaaaatgaaaaaggttgcaaggaacgaatatatgtgattatcactgtaagccacaaaggcattcgaagagaatgaagtgtacaaaacaactcttgtagtttactgtttttttaagtgtgtaattctaaaagccagtttatgatttaggattgtgttaactgaatggttctatcaaatataatagcatttgaaacattttctaatagttatgatacttatacatgtgctttcaggaagttccttggtgaaacaattgttcaggggggatctaggtaattggcagattctaaataatataatttccagatagtaattttaagagtactcatcgctcttgccaaataagttcagggtattcaaatcttggactagtcctgcaagggtacaaaagaataaaaatcccagtgagatacttggaaaccacagtttattattatttatctgggcaattatgtgtgtgtgaggatggaagggtagggaataatcgaacatctaaagccttgaataagagaatactaattgtagggtatgatgatactcagaaattggagatattatagggaaaaagaaatccttgggaattttaactaaaattcactgatatgagaacattaggagatccagggacatatatggataagaatttctaaaataatggtaat

SEQ ID NO: 6459 - protein, 503 aa, Homo sapiens [sequence omitted]

SEQ ID NO: 6460 - DNA, 366 bp, Rattus norvegicus
  ref <308>: DATABASE ACCESSION NUMBER: EMBL / AA997806
  ref <309>: DATABASE ENTRY DATE: 2000-03-03
tttttttttttttttttcccatacctattactttaattaattttcatgaacaatcctatataggtattatccctatttttttttctgaaccagggttaggaaagccagattgctcgcgatctaatatgttacaatacaaatgagccaagttgaggggtatgctacacaataaggaagtatttatttgctttcccctccctcctactttccatcccgagtttgtcaagataactcagatcttgatttttctctaacttgtaaaaatatgtcatcttgagtttgggctgcttcagaattcttggtctttgtgccagcttggttgcaggtgtagttcctatgcgcttcctgctcttgctgttgactgca

SEQ ID NO: 6461 - protein, 511 aa, Rattus norvegicus
  ref <308>: DATABASE ACCESSION NUMBER: SWISS-Prot / P15129
  ref <309>: DATABASE ENTRY DATE: 2002-06-15
MVLNFLSPSLSRLGLWASVVILMVIVLKLFSLLLRRQKLARAMDSFPGPPTHWLFGHALEIQKLGSLDKVVSWAQQFPHAHPLWFGQFVGFLNIYEPDYAKAVYSRGDPKAADVYDFFLQWIGKGLLVLDGPKWFQHRKLLTPGFHYDVLKPYVAIFAESTRMMLDKWEKKASENKSFDIFCDVGHMALDTLMKCTFGKGDSGLGHRDNSYYLAVSDLTLLMQQRIDSFQYHNDFIYWLTPHGRRFLRACKIAHDHTDEVIRQRKAALQDEKERKKIQQRRHLDFLDILLGVRDESGIKLSDAELRAEVDTFMFEGHDTTTSGISWFLYCMALYPEHQQLCREEVRGILGDQDSFQWDDLAKMTYLTMCMKECFRLYPPVPQVYRQLNKPVTFVDGRSLPAGSLISLHIYALHRNSTVWPDPEVFDPLRFSPENAAGRHPFAFMPFSAGPRNCIGQQFAMNEMKVVTALCLLRFEFSLDPSKMPIKVPQLILRSKNGIHLYLKPLASRSGK

SEQ ID NO: 6462 - DNA, 2130 bp, Homo sapiens
  ref <308>: DATABASE ACCESSION NUMBER: EMBL / X16699
  ref <309>: DATABASE ENTRY DATE: 1993-09-12
atggtgcccagcttcctctccctgagcttctcctccttgggcctgtgggcttctgggctgatcttggtcttaggctttctcaagctcatccacctgctgctgcggaggcagacgttggctaaggctatggacaaattcccagggcctcccacccactggctttttggacatgccctcgagatccaggagacggggagcctggacaaagtggtgtcctgggcccaccagttcccgtatgcccacccactctggttcggacagttcattggcttcctgaacatctatgagcctgactatgccaaagctgtgtacagccgtggggaccctaaggcccctgatgtgtatgacttcttcctccagtggattgggagaggcctgctggttcttgaggggcccaagtggttgcagcaccgcaagctgctcacacctggctttcattatgatgtgctgaagccctatgtggccgtgttcactgagtctacacgtatcatgctggacaagtgggaagagaaagctcgggagggtaagtcctttgacatcttctgcgatgtgggtcacatggcgctgaacacactcatgaagtgcacctttggaagaggagacaccggcctgggccacagggacagcagctactaccttgcagtcagcgatctcactctgttgatgcagcagcgccttgtgtccttccagtaccataatgacttcatctactggctcaccccacatggccgccgcttcctgcgggcctgccaggtggcccatgaccatacagaccaggtcatcagggagcggaaggcagccctgcaggatgagaaggtgcggaagaagatccagaaccggaggcacctggacttcctggacattctcctgggtgcccgggatgaagatgacatcaaactgtcagatgcagacctccgggctgaagtggacacattcatgtttgaaggccatgacaccaccaccagtggtatctcctggtttctctactgcatggccctgtaccctgagcaccagcatcgttgtagagaggaggtccgcgagatcctaggggaccaggacttcttccagtgggatgatctgggcaaaatgacttatctgaccatgtgcatcaaggagagcttccgcctctacccacctgtgccccaggtgtaccgccagctcagcaagcctgtcacctttgtggatggccggtctctacctgcaggaagcctgatctctatgcatatctatgccctccataggaacagtgctgtatggcccgaccctgaggtctttgactctctgcgcttttccactgagaatgcatccaaacgccatccctttgcctttatgcccttctctgctgggcccaggaactgcattgggcagcagtttgccatgagtgagatgaaggtggtcacagccatgtgcttgctccgctttgagttctctctggacccctcacggctgcccatcaagatgccccagcttgtcctgcgctccaagaatggctttcacctccacctgaagccactgggccctgggtctgggaagtagctctgatgagaatggggtcccagatggctcaggctgtgacctccctgggcaccaccctccccaggctgggtgtggaggagttggggccccctgccgttcagagcttgtagtttagaagggaagtaggcattaccatagacgactcctagaggacagtgctatgtaaaaatgtgtgtctataatgtttatcatgcatgtattctagagctcattcatttattcaacaaacatttggtgagcacctatttcgttcgagaaacttcatttatctcctataattggcaaacttaaaaatgcagcagaaacttacattccaaccttagagactcatagtgagcacaaggaaagttttgccctgagattcatggttatggctgggtaccaccaaatagaagaatggcttaggggagtgccccttcacgagtgtgtttctttgttgaactttgtgtgtgtgtgtttagaatataacagacataagaaaaaattacctaaatgaagactgtacaaaataataaataattctgaagcagactctcttgtaaccatcactgaagtcaagaaatatggaatatggtatcactgatggtcttctgc

SEQ ID NO: 6463 - protein, 511 aa, Homo sapiens
  ref <308>: DATABASE ACCESSION NUMBER: SWISS-Prot / P13584
  ref <309>: DATABASE ENTRY DATE: 2002-06-15
MVPSFLSLSFSSLGLWASGLILVLGFLKLIHLLLRRRTLAKAMDKFPGPPTHWLFGHALEIQETGSLDKVVSWAHQFPYAHPLWFGQFIGFLNIYEPDYAKAVYSRGDPKAPDVYDFFLQWIGRGLLVLEGPKWLQHRKLLTPGFHYDVLKPYVAVFTESTRIMLDKWEEKAREGKSFDIFCDVGHMALNTLMKCTFGRGDTGLGHRDSSYYLAVSDLTLLMQQRLVSFQYHNDFIYWLTPHGRRFLRACQVAHDHTDQVIRERKAALQDEKVRKKIQNRRHLDFLDILLGARDEDDIKLSDADLRAEVDTFMFEGHDTTTSGISWFLYCMALYPEHQHRCREEVREILGDQDFFQWDDLGKMTYLTMCIKESFRLYPPVPQVYRQLSKPVTFVDGRSLPAGSLISMHIYALHRNSAVWPDPEVFDSLRFSTENASKRHPFAFMPFSAGPRNCIGQQFAMSEMKVVTAMCLLRFEFSLDPSRLPIKMPQLVLRSKNGFHLHLKPLGPGSGK

SEQ ID NO: 6464 - DNA, 524 bp, Rattus norvegicus
  ref <308>: DATABASE ACCESSION NUMBER: EMBL / AA997886
  ref <309>: DATABASE ENTRY DATE: 2000-03-03
cggccgccaaactttttttttcagagtaaaaccatttattgcacactaggaccccagcaagcacagtgagtgagatgctgtgcctccccttagcggggtgaagcacagagctggtaggggcgcggggtggtcagagcaccaaagatgccatagtcgctgggccggggctgtccagtgggcacggagaagctgaagcgctgcaggaggcaggtgaagaagaggaagagctccatgcgggccaggggctcccccaggcatgctctgcggcctgctgagaatggcatgaaggcctcatgcttcacaaagttgccctgggcatccaggaagtgttcagggtggaagcggaggggcttctcccagacggtctcatccttcagcactgaggacaggttggtgatgagggttgtccccttagggataaggaagccctgcacttcaatgtcacgagaagtcttgtgaggcacaccaagagggagaatgtctgcaaagcgctgcacctcatggatgacagcattggtgaacgg

SEQ ID NO: 6465 - protein, 500 aa, Rattus norvegicus
  ref <308>: DATABASE ACCESSION NUMBER: SWISS-Prot / Q64680
  ref <309>: DATABASE ENTRY DATE: 2002-06-15
MRMPTGSELWPIAIFTIIFLLLVDLMHRRQRWTSRYPPGPVPWPVLGNLLQIDFQNMPAGFQKLRCRFGDLFSLQLAFESVVVLNGLPALREALVKYSEDTADRPPLHFNDQSGFGPRSQGVVLARYGPAWRQQRRFSVSTFRHFGLGKKSLEQWVTEEARCLCAAFADHSGFPFSPNTLLDKAVCNVIASLLFACRFEYNDPRFIRLLDLLKDTLEEESGFLPMLLNVFPMLLHIPGLLGKVFSGKKAFVAMLDELLTEHKVTWDPAQPPRDLTDAFLAEVEKAKGNPESSFNDENLRVVVADLFMAGMVTTSTTLTWALLFMILRPDVQCRVQQEIDEVIGQVRRPEMADQARMPFTNAVIHEVQRFADILPLGVPHKTSRDIEVQGFLIPKGTTLIINLSSVLKDETVWEKPLRFHPEHFLDAQGNFVKHEAFMPFSAGRRACLGEPLARMELFLFFTCLLQRFSFSVPAGQPRPSNYGVFGALTTPRPYQLCASPR

SEQ ID NO: 6466 - DNA, 9432 bp, Homo sapiens
  ref <308>: DATABASE ACCESSION NUMBER: EMBL / M33388
  ref <309>: DATABASE ENTRY DATE: 2000-03-04
gaattcaagaccagcctggacaacttggaagaacccggtctctacaaaaaatacaaaattagctgggattgggtgcggtggctcatgcctataatcccagcactttgggagcctgaggtgggtggatcacctgaagtcaggagttcaagactagcctggccaacatggtgaaaccctatctctactgaaaatacaaaaagctagacgtggtggcacacacctgtaatcccagctacttaggaggctgaggcaggagaattgcttgaagcctagaggtgaaggttgtagtgagccgagattgcatcattgcacaatggaggggagccaccagcctgggcaacaagaggaaatctccgtctccaaaaaaaaaaaaaaaaaaaaaagaattaggctgggtggtgcctgtagtcccagctacttgggaggcagggggtccacttgatgtcgagactgcagtgagccatgatcctgccactgcactccggcctgggcaacagagtgagaccctgtctaaagaaaaaaaaaataaagcaacatatcctgaacaaaggatcctccataacgttcccaccagatttctaatcagaaacatggaggccagaaagcagtggaggaggacgaccctcaggcagcccgggaggatgttgtcacaggctggggcaagggccttccggctaccaactgggagctctgggaacagccctgttgcaaacaagaagccatagcccggccagagcccaggaatgtgggctgggctgggagcagcctctggacaggagtggtcccatccaggaaacctccggcatggctgggaagtggggtacttggtgccgggtctgtatgtgtgtgtgactggtgtgtgtgagagagaatgtgtgccctaagtgtcagtgtgagtctgtgtatgtgtgaatattgtctttgtgtgggtgattttctgcgtgtgtaatcgtgtccctgcaagtgtgaacaagtggacaagtgtctgggagtggacaagagatctgtgcaccatcaggtgtgtgcatagcgtctgtgcatgtcaagagtgcaaggtgaagtgaagggaccaggcccatgatgccactcatcatcaggagctctaaggccccaggtaagtgccagtgacagataagggtgctgaaggtcactctggagtgggcaggtgggggtagggaaagggcaaggccatgttctggaggaggggttgtgactacattagggtgtatgagcctagctgggaggtggatggccgggtccactgaaaccctggttatcccagaaggctttgcaggcttcaggagcttggagtggggagagggggtgacttctccgaccaggcccctccaccggcctaccctgggtaagggcctggagcaggaagcaggggcaagaacctctggagcagcccatacccgccctggcctgactctgccactggcagcacagtcaacacagcaggttcactcacagcagagggcaaaggccatcatcagctccctttataagggaagggtcacgcgctcggtgtgctgagagtgtcctgcctggtcctctgtgcctggtggggtgggggtgccaggtgtgtccagaggagcccatttggtagtgaggcaggtatggggctagaagcactggtgcccctggccgtgatagtggccatcttcctgctcctggtggacctgatgcaccggcgccaacgctgggctgcacgctacccaccaggccccctgccactgcccgggctgggcaacctgctgcatgtggacttccagaacacaccatactgcttcgaccaggtgagggaggaggtcctggagggcggcagaggtgctgaggctcccctaccagaagcaaacatggatggtgggtgaaaccacaggctggaccagaagccaggctgagaaggggaagcaggtttgggggacgtcctggagaagggcatttatacatggcatgaaggactggattttccaaaggccaaggaagagtagggcaagggcctggaggtggagctggacttggcagtgggcatgcaagcccattgggcaacatatgttatggagtacaaagtcccttctgctgacaccagaaggaaaggccttgggaatggaagatgagttagtcctgagtgccgtttaaatcacgaaatcgaggatgaagggggtgcagtgacccggttcaaaccttttgcactgtgggtcctcgggcctcactgcctcaccggcatggaccatcatctgggaatgggatgctaactggggcctctcggcaattttggtgactcttgcaaggtcatacctgggtgacgcatccaaactgagttcctccatcacagaaggtgtgacccccacccccgccccacgatcaggaggctgggtctcctccttccacctgctcactcctggtagccccgggggtcgtccaaggttcaaataggactaggacctgtagtctggggtgatcctggcttgacaagaggccctgaccctccctctgcagttgcggcgccgcttcggggacgtgttcagcctgcagctggcctggacgccggtggtcgtgctcaatgggctggcggccgtgcgcgaggcgctggtgacccacggcgaggacaccgccgaccgcccgcctgtgcccatcacccagatcctgggtttcgggccgcgttcccaaggcaagcagcggtggggacagagacagatttccgtgggacccgggtgggtgatgaccgtagtccgagctgggcagagagggcgcggggtcgtggacatgaaacaggccagcgagtggggacagcgggccaagaaaccacctgcactagggaggtgtgagcatggggacgagggcggggcttgtgacgagtgggcggggccactgccgagacctggcaggagcccaatgggtgagcgtggcgcatttcccagctggaatccggtgtcgaagtgggggcggggaccgcacctgtgctgtaagctcagtgtgggtggcgcggggcccgcggggtcttccctgagtgcaaaggcggtcagggtgggcagagacgaggtggggcaaagcctgccccagccaagggagcaaggtggatgcacaaagagtgggccctgtgaccagctggacagagccagggactgcgggagaccagggggagcatagggttggagtgggtggtggatggtggggctaatgccttcatggccacgcgcacgtgcccgtcccacccccaggggtgttcctggcgcgctatgggcccgcgtggcgcgagcagaggcgcttctccgtgtccaccttgcgcaacttgggcctgggcaagaagtcgctggagcagtgggtgaccgaggaggccgcctgcctttgtgccgccttcgccaaccactccggtgggtgatgggcagaagggcacaaagcgggaactgggaaggcgggggacggggaaggcgaccccttacccgcatctcccacccccaggacgcccctttcgccccaacggtctcttggacaaagccgtgagcaacgtgatcgcctccctcacctgcgggcgccgcttcgagtacgacgaccctcgcttcctcaggctgctggacctagctcaggagggactgaaggaggagtcgggctttctgcgcgaggtgcggagcgagagaccgaggagtctctgcagggcgagctcccgagaggtgccggggctggactggggcctcggaagagcaggatttgcatagatgggtttgggaaaggacattccaggagaccccactgtaagaagggcctggaggaggaggggacatctcagacatggtcgtgggagaggtgtgcccgggtcagggggcaccaggagaggccaaggactctgtacctcctatccacgtcagagatttcgattttaggtttctcctctgggcaaggagagagggtggaggctggcacttggggagggacttggtgaggtcagtggtaaggacaggcaggccctgggtctacctggagatggctggggcctgagacttgtccaggtgaacgcagagcacaggagggattgagaccccgttctgtctggtgtaggtgctgaatgctgtccccgtcctcctgcatatcccagcgctggctggcaaggtcctacgcttccaaaaggctttcctgacccagctggatgagctgctaactgagcacaggatgacctgggacccagcccagcccccccgagacctgactgaggccttcctggcagagatggagaaggtgagagtggctgccacggtggggggcaagggtggtgggttgagcgtcccaggaggaatgaggggaggctgggcaaaaggttggaccagtgcatcacccggcgagccgcatctgggctgacaggtgcagaattggaggtcatttgggggctaccccgttctgtcccgagtatgctctcggccctgctcaggccaaggggaaccctgagagcagcttcaatgatgagaacctgcgcatagtggtggctgacctgttctctgccgggatggtgaccacctcgaccacgctggcctggggcctcctgctcatgatcctacatccggatgtgcagcgtgagcccatctgggaaacagtgcaggggccgagggaggaagggtacaggcgggggcccatgaactttgctgggacacccggggctccaagcacaggcttgaccaggatcctgtaagcctgacctcctccaacataggaggcaagaaggagtgtcagggccggaccccctgggtgctgacccattgtggggacgcatgtctgtccaggccgtgtccaacaggagatcgacgacgtgatagggcaggtgcggcgaccagagatgggtgaccaggctcacatgccctacaccactgccgtgattcatgaggtgcagcgctttggggacatcgtccccctgggtgtgacccatatgacatcccgtgacatcgaagtacagggcttccgcatccctaaggtaggcctggcgccctcctcaccccagctcagcaccagcacctggtgatagccccagcatggctactgccaggtgggcccactctaggaaccctggccacctagtcctcaatgccaccacactgactgtccccacttgggtggggggtccagagtataggcagggctggcctgtccatccagagcccccgtctagtggggagacaaaccaggacctgccagaatgttggaggacccaacgcctgcagggagagggggcagtgtgggtgcctctgagaggtgtgactgcgccctgctgtggggtcggagagggtactgtggagcttctcgggcgcaggactagttgacagagtccagctgtgtgccaggcagtgtgtgtcccccgtgtgtttggtggcaggggtcccagcatcctagagtccagtccccactctcaccctgcatctcctgcccagggaacgacactcatcaccaacctgtcatcggtgctgaaggatgaggccgtctgggagaagcccttccgcttccaccccgaacacttcctggatgcccagggccactttgtgaagccggaggccttcctgcctttctcagcaggtgcctgtggggagcccggctccctgtccccttccgtggagtcttgcaggggtatcacccaggagccaggctcactgacgcccctcccctccccacaggccgccgtgcatgcctcggggagcccctggcccgcatggagctcttcctcttcttcacctccctgctgcagcacttcagcttctcggtgcccactggacagccccggcccagccaccatggtgtctttgctttcctggtgagcccatccccctatgagctttgtgctgtgccccgctagaatggggtacctagtccccagcctgctccctagccagaggctctaatgtacaataaagcaatgtggtagttccaactcgggtcccctgctcacgccctcgttgggatcatcctcctcagggcaaccccacccctgcctcattcctgcttaccccaccgcctggccgcatttgagacaggggtacgttgaggctgagcagatgtcagttacccttgcccataatcccatgtcccccactgacccaactctgactgcccagattggtgacaaggactacattgtcctggcatgtggggaaggggccagaatgggctgactagaggtgtcagtcagccctggatgtggtggagagggcaggactcagcctggaggcccatatttcaggcctaactcagcccaccccacatcagggacagcagtcctgccagcaccatcacaacagtcacctcccttcatatatgacaccccaaaacggaagacaaatcatggcgtcagggagctatatgccagggctacctacctcccagggctcagtcggcaggtgccagaacgttccctgggaaggccccatggaagcccaggactgagccaccaccctcagcctcgtcacctcaccacaggactggctacctctctgggccctcagggatgctgctgtacagacccctgaccagtgacgagttcgcactcagggccaggctggcgctggaggaggacacttgtttggctccaaccctaggtaccatcctcccagtagggatcaggcagggcccacaggcctgccctagggacaggagtcaaccttggacccataaggcactggggcgggcagagaaggaggaggtggcatgggcagctgagagccagagaccctgaccctagtccttgctctgccattaccccgtgtgaccccgggcccacccttccccacccttccccaccccgggcttctgtttccttctgccaacgagaaggctgcttcacctgccccgagtcctgtcttcctgctctgccttctggggctgtggcccttgctggcctggagccccaaccaagggcagggactgctgtcctccacgtctgtcctcaccgacataatgggctgggctgggcacacaggcagtgcccaagagtttctaatgagcatatgattacctgagtcctgggcagaccttcttagggaacagcctgggacagagaaccacagacactctgaggagccaccctgaggcctcttttgccagaggaccctacagcctccctggcagcagttccgccagcatttctgtaaatgccctcatgccagggtgcggcccggctgtcagcacgagagggacgttggtctgtcccctggcaccgagtcagtcagaagggtggccagggcccccttgggcccctccagagacaatccactgtggtcacacggctcggtggcaggaagtgctgttcctgcagctgtggggacagggagtgtggatgaagccaggctgggtttgtctgaagacggaggccccgaaaggtggcagcctggcctatagcagcagcaactcttggatttattggaaagattttcttcacggttctgagtcttgggggtgttagaggctcagaaccagtccagccagagctctgtcatgggcacgtagacccggtcccagggcctttgctctttgctgtcctcagaggcctctgcaaagtagaaacaggcagccttgtgagtcccctcctgggagcaaccaaccctccctctgagatgccccggggccaggtcagctgtggtgaaaggtagggatgcagccagctcagggagtggcccagagttcctgcccacccaaggaggctcccaggaaggtcaaggcacctgactcctgggctgcttccctcccctcccctccccaggtcaggaaggtgggaaagggctggggtgtctgtgaccctggcagtcactgagaagcagggtggaagcagccccctgcagcacgctgggtcagtggtcttaccagatggatacgcagcaacttccttttgaacctttttattttcctggcaggaagaagagggatccagcagtgagatcaggcaggttctgtgttgcacagacagggaaacaggctctgtccacacaaagtcggtggggccaggatgaggcccagtctgttcacacatggctgctgcctctcagctctgcacagacgtcctcgctcccctgggatggcagcttggcctgctggtcttggggttgagccagcctccagcactgcctccctgccctgctgcctcccactctgcagtgctccatggctgctcagttggacccacgctggagacgttcagtcgaagccccgggctgtccttacctcccagtctggggtacctgccacctcctgctcagcaggaatggggctaggtgcttcctcccctggggacttcacctgctctccctcctgggataagacggcagcctcctccttgggggcagcagcattcagtcctccaggtctcctgggggtcgtgacctgcaggaggaataagagggcagactgggcagaaaggccttcagagcacctcatcctcctgttctcacactggggtgtcacagtcctgggaagttcttccttttcagttgagctgtggtaaccttgtgagtttcctggagggggcctgccactacccttgggactccctgccgtgtgtctgggtctaactgagctctgaaaggagagagccccagccctgggccttccaggggaagccttacctcagaggttggcttcttcctactcttgactttgcgtctctgcagagggaggtgggaggggtgacacaaccctgacacccacactatgagtgatgagtagtcctgccccgactggcccatcctttccaggtgcagtcccccttactgtgtctgccaagggtgccagcacagccgccccactccaggggaagaggagtgccagcccttaccacctgagtgggcacagtgtagcatttattcattagcccccacactggcctgaccatctcccctgtgggctgcatgacaaggagagagaacaggctgaggtgagagctactgtcaacacctaaacctaaaaaatctataattgggctgggcagggtggctcacgcctgtaatcccagcactttgggaggccgagatgggtggatcacctgaggtcagatgttcgagaccagcctggccaacatggtgaaaccccgtctctactaaaaatacaaaaaattagctgggcgtggtggtgggtgcctgtaatcccagctactcaggaggctgaggcaggagaattgcttgaacctgggaggcagaggctgcagtgagccgagatcgcatcattgcactccagcctggtcaacaagagtgaaactgtcttaaaaaaaaaatctataattgatatctttagaaagataaaactttgcattcatgaaataagaataggagggtctaaaataaaaatgttcaaacacccaccaccactaattcttgacaaaaatatagtctgggtgccttagctcatgcctgtaatcccagcattttgggaggctaaggcaggaggattgtttgagcctaggaattc

SEQ ID NO: 6467 - protein, 497 aa, Homo sapiens
  ref <308>: DATABASE ACCESSION NUMBER: SWISS-Prot / AAA53500
  ref <309>: DATABASE ENTRY DATE: 2002-06-15
MGLEALVPLAVIVAIFLLLVDLMHRRQRWAARYPPGPLPLPGLGNLLHVDFQNTPYCFDQLRRRFGDVFSLQLAWTPVVVLNGLAAVREALVTHGEDTADRPPVPITQILGFGPRSQGVFLARYGPAWREQRRFSVSTLRNLGLGKKSLEQWVTEEAACLCAAFANHSGRPFRPNGLLDKAVSNVIASLTCGRRFEYDDPRFLRLLDLAQEGLKEESGFLREVLNAVPVLLHIPALAGKVLRFQKAFLTQLDELLTEHRMTWDPAQPPRDLTEAFLAEMEKAKGNPESSFNDENLRIVVADLFSAGMVTTSTTLAWGLLLMILHPDVQRRVQQEIDDVIGQVRRPEMGDQAHMPYTTAVIHEVQRFGDIVPLGMTHMTSRDIEVQGFRIPKGTTLITNLSSVLKDEAVWEKPFRFHPEHFLDAQGHFVKPEAFLPFSAGRRACLGEPLARMELFLFFTSLLQHFSFSVPTGQPRPSHHGVFAFLVSPSPYELCAVPR

SEQ ID NO: 6468 - DNA, 522 bp, Rattus norvegicus
  ref <308>: DATABASE ACCESSION NUMBER: EMBL / AI007614
  ref <309>: DATABASE ENTRY DATE: 2000-03-03
ggagagggttgtcctggccaagaactcagtcatttttctgtgtaccaagttttgcctaaattgtgcagatggttcttaaaaaagaaaggaaaggaaaaggaaatgtgtgcgtcttgttggagggccagaagttttgttgtgtaacagtattagcaaggcctgggctaagggtttaatgtccgttaagcctaaagtgcggcagcagctccaccacggtctgcacgcaccataggaaaggccagctttcctgtgggttctcatttcgtttcgttttgttttttgcctacctcaatgttcttaatgcattgagaggtgacttagcttaatggttttggcagaaaacatttaatgtttaatttaaccttaataccaaaactacctcgtgccgaattcttggcctcgagggccaaattccctatagtgagtcgtattaaattcgtaatcatgtcatagctgtttcctgtgtgaaattgttatccgctcacaattccacacaacatacgagccggaagcataaagtgt

SEQ ID NO: 6469 - DNA, 569 bp, Rattus norvegicus
  ref <308>: DATABASE ACCESSION NUMBER: EMBL / AI007824
  ref <309>: DATABASE ENTRY DATE: 2000-03-03
cctcactatagggaataagcttgcggacgctaaagttttttttttttttttttttttttttttttagtattactttgacttgtgagtctaggttaaaatcattcggaggattttttattctccgaggtcaccccaaccgaaattttttagttcatatttattttgttttagcccattaggttgtttttatataagttgaactagtaaattgaagctccatagggtcttctcgtcttattgggagattccagcctcttcactggaaggtcaatttcactgattgaaagtaagagacagttgaaccctcgtttagccattcattctagtccctaattaaggaacaagtgattatgctacctttgcacggtcaggataccgcggccgtttaactttagtcactgggcaggcaatgcctctaatacttgttatgctagaggtgatgtttttggtaaacaggcggggttcgtgtttgccgagttccttttactttttttaatctttccttaaagcacgcctgtgttgggctaacgagttagggataagtaattttattgttgggttagtaccta

SEQ ID NO: 6470 - protein, 123 aa, Rattus norvegicus
  ref <308>: DATABASE ACCESSION NUMBER: SWISS-Prot / CAA49904
  ref <309>: DATABASE ENTRY DATE: 2002-06-15
MEPCELQNELVSAEGRNRKAVLCQRCGSRVLQPGTALFSRRQLFLPSMRKKPDLVDGSNPDGDVLEEHWLVNDMFIFENVGFTKDVGNVKFLVCADCEIGPIGWHCLDDKNSFYVALERVSHE

SEQ ID NO: 6471 - DNA, 569 bp, Rattus norvegicus; identical to SEQ ID NO: 6469
  ref <308>: DATABASE ACCESSION NUMBER: EMBL / AI007824
  ref <309>: DATABASE ENTRY DATE: 2000-03-03

SEQ ID NO: 6472 - protein, 123 aa, Rattus norvegicus; identical to SEQ ID NO: 6470
  ref <308>: DATABASE ACCESSION NUMBER: SWISS-Prot / CAA49904
  ref <309>: DATABASE ENTRY DATE: 2002-06-15

SEQ ID NO: 6473 - DNA, 540 bp, Rattus norvegicus
  ref <308>: DATABASE ACCESSION NUMBER: EMBL / AI007835
  ref <309>: DATABASE ENTRY DATE: 2000-03-03
cccaacttaaatatgcctggaaggggaaaagattgcaattttggccttctttcacagatatactgcgctctctcaacactatgtgacaggcctgttaaccaccactcataaaagggctaagcagactgcagggaagcctcaggaacgcagagcatcaagtgttttccgtcgtttattcatatttcccctggactcatattaatacacaccaccaccacgtgtgggttagcggggggctacagtcagagcattcccagggactgaagaccttaacgttttcttctaacagtttggaacaattcacatatttattgatcatgacaaataaagtggttccttctacaatgttgagggggaaatgtactcattagtataatggttctcatctacagaattgatttacaggaagcaagtaatgaaggagtgttcaactactctactctcaaaccgaaagaacccttccaataccacaagactggtcttgttggtaaggaacggaaatcccatcaccagactaccaccataagagtatattcaata

SEQ ID NO: 6474 - protein, 433 aa, Rattus norvegicus
  ref <308>: DATABASE ACCESSION NUMBER: SWISS-Prot / O08875
  ref <309>: DATABASE ENTRY DATE: 2000-05-30
MLELIEVNGTPGSQLSTPRSGKSPSPSPTSPGSLRKQRISQHGGSSTSLSSTKVCSSMDENDGPGEEESDEGFQIPATITERYKVGRTIGDGNFAVVKECIERSTAREYALKIIKKSKCRGKEHMIQNEVSILRRVKHPNIVLLIEEMDVPTELYLVMELVKGGDLFDAITSTSKYTERDASGMLYNLASAIKYLHSLNIVHRDIKPENLLVYEHQDGSKSLKLGDFGLATIVDGPLYTVCGTPTYVAPEIIAETGYGLKVDIWAAGVITYILLCGFPPFRGSGDDQEVLFDQILMGQVDFPSPYWDNVSDSAKELINMMLLVNVDQRFSAVQVLEHPWVNDDGLPENEHQLSVAGKIKKHFNTGPKPSSTAAGVSVIATTALDKERQVFRRRRNQDVRGRYKAQPAPPELNSESEDYSPSSSETVRSPNSPF

SEQ ID NO: 6475 - DNA, 5703 bp, Homo sapiens
  ref <308>: DATABASE ACCESSION NUMBER: EMBL / AB002367
  ref <309>: DATABASE ENTRY DATE: 2001-10-10
gcacatccctgcactagtggccgcaaccgagacgccgcgctccagcagctgctgccgcccagcccggccccgccgccgccccccagccctgcagccccgcagccccggccgcgcccagcccggcgaggacagcaccaggaggcggcccccagcgcggccacaaagacccccggcggcgtctctccgcggaccggtcctacttgaagtccatcatgtccttcggcagagacatggagctggagcacttcgacgagcgggataaggcgcagagatacagccgagggtcgcgggtgaacggcctgccgagcccgacgcacagcgcccactgcagcttctaccgcacccgcacgctgcagacgctcagctccgagaagaaggccaagaaagttcgtttctatcgaaacggagatcgatacttcaaagggattgtgtatgccatctccccagaccggttccgatcttttgaggccctgctggctgatttgacccgaactctgtcggataacgtgaatttgccccagggagtgagaacaatctacaccattgatgggctcaagaagatttccagcctggaccaactggtggaaggagagagttatgtatgtggctccatagagcccttcaagaaactggagtacaccaagaatgtgaaccccaactggtcggtgaacgtcaagaccacctcggcttctcgggcagtgtcttcactggccactgccaaaggaagcccttcagaggtgcgagagaataaggatttcattcggcccaagctggtcaccatcatcagaagtggcgtgaagccacggaaagctgtcaggattctgctgaacaagaaaacggctcattcctttgagcaggtcctcaccgatatcaccgatgccatcaagctggactcgggagtggtgaaacgcctgtacacgttggatgggaaacaggtgatgtgccttcaggacttttttggtgatgatgacatttttattgcatgtggaccggagaagttccgttaccaggatgatttcttgctagatgaaagtgaatgtcgagtggtaaagtccacttcttacaccaaaatagcttcatcatcccgcaggagcaccaccaagagcccaggaccgtccaggcgtagcaagtcccctgcctccaccagctcagttaatggaacccctggtagtcagctctctactccgcgctcaggcaagtcgccaagcccatcacccaccagcccaggaagcctgcggaagcagaggagctctcagcatggcggctcctctacgtcacttgcgtccaccaaagtctgcagctcgatggatgagaacgatggccctggagaagaagtgtcggaggaaggcttccagattccagctacaataacagaacgatataaagtcggaagaacaataggagatggaaattttgctgttgtcaaggaatgtgtagaaagatcgactgctagagagtacgctctgaaaattatcaagaaaagcaaatgtcgaggcaaagagcacatgatccagaatgaagtgtctattttaagaagagtgaagcatcccaatatcgttcttctgattgaggagatggatgtgccaactgaactgtatcttgtcatggaattagtaaaggggggagacctttttgatgccattacttccactaacaaatacaccgagagagacgccagtgggatgctgtacaacctagccagcgccatcaaatacctgcatagcctgaacatcgtccaccgtgatatcaagccagagaacctgctggtgtatgagcaccaagatggcagcaaatcactgaagctgggtgactttggactggccaccattgtagacggccccctgtacacagtctgtggcaccccaacatacgtggctccagaaatcattgcagagactggatacggcctcaaggtggacatctgggcagcaggtgtaatcacttatatcctgctgtgtggtttccctccattccgtggaagtggtgatgaccaggaggtgctttttgatcagattttgatggggcaggtggactttccttctccatactgggataatgtttccgattctgcaaaggagctcattaccatgatgctgttggtcgatgtagatcagcgattttctgctgttcaagtacttgagcatccctgggttaatgatgatggcctcccagaaaatgaacatcagctgtcagtagctggaaagataaagaagcatttcaacacaggccccaagccgaatagcacagcagctggagtttctgtcatagcactggaccacgggtttaccatcaagagatcagggtctttggactactaccagcaaccaggaatgtattggataagaccaccgctcttgataaggagaggcaggttttccgacgaagacgcaaccaggatgtgaggagccggtacaaggcgcagccagctcctcccgaactcaactcggaatcggaagactactccccaagctcctccgagactgttcgctcccctaactcgcccttttaataagacccttttactcaaagtcctagcttaaccctttgagactctgagatttttttcccccaaatttgtgtaaaacagtttcatctgatctatctagcgctcaatgcttgaatggcagaactgaaagtgttttcaggtatctttgtagcggtttccctttactgaataagatgacacgtggtgattgtgaagatggtaatttgctgctaatagagtcctcaaagggttaaggccaatttgcaatttttttttaaacttagaagcaatgaatgttttcatcagtcaagctaggatctgcagtatgtaatatagcacttgttaaccctctgagtgcatagaattttattgagaattcttgtttgggaatttttcaggcctttggatgtatacacacatgtttcttgattttactgcagatcaaggggtgttgttagatgctgaaatgtccagaaaagaaggacatttagaatgatatcttgtttgtccttttctgtgggtttagaacgtggcaggtttataacttagacacacgcacggttctttcttcttcacaatcctattcagaaacagattttttttttcattagagatatgactgtcagttgcagtgagttctgcatcccaagtggagggaattgggtttgtggcaaagagcttgacccaggaaatagatggtgccccccaaattgtctccacatgaagatgtactgatgacgccccagaaatgctgcttccatatcagctgctgctagcgccagcgcagactctcagggagtcaccacagcttgtcttgtgcttggtgagtgagggtctctctactcagtgtcagacatctacaggaaagaaacaactggtggaaaagagcaataaattgcccggtgctctgcagggctggaatttcaaacagaaagagggaataagatcctgtgatttttctcacctgcttttccacgcactgtggtcatcactgtgcaatctacatctagtatgaaatccacacataggagagctggggcacaaggggactggaggcagttgctttgcaagatggctgaggagaaagcacactgggaacacaatccagaatgttctaacaataagttttcagtgaataaaccactggcaagacatttccatgtgcacctttaggttacctatatagtctcctaggaagatcaggatgaaagacctagatgatacccctgaggataaaacctccatcccctaaaatgattttttttaaataccactgtctttagctgtccaggaggtcagagtgttttttctgtctttgggccaagtcctgtctgagacctgtattttcactcttgttaccaaatctatctccctagtgcagtgtctccaggcctgagtttcttctggaacagattccattttagaatggggattcacaggttctgtgcatcaccacagtgctcagagaggattctcctggggtgtcttagaggcaggtgcccaactcaaatgtattcccaaggtttgctgggctctgggatccacgagacaaccagagagggatatctcatgaaatttgcatctggtggctgaacagtacctatgttctctgttttgaatatactttaatacctgagagtcttaaaatttgtgaacaacgtttctatagtcctttattttcaaatgcacattgatcttcacttgctgcatttttactcttcaaccctgaaactatggtctacattaatatggatttttaaatcacatgtcattacttttgcaacaccatcaccaaaattttttgctcttttacatttaggttcatctctgtggtctgtgttgtcctgacatgtaaaaagcatatcgtttattgaggtttttttcccccccttttagagcatccggaagtgataacacgcaaaatcacaaagtagcataaatcagtaaattagttgagttgtttttgggggggaggtgggggtagggggcacagaacaccagaaagagtgttggtgtgtaggtagattccatattaatgaggaacactgaactagttggaaattactgctttctctagaaatataaagcaaagcactattccaaggctatggagtagctctacagcctggcctcaactctaaaagtgtgaagaatgcaatgggcagagacctacctgcagtggactgtcattttcctttctttctctgaattactgctttttctgtgggcattaactatattgctacagcatctagtgtactgagcctgcggtgcatggctcaggccttttcccatcgacgtctagggggactctggaccgtgtgaagctagggggtgtttctcagcacactgcagaagggcagctcagaagaatgcagggcccattcagcatggggatcccagcacatcactgtagaatttgagtgatctatgctgaataaacagtggaatgtgaccagtcaagtagaaatcttgagtaatcagatggaatgcaatctttctaacattaagctaccaagatcctgaatgtcagagatgtactcagagggttaacagacaagcacaaggcatgctgactacattggtgtatccagattgctttgcttttagccagtgctttctaatttttttctcgacattcttgggatagttcaagtttgaaataattaagtggtggtgttctttaaggaatttctataaccaaattgatcttatttttgatttcacttatcatagaacaaatatgtatcattatggcagtgtatctatgtaattatcaatttaatcatcaccaccggtgtttccatattttttcccaagtatttaatatagctctcttatggtggtggcctggtgatggggaccgtctttcttttactgacacatgaccaatcatatggtattttcaagggaattttaagattcatcttttcagtttgatagtagactagttaaggaagaactctttcattacttgcatcgtgtaaatcatctctgtagacatgtgttcatattaatgaacacattttttctcaacattgtagcagaaatcattttattcgtcatgatcaatgaatatgtgatttgctccagatcgttagaaggaaaagtaagatttcagtcatcaaaaatgtttttaccgtagccctcatctaacttacacgtggtgcatattaaaataagcagagaaaaaaaaatgtgaataaactactgaaaac

SEQ ID NO: 6476 - protein, 740 aa, Homo sapiens; identical to SEQ ID NO: 621
  ref <308>: DATABASE ACCESSION NUMBER: SWISS-Prot / O15075
  ref <309>: DATABASE ENTRY DATE: 2002-06-15

SEQ ID NO: 6477 - DNA, 496 bp, Rattus norvegicus
  ref <308>: DATABASE ACCESSION NUMBER: EMBL / AI008131
  ref <309>: DATABASE ENTRY DATE: 2000-03-03
agcaaaactggtaaaaacaaaattgtaatcgttgaacatagcgctctggcaatcaagacgtttgaaaccgtcaatcttctggggcgaagaaagcactgtgcgacacttagaactctgattaacagacaaggtggtcacaaattttcctggcttgaagacttccacaactttcctgatcaggtcatcataggaggtctgacttaggtttgtttcaaagctaacataagaaaattctggttctggagtgatgtgaatattccaatatgttccatccgatttcattccattcattgagtagccacaaggattgaacagtgtggcatcaatgacagaacctggtatcaggtcacgaattccactctcacgagtgacatcctttgcagtaacaccatctttcatgtagaactggtccataactgctgggtcaagctcactcatcagaatttccacggtttgatctggctgattgattactcggctctctgggagcctcgtg

SEQ ID NO: 6478 - protein, 333 aa, Rattus norvegicus
  ref <308>: DATABASE ACCESSION NUMBER: SWISS-Prot / P17708
  ref <309>: DATABASE ENTRY DATE: 2001-10-16
MEAAHFFEGTEKLLEVWFSRQQSDASQGSGDLRTIPRSEWDVLLKDVQCSIISVTKTDKQEAYVLSESSMFVSKRRFILKTCGTTLLLKALVPLLKLARDYSGFDSIQSFFYSRKNFMKPSHQGYPHRNFQEEIEFLNAIFPNGAAYCMGRMNSDCWYLYTLDLPESRVINQPDQTLEILMSELDPAVMDQFYMKDGVTAKDVTRESGIRDLIPGSVIDATLFNPCGYSMNGMKSDGTYWTIHITPEPEFSYVSFETNLSQTSYDDLIRKVVEVFKPGKFVTTLFVNQSSKCRTVLSSPQKIDGFKRLDCQSAMFNDYNFVFTSFAKKQQQQS

SEQ ID NO: 6479 - DNA, 1686 bp, Homo sapiens
  ref <308>: DATABASE ACCESSION NUMBER: EMBL / BC000171
  ref <309>: DATABASE ENTRY DATE: 2001-07-13
ctggaacaatccgcagcggcggcggcagcggcgggagaagaggtttaatttagttgattttctgtggttgttggttgttcgctagtctcacggtgatggaagctgcacattttttcgaagggaccgagaagctgctggaggtttggttctcccggcagcagcccgacgcaaaccaaggatctggggatcttcgcactatcccaagatctgagtgggacatacttttgaaggatgtgcaatgttcaatcataagtgtgacaaaaactgacaagcaggaagcttatgtactcagtgagagtagcatgtttgtctccaagagacgtttcattttgaagacatgtggtaccaccctcttgctgaaagcactggttcccctgttgaagcttgctagggattacagtgggtttgactcaattcaaagcttcttttattctcgtaagaatttcatgaagccttctcaccaagggtacccacaccggaatttccaggaagaaatagagtttcttaatgcaattttcccaaatggagcagcatattgtatgggacgtatgaattctgactgttggtacttatatactctggatttcccagagagtcgggtaatcagtcagccagatcaaaccttggaaattctgatgagtgagcttgacccagcagttatggaccagttctacatgaaagatggtgttactgcaaaggatgtcactcgtgagagtggaattcgtgacctgataccaggttctgtcattgatgccacaatgttcaatccttgtgggtattcgatgaatggaatgaaatcggatggaacttattggactattcacatcactccagaaccagaattttcttatgttagctttgaaacaaacttaagtcagacctcctatgatgacctgatcaggaaagttgtagaagtcttcaagccaggaaaatttgtgaccaccttgtttgttaatcagagttctaaatgtcgcacagtgcttgcttcgccccagaagattgaaggttttaagcgtcttgattgccagagtgctatgttcaatgattacaattttgtttttaccagttttgctaagaagcagcaacaacagcagagttgattaagaaaaatgaagaaaaaacgcaaaaagagaacacatgtagaaggtggtggatgctttctagatgtcgatgctgggggcagtgctttccataaccaccactgtgtagttgcagaaagccctagatgtaatgatagtgtaatcattttgaattgtatgcattattatatcaaggagttagatatcttgcatgaatgctctcttctgtgtttaggtattctctgccactcttgctgtgaaattgaagtgcatgtagaaaaaaccttttactatatgaaactttacaacacttgtgaaagcaactcaatttggtttatgcacagtgtaatatttctccaagtatcatccaaaattccccacagacaaggctttcgtcctcattaggtgttggcctcagcctaaccctctaggactgttctattaaattgctgccagaattttacatccagttacctccactttctagaacatattctttactaatgttattgaaaccaatttctacttcatactgatgtttttggaaacagcaattaaagtttttcttccatgagttgagtccttaaaaaaaaaaaaaaaaaaaaaa

SEQ ID NO: 6480 - protein, 334 aa, Homo sapiens
  ref <308>: DATABASE ACCESSION NUMBER: SWISS-Prot / P17707
  ref <309>: DATABASE ENTRY DATE: 2002-06-15
MEAAHFFEGTEKLLEVWFSRQQPDANQGSGDLRTIPRSEWDILLKDVQCSIISVTKTDKQEAYVLSESSMFVSKRRFILKTCGTTLLLKALVPLLKLARDYSGFDSIQSFFYSRKNFMKPSHQGYPHRNFQEEIEFLNAIFPNGAGYCMGRMNSDCWYLYTLDFPESRVISQPDQTLEILMSELDPAVMDQFYMKDGVTAKDVTRESGIRDLIPGSVIDATMFNPCGYSMNGMKSDGTYWTIHITPEPEFSYVSFETNLSQTSYDDLIRKVVEVFKPGKFVTTLFVNQSSKCRTVLASPQKIEGFKRLDCQSAMFNDYNFVFTSFAKKQQQQQS

SEQ ID NO: 6481 - DNA, 496 bp, Rattus norvegicus; identical to SEQ ID NO: 6477
  ref <308>: DATABASE ACCESSION NUMBER: EMBL / AI008131
  ref <309>: DATABASE ENTRY DATE: 2000-03-03

SEQ ID NO: 6482 - protein, 333 aa, Rattus norvegicus; identical to SEQ ID NO: 6478
  ref <308>: DATABASE ACCESSION NUMBER: SWISS-Prot / P17708
  ref <309>: DATABASE ENTRY DATE: 2001-10-16

SEQ ID NO: 6483 - DNA, 1686 bp, Homo sapiens; identical to SEQ ID NO: 6479
  ref <308>: DATABASE ACCESSION NUMBER: EMBL / BC000171
  ref <309>: DATABASE ENTRY DATE: 2001-07-13

SEQ ID NO: 6484 - protein, 334 aa, Homo sapiens; identical to SEQ ID NO: 6480
  ref <308>: DATABASE ACCESSION NUMBER: SWISS-Prot / P17707
  ref <309>: DATABASE ENTRY DATE: 2002-06-15

SEQ ID NO: 6485 - DNA, 512 bp, Rattus norvegicus
  ref <308>: DATABASE ACCESSION NUMBER: EMBL / AI008423
  ref <309>: DATABASE ENTRY DATE: 2000-03-03
agtgcacgactgctctttttttactttaaaaatatttattagaaatgtacatttaattcgttttaaggaatggtctagacaagtgttaatatcacctcgaatttgtaaaactttacatcttgaagctatttacagatttacaagaactcatcccttcccaacaccagacaggacagctaagggcactgtcacttcactctgtacttgtagaaggaacacagcgtgtgggtaaagttccatcccagcgccagtgatagtccgtacagcacaatgagaggtgcaaatggatagagcaggaccactgtatttttcaaaaatggcaatgcactgtatcccaggaaggtcacatagatataatagccaaccgcgatcaaccataaggtatttccaactaaatatccaataaacgtgtctgtgagaataacatggttgatgaagaagagctggatgaaatgcaggatgacgaggagcggatagaaagcattcaagtgcacgtcgaaggcgtagcccca

SEQ ID NO: 6486 - protein, 259 aa, Rattus norvegicus
  ref <308>: DATABASE ACCESSION NUMBER: SWISS-Prot / AAB93932
  ref <309>: DATABASE ENTRY DATE: 2001-12-01
MLPSTSLNSSMYGNGALNSRDAARHTAGAKRYKYLRRLFRFRQMDFEFAAWQMLYLFTSPQRVYRNFHYRKQTKDQWARDDPAFLVLLSIWLCVSTIGFGFVLDMGFFETIKLLLWVVFIDCVGVGLLISTLMWFISNKYLVKRQSRDYDVEWGYAFDVHLNAFYPLLVILHFIQLFFINHVILTDTFIGYLVGNTLWLIAVGYYIYVTFLGYSALPFLKNTVVLLYPFAPLIVLYGLSLALGWNFTHTLCSFYKYRVK

SEQ ID NO: 6487 - DNA, 1094 bp, Homo sapiens
  ref <308>: DATABASE ACCESSION NUMBER: EMBL / AF077038
  ref <309>: DATABASE ENTRY DATE: 2001-05-31
gttgagggaagggaagcccgcccggtggcgctggggtcggctgctgggaggaggtggtgggctggttcggacgtgggtcgaggctgtagcaggactccaggaagatgttaccgagtacttcagtgaattccttagtgcaggggaacggagtcttgaattccagggatgcggcaagacacacagccggagcgaaacgctacaaatatctgagaaggcttttccgctttcggcaaatggactttgaatttgctgcctggcagatgctctacctgttcacatccccacagagagtttacagaaattttcattatcgaaaacagacgaaggaccagtgggccagagatgaccctgctttcttggtcctgttaagtatctggctctgtgtgtccactataggatttggctttgtgctggacatgggattctttgagacaataaagcttctcctttgggttgtactcatagattgtgtaggcgttggtcttctgatagcaactttaatgtggttcatctctaacaagtatttagtgaaacgacagagcagagactatgatgtggaatggggctatgcttttgatgtgcatctcaatgctttttatccactcctggtcattttgcattttatccagctttttttcatcaaccatgttatcctgacagacacatttattggatatttagttggaaataccttatggttggttgcagttggctattatatctatgtaactttcctgggatacagtgcattgccatttttgaaaaatacagtaattcttctgtatccatttgcacctctgattctgctctacgggctttccctggcactgggatggaacttcacccatactctctgttctttctataagtacagagtgaaataaaaagtgagaagaagattcaatcgtaactgtgtcaacagtattgtgaagtgatcatttcttgtaaaacttgtaaataaactatcatctttgtagatatcttaaaggtgtaaagtttgcaaatttgaagaaatatatattaacactgtggtcaggtacattccttaaaactaattaaatgtacatttctataataaatattttttaaactaa

SEQ ID NO: 6488 - protein, 259 aa, Homo sapiens
  ref <308>: DATABASE ACCESSION NUMBER: SWISS-Prot / AAD27771
  ref <309>: DATABASE ENTRY DATE: 2002-10-01
MLPSTSVNSLVQGNGVLNSRDAARHTAGAKRYKYLRRLFRFRQMDFEFAAWQMLYLFTSPQRVYRNFHYRKQTKDQWARDDPAFLVLLSIWLCVSTIGFGFVLDMGFFETIKLLLWVVLIDCVGVGLLIATLMWFISNKYLVKRQSRDYDVEWGYAFDVHLNAFYPLLVILHFIQLFFINHVILTDTFIGYLVGNTLWLVAVGYYIYVTFLGYSALPFLKNTVILLYPFAPLILLYGLSLALGWNFTHTLCSFYKYRVK

SEQ ID NO: 6489 - DNA, 607 bp, Rattus norvegicus
  ref <308>: DATABASE ACCESSION NUMBER: EMBL / AI008638
  ref <309>: DATABASE ENTRY DATE: 2000-03-03
ccagtggagagcacaaatgtattttggaatctgcttgttaacttgggtagcaagccagcagaggtcccatagccagctcgccaaccacccagagcccatctatctctccagacccgacagtcctcttgtcaaccgaggctccagagcgagggtcaagaggggtctcaggagataagaggcaggatctggtgacccaaggggcagcaagcggacgtgggcctctccttccaggaatggaacatggagggatgtgcggtgtgcagagacgggtgggcaaccagaggttccctttagtcttgagtcaacccctggagaaagtttaggacttggggtggttggtacagcagcccacataccccaacttcactcttcttctctattcatctcagacctgtccaactcccccagaatgcctgagagaaggggctagcaggaggcctgtgggggctgcagggtgaggggaagggtgaggggcaactctgaaacccccttgcccttcctgcctgtagtcccagtgcaatcaagagggaggattgagaaggtgtcagccacagaaggcagcatggcctgggaggcagggccaggaggcccctcagcctctggccgt

SEQ ID NO: 6490 - protein, 427 aa, Rattus norvegicus
  ref <308>: DATABASE ACCESSION NUMBER: SWISS-Prot / P70490
  ref <309>: DATABASE ENTRY DATE: 2000-05-30
MQFSRVLAALCGVLLCASGLFAASGDFCDSSLCLNGGTCLMGQDNDIYCLCPEGFTGLVCNETEKGPCSPNPCFHDAKCLVTEDTQRGDIFTEYICQCPVGYSGIHCELGCSTKLGLEGGAIADSQISASSVYMGFMGLQRWGPELARLYRTGIVNAWTASSYDSKPWIQVDFLRKMRVSGVMTQGASRAGRAEYLKTFKVAYSLDGRRFEFIQDESGTGDKEFMGNQDNNSLKINMFNPTLEAQYIRLYPVSCHRGCTLRFELLGCELHGCSEPLGLKNNTIPDSQITASSSYKTWNLRAFGWYPHLGRLDNQGKINAWTAQSNSAKEWLQVDLGTQKKVTGIITQGARDFGHIQYVASYKVAHSDDGVQWTVYEEQGTSKVFQGNLDNNSHKKNIFEKPFMARYVRVLPLSWHNRITLRLELLGC

SEQ ID NO: 6491 - DNA, 1934 bp, Homo sapiens
  ref <308>: DATABASE ACCESSION NUMBER: EMBL / U58516
  ref <309>: DATABASE ENTRY DATE: 1999-06-30
agaaccccgcggggtctgagcagcccagcgtgcccattccagcgcccgcgtccccgcagcatgccgcgcccccgcctgctggccgcgctgtgcggcgcgctgctctgcgcccccagcctcctcgtcgccctggatatctgttccaaaaacccctgccacaacggtggtttatgcgaggagatttcccaagaagtgcgaggagatgtcttcccctcgtacacctgcacgtgccttaagggctacgcgggcaaccactgtgagacgaaatgtgtcgagccactgggcatggagaatgggaacattgccaactcacagatcgccgcctcatctgtgcgtgtgaccttcttgggtttgcagcattgggtcccggagctggcccgcctgaaccgcgcaggcatggtcaatgcctggacacccagcagcaatgacgataacccctggatccaggtgaacctgctgcggaggatgtgggtaacaggtgtggtgacgcagggtgccagccgcttggccagtcatgagtacctgaaggccttcaaggtggcctacagccttaatggacacgaattcgatttcatccatgatgttaataaaaaacacaaggagtttgtgggtaactggaacaaaaacgcggtgcatgtcaacctgtttgagacccctgtggaggctcagtacgtgagattgtaccccacgagctgccacacggcctgcactctgcgctttgagctactgggctgtgagctgaacggatgcgccaatcccctgggcctgaagaataacagcatccctgacaagcagatcacggcctccagcagctacaagacctggggcttgcatctcttcagctggaacccctcctatgcacggctggacaagcagggcaacttcaacgcctgggttgcggggagctacggtaacgatcagtggctgcaggtggacctgggctcctcgaaggaggtgacaggcatcatcacccagggggcccgtaactttggctctgtccagtttgtggcatcctacaaggttgcctacagtaatgacagtgcgaactggactgagtaccaggaccccaggactggcagcagtaagatcttccctggcaactgggacaaccactcccacaagaagaacttgtttgagacgcccatcctggctcgctatgtgcgcatcctgcctgtagcctggcacaaccgcatcgccctgcgcctggagctgctgggctgttagtggccacctgccacccccaggtcttcctgctttccatgggcccgctgcctcttggcttctcagcccctttaaatcaccatagggctggggactggggaaggggagggtgttcagaggcagcaccaccacacagtcacccctccctccctctttcccaccctccacctctcacgggccctgccccagcccctaagccccgtcccctaacccccagtcctcactgtcctgttttcttaggcactgagggatctgagtaggtctgggatggacaggaaagggcaaagtagggcgtgtggtttccctgcccctgtccggaccgccgatcccaggtgcgtgtgtctctgtctctcctagcccctctctcacacatcacattcccatggtggcctcaagaaaggcccggaagccccaggctggagataacagcctcttgcccgtcggccctgcgtcggccctggggtaccatgtgccacaactgctgtggccccctgtccccaagacacttccccttgtctccctggttgcctctcttgccccttgtcctgaagcccagcgacacagaagggggtggggcgggtctatggggagaaagggagcgaggtcagaggagccggcatgggttggcagggtgggcgtttggggccctcatgctggcttttcaccccagaggacacaggcagcttccaaaatatatttatcttcttcacggg

SEQ ID NO: 6492 - protein, 387 aa, Homo sapiens
  ref <308>: DATABASE ACCESSION NUMBER: SWISS-Prot / Q08431
  ref <309>: DATABASE ENTRY DATE: 2001-10-16
MPRPRLLAALCGALLCAPSLLVALDICSKNPCHNGGLCEEISQEVRGDVFPSYTCTCLKGYAGNHCETKCVEPLGMENGNIANSQIAASSVRVTFLGLQHWVPELARLNRAGMVNAWTPSSNDDNPWIQVNLLRRMWVTGVVTQGASRLASHEYLKAFKVAYSLNGHEFDFIHDVNKKHKEFVGNWNKNAVHVNLFETPVEAQYVRLYPTSCHTACTLRFELLGCELNGCANPLGLKNNSIPDKQITASSSYKTWGLHLFSWNPSYARLDKQGNFNAWVAGSYGNDQWLQVDLGSSKEVTGIITQGARNFGSVQFVASYKVAYSNDSANWTEYQDPRTGSSKIFPGNWDNHSHKKNLFETPILARYVRILPVAWHNRIALRLELLGC

SEQ ID NO: 6493 - DNA, 496 bp, Rattus norvegicus
  ref <308>: DATABASE ACCESSION NUMBER: EMBL / AI008639
  ref <309>: DATABASE ENTRY DATE: 2000-03-03
cgctacagaaaataaaaactcaaaaaataaccaactctacacatgatccataatgtacatgggaaagtcctggtagagtgtgaaggaaaaccagagctgcccaatacaactggctgttgcctgtcagttagtagaaggtgtcttgccactgagattggattcaaaagtgcaaaaggaaagcattttaaaaaccaaacctagaattcaacttcgtatatggactcagttttattcactctagtaactaggtaaaaagtatacatgtctgtggtacagtcaatgcgtcccacgcttctacttcaacgtctacaaagtcaccaccaagggatcaatgatggcaaacgaagggcttaggataaccaaaaggtataaaaaagtttgcagtcttgccccaagatacaaaaactgaattttaaacaatgtcaaaacatacatgatttaaacagtatatgaaaaaaagtcacacatcaaatcaagtacaaaaatatccaaacta

SEQ ID NO: 6494 - protein, 552 aa, Rattus norvegicus
  ref <308>: DATABASE ACCESSION NUMBER: SWISS-Prot / O70437
  ref <309>: DATABASE ENTRY DATE: 2001-10-16
MDNMSITNTPTSNDACLSIVHSLMCHRQGGESETFAKRAIESLVKKLKEKKDELDSLITAITTNGAHPSKCVTIQRTLDGRLQVAGRKGFPHVIYARLWRWPDLHKNELKHVKYCQYAFDLKCDSVCVNPYHYERVVSPGIDLSGLTLQSNAPPSMLVKDEYVHDFEGQPSLPTEGHSIQTIQHPPSNRASTETYSAPALLAPSESNATSTTNFPNIPVASTSQPASILAGSHSEGLLQIASGPQPGQQQNGFTAQPATYHHNSTTTWTGSRTAPYTPNLPHHQNGHLQHHPPMPPHPGHYWPVHNELAFQPPISNHPAPEYWCSIAYFEMDVQVGETFKVPSSCPIVTVDGYVDPSGGDRFCLGQLSNVHRTEAIERARLHIGKGVQLECKGEGDVWVRCLSDHAVFVQSYYLDREAGRAPGDAVHKIYPSAYIKVFDLRQCHRQMQQQAATAQAAAAAQAAAVAGNIPGPGSVGGIAPAISLSAAAGIGVDDLRRLCILRMSFVKGWGPDYPRQSIKETPCWIEIHLHRALQLLDEVLHTMPIADPQPLD

SEQ ID NO: 6495 - DNA, 308 bp, Homo sapiens
  ref <308>: DATABASE ACCESSION NUMBER: EMBL / N74105
  ref <309>: DATABASE ENTRY DATE: 2000-03-04
agttggctttctcttttaatcaaaaacatactttgttacagagttctcaagaaaggttcgactattttttagccacagactttaaccaggcaaaagtatacagaaagccacaaaggaactcctgggactttcaactgaccagttgtccccaaagcagaagctacgagtggctcttctctggcttctggcatagctgcattcctctgaatttaggggaggaaacagttgggaaataccaccaccaaatctgtccccaacccccaactcacttcttctaaactgggctctgcagcccaccaggttttcat

SEQ ID NO: 6496 - DNA, 460 bp, Rattus norvegicus
  ref <308>: DATABASE ACCESSION NUMBER: EMBL / AI008836
  ref <309>: DATABASE ENTRY DATE: 2000-03-03
gagcctgttggcctaccaggacccttctttcctacttcacttttgcccttggcacggtatgcagcaatatccttttcatacttctcctttagtttagctgctttctgctcatacggttgtttatctttggcagattgctcagaccacatctcccccagtttctttgcagtatctccaatagacaggccggggtgttcacttttgatctttgggcgatgttcagagcaaaacaggaagaaggcagacggtggtctcttgggagcatttggatcttttttctttcctttcttatcaccttggggaaggaagtctctctgtggaggtctgagggaagagctcgcgccaggtagacgctgcgccgtcatcatgggcaagggggaccccaacaagccgcggggcaagatgtcctcgtacgccttcttcgtgcaaacctgccgggaggagcacaggaagaagcatt

SEQ ID NO: 6497 - protein, 209 aa, Rattus norvegicus; identical to SEQ ID NO: 2212
  ref <308>: DATABASE ACCESSION NUMBER: SWISS-Prot / P52925
  ref <309>: DATABASE ENTRY DATE: 2002-06-15

SEQ ID NO: 6498 - DNA, 1066 bp, Homo sapiens; identical to SEQ ID NO: 2213
  ref <308>: DATABASE ACCESSION NUMBER: EMBL / Z17240
  ref <309>: DATABASE ENTRY DATE: 1995-07-28

SEQ ID NO: 6499 - protein, 208 aa, Homo sapiens; identical to SEQ ID NO: 2214
  ref <308>: DATABASE ACCESSION NUMBER: SWISS-Prot / P26583
  ref <309>: DATABASE ENTRY DATE: 2002-06-15

SEQ ID NO: 6500 - DNA, 531 bp, Rattus norvegicus
  ref <308>: DATABASE ACCESSION NUMBER: EMBL / AI008852
  ref <309>: DATABASE ENTRY DATE: 2000-03-03
cgcaacgggtttgccgtcagaacgcaggtgttgtgaaagccaccgctaattcaaagcaaaaatgggaaaggaaaagactcacatcaacatcgtcgtaattggacacgtagattccggcaagtccaccacaaccggccacctgatctacaaatgtggtggaatcgacaaaagaaccattgaaaagtttgagaaggaggctgcggagatgggaaaaggctccttcaagtatgcctgggtcctggacaaactgaaagctgagcgtgagcgtggtatcactattgacatctccctgtggaagtttgagaccagcaagtactatgtgactatcattgatgccccaggacacagagacttcatcaagaacatgattacgggcacatctcaggctgactgcgctgtcctgattgttgctgctggtgttggggaatttgaagctggtatctccaagaacgggcagacccgtgagcatgctcttctggctacactttgggtgtgaaacaacttaattgtggtgtcaacaaaatggattcc

SEQ ID NO: 6501 - protein, 462 aa, Rattus norvegicus
  ref <308>: DATABASE ACCESSION NUMBER: SWISS-Prot / P20001
  ref <309>: DATABASE ENTRY DATE: 2001-10-16
MGKEKTHINIVVIGHVDSGKSTTTGHLIYKCGGIDKRTIEKFEKEAAEMGKGSFKYAWVLDKLKAERERGITIDISLWKFETSKYYVTIIDAPGHRDFIKNMITGTSQADCAVLIVAAGVGEFEAGISKNGQTREHALLAYTLGVKQLIVGVNKMDSTEPPYSQKRYEEIVKEVSTYIKKIGYNPDTVAFVPISGWNGDNMLEPSANMPWFKGWKVTRKDGSASGTTLLEALDCILPPTRPTDKPLRLPLQDVYKIGGIGTVPVGRVETGVLKPGMVVTFAPVNVTTEVKSVEMHHEALSEALPGDNVGFNVKNVSVKDVRRGNVAGDSKNDPPMEAAGFTAQVIILNHPGQISAGYAPVLDCHTAHIACKFAELKEKIDRRSGKKLEDGPKFLKSGDAAIVDMVPGKPMCVESFSDYPPLGRFAVRDMRQTVAVGVIKAVDKKAAGAGKVTKSAQKAQKAK

SEQ ID NO: 6502 - DNA, 436 bp, Homo sapiens
  misc_feature (1)..(436): n=a, c, g or t
  ref <308>: DATABASE ACCESSION NUMBER: EMBL / AA076035
  ref <309>: DATABASE ENTRY DATE: 2000-03-03
aattctgtgacagatttttggtcaagttgtttccattaaaaagtactgattttgaaaactaataacttaaaactgccacacacaaaaaaaatggtccacaacattctttccttctgaaggttttacgatgcattgttatcattaaccagtcttttactattaaacttaaatggccaattgagacaaacagttctgagaccgttcttccaccactgattaagactggggtggcaggtgttaaggggtaatattcatttagccttctgagctttctgggcagactttggtgactttgccagctccagcaagccttcttggtccacagctttgatggacacccacagccaactggtctggcctcatgtcacgaacagcaaagnnacccaagtggaggggtagtcagagaagctctccacacacatggggctgccaggaa

SEQ ID NO: 6503 - protein, 462 aa, Homo sapiens
  ref <308>: DATABASE ACCESSION NUMBER: SWISS-Prot / P04720
  ref <309>: DATABASE ENTRY DATE: 2002-06-15
MGKEKTHINIVVIGHVDSGKSTTTGHLIYKCGGIDKRTIEKFEKEAAEMGKGSFKYAWVLDKLKAERERGITIDISLWKFETSKYYVTIIDAPGHRDFIKNMITGTSQADCAVLIVAAGVGEFEAGISKNGQTREHALLAYTLGVKQLIVGVNKMDSTEPPYSQKRYEEIVKEVSTYIKKIGYNPDTVAFVPISGWNGDNMLEPSANMPWFKGWKVTRKDGNASGTTLLEALDCILPPTRPTDKPLRLPLQDVYKIGGIGTVPVGRVETGVLKPGMVVTFAPVNVTTEVKSVEMHHEALSEALPGDNVGFNVKNVSVKDVRRGNVAGDSKNDPPMEAAGFTAQVIILNHPGQISAGYAPVLDCHTAHIACKFAELKEKIDRRSGKKLEDGPKFLKSGDAAIVDMVPGKPMCVESFSDYPPLGRFAVRDMRQTVAVGVIKAVDKKAAGAGKVTKSAQKAQKAK

SEQ ID NO: 6504 - DNA, 440 bp, Rattus norvegicus
  ref <308>: DATABASE ACCESSION NUMBER: EMBL / AI008888
  ref <309>: DATABASE ENTRY DATE: 2000-03-03
acggtctctaaaaatatatatttagagagatagttttatacagttttctgaaaataattgtttggaaagaaacaaaatacaacgccgtttgggcatcacaaaggaagctgctcacagaggggtatttacttcgtggtcccaaacacggattccaaaggtgaagtatttggcaaaggggctgcagaatcagaagtaggttagctcatcgtgcttttctttgtcggtctggtaagaggacaaggtcaaaggcttgttctcatgagggaggggttcaaacaccctcaagtgcacacatttttcttcgccgacatcaaccttgatgaagaagttggtgccggccactacctgtctcctgaaggatatggctttaaagacatcaaacttctgatttgctttctcttcaagttgagacttcaccttgttggcgatctcctgcgtct

SEQ ID NO: 6505 - protein, 98 aa, Rattus norvegicus
  ref <308>: DATABASE ACCESSION NUMBER: SWISS-Prot / P01041
  ref <309>: DATABASE ENTRY DATE: 2002-06-15
MMCGAPSATMPATTETQEIADKVKSQLEEKANQKFDVFKAISFRRQVVAGTNFFIKVDVGEEKCVHLRVFEPLPHENKPLTLSSYQTDKEKHDELTYF

SEQ ID NO: 6506 - DNA, 338 bp, Homo sapiens
  ref <308>: DATABASE ACCESSION NUMBER: EMBL / AW451145
  ref <309>: DATABASE ENTRY DATE: 2000-02-21
tttttttttttttttttaaagcccctaaaaatatatatttagagagatcatatacagttttctgaaaataattatttggaaggatgcaaaatacaacgcagtttgagaatcacaacagaagctgctcaactcccttctctccatcaccgaggggggttttactacgtggtcccaaacacaggtgcaaaggagccccgaatcagaagtaggagagctcatcgtgcctttctttgttggtctgataggaagacagggtcaaaggcttgttttcatgggggaggggttgaaacaccctcaagtgcacgcatttatctccaccaacatcaaccttgatgaag

SEQ ID NO: 6507 - protein, 98 aa, Homo sapiens
  ref <308>: DATABASE ACCESSION NUMBER: SWISS-Prot / P04080
  ref <309>: DATABASE ENTRY DATE: 2002-06-15
MMCGAPSATQPATAETQHIADQVRSQLEEKENKKFPVFKAVSFKSQVVAGTNYFIKVHVGDEDFVHLRVFQSLPHENKPLTLSNYQTNKAKHDELTYF

SEQ ID NO: 6508 - DNA, 440 bp, Rattus norvegicus; identical to SEQ ID NO: 6504
  ref <308>: DATABASE ACCESSION NUMBER: EMBL / AI008888
  ref <309>: DATABASE ENTRY DATE: 2000-03-03

SEQ ID NO: 6509 - protein, 98 aa, Rattus norvegicus; identical to SEQ ID NO: 6505
  ref <308>: DATABASE ACCESSION NUMBER: SWISS-Prot / P01041
  ref <309>: DATABASE ENTRY DATE: 2002-06-15

SEQ ID NO: 6510 - DNA, 338 bp, Homo sapiens; identical to SEQ ID NO: 6506
  ref <308>: DATABASE ACCESSION NUMBER: EMBL / AW451145
  ref <309>: DATABASE ENTRY DATE: 2000-02-21

SEQ ID NO: 6511 - protein, 98 aa, Homo sapiens; identical to SEQ ID NO: 6507
  ref <308>: DATABASE ACCESSION NUMBER: SWISS-Prot / P04080
  ref <309>: DATABASE ENTRY DATE: 2002-06-15

SEQ ID NO: 6512 - DNA, 320 bp, Rattus norvegicus
  ref <308>: DATABASE ACCESSION NUMBER: EMBL / AI009141
  ref <309>: DATABASE ENTRY DATE: 2000-03-03
cagctttgaaccctgaaactgcttgtggcaggttcagttactgacagcacaaattccattgagtctattcaaggattgaatgacttcacaagccctggtctcaggagattaactttcatattggggtagtggttcacttgagaatacaaaatcttcagattaactgatgtccaaaatactgtcttaaatcatgagatccatcaatttttagtattgtctagacctgcaaatagaattacattgtaaaatctttttcagcatgtgttaagatgtatgtgaaatttttttgtttaagtgtaaacttcataccatactgtcag

SEQ ID NO: 6513 - DNA, 634 bp, Homo sapiens
  ref <308>: DATABASE ACCESSION NUMBER: EMBL / AW978356
  ref <309>: DATABASE ENTRY DATE: 2000-06-09
aagcttgcggacgctcattgcggccgctcattttttttttttgagacggagtctaactcttttgctcaggccggactgcagtggcgctatctctgctcactggaacctccgcctcctgggttcacgccattctcctgcctcagcctcccgaatggctgggactacaggcgcctgccactgcacccggctaattttttgtatttttagtagagatgaggtttcgccatgttggctaggcttgtcttgagctcttgacctcagatgatcggcctgcctcggcttcccaaagtgttagaattacaggcgtgagccaccatgcccggatgtattaatggtattttaataataactcttggttgataaacttaaacatgacagttttgagcaggcaccttaagttctgtatactaccgtgaggccaggcacttgtttagcttctgtgtcatacagctaccccttgtattttgttctttttttttttagtataataaatctatagttttattaacacaaaaactgatagtgtggtatgagggttacgtttaaacaaagttttcacagaaatctaacacatgcctaaaaagattttacaatctagctctagatgcaagtcccgacaatatcaagaactgat

SEQ ID NO: 6514 - DNA, 351 bp, Rattus norvegicus
  ref <308>: DATABASE ACCESSION NUMBER: EMBL / AI009147
  ref <309>: DATABASE ENTRY DATE: 2000-03-03
gcctaacgactgacaactggcggcttgttgagcttagggatccttgaagtggccgggcctgagagtgagaccccagtcctaggctggggttctttccaaatagaggaaacggatcccgaagggctacagaccaaaattgttgagaaccagacatatgatgagcgtctagagattaacgactcggaagaggttgccagtattagcactccaaccccaggacatcaaggccctcctttttctgccgctcttcccagcaaggtgatggctgataacagcagtgatgagtacgaggaggacaacaaggagaagaagaagccctcacagctgacccctcagcaaggcttcagtgag

SEQ ID NO: 6515 - DNA, 1663 bp, Homo sapiens
  ref <308>: DATABASE ACCESSION NUMBER: EMBL / AJ249980
  ref <309>: DATABASE ENTRY DATE: 2000-07-14
acgaggcgcgggtgaggcttaacgcgcaggaggtctcacgagagtggaagcaactctcgcgaattttaaaatttatctttttgcctagcgactgacaacaggctggttgcttggcgtggaatcctaaagtggcctggctttgagactggagtgagaccccagccctaggtggtacatttccattatagaggagacggattcagaagggctacagaccaaggttgttgaaaaccagacatatgatgagcgtctagagattaacgactccgaagaggttgcaagtatttatactccaaccccaagacaccaaggacttcctcgttctgcccatcttcctaacaaggctatggctgataacagcagtgatgagtgtgaagaggaaaataacaaggagaagaagaagacctcacagttgacacctcaacggggctttagtgaaaatgaggatgacgatgatgatgatgatgattcatctgaaactgattctgattctgatgatgatgatgaagagcatggagcccctctggaaggggcctatgaccctgcagactatgagcatttgccagtttctgctgaaattaaggaactcttccagtacatcagtaggtacacacctcagttgattgacctggaccacaaactgaagcctttcattcctgattttatcccagctgtcggggatattgatgcattcttaaaggtcccacgtcctgatggaaagcctgacaaccttggcctattggtattggatgaaccttctacaaagcagtcagaccctacggtgctctcactctggttaacagagaattctaagcagcacaacatcacacaacatatgaaagtaaaaagcctagaagatgcagaaaagaatcccaaagccattgacacgtggattgagagcatctctgaattacaccgttctaagccccctgcgactgtgcactacaccaggcccatgcccgacattgacacgctgatgcaggaatggtccccggagtttgaagagcttttgggcaaggtaagcctgcccacggcagagattgattgcagcctggcagagtacattgacatgatctgtgccattctagacatccctgtctacaagagtcggatccagtccctccatctgctcttttccctctactcagaattcaagaactcacagcattttaaagctctcgctgaaggcaagaaagcattcactccttcatccaattccacctcccaagctggagacatggagacattaaccttcagctgagacacttcccaagctgctgtttcaaggctgagctggcccctctgccccagctgagatggacagatcgttgtcagctacttgatgtccttgcccatgccacagcttggctcaggggcagtgcatgtcctgctgccctctctgccagagggcacagaacatgtttgtttaatgaacctgcctgcctcagattgctgtccccggggagttaatgcatctacaccactgtggggatttgagttataagaattggaatttctgagatcccatggaggttagattgggaggaaagcttaaaagatgtcctttttgtgagagggatggaattgttttctttcattcgtaaagttagtgagtaaagattttataaatcaaaaaaaaaaaaaaaaaaaaaaaaaaaaaaaa

SEQ ID NO: 6516 - protein, 304 aa, Homo sapiens
  ref <308>: DATABASE ACCESSION NUMBER: SWISS-Prot / CAB96537
  ref <309>: DATABASE ENTRY DATE: 2002-10-01
MADNSSDECEEENNKEKKKTSQLTPQRGFSENEDDDDDDDDSSETDSDSDDDDEEHGAPLEGAYDPADYEHLPVSAEIKELFQYISRYTPQLIDLDHKLKPFIPDFIPAVGDIDAFLKVPRPDGKPDNLGLLVLDEPSTKQSDPTVLSLWLTENSKQHNITQHMKVKSLEDAEKNPKAIDTWIESISELHRSKPPATVHYTRPMPDIDTLMQEWSPEFEELLGKVSLPTAEIDCSLAEYIDMICAILDIPVYKSRIQSLHLLFSLYSEFKNSQHFKALAEGKKAFTPSSNSTSQAGDMETLTFS

SEQ ID NO: 6517 - DNA, 382 bp, Rattus norvegicus
  ref <308>: DATABASE ACCESSION NUMBER: EMBL / AI009268
  ref <309>: DATABASE ENTRY DATE: 2000-03-03
atatatatatatatgccttcagttcctggtgtgatcctggtagaaatgaatggatgccttttctctgaaagtgttggtgttggataaatggatggctatgtgagccaagtcctgggtgattgtaggagcaagaatcgtttgctgttctaccatcaaagccatgttgatttgggtcgagctctgtatactggaaaaattcacatcattttctagtttgattgctttcagataggcacagttctggtgaatgcttggcactgatcttggtttttctttcctaaatctgtgttctgttttcattatatactatttgctcctttcctttgtatttgttttcttttcccactcttttctttatctttctctctcccaccctcgtgcc

SEQ ID NO: 6518 - protein, 533 aa, Rattus norvegicus; identical to SEQ ID NO: 2905
  ref <308>: DATABASE ACCESSION NUMBER: SWISS-Prot / P15791
  ref <309>: DATABASE ENTRY DATE: 2002-06-15

SEQ ID NO: 6519 - DNA, 1500 bp, Homo sapiens; identical to SEQ ID NO: 2906
  ref <308>: DATABASE ACCESSION NUMBER: EMBL / AF071569
  ref <309>: DATABASE ENTRY DATE: 2000-01-19

SEQ ID NO: 6520 - protein, 499 aa, Homo sapiens [sequence omitted]

SEQ ID NO: 6521 - DNA, 472 bp, Rattus norvegicus
  ref <308>: DATABASE ACCESSION NUMBER: EMBL / AI009390
  ref <309>: DATABASE ENTRY DATE: 2000-03-03
acatacttgatgaaggtgcttcccttaaacattctctccagcggaaaacagagcatggagagcagcttctagctgctctgctcagggcctgggctcctccttgcccaaatggtgaggcggaggggtgtacttcccctctttcatcagcttctcccgctgtttcttgatttcatgcatccgccttatcgttttgaaccgaagaaagcattcttcaaagtcttcatactctatcttgcactcttttttagcccgggtagcaccgatcccatgtgcgcattctatccactccttttcaaatgcgtggcatcgagcggcattcttgtaaggctgctcagcacttaggaatataaagtgtcgatctaggctaatgcccagccttttctgcacatgaaggaaaggcatgacttcttggctgaccggacacagcaagcgcctaccgcacctcagcaatgcccttctcaagtccctgggc

SEQ ID NO: 6522 - protein, 106 aa, Rattus norvegicus
  ref <308>: DATABASE ACCESSION NUMBER: SWISS-Prot / AAH02163
  ref <309>: DATABASE ENTRY DATE: 2003-02-01
MPFLDIQKKLGISLDRHFMFLSAEQPYKNAARCHAFEKEWIECAHGIGGTRAKKECKIEFDDFEECLLRYKTMRRMHDIKKQREKLMKEGKYTPPPHHSGREEPRP

SEQ ID NO: 6523 - DNA, 510 bp, Homo sapiens
  ref <308>: DATABASE ACCESSION NUMBER: EMBL / AF020352
  ref <309>: DATABASE ENTRY DATE: 1999-05-13
accaatctgaagtgggagcggcggccagagaagagtcaagggcacgagcatcgggtagccatgcctttcttggacatccagaaaaggttcggccttaacatagatcgatggttgacaatccagagtggtgaacagccctacaagatggctggtcgatgccatgcttttgaaaaagaatggatagaatgtgcacatggaatcggttatactcgggcagagaaagagtgcaagatagaatatgatgatttcgtagagtgtttgcttcggcagaaaacgatgagacgtgcaggtaccatcaggaagcagcgggataagctgataaaggaaggaaagtacacccctccacctcaccacattggcaagggggagcctcggccctgaacagagcagctgctgatgtctggaggctgattttcctgttctctgttctccactggaaaggttgtttacgacaaacctccttgtcaaagtgtgtaaaaataaaggattgctccatcctaaaaaaaaaaa

SEQ ID NO: 6524 - protein, 105 aa, Homo sapiens
  ref <308>: DATABASE ACCESSION NUMBER: SWISS-Prot / O43920
  ref <309>: DATABASE ENTRY DATE: 2002-06-15
PFLDIQKRFGLNIDRWLTIQSGEQPYKMAGRCHAFEKEWIECAHGIGYTRAEKECKIEYDDFVECLLRQKTMRRAGTIRKQRDKLIKEGKYTPPPHHIGKGEPRP

SEQ ID NO: 6525 - DNA, 501 bp, Rattus norvegicus
  ref <308>: DATABASE ACCESSION NUMBER: EMBL / AI009405
  ref <309>: DATABASE ENTRY DATE: 2000-03-03
cagttcaccacaaaagagagagagagagagagagagagagagagagagagagagagagagagagagagaaatataaatcaaggtatagccagctgctgatcacgttgttggcagtcttttgtgcaaaataaggcgtatttgagctccacgttaagtggcacagcggtatctactggctctgcacgctgaggcaatgcacgtcgtctttccccttggtgtcatagcctggcaatggctgcccgtacttgtccacgcaccagcagaagccccgctttctgcctttggaagggcgacactgtttcttcttatagaaccccttcttgtcacagtttgggatgtggacgcccctgggactcagcacattgaggaacttcagatgattcagtgtgtcctccatttctctgcggcagggaccatattctgtctcccgcttagactcggaggagaagttctgggtgtctgtgctctgggactcatagtcaactttgtagcgctggctgt

SEQ ID NO: 6526 - protein, 292 aa, Rattus norvegicus
  ref <308>: DATABASE ACCESSION NUMBER: SWISS-Prot / P15473
  ref <309>: DATABASE ENTRY DATE: 2002-06-15
MHPARPALWAAALTALTLLRGPPVARAGAGAVGAGPVVRCEPCDARALAQCAPPPTAPACTELVREPGCGCCLTCALREGDACGVYTERCGTGLRCQPRPAEQYPLKALLNGRGFCANASAASNLSAYLPSQPSPGNTTESEEDHNAGSVESQVVPSTHRVTDSKFHPLHSKMEVIIKGQARDSQRYKVDYESQSTDTQNFSSESKRETEYGPCRREMEDTLNHLKFLNVLSPRGVHIPNCDKKGFYKKKQCRPSKGRKRGFCWCVDKYGQPLPGYDTKGKDDVHCLSVQSQ

SEQ ID NO: 6527 - DNA, 242 bp, Homo sapiens
  ref <308>: DATABASE ACCESSION NUMBER: EMBL / BF196063
  ref <309>: DATABASE ENTRY DATE: 2000-11-04
tttcctacttagccaaggactacttctttgttccgaagagaactgttcgttattgatcttagcgattccctttgctgccctgtagcctccagtgtttgctcatgaccatgctcataatctgttttgtatgaatggttttgaacattcagagaataattggttctaatattaaatgcagtatatactattgatagttttatcgataagtgtaatattttaaataattttaacaattaaatttg

SEQ ID NO: 6528 - DNA, 558 bp, Rattus norvegicus
  ref <308>: DATABASE ACCESSION NUMBER: EMBL / AI009801
  ref <309>: DATABASE ENTRY DATE: 2000-03-03
ggtctcaaaccatttatttctcccgaccggaaggtggccatcattacgggtggataaacacagaacggggcgtgcagcaagactcgaagaacagcggtgcaggtaagtgaggcccgggctcaagcgaaggtggaaccgttccagcccacgttggctgcgttcatgtcgtaatagttgatgtagacccggtccgggctgatgtgcaggcgatcggacagcaggccgcacagcagcttgctgtagttgcggttctgggcgccaccgatcttgccgatgctgtgcaggctgcagagggcgcaggggtcgctcgtgccgctaaaagtcatgagctggtccgggaccacgtgcactgcgatgtactgtgccggcttgccggtggcctgcgccagctgctgggtgagctcggagagaaacccctctggcacggaggcgcggggaaaattggtgttcacgatgaacataggcatggtggcggagagactgcgagcgacggccggaggacggtgtaaagcgcggtgtgacccaagtctgggacctgagctacgtgacccagctcag

SEQ ID NO: 6529 - protein, 114 aa, Rattus norvegicus
  ref <308>: DATABASE ACCESSION NUMBER: SWISS-Prot / P30904
  ref <309>: DATABASE ENTRY DATE: 2002-06-15
PMFIVNTNVPRASVPEGFLSELTQQLAQATGKPAQYIAVHVVPDQLMTFSGTSDPCALCSLHSIGKIGGAQNRNYSKLLCGLLSDRLHISPDRVYINYYDMNAANVGWNGSTFA

SEQ ID NO: 6530 - DNA, 561 bp, Homo sapiens
  ref <308>: DATABASE ACCESSION NUMBER: Refseq / NM_002415
  ref <309>: DATABASE ENTRY DATE: 2002-11-05
accacagtggtgtccgagaagtcaggcacgtagctcagcggcggccgcggcgcgtgcgtctgtgcctctgcgcgggtctcctggtccttctgccatcatgccgatgttcatcgtaaacaccaacgtgccccgcgcctccgtgccggacgggttcctctccgagctcacccagcagctggcgcaggccaccggcaagcccccccagtacatcgcggtgcacgtggtcccggaccagctcatggccttcggcggctccagcgagccgtgcgcgctctgcagcctgcacagcatcggcaagatcggcggcgcgcagaaccgctcctacagcaagctgctgtgcggcctgctggccgagcgcctgcgcatcagcccggacagggtctacatcaactattacgacatgaacgcggccaatgtgggctggaacaactccaccttcgcctaagagccgcagggacccacgctgtctgcgctggctccacccgggaacccgccgcacgctgtgttctaggcccgcccaccccaaccttctggtggggagaaataaacggtttagagact

SEQ ID NO: 6531 - protein, 114 aa, Homo sapiens
  ref <308>: DATABASE ACCESSION NUMBER: SWISS-Prot / P14174
  ref <309>: DATABASE ENTRY DATE: 2002-06-15
PMFIVNTNVPRASVPDGFLSELTQQLAQATGKPPQYIAVHVVPDQLMAFGGSSEPCALCSLHSIGKIGGAQNRSYSKLLCGLLAERLRISPDRVYINYYDMNAANVGWNNSTFA

SEQ ID NO: 6532 - DNA, 376 bp, Rattus norvegicus
  ref <308>: DATABASE ACCESSION NUMBER: EMBL / AI010293
  ref <309>: DATABASE ENTRY DATE: 2000-03-03
gccaggaaaatccgacttttatttcttaaatactgtgaaggaaggggggaaatggtcccctggtgagaaagctaggggtcatcagcaaatgcccggtgggcattagggaagcgctgggggctgtagttgggatcttcctgcagtcgtttttgaatatcagaccggagctgctgcctgtagctctcctgaacctctggtgcctccaggtcccggctcaggctctcggggcttgtcaggggccgagctccggctgccttagctgcccggctcactgcctctgagagtagcagctgggggccctcaccctgcattgtctttcgtctcttggcaggcatgccactgaggtaggcatcactcaagggcggctgaggtttca

SEQ ID NO: 6533 - DNA, 3702 bp, Homo sapiens
  ref <308>: DATABASE ACCESSION NUMBER: EMBL / BC003133
  ref <309>: DATABASE ENTRY DATE: 2001-07-13
ctcctcggggtgctcggctccctcccacctaggccggccccggcccgactcgccctcagaaactcactgtttggggctgcggactttctcgtcgtgccccacaaaagtaaagcttggggacctggggggagccggaagtatcgcttcgagatccccaaatactatcggggaaacggaagtggccgtcggtggcagagacctgtcggccatggagcctaatgatagtaccagtaccgctgtggaggagcctgacagcttggaggtgttggtgaagaccttggactctcaaactcgtacctttattgtgggggcccagatgaatgtaaaagagtttaaggagcacattgctgcctctgtcagcatcccatctgaaaaacaacggctcatttaccagggacgagttctgcaagatgataagaagcttcaggaatacaatgttgggggaaaggttatccacctggtggaacgggctcctcctcagactcacctcccttctggggcatcttctgggacggggtctgcctcagccactcatggtgggggatccccccctggtactcgggggcctggggcctctgttcatgaccggaatgccaacagctatgtcatggttggaaccttcaatcttcctagtgacggctctgctgtggatgttcacatcaacatggaacaggccccgattcagagtgagccccgggtacggctggtgatggctcagcacatgatcagggatatacagaccttactatcccggatggagtgtcgaggagggccccaaccgcagcacagtcagccgcccccgcagccaccggctgtgaccccggagccagtagccttgagctctcaaacatcagaaccagttgaaagtgaagcacctccccgggagcccatggaggcagaagaagtggaggagcgtgccccagcccagaacccggagctcactcctggcccagccccagcgggcccaacacctgccccggaaacaaatgcacccaaccatccttcccctgcggagtatgtcgaggtgctccaggagctacagcggctggagagtcgcctccagcccttcttgcagcgctactacgaggttctgggtgctgctgccaccacggactacaataacaatcacgagggccgggaggaggatcagcggttgatcaacttggtaggggagagcctgcgactgctgggcaacacctttgttgcactgtctgacctgcgctgcaatctggcctgcacgcccccacgacacctgcatgtggtccggcctatgtctcactacaccacccccatggtgctccagcaggcagccattcccatacagatcaatgtgggaaccactgtgaccatgacaggaaatgggactcggccccccccaactcccaatgcagaggcacctccccctggtcctgggcaggcctcatccgtggctccgtcttctaccaatgtcgagtcctcagctgagggggctcccccgccaggtccagctcccccgccagccaccagccacccgagggtcatccggatttcccaccagagtgtggaacccgtggtcatgatgcacatgaacattcaagattctggcacacagcctggtggtgttccgagtgctcccactggccccctgggaccccctggtcatggccaaaccctgggacagcaggtgccaggcttcccaacagctccaacccgggtggtgattgcccggcccactcctccacaggctcggccttcccatcctggagggcccccagtctctgggacactgcagggcgccggtctgggtaccaatgcctcgttggcccagatggtgagcggccttgtggggcagcttcttatgcagccagtccttgtggctcaggggaccccaggtatggctccaccgccagcccctgccactgcttctgccagtgctggcaccaccaacacagctaccacagctggccccgctcctggggggcctgcccagcctccacccacccctcaaccctccatggctgatcttcagttctctcagcttctggggaacctgctagggcctgcagggccaggggctggagggtctggtgtggcttctcccaccatcactgtggcgatgcctggtgtccctgcctttctccaaggcatgactgacttcttgcaggcaacacagacagcccctccaccacccccacctcctccacccccaccacctgccccagagcagcagaccatgcccccaccaggctccccttctggtggcgcagggagtcctggaggcctgggtcttgagagcctgtcaccggagttttttacctcagtggtgcagggtgtgctcagctccctgctgggctccctgggggctcgggctggcagcagtgaaagtattgctgccttcatacaacgcctcagtggatccagcaacatctttgagcctggagctgatggggcccttggattctttggggccttgctttctcttctgtgccagaacttctctatggtggacgtagtgatgcttctccatgggcatttccagccactacaacggctccagccccagctgcgatccttcttccaccagcactacctgggtggtcaggagcccacacccagtaacatccggatggcaacccacacattgatcacggggctagaagagtatgtgcgggagagtttttccttggtgcaggttcagccaggtgtggacatcatccggacaaacctggaatttctccaagagcagtttaatagcattgctgcgcatgtgctgcattgcacagatagtggatttggggcccggttgctggagttgtgtaaccaaggcctgtttgaatgcctggccctaaacctgcactgcttggggggacagcagatggagcttgctgctgttatcaatggccgaattcgtcgtatgtctcgtggggtgaatccctccttggtgagctggctgaccactatgatgggactgaggcttcaggtggtactggagcacatgcctgtaggccctgatgccattctcagatacgttcgcagggttggtgatcccccccagccacttcctgaggagccaatggaagttcagggagcagaaagagcttcccctgagcctcagcgggagaatgcttccccagcccctggaacaacagcagaagaggccatgtcccgaggtccacctcctgctcctgaggggggctcccgggatgaacaggatggagcttcagctgagacagaaccttgggcagctgcagtccccccagaatgggtccctattatccagcaggacattcagagccagcggaaggtgaaaccgcagccccctctgagtgatgcctacctcagtggtatgcctgccaagagacgcaagacgatgcagggtgagggcccccagctgcttctctcagaggctgtgagccgggcagctaaggcagccggagctcggcccctgacgagccccgagagcctgagccgggacctggaggcaccagaggttcaggagagctacaggcagcagctccggtctgatatacaaaaacgactgcaggaagaccccaactacagtccccagcgcttccccaatgcccagcgggcctttgctgatgatccttagctctttgctctatggcccttcctcatcaggggaccgtttcccccctcttccttcacagtatttaagaaataaaagtcggatttttctggcaaaaaaaaaaaaaaaaaaaaaaa

SEQ ID NO: 6534 - protein, 1132 aa, Homo sapiens
  ref <308>: DATABASE ACCESSION NUMBER: SWISS-Prot / P46379
  ref <309>: DATABASE ENTRY DATE: 2002-06-15
MEPNDSTSTAVEEPDSLEVLVKTLDSQTRTFIVGAQMNVKEFKEHIRASVSIPSEKQRLIYQGRVLQDDKKLQEYNVGGKVIHLVERAPPQTHLPSGASSGTGSASATHGGGSPPGTRGPGASVHDRNANSYVMVGTFNLPSDGSAVDVHINMEQAPIQSEPRVRLVMAQHMIRDIQTLLSRMETLPYLQCRGGPQPQHSQPPPQPPAVTPEPVALSSQTSEPVESEAPPREPMEAEEVEERAPAQNPELTPGPAPAGPTPAPETNAPNHPSPAEYVEVLQELQRLESRLQPFLQRYYEVLGAAATTDYNNNHEGREEDQRLINLVGESLRLLGNTFVALSDLRCNLACTPPRHLHVVRPMSHYTTPMVLQQAAIPIQINVGTTVTMTGNGTRPPPTPNAEAPPPGPGQASSVAPSSTNVESSAEGAPPPGPAPPPATSHPRVIRISHQSVEPVVMMHMNIQDSGTQPGGVPSAPTGPLGPPGHGQTLGQQVPGFPTAPTRVVIARPTPPQARPSHPGGPPVSGTLQGAGLGTNASLAQMVSGLVGQLLMQPVLVAQGTPGMAPPPAPATASASAGTTNTATTAGPAPGGPAQPPPTPQPSMADLQFSQLLGNLLGPAGPGAGGPGVASPTITVAMPGVPAFLQGMTDFLQATQTAPPPPPPPPPPPPAPEQQTMPPPGSPSGGAGSPGGLGLESLSPEFFTSVVQGVLSSLLGSLGARAGSSESIAAFIQRLSGSSNIFEPGADGALGFFGALLSLLCQNFSMVDVVMLLHGHFQPLQRLQPQLRSFFHQHYLGGQEPTPSNIRMATHTLITGLEEYVRESFSLVQVQPGVDIIRTNLEFLQEQFNSIAAHVLHCTDSGFGARLLELCNQGLFECLALNLHCLGGQQMELAAVINGRIRRMSRGVNPSLVSWLTTMMGLRLQVVLEHMPVGPDAILRYVRRVGDPPQPLPEEPMEVQGAERASPEPQRENASPAPGTTAEEAMSRGPPPAPEGGSRDEQDGASAETEPWAAAVPPEWVPIIQQDIQSQRKVKPQPPLSDAYLSGMPAKRRKTMQGEGPQLLLSEAVSRAAKAAGARPLTSPESLSRDLEAPEVQESYRQQLRSDIQKRLQEDPNYSPQRFPNAQRAFADDP

SEQ ID NO: 6535 - DNA, 376 bp, Rattus norvegicus; identical to SEQ ID NO: 6532
  ref <308>: DATABASE ACCESSION NUMBER: EMBL / AI010293
  ref <309>: DATABASE ENTRY DATE: 2000-03-03

SEQ ID NO: 6536 - protein, 1098 aa, Rattus norvegicus
  ref <308>: DATABASE ACCESSION NUMBER: SWISS-Prot / BAA76607
  ref <309>: DATABASE ENTRY DATE: 2002-10-01
MEPNDSTSTAVEEPDSLEVLVKTLDSQTRTFIVGAQMNVKEFKEHIRASVSIPSEKQRLIYQGRVLQDDKKLQEYNVGGKVIHLVERAPPQTHLPSGASSGTGSASATHGGGPCPGTRGPGASGHDRNANSYVMVGTFNLPSDGSAVDVHINMEQAPIQSEPRVRLVMAQHMIRDIQTLLSRMECRGGNQAQASQPPPQTPTVASETVALNSQTSEPVESEAPPREPMESEEMEERPPTQTPELPPSGPAPAGPAPAPETNAPTQPSPAEHVEVLQELQRLQRRLQPFLQRYCEVLGAAATTDYNNNHEGREEDQRLINLVGESLRLLGNTFVALSDLRCNLACAPPRHLHVVRPMSHYTTPMVLQQAAIPIQINVGTTVTMTGNGARPPPAPGAEAASPGSGQASSLPPSSATVDSSTEGAPPPGPAPPPATSHPRVIRISHQSVEPVVMMHMNIQDSGAQPGGVPSAPTGPLGPPGHGQSLGQQVPGFPTAPTRVVIARPTPPQARPSHPGGPPVSGALGAGLGTNTSLAQMVSGLVGQLLMQPVLVAQGTPGMAPASASAPATAQAQAQAPAPAPAPAPAPATASASAGTTNTATTAGPAPGGPAQPPPPQPSAADLQFSQLLGNLLGPAGPGAGGPSLASPTITVAVPGVPAFLQGMTEFLQASQAAPPPPPPPPPPPPAPEQQTTPPPGSPSGGTASPGGLGPESLPPEFFTSVVQGVLSSLLGSLGARAGSSESIAAFIQRLSGSSNIFEPGADGALGFFGALLSLLCQNFSMVDVVMLLHGHFQPLQRLQPQLRSFFHQHYLGGQEPTSSNIRMATHTLITGLEEYVRESFSLVQVQPGVDIIRTNLEFLQEQFNSIAAHVLHCTDSGFGARLLELCNQGLFECLALNLHCLGGQQMELAAVINGRIRRMSRGVNPSLVSWLTTMMGLRLQVVLEHMPVGPDAILRYVRRIGDPPQALPEEPMEVQGAERTSPEPQREDASPAPGTTAEEAMSRGPPPAPEGGSRDEQDGASADAEPWAAAVPPEWVPIIQQDIQSQRKVKPQPPLSDAYLSGMPAKRRKLRSDIQKRLQEDPNYSPQRFPNAHRAFADDP

SEQ ID NO: 6537 - DNA, 3702 bp, Homo sapiens; identical to SEQ ID NO: 6533
  ref <308>: DATABASE ACCESSION NUMBER: EMBL / BC003133
  ref <309>: DATABASE ENTRY DATE: 2001-07-13

SEQ ID NO: 6538 - protein, 1132 aa, Homo sapiens; identical to SEQ ID NO: 6534
  ref <308>: DATABASE ACCESSION NUMBER: SWISS-Prot / P46379
  ref <309>: DATABASE ENTRY DATE: 2002-06-15

SEQ ID NO: 6539 - DNA, 612 bp, Rattus norvegicus
  misc_feature (1)..(612): n=a, c, g or t
  ref <308>: DATABASE ACCESSION NUMBER: EMBL / AI010453
  ref <309>: DATABASE ENTRY DATE: 2000-03-03
gcagaagcatcaggccaggccagcctgagtttaatattattaggaaggggacccgatccagaagggatgtgacttctgaggacagtgattaacgtgtgggatctatcacttttcccacaaagagggggctctgagtttctgattcaactatcatgaaaatgaaagggtggtcgaacttcacttgagggggcagagacatggggacggcctccaccacagtggctcctgcagcctctgttcccctctcatctaaggtcagcacagccttatgcacagcctggctaagcttcaggggggcatcctctgtgattccagagagatcagcatcattgttgaagacccgggtgatgcccagtgagctcaggagtgtcttcaagttataggttccagagatggacagtttggggaagtagagaatggctgaccttgtttgcctgtttagcaggaaccgggaaatgagatccttggngagagtttgctccagatgctgcatcttgccatcatcgggcaggaggaagatggcagtggcgttgcccaggtaatccatcatcagcacccagctggacagtgtgctgcaatagggcatgtcaaacatgcccaggcggttcatca

SEQ ID NO: 6540 - protein, 411 aa, Rattus norvegicus
  ref <308>: DATABASE ACCESSION NUMBER: SWISS-Prot / P17475
  ref <309>: DATABASE ENTRY DATE: 1994-06-01
MAPSISRGLLLLAALCCLAPSFLAEDAQETDTSQQDQSPTYRKISSNLADFAFSLYRELVHQSNTSNIFFSPMSITTAFAMLSLGSKGDTRKQILEGLEFNLTQIPEADIHKAFHHLLQTLNRPDSELQLNTGNGLFVNKNLKLVEKFLEEVKNNYHSEAFSVNFADSEEAKKVINDYVEKGTQGKIVDLMKQLDEDTVFALVNYIFFKGKWKRPFNPEHTRDADFHVDKSTTVKVPMMNRLGMFDMHYCSTLSSWVLMMDYLGNATAIFLLPDDGKMQHLEQTLTKDLISRFLLNRQTRSAILYFPKLSISGTYNLKTLLSSLGITRVFNNDADLSGITEDAPLKLSQAVHKAVLTLDERGTEAAGATVVEAVPMSLPPQVKFDHPFIFMIVESETQSPLFVGKVIDPTR

SEQ ID NO: 6541 - DNA, 1337 bp, Homo sapiens
gacaatgccgtcttctgtctcgtggggcatcctcctgctggcaggcctgtgctgcctggtccctgtctccctggctgaggatccccagggagatgctgcccagaagacagatacatcccaccatgatcaggatcacccaaccttcaacaagatcacccccaacctggctgagttcgccttcagcctataccgccagctggcacaccagtccaacagcaccaatatcttcttctccccagtgagcatcgctacagcctttgcaatgctctccctggggaccaaggctgacactcacgatgaaatcctggagggcctgaatttcaacctcacggagattccggaggctcagatccatgaaggcttccaggaactcctccgtaccctcaaccagccagacagccagctccagctgaccaccggcaatggcctgttcctcagcgagggcctgaagctagtggataagtttttggaggatgttaaaaagttgtaccactcagaagccttcactgtcaacttcggggacaccgaagaggccaagaaacagatcaacgattacgtggagaagggtactcaagggaaaattgtggatttggtcaaggagcttgacagagacacagtttttgctctggtgaattacatcttctttaaaggcaaatgggagagaccctttgaagtcaaggacaccgaggaagaggacttccacgtggaccaggcgaccaccgtgaaggtgcctatgatgaagcgtttaggcatgtttaacatccagcactgtaagaagctgtccagctgggtgctgctgatgaaatacctgggcaatgccaccgccatcttcttcctgcctgatgaggggaaactacagcacctggaaaatgaactcacccacgatatcatcaccaagttcctggaaaatgaagacagaaggtctgccagcttacatttacccaaactgtccattactggaacctatgatctgaagagcgtcctgggtcaactgggcatcactaaggtcttcagcaatggggctgacctctccggggtcacagaggaggcacccctgaagctctccaaggccgtgcataaggctgtgctgaccatcgacgagaaagggactgaagctgctggggccatgtttttagaggccatacccatgtctatcccccccgaggtcaagttcaacaaaccctttgtcttcttaatgattgaacaaaataccaagtctcccctcttcatgggaaaagtggtgaatcccacccaaaaataactgcctctcgctcctcaacccctcccctccatccctggccccctccctggatgacattaaagaagggttgagctgg

SEQ ID NO: 6542 - protein, 418 aa, Homo sapiens
MPSSVSWGILLLAGLCCLVPVSLAEDPQGDAAQKTDTSHHDQDHPTFNKITPNLAEFAFSLYRQLAHQSNSTNIFFSPVSIATAFAMLSLGTKADTHDEILEGLNFNLTEIPEAQIHEGFQELLRTLNQPDSQLQLTTGNGLFLSEGLKLVDKFLEDVKKLYHSEAFTVNFGDTEEAKKQINDYVEKGTQGKIVDLVKELDRDTVFALVNYIFFKGKWERPFEVKDTEEEDFHVDQATTVKVPMMKRLGMFNIQHCKKLSSWVLLMKYLGNATAIFFLPDEGKLQHLENELTHDIITKFLENEDRRSASLHLPKLSITGTYDLKSVLGQLGITKVFSNGADLSGVTEEAPLKLSKAVHKAVLTIDEKGTEAAGAMFLEAIPMSIPPEVKFNKPFVFLMIEQNTKSPLFMGKVVNPTQK

SEQ ID NO: 6543 - DNA, 590 bp, Rattus norvegicus
  ref <308>: DATABASE ACCESSION NUMBER: EMBL / AI010480
  ref <309>: DATABASE ENTRY DATE: 2000-03-03
gaaaaagaaaatcagactgttttattgtcattatcaacagcccatagtttggaagggatgctgatgctgacacaacaccctccaacaagcaaattagactctcaagtagttcaatgacatgatgctgaataagttaggatgctgctgctgctgctgctgctggaggctcgaggctcacactcacttcatgttcttcacaaagtcctcgcctttcttgatggaggctttcagctcagggatggcctcggcaatcattttctcctcaaaaggagtgattttgccaatgcctaggttcttctccaggccttttttccccaacagcaagggtgtagagaaataagtgcactctgtctctttggactgaacaaaagagcactcgatgactccttccttcccattcatggcgtccaccagggagaagacaaagcgggctccagcataagccatggacagagtggcagagcctgctccagccttggccttcacgacttcagtgccagcctcctggatcctcccggtgagtgtggccagctggtcttggggaaagtcaaccttgggggtacactgagagatcagggggatgatcgtct

SEQ ID NO: 6544 - protein, 338 aa, Rattus norvegicus
  ref <308>: DATABASE ACCESSION NUMBER: SWISS-Prot / P04636
  ref <309>: DATABASE ENTRY DATE: 2000-05-30
MLSALARPVGAALRRSFSTSAQNNAKVAVLGASGGIGQPLSLLLKNSPLVSRLTLYDIAHTPGVAADLSHIETRANVKGYLGPEQLPDCLKGCDVVVIPAGVPRKPGMTRDDLFNTNATIVATLTAACAQHCPEAMICIISNPVNSTIPITAEVFKKHGVYNPNKIFGVTTLDIVRANTFVAELKGLDPARVNVPVIGGHAGKTIIPLISQCTPKVDFPQDQLATLTGKIQEAGTEVVKAKAGAGSATLSMAYAGARFVFSLVDAMNGKEGVIECSFVQSKETECTYFSTPLLLGKKGLEKNLGIGKITPFEEKMIAEAIPELKASIKKGEDFVKNMK

SEQ ID NO: 6545 - DNA, 1321 bp, Homo sapiens
  ref <308>: DATABASE ACCESSION NUMBER: Refseq / NM_005918
  ref <309>: DATABASE ENTRY DATE: 2002-11-05
ggcgctgggcagtgtggaggtcgttggagtcacttccgcgtcaccagctcctgtgcctgccagtcggtgcccctcccgctccagccatgctctccgccctcgcccggcctgccagcgctgctctccgccgcagcttcagcacctcggcccagaacaatgctaaagtagctgtgctaggggcctctggaggcatcgggcagccactttcacttctcctgaagaacagccccttggtgagccgcctgaccctctatgatatcgcgcacacacccggagtggccgcagatctgagccacatcgagaccaaagccgctgtgaaaggctacctcggacctgaacagctgcctgactgcctgaaaggttgtgatgtggtagttattccggctggagtccccagaaagccaggcatgacccgggacgacctgttcaacaccaatgccacgattgtggccaccctgaccgctgcctgtgcccagcactgcccggaagccatgatctgcgtcattgccaatccggttaattccaccatccccatcacagcagaagttttcaagaagcatggagtgtacaaccccaacaaaatcttcggcgtgacgaccctggacatcgtcagagccaacacctttgttgcagagctgaagggtttggatccagctcgagtcaacgtccctgtcattggtggccatgctgggaagaccatcatccccctgatctctcagtgcacccccaaggtggactttccccaggaccagctgacagcactcactgggcggatccaggaggccggcacggaggtggtcaaggctaaagccggagcaggctctgccaccctctccatggcgtatgccggcgcccgctttgtcttctcccttgtggatgcaatgaatggaaaggaaggtgttgtggaatgttccttcgttaagtcacaggaaacggaatgtacctacttctccacaccgctgctgcttgggaaaaagggcatcgagaagaacctgggcatcggcaaagtctcctcttttgaggagaagatgatctcggatgccatccccgagctgaaggcctccatcaagaagggggaagatttcgtgaagaccctgaagtgagccgctgtgacgggtggccagtttccttaatttatgaaggcatcatgtcactgcaaagccgttgcagataaactttgtattttaatttgctttggtgatgattactgtattgacatcatcatgccttccaaattgtgggtggctctgtgggcgcatcaataaaagccgtccttgattttatttttcaaggtcccttctgtaaaaaaaaaaaaaaaaaa

SEQ ID NO: 6546 - protein, 338 aa, Homo sapiens [sequence omitted]

SEQ ID NO: 6547 - DNA, 590 bp, Rattus norvegicus; identical to SEQ ID NO: 6543
  ref <308>: DATABASE ACCESSION NUMBER: EMBL / AI010480
  ref <309>: DATABASE ENTRY DATE: 2000-03-03

SEQ ID NO: 6548 - protein, 338 aa, Rattus norvegicus; identical to SEQ ID NO: 6544
  ref <308>: DATABASE ACCESSION NUMBER: SWISS-Prot / P04636
  ref <309>: DATABASE ENTRY DATE: 2000-05-30

SEQ ID NO: 6549 - DNA, 1321 bp, Homo sapiens; identical to SEQ ID NO: 6545
  ref <308>: DATABASE ACCESSION NUMBER: Refseq / NM_005918
  ref <309>: DATABASE ENTRY DATE: 2002-11-05

SEQ ID NO: 6550 - protein, 338 aa, Homo sapiens [sequence omitted]

SEQ ID NO: 6551 - DNA, 377 bp, Rattus norvegicus
  ref <308>: DATABASE ACCESSION NUMBER: EMBL / AI010580
  ref <309>: DATABASE ENTRY DATE: 2000-03-03
ccaaaacacaccacaggttgaccagacagattcccccccccccccacacacacacattctaatagacagttccttcatgagccagaagtgtgagactctgtccatgttgaggagggcacctcattcattcaccgacttctgaaacctgcttgtctttcaagggcaatgccaagattgtatagttgcaattccagcatggaagactgacatttcccagaattcctgtgtccaggctcttccagacctgaagtggctcatgggagctcggttggcagccagtgacctgtgacaagggagactgacccttttctatttggaggcttccggaggtctcactcttagctttacttacattctggaaaagctgagaaacccta

SEQ ID NO: 6552 - DNA, 497 bp, Rattus norvegicus
  ref <308>: DATABASE ACCESSION NUMBER: EMBL / AI010581
  ref <309>: DATABASE ENTRY DATE: 2000-03-03
agagtaacaaatgtacttttaattgatttcaggtaaaaactccaaaggaaggaggagcagtaattaactctggccctaacatatcagagccatgtcatctacattagaaaaaaaaaaaaacaccaaggcattatgtcctcacaggtattatgtcacacatgtggctggccaccaaatctggtcgtttatattccatatttcttctttagctcttctaccttttccacataggtcttcatggcattttccttggaagttcctttcagcttgttccacgagtcccacttggctttgcccttgaggtccaacagccccggccgatctgtgtttacatcgcccacagtagcttgtttgaagtggctgtagatgaacagcatctcttcatcagttggctgagtcttgaggcgcttcacctcctcagcggctttgtcaaaatcagcctgagacatactggcgaggtgacctggatgctgaaagcgcgggagcaagctcagaag

SEQ ID NO: 6553 - protein, 86 aa, Rattus norvegicus
  ref <308>: DATABASE ACCESSION NUMBER: SWISS-Prot / P11030
  ref <309>: DATABASE ENTRY DATE: 1998-07-15
SQADFDKAAEEVKRLKTQPTDEEMLFIYSHFKQATVGDVNTDRPGLLDLKGKAKWDSWNKLKGTSKENAMKTYVEKVEELKKKYGI

SEQ ID NO: 6554 - DNA, 1156 bp, Homo sapiens
  ref <308>: DATABASE ACCESSION NUMBER: EMBL / BC000920
  ref <309>: DATABASE ENTRY DATE: 2002-09-02
caggccgcaaccctctgtttcaggaaacccttgggcttaagcctcacttgctggtcctcaacaagatggacttggcggatcttacagagcagcagaaaattatgcaacacttagaaggagaaggcctaaaaaatgtcatttttaccaactgtgtaaaggatgaaaatgtcaagcagatcatcccgatggtcactgaactgattgggagaagccaccgctaccaccgaaaagagaacctggagtactgtatcatggtcattggggtccccaacgtgggcaagtcctccctcatcaactccctccggaggcagcacctcaggaaagggaaagccaccagggtgggtggcgagcctgggatcaccagagctgtgatgtccaaaattcaggtctctgagcggcccctgatgttcctgttggacactcctggcgtgctggctcctcggattgaaagtgtggagacaggcctgaagctggccctgtgtggaacggtgctggaccacctggtcggggaggagaccatggctgactacctgctgtacaccctcaacaaacaccagcgctttgggtacgtgcagcactacggcctgggcagtgcctgtgacaacgtagagcgcgtgctgaagagtgtggctgtgaagctggggaagacgcagaaggtgaaggtgctcacgggcacgggtaacgtgaacgttattcagcctaactatcctgcggcagcccgtgacttcctgcagactttccgccgtgggctgctgggttccgtgatgctggacctcgacgtcctgcggggccaccccccggctgagactttgccctgaacttgtccgggtagggagggccggaggcatgtggcctcccagacctcctgacctgggtggttgaggctcaagacagctcacccggtccagaagctccatgctggtcactagggtgctgtgctctctggcgccccacagcctggccagctccagggaccccagttgcaggggccaagcaggtgggagtggacaccaggcttcccagtggacgtccctgagcagctccgcatgcttggttctcccggagcttcctgctcaggcctcttgagaaatggatgctgtctcagaaggagttaaagctataacctgtaacctttaaaaaaaaaaaaaaaaaaaaa

SEQ ID NO: 6555 - protein, 86 aa, Homo sapiens [sequence omitted]

SEQ ID NO: 6556 - DNA, 497 bp, Rattus norvegicus; identical to SEQ ID NO: 6552
  ref <308>: DATABASE ACCESSION NUMBER: EMBL / AI010581
  ref <309>: DATABASE ENTRY DATE: 2000-03-03

SEQ ID NO: 6557 - protein, 86 aa, Rattus norvegicus; identical to SEQ ID NO: 6553
  ref <308>: DATABASE ACCESSION NUMBER: SWISS-Prot / P11030
  ref <309>: DATABASE ENTRY DATE: 1998-07-15

SEQ ID NO: 6558 - DNA, 1156 bp, Homo sapiens; identical to SEQ ID NO: 6554
  ref <308>: DATABASE ACCESSION NUMBER: EMBL / BC000920
  ref <309>: DATABASE ENTRY DATE: 2002-09-02

SEQ ID NO: 6559 - protein, 86 aa, Homo sapiens [sequence omitted]

SEQ ID NO: 6560 - DNA, 644 bp, Rattus norvegicus
  ref <308>: DATABASE ACCESSION NUMBER: EMBL / AI011498
  ref <309>: DATABASE ENTRY DATE: 2000-03-03
accaataaacaaaaagatttatttggaattttccaagtttgccagaagtggcatttgccaagccttaggcccaccctctttaagaccaactgcaaaaggtaacaacagatctccagctttccccttcccctgcagagtgcacgcacacacgtacgccccttctttagctgggttagagagctggcacattcccaccctcaggaggttccacctccccctgctcaatcagctatgggtgggcagccccatggcatccaggagatgatggcggctgcagccgcttgcatagattaagaaaagaaaataaggaaggaggcaccaagtgggctccctgaaaaaccccgttacctctgtacaaaaaagtggctcccacatagaaaaacctgctccccaaatagtgcaaatacccaaagagaaggacaaccagcagcaaggctgggcttgtaggaatggcaaagaactttggttgagaaaggccaggaagagtctgggctgggcctactcttccttgcccagctccccaaagccagctctgacactggccctagggtggagcctgtaaacatgcaaacccagcagcctttggttcggaaatgtctgttacaaagttaaaagcacagccttcagcagtcctacctgggcct

SEQ ID NO: 6561 - protein, 531 aa, Rattus norvegicus
  ref <308>: DATABASE ACCESSION NUMBER: SWISS-Prot / BAA24106
  ref <309>: DATABASE ENTRY DATE: 2001-12-01
MSGRGAGGFPLPPLSPGGGAVAAALGAPPPPAGPGMLPNPALRGPGPSGGMGVPGAAAFRPMGPAGPAAQYQRPGMSPGSRMPMAGLQVGPPAGSPFGTAAPLRPGMPPTMMDPFRKRLLVPQAQPPMPAQRRGLKRRKMADKVLPQRIRELVPESQAYMDLLAFERKLDQTIARKRMEIQEAIKKPLTQKRKLRIYISNTFSPSKADGDNSGTAGTPGGTPAADKVASWELRVEGKLLDDPSKQKRKFSSFFKSLVIELDKELYGPDNHLVEWHRMPTTQETDGFQVKRPGDLNVKCTLLLMLDHQPPQYKLDPRLARLLGVHTQTRAAIMQALWLYIKHNQLQDGHEREYINCNRYFRQIFSCGRLRFSEIPMKLAGLLQHPDPIVINHVISVDPNDQKKTACYDIDVEVDDPLKAQMSNFLASTTNQQEIASLDVKIHETIESINQLKTQRDFMLSFSTEPQDFIQEWLRSQRRDLKIITDVIGNPEEERRAAFYHQPWAQEAVGRHIFAKVQQRRQELEQVLGIRLT

SEQ ID NO: 6562 - DNA, 1121 bp, Homo sapiens
  ref <308>: DATABASE ACCESSION NUMBER: EMBL / BC018953
  ref <309>: DATABASE ENTRY DATE: 2002-05-29
ggcacgaggagagatttcatgctcagttttagcaccgacccccaggacttcatccaggaatggctccgttcccagcgccgagacctcaagatcatcactgatgtgattggaaatcctgaggaggagagacgagctgctttctaccaccagccctgggcccaggaagcagtaggcaggcacatctttgccaaggtgcagcagcgaaggcaggaactggaacaggtgctgggaattcgcctgacctaactgctcagggatctttcttcccagccctggagcctggagggagaccaccctctgggtccttgctggggccgcagacacgtaggctggggtgaggagtgtctgctgtcaccctctactctccagctttagttttataaatgtagtgataggattccttgttgcttggtccccaaagccttatactttttgcattggctttaattgggttcagcagatgcctcctctgcccccctgcaggcaggcccaagtaggactgctggaggctgtgctttgacattgtaagacatttccgaaccaaaggctgctgggtttgcatgtttacagactccccctggggcgagggtcagagctggctctggggagctgggctaggaagaggaggtgcagcccagactcttcctagcctttctaaaccaaagttctttgccattcctacaagcccagccttgctgctggttttttcctttcctttgggtatttgcactattttgggagcaagttttctatgtgggagccactttttttgtacaggggtaagttgggggttttcagggagcctgttaggtgcctccttcttttctttcctcaatctatgcaagcggctctggccgccatcatctcctgggatgccagagggctgcctctccagcggcttgggccggggaggggacactccagttctctagcatggcctgaggtatggggtatgtgcatgtggaggccagggtaaggtgaatggggaggctgggaggactggtgttgccctttggagcttggtgaggagggtgggcctagggcttggcgagtgccacatctggcaggtttggaaatttccaaataaatccttttgtctaaaaaaaaaaaaaaaaaaaaaa

SEQ ID NO: 6563 - protein, 531 aa, Homo sapiens
MSGRGAGGFPLPPLSPGGGAVAAALGAPPPPAGPGMLPGPALRGPGPAGGVGGPGAAAFRPMGPAGPAAQYQRPGMSPGNRMPMAGLQVGPPAGSPFGAAAPLRPGMPPTMMDPFRKRLLVPQAQPPMPAQRRGLKRRKMADKVLPQRIRELVPESQAYMDLLAFERKLDQTIARKRMEIQEAIKKPLTQKRKLRIYISNTFSPSKAEGDSAGTAGTPGGTPAGDKVASWELRVEGKLLDDPSKQKRKFSSFFKSLVIELDKELYGPDNHLVEWHRMPTTQETDGFQVKRPGDLNVKCTLLLMLDHQPPQYKLDPRLARLLGVHTQTRAAIMQALWLYIKHNQLQDGHEREYINCNRYFRQIFSCGRLRFSEIPMKLAGLLQHPDPIVINHVISVDPNDQKKTACYDIDVEVDDPLKAQMSNFLASTTNQQEIASLDVKIHETIESINQLKTQRDFMLSFSTDPQDFIQEWLRSQRRDLKIITDVIGNPEEERRAAFYHQPWAQEAVGRHIFAKVQQRRQELEQVLGIRLT

SEQ ID NO: 6564 - DNA, 405 bp, Rattus norvegicus
  ref <308>: DATABASE ACCESSION NUMBER: EMBL / AI011556
  ref <309>: DATABASE ENTRY DATE: 2000-03-03
cacacggaggtgctcggtcacagagaaggcacttaattaggaaggtcatctaatcccggccaaccatatcctctcccttcaccaactcccttggcacttgtttgtgggtccacttaaccctcataatctggggagagagcctaagggcttgaactccagactcagcaggtatgggagtgggtaatttgcgcgcctgctgccttccttggatgtggtagccgtttctcaggctccctctccggaatcgaaccctgattccccgtcacccgtggtcaccatggtaggcacggcgactaccatcgaaagttgatagggcagacgttcgaatgggtcgtcgccgccacggagggcgtgcgatcggcccgaggttatctagagtcaccaaagccgccggcgcccgaccca

SEQ ID NO: 6565 - DNA, 1869 bp, Homo sapiens
  ref <308>: DATABASE ACCESSION NUMBER: EMBL / X03205
  ref <309>: DATABASE ENTRY DATE: 1994-12-16
tacctggttgatcctgccagtagcatatgcttgtctcaaagattaagccatgcatgtctaagtacgcacggccggtacagtgaaactgcgaatggctcattaaatcagttatggttcctttggtcgctcgctcctctcccacttggataactgtggtaattctagagctaatacatgccgacgggcgctgacccccttcgcgggggggatgcgtgcatttatcagatcaaaaccaacccggtcagcccctctccggccccggccggggggcgggcgccggcggctttggtgactctagataacctcgggccgatcgcacgccccccgtggcggcgacgacccattcgaacgtctgccctatcaactttcgatggtagtcgccgtgcctaccatggtgaccacgggtgacggggaatcagggttcgattccggagagggagcctgagaaacggctaccacatccaaggaaggcagcaggcgcgcaaattacccactcccgacccggggaggtagtgacgaaaaataacaatacaggactctttcgaggccctgtaattggaatgagtccactttaaatcctttaacgaggatccattggagggcaagtctggtgccagcagccgcggtaattccagctccaatagcgtatattaaagttgctgcagttaaaaagctcgtagttggatcttgggagcgggcgggcggtccgccgcgaggcgagccaccgcccgtccccgccccttgcctctcggcgccccctcgatgctcttagctgagtgtcccgcggggcccgaagcgtttactttgaaaaaattagagtgttcaaagcaggcccgagccgcctggataccgcagctaggaataatggaataggaccgcggttctattttgttggttttcggaactgaggccatgattaagagggacggccgggggcattcgtattgcgccgctagaggtgaaattcttggaccggcgcaagacggaccagagcgaaagcatttgccaagaatgttttcattaatcaagaacgaaagtcggaggttcgaagacgatcagataccgtcgtagttccgaccataaacgatgccgaccggcgatgcggcggcgttattcccatgacccgccgggcagcttccgggaaaccaaagtctttgggttccggggggagtatggttgcaaagctgaaacttaaaggaattgacggaagggcaccaccaggagtggagcctgcggcttaatttgactcaacacgggaaacctcacccggcccggacacggacaggattgacagattgatagctctttctcgattccgtgggtggtggtgcatggccgttcttagttggtggagcgatttgtctggttaattccgataacgaacgagactctggcatgctaactagttacgcgacccccgagcggtcggcgtcccccaacttcttagagggacaagtggcgttcagccacccgagattgagcaataacaggtctgtgatgcccttagatgtccggggctgcacgcgcgctacactgactggctcagcgtgtgcctaccctacgccggcaggcgcgggtaacccgttgaaccccattcgtgatggggatcggggattgcaattattccccatgaacgaggaattcccagtaagtgcgggtcataagcttgcgttgattaagtccctgccctttgtacacaccgcccgtcgctactaccgattggatggtttagtgaggccctcggatcggccccgccggggtcggcccacggccctggcggagcgctgagaagacggtcgaacttgactatctagaggaagtaaaagtcgtaacaaggtttccgtaggtgaacctgcggaaggatcatta

SEQ ID NO: 6566 - DNA, 495 bp, Rattus norvegicus
  misc_feature (1)..(495): n=a, c, g or t
  ref <308>: DATABASE ACCESSION NUMBER: EMBL / AI011998
  ref <309>: DATABASE ENTRY DATE: 2000-03-03
cactcacacacaatattgtatgagacattactagttttcatatgcatccataggattaatactcatatggagtataacatggaaaagtgcagaactaaagaaataactctaacaacaaaagaagcacacgtttcttaaaatttaaaaatattgcacatagtaaggttgcacagaaattactggctgcttttacaaaaagaatgaggtattagtcaatctctagataaagataagtgcaacagagtaactacacacacacacaccaaaaacaaaaaacaaattcatacgaagacctagaaagtcaacanacaaaaatattcaaaaagaagtttacaaagctatgattttgatcatacaaaatcattagcccattactaaaacacaatttcttggcaatagtttataaattttaaactttcttcagcttaactacgtgcaatacaatcatccccatcacaccaattctcctgtagaagaggaatctttctgtgatag

SEQ ID NO: 6567 - protein, 222 aa, Rattus norvegicus
  ref <308>: DATABASE ACCESSION NUMBER: SWISS-Prot / P97554
  ref <309>: DATABASE ENTRY DATE: 2002-06-15
MATPQSVFVFAICILMITELILASKNYYDILGVPKSASERQIKKAFHKLAMKYHPDKNKSPDAEAKFREIAEAYETLSDANRRKEYDIIGHSAFTNGKGQRSNGSPFEQSFNFNFDDLFKDFNLFGQNQNTRSKKHFENHFQTRQDGSSRQRHHFQEFSFGGGLFDDMFEDMEKMFSFSGFDSTNRRTVQTENRFHGSSKHCRTVTQRRGNMVTTYTDCSGQ

SEQ ID NO: 6568 - DNA, 2371 bp, Homo sapiens
  ref <308>: DATABASE ACCESSION NUMBER: Refseq / NM_012328
  ref <309>: DATABASE ENTRY DATE: 2002-11-05
agctggctgagaggggactgggcgccggcggggaaggaggagcgctaggtcggtgtacgaccgagattagggtgcgtgccagctccgggaggccgcggtgaggggccgggcccaagctgccgacccgagccgatcgtcagggtcgccagcgcctcagctctgtggaggagcagcagtagtcggagggtgcaggatattagaaatggctactccccagtcaattttcatctttgcaatctgcattttaatgataacagaattaattctggcctcaaaaagctactatgatatcttaggtgtgccaaaatcggcatcagagcgccaaatcaagaaggcctttcacaagttggccatgaagtaccaccctgacaaaaataagagcccggatgctgaagcaaaattcagagagattgcagaagcatatgaaacactctcagatgctaatagacgaaaagagtatgatacacttggacacagtgcttttactagtggtaaaggacaaagaggtagtggaagttcttttgagcagtcatttaacttcaattttgatgacttatttaaagactttggcttttttggtcaaaaccaaaacactggatccaagaagcgttttgaaaatcatttccagacacgccaggatggtggttccagtagacaaaggcatcatttccaagaattttcttttggaggtggattatttgatgacatgtttgaagatatggagaaaatgttttcttttagtggttttgactctaccaatcagcatacagtacagactgaaaatagatttcatggatctagcaagcactgcaggactgtcactcaacgaagaggaaatatggttactacatacactgactgttcaggacagtagttcttattctattctcactaaatccaactggttgactcttcctcattatctttgatgctaaacaattttctgtgaactattttgacaagtgcatgatttcactttaaacaatttgatatagctattaaatatatttaagggttttttttttttgacaaattcaacattcaacgagtagacaaaatgctaattatttccctgattaggaaagtttctttaaaaaacacgtaattttgcctagtgctttttctctacctgcccttgggctcactaatatcaccagtattattaccaagaaaatattgagtttacctgattaaactttaaaagttaattgtagatttaaattgtgtgaacctaatgatttttgcagtgaaacctttactaattcaaagttgcatgttctatgacatctgtgacttgcgttgcagagtgtacatgaaactgtataattgagtcattcagtaaaggagaacagtatcttggttaattgctactgaaaggttgagaaaggaatggtttgatatttaccacagcgctgtgcctttctacagtagaactggggtaaaggaaatggttttattgcccatagtcatttaggctggaaaaaagttgaaaacttaacgaaatattgccaagagattgttatgtgtttggttccagcctaaaaatgattttgtagtgttgaaatcatagctacttacatagctttttcatatttctttcttagttgttggcactcttaggtcttagtatggatttatgtgtttgtgtgtgtgtagtttatcctctctctcatctttatctagagattgactgatacctcattctgtttgtaaaaccagccagtaatttctgtgcaaccttactatgtgcaatatttttaaatcctgagaaatgtgtgcttttgttttcggatagacttatttctttagttctgcacttttccacattatactccatatgagtattaatcctatggatacatattaaaacaagtgtctcatacaacattgtatgtgagagaaatataaatatttacaacctgatattcgttgttgttttattgttaaaagtttattatgcaactctggaggtatagagggcatataagctatgggacatatgctgatcacaggctatattcatgaagttacttttgaccaacctgaaaactgataggattttgtttgtcatttggtaatttctactgcattcttaccatccttctctcacaaattttgatagcttgaagatctttttaattataattttgttgtatttgtttcctaggagcaagtgttcctgctgccagttctttcctctttaggcgtggttgagaaaaagcagaaactttacataaagctgtatttcttaatcatctttaatttgaaacttaagaaaatgaatttattctgttatatttatgtaacttatttcctggaagttatatctactagttttgtttgataataataaaattagctataccttgaa

SEQ ID NO: 6569 - protein, 223 aa, Homo sapiens
  ref <308>: DATABASE ACCESSION NUMBER: SWISS-Prot / Q9UBS3
  ref <309>: DATABASE ENTRY DATE: 2002-06-15
MATPQSIFIFAICILMITELILASKSYYDILGVPKSASERQIKKAFHKLAMKYHPDKNKSPDAEAKFREIAEAYETLSDANRRKEYDTLGHSAFTSGKGQRGSGSSFEQSFNFNFDDLFKDFGFFGQNQNTGSKKRFENHFQTRQDGGSSRQRHHFQEFSFGGGLFDDMFEDMEKMFSFSGFDSTNQHTVQTENRFHGSSKHCRTVTQRRGNMVTTYTDCSGQ

SEQ ID NO: 6570 - DNA, 482 bp, Rattus norvegicus
  misc_feature (1)..(482): n=a, c, g or t
  ref <308>: DATABASE ACCESSION NUMBER: EMBL / AI012030
  ref <309>: DATABASE ENTRY DATE: 2000-03-03
gaaagtatcaaaccagaattttattatatataaacacatttcttaatactgctctttcattactttcaacccgcggaaggaaggagtggcccagccagacagaagatcatgtgaggaacaagcaacgcacacgaatctgtgtatcggtaatgctactgcaggggaatatgaaaccagactccgtaacaaagcgactgtttccttgcgctcttatttggctcctcggcgctgcctgaagtagcggttgtaggcggcgttgtacccgtagatcagggcgtagcgctcacacagcttgtagtcatcacaggcctccctgttgatctcctgngcaggcttgttgagttcccggactctttcctgggctttagcgtgccatctctgctgaggggatataaaggtgttggcatttctccggttggtgaagggactgacttcataggattccatgctttcgtgagattcatagcacagggctgccacgg

SEQ ID NO: 6571 - protein, 103 aa, Rattus norvegicus
  ref <308>: DATABASE ACCESSION NUMBER: SWISS-Prot / P08494
  ref <309>: DATABASE ENTRY DATE: 2002-06-15
MKSLLPLAILAALAVAALCYESHESMESYEVSPFTTRRNANTFISPQQRWHAKAQERVRELNKPAQEINREACDDYKLCERYALIYGYNAAYNRYFRQRRGAK

SEQ ID NO: 6572 - DNA, 603 bp, Homo sapiens
  ref <308>: DATABASE ACCESSION NUMBER: Refseq / NM_000900
  ref <309>: DATABASE ENTRY DATE: 2002-11-05
cgtgctgctacacaagaaccctgagactgacctgcaggacgaaaccatgaagagcctgatccttcttgccatcctggccgccttagcggtagtaactttgtgttatgaatcacatgaaagcatggaatcttatgaacttaatcccttcattaacaggagaaatgcaaataccttcatatcccctcagcagagatggagagctaaagtccaagagaggatccgagaacgctctaagcctgtccacgagctcaatagggaagcctgtgatgactacagactttgcgaacgctacgccatggtttatggatacaatgctgcctataatcgctacttcaggaagcgccgaggggccaaatgagactgagggaagaaaaaaaatctctttttttctggaggctggcacctgattttgtatccccctgtagcagcattactgaaatacataggcttatatacaatgcttctttcctgtatattctcttgtctggctgcacccctttttcccgcccccagattgataagtaatgaaagtgcactgcagtgagggtcaaaggagagtcaacatatgtgattgttccataataaacttctggtgtgatactt

SEQ ID NO: 6573 - protein, 103 aa, Homo sapiens
  ref <308>: DATABASE ACCESSION NUMBER: SWISS-Prot / P08493
  ref <309>: DATABASE ENTRY DATE: 2002-06-15
MKSLILLAILAALAVVTLCYESHESMESYELNPFINRRNANTFISPQQRWRAKVQERIRERSKPVHELNREACDDYRLCERYAMVYGYNAAYNRYFRKRRGAK

SEQ ID NO: 6574 - DNA, 480 bp, Rattus norvegicus
  ref <308>: DATABASE ACCESSION NUMBER: EMBL / AI012183
  ref <309>: DATABASE ENTRY DATE: 2000-03-03
aatgcattctgtaaaagttcatttggcagtctctttctctttctttctctctgtcctttttttgaaatcaaagtccattaagttcttcccctctcttcttttagcaaacttgtaacatcctttcttaacagaaggaaattaagcaaacaaaaaccagtcttttgccttttctttctctgtttcactcccccttattttgatttatttatttattgaattgccatgtatggccagttaaaactgctgccggacagtaacatatcccggatgagggtttcgatgggggttttacctaccaaacggacgaaaaacaattgctctatgactgaggaggagaccgtgcggagggaagggagacgaagcaaaagctttccgaaccgtgttggctggttggggtactggctcctaacgtactcttccaaagcacactgggacttttcctgcaaactttcaacgtgggctacatcagacagaccacag

SEQ ID NO: 6575 - protein, 414 aa, Rattus norvegicus
  ref <308>: DATABASE ACCESSION NUMBER: SWISS-Prot / O09018
  ref <309>: DATABASE ENTRY DATE: 2001-10-16
MAMVVSTWRDPQDEVPGSQGSQASQAPPVPGPPPGAPHTPQTPGQGGPASTPAQTAAGSQGGPGGPGSDKQQQQQHIECVVCGDKSSGKHYGQFTCEGCKSFFKRSVRRNLSYTCRANRNCPIDQHHRNQCQYCRLKKCLKVGMRREAVQRGRMPPTQPTHGQFALTNGDPLNCHSYLSGYISLLLRAEPYPTSRFGSQCMQPNNIMGIENICELAARMLFSAVEWARNIPFFPDLQITDQVALLRLTWSELFVLNAAQCSMPLHVAPLLAAAGLHASPMSADRVVAFMDHIRIFQEQVEKLKALHVDSAEYSCLKAIVLFTSDACGLSDVAHVESLQEKSQCALEEYVRSQYPNQPTRFGKLLLRLPSLRTVSSSVIEQLFFVRLVGKTPIETLIRDMLLSGSSFNWPYMAIQ

SEQ ID NO: 6576 - DNA, 1563 bp, Homo sapiens
  ref <308>: DATABASE ACCESSION NUMBER: EMBL / BC014664
  ref <309>: DATABASE ENTRY DATE: 2001-09-27
ccgagccacccggggcgccctcccgcgccctcttgcaccctcgcacacacaaaaggcggcgcgccggagcccgagacccggggagtcgccgccgccccgccgccgcccgcagccaggggagcaggaagtccggacgcagcccccatagatatggcaatggtagtcagcacgtggcgcgacccccaggacgaggtgcccggctcacagggcagccaggcctcgcaggcgccgcccgtgcccggcccgccgcccggcgccccgcacacgccacagacgcccggccaagggggcccagccagcacgccagcccagacggcggccggtggccagggcggccctggcggcccgggtagcgacaagcagcagcagcagcaacacatcgagtgcgtggtgtgcggagacaagtcgagcggcaagcactacggccagttcacgtgcgagggctgcaagagcttcttcaagcgcagcgtgcggaggaacctgagctacacgtgccgcgccaaccggaactgtcccatcgaccagcaccatcgcaaccagtgccagtactgccgcctcaaaaagtgcctcaaagtgggcatgagacgggaagcggtgcagaggggcaggatgccgccgacccagccgacccacgggcagttcgcgctgaccaacggggatcccctcaactgccactcgtacctgtccggatatatttccctgctgttgcgcgcggagccctatcccacgtcgcgcttcggcagccaatgcatgcagcccaacaacatcatgggtatcgagaacatttgcgaactggccgcgaggatgctcttcagcgccgtcgagtgggcccggaacatccccttcttccccgacctgcagatcacggaccaggtggccctgcttcgcctcacctggagcgagctgtttgtgttgaatgcggcgcagtgctccatgcccctccacgtcgccccgctcctggccgccgccggcctgcatgcttcgcccatgtccgccgaccgggtggtcgcctttatggaccacatacggatcttccaagagcaagtggagaagctcaaggcgctgcacgttgactcagccgagtacagctgcctcaaggccatagtcctgttcacctcagatgcctgtggtctctctgatgtagcccatgtggaaagcttgcaggaaaagtctcagtgtgctttggaagaatacgttaggagccagtaccccaaccagccgacgagattcggaaagcttttgcttcgcctcccttccctccgcaccgtctcctcctcagtcatagagcaattgtttttcgtccgtttggtaggtaaaacccccatcgaaaccctcatccgggatatgttactgtccggcagcagttttaactggccgtatatggcaattcaataaataaataaaataagaagggggagtgaaacagagaaagaaaaggcaaaagactggtttgtttgcttaatttccttctgttaagaaaggatataaaaggatgttacaagtttgctaaaagaagagaggggaagaatttaatggactgtgaatttcaaaaaaaaaaaaaaa

SEQ ID NO: 6577 - protein, 414 aa, Homo sapiens
  ref <308>: DATABASE ACCESSION NUMBER: SWISS-Prot / P24468
  ref <309>: DATABASE ENTRY DATE: 2001-10-16
MAMVVSTWRDPQDEVPGSQGSQASQAPPVPGPPPGAPHTPQTPGQGGPASTPAQTAAGGQGGPGGPGSDKQQQQQHIECVVCGDKSSGKHYGQFTCEGCKSFFKRSVRRNLSYTCRANRNCPIDQHHRNQCQYCRLKKCLKVGMRREAVQRGRMPPTQPTHGQFALTNGDPLNCHSYLSGYISLLLRAEPYPTSRFGSQCMQPNNIMGIENICELAARMLFSAVEWARNIPFFPDLQITDQVALLRLTWSELFVLNAAQCSMPLHVAPLLAAAGLHASPMSADRVVAFMDHIRIFQEQVEKLKALHVDSAEYSCLKAIVLFTSDACGLSDVAHVESLQEKSQCALEEYVRSQYPNQPTRFGKLLLRLPSLRTVSSSVIEQLFFVRLVGKTPIETLIRDMLLSGSSFNWPYMAIQ

SEQ ID NO: 6578 - DNA, 647 bp, Rattus norvegicus
  misc_feature (1)..(647): n=a, c, g or t
  ref <308>: DATABASE ACCESSION NUMBER: EMBL / AI012275
  ref <309>: DATABASE ENTRY DATE: 2000-03-03
caagtttacattttattaaatacacagttaacaagtttgagttttctacataggaaaaggccagttaatttcaggtgcttcatagaaaaattagcattggaaaaacaaatacaaatccataattggccttgtggctaatggggaaaaaataactattttaaaaggtagcaaaatctaaccaggtcggagacctttataaacaaacagtagacttaccacagaaattgcattcaaactccactatagcaaaactgtaaccacaaaatttggctacagctaattgtttccaaaaaaatctttcttaaaaaattaacagttatgactataaaaatgtagtttttctttacaaagtaaaaaagtttaaatctttaataaatggaaacaaaatgatcctcttacagtttttataaatagctctcaagacatatattactcatctgctgtaatctttctttacctgagagaatttcccaggatcccaaaggattaccttaaagacttctatcatttccctcacatgaatgtggttaagcttctggaagtcaactggatgaatgcattctggctctgcccttgcgcaactaaaacaaaattaaattacctctttggtaaaagccaagtgttccggnctttcgaaataacttgtc

SEQ ID NO: 6579 - DNA, 1309 bp, Homo sapiens
  ref <308>: DATABASE ACCESSION NUMBER: EMBL / AK026295
  ref <309>: DATABASE ENTRY DATE: 2000-09-29
tttatttttttgtagagatggggttgtccaggctggtctcaaactcctgagctcaagcaatgtgcccgccttggcttcccaaagtgctgggattataggcgtaaaccactgcacgcagcctaccctctgcctttttaagatgatgtatttatttaatttttgccatcattggtgcttcaccttcctgcgaaggaaattccagagcctgtatttaagctacctaggcttttacactccctttattgcctttccaaatagtatctcatttggtgtactctagtgtcctatacctcttggaaacgaaagagggcccaacctacaactaagaagggacaaaccttgaactaagtaagaccttacacacccagaaagaacactgggccctccttcttcagggacaatgcagtagccacttggcttgtggaatttactgaaggctatttcctgtaacttgctagttaacttagttttgtatttcaggcagaggtgcgctctgtaatgttgggcctttgacttcacagtactggagagctgttcacacagatgtttagacctttctctctctctctcttttcttctttctcaacaactctttcacagaggcagtcattttgaaaggttgaaatatttggcctttaccaaagagctttttttttccttaagcaaaatcctttcagaaagaaacaaatggggaagggcagattaagaatgcatatgtcccaatccacttctataggagtttaatcatattcacatgagtaaaatgatggaagaactctttaaggtaatcctttgggataaaggatcctgggaagttctctcaggtaaagaaagcttacagcagatttgtaatatatgtctggagagctatttataagaaatttaagaggattgttttgttttcctttattaaagatttaagcctttttactttgcaaaaagaaaactacaaaagttttatagatataactttgctaattttttaaacttttctgaaacgattagctgtagccaaattatgtggttacgttttgctacattagaatttgaaaatgcaatatgtgtggtaaatctactgtttgaaatttataatggtctctgatatgattcgaattttggtaacttttgaaagttattttccccctttagtcatggatttctatttgttttttaatgttaatttttctagaaagcatctgaattgactaggcttttcctatataaaaaactcaaaacttgttaactctgtactttaataaaatttaaaattaaaactgtgttgttttttaaaaaaaaaaaaaaaaaaaaa

SEQ ID NO: 6580 - DNA, 631 bp, Rattus norvegicus
  ref <308>: DATABASE ACCESSION NUMBER: EMBL / AI012589
  ref <309>: DATABASE ENTRY DATE: 2000-03-03
ctgccttacaaactttattagtctgggaaaagggggacaaggagttcctgtcccttcgtccactactgtttaccattgccgttgatgggacggttcaaatggtcaggggaggacagaaaggccttgatcttggggcgggcactgaggcgagccacataggcagagagcagggggaagttgtccaggcagccaggggccaggacttggtggaccagcagcaggtccagcaagttgtaatctgcaaaggaaatctggttacccacaatgaaagctttgcctccctggttctgggacagcagggtctcaaaaggtttcagatgcccaggcagggccttcacatagtcatccttaccattctcatagttagtgtagatgagggtaccatatttgcatcgaaggtcctccaccccatcattcaccatatccaccaaggcagcctccttctggtctttcccataaagccctaaagagcgacccaggtgcctcaagatggcattagattggtaaagggtgaggtctccatcttcaaacttggggagctgcccatacagacaagtggacttgagcgagccttgaagccagacatctatggtaaccacctcctccttccagctctggccctggtcagcca

SEQ ID NO: 6581 - protein, 209 aa, Rattus norvegicus
  ref <308>: DATABASE ACCESSION NUMBER: SWISS-Prot / P04906
  ref <309>: DATABASE ENTRY DATE: 2002-06-15
PPYTIVYFPVRGRCEATRMLLADQGQSWKEEVVTIDVWLQGSLKSTCLYGQLPKFEDGDLTLYQSNAILRHLGRSLGLYGKDQKEAALVDMVNDGVEDLRCKYGTLIYTNYENGKDDYVKALPGHLKPFETLLSQNQGGKAFIVGNQISFADYNLLDLLLVHQVLAPGCLDNFPLLSAYVARLSARPKIKAFLSSPDHLNRPINGNGKQ

SEQ ID NO: 6582 - DNA, 719 bp, Homo sapiens
  ref <308>: DATABASE ACCESSION NUMBER: EMBL / U30897
  ref <309>: DATABASE ENTRY DATE: 1999-07-01
gtcttcgccaccatgccgccctacaccgtggtctatttcccagttcgaggccgctgcgcggccctgcgcatgctgctggcagatcagggccagagctggaaggaggaggtggtgaccgtggagacgtggcaggagggctcactcaaagcctcctgcctatacgggcagctccccaagttccaggacggagacctcaccctgtaccagtccaataccatcctgcgtcacctgggccgcacccttgggctctatgggaaggaccagcaggaggcagccctggtggacatggtgaatgacggcgtggaggacctccgctgcaaatacgtctccctcatctacaccaactatgaggcgggcaaggatgactatgtgaaggcactgcccgggcaactgaagccttttgagaccctgctgtcccagaaccagggaggcaagaccttcattgtgggagaccagatctccttcgctgactacaacctgctggacttgctgctgatccatgaggtcctagcccctggctgcctggatgcgttccccctgctctcagcatatgtggggcgcctcagtgcccggcccaagctcaaggccttcctggcctcccctgagtacgtgaacctccccatcaatggcaacgggaaacagtgagggttggggggactctgagcgggaggcagagtttgccttcctttctccaggaccaataaaatttctaagagagc

SEQ ID NO: 6583 - protein, 209 aa, Homo sapiens
  ref <308>: DATABASE ACCESSION NUMBER: SWISS-Prot / P09211
  ref <309>: DATABASE ENTRY DATE: 2002-06-15
PPYTVVYFPVRGRCAALRMLLADQGQSWKEEVVTVETWQEGSLKASCLYGQLPKFQDGDLTLYQSNTILRHLGRTLGLYGKDQQEAALVDMVNDGVEDLRCKYISLIYTNYEAGKDDYVKALPGQLKPFETLLSQNQGGKTFIVGDQISFADYNLLDLLLIHEVLAPGCLDAFPLLSAYVGRLSARPKLKAFLASPEYVNLPINGNGKQ

SEQ ID NO: 6584 - DNA, 631 bp, Rattus norvegicus; identical to SEQ ID NO: 6580
  ref <308>: DATABASE ACCESSION NUMBER: EMBL / AI012589
  ref <309>: DATABASE ENTRY DATE: 2000-03-03

SEQ ID NO: 6585 - protein, 209 aa, Rattus norvegicus; identical to SEQ ID NO: 6581
  ref <308>: DATABASE ACCESSION NUMBER: SWISS-Prot / P04906
  ref <309>: DATABASE ENTRY DATE: 2002-06-15

SEQ ID NO: 6586 - DNA, 719 bp, Homo sapiens; identical to SEQ ID NO: 6582
  ref <308>: DATABASE ACCESSION NUMBER: EMBL / U30897
  ref <309>: DATABASE ENTRY DATE: 1999-07-01

SEQ ID NO: 6587 - protein, 209 aa, Homo sapiens; identical to SEQ ID NO: 6583
  ref <308>: DATABASE ACCESSION NUMBER: SWISS-Prot / P09211
  ref <309>: DATABASE ENTRY DATE: 2002-06-15

SEQ ID NO: 6588 - DNA, 614 bp, Rattus norvegicus
  ref <308>: DATABASE ACCESSION NUMBER: EMBL / AI012604
  ref <309>: DATABASE ENTRY DATE: 2000-03-03
cttgcggccacgagatttttcttttatttttttttttttttttttttttttttttttttttttaattttataacattgttttaatcaagtaatgtagctgtttgaaacaggaaactttttaagacacctcaatagagccatgaaggattactcttaccaggttaacctccatgaataaaaacccagattgtgtgaaatttgaatcccactggtttggcaccagaatgaacagaagcccaagaccttcctaagtgtctaagacctgaccatttccctttaaagcaacagctctaagacaaaatcttgccaacctgaggccgaaatgtgctgatctacttgagaatctcaaaaagtaatgacatatggatgggctgcccatgcaacaaagagtctgaaacccaggagacaagtgactttccaagtcccacttctttggtgtgacacagcacattcccctgttaccattccaggtatatggctcctgttccacgcccagcctcctatcaaggttttaattttaccaaatgtttggtatgattttaacgcatactttttacattaatcaaagtcttataatctgtgagatggatgacacaaagaataagatccaaata

SEQ ID NO: 6589 - protein, 429 aa, Rattus norvegicus
  ref <308>: DATABASE ACCESSION NUMBER: SWISS-Prot / Q07205
  ref <309>: DATABASE ENTRY DATE: 2001-10-16
MSVNVNRSVSDQFYRYKMPRLIAKVEGKGNGIKTVIVNMVDVAKALNRPPTYPTKYFGCELGAQTQFDVKNDRYIVNGSHEANKLQDMLDGFIKKFVLCPECENPETDLHVNPKKQTIGNSCKACGYRGMLDTHHKLCTFILKNPPENSDIGTGKKEKEKKNRKGKDKENGSVSTSETPPPPPPNEISPPHAVEEEEDDDWGEDTTEEAQRRRMDEISDHAKGLTLSDDLERTVEERVNILFDFVKKKKEEGIIDSSDKDIVAEAERLDVKAMGPLVLTEVLFDEKIREQIKKYRRHFLRFCHNNKKAQRYLLHGLECVVAMHQAQLISKIPHILKEMYDADLLEEEVIISWSEKASKKYVSKELAKEIRVKAEPFIKWLKEAEEESSGGEEEDEDENIEVVYSKTASVPKVETVKSDNKDDDIDIDAI

SEQ ID NO: 6590 - DNA, 3899 bp, Homo sapiens
  ref <308>: DATABASE ACCESSION NUMBER: Refseq / NM_001969
  ref <309>: DATABASE ENTRY DATE: 2002-11-05
agcttgagcgcggcggcggcgttgttcagtcagagcgagaacattccagaggtcgcccagctccggcgctgacgggtgtggaccgcggacgtcgctgggacagcccctccccgctgctcggcggcggcatctggcccggccgctcctcgctgcgcttcgcctccgcctcctcggactcggactcgggtttatatcgcgcctcacttcatcccagtcccgggcgagcagcgttgggtttatgtctttatttgacgaaaacgagctgttgcgcagccattggtacctgtattggggaaacatagcatacaagcaagaagcttacagcctcagtggcgaaaattttttcatgtcagagaccgagaactcttgcagtcgtttatgtcatcccttcttctccagacagaagataccaaaaagttgcaatcaaagatctcttcatcttattgataaagccactaataagccaaaatgtctgtcaatgtcaaccgcagcgtgtcagaccagttctatcgctacaagatgccccgtctgattgccaaggttgagggcaaaggcaatggaatcaagacagttatagtcaacatggttgacgttgcaaaggcgcttaatcggcctccaacgtatcccaccaaatattttggttgtgagctgggagcacagacccagtttgatgttaagaatgaccgttacattgtcaatggatctcatgaggcgaataagctgcaagacatgttggatggattcattaaaaaatttgttctctgtcctgaatgtgagaatcctgaaacagatttgcatgtcaatccaaagaagcaaacaataggtaattcttgtaaagcctgtggctatcgaggcatgcttgacacacatcataaactctgcacattcattctcaaaaacccacctgagaatagtgacagtggtacaggaaagaaagaaaaagaaaagaaaaacagaaagggcaaagacaaggaaaatggctccgtatccagcagtgagacaccaccaccaccaccaccaccaaatgaaattaatcctcctccacatacaatggaagaagaggaggatgatgactggggagaagatacaactgaggaagctcaaaggcgtcgaatggatgaaatcagtgaccatgcaaaagttctgacactcagtgatgatttggaaagaacaattgaggagagggtcaatatcctctttgattttgttaagaaaaagaaagaagagggtgttattgattcatctgacaaagaaatcgttgctgaagcagaaagactggatgtaaaagccatgggccctcttgttctaactgaagttctttttaatgagaagattagagaacagattaagaaatacaggcgccatttcctacgattttgtcacaacaacaaaaaagcccaacggtaccttcttcatggtttggagtgtgtggtagcaatgcatcaagctcagcttatctccaagattccacatatcttgaaggagatgtacgatgcagaccttttagaagaagaggtcatcatcagctggtcggaaaaggcctctaagaaatatgtctccaaagaacttgccaaagagattcgtgtcaaagcagaaccatttataaaatggttgaaggaggcagaggaagaatcttctggtggcgaagaagaagatgaagatgagaacattgaggtggtgtattcgaaggctgccagtgtaccgaaagttgagactgtaaagtcagacaacaaggatgacgacatcgatattgatgccatttaaagggatggatgcaacctagcttaacagtataatgctgcaaattttcctccattatcagccagaagtgcaacatgtatgtgcaaaagctaaaatggcttaacatcatgctacactttacactaaaaatctattactgtgagtggtctgttattaagcccaatgagacatctagggagtccatacacatcagtgagcagatgtagtttgcttatttatagcatgtttctttttgaaaaactagtggtggacacatttggatcacatttatacagttataaaaataaaggtttgattttggtcgttcttcagatgtttggctctgaatgacttaagctgaagtaactggctccttactttaaatgttctgccatcatttcacctgatgagcattcttggagcctgccagatattgttaggtcctggggctgcaaagaggtcctcaacaggatgtaaagcaaacttaattgtaattaatttattcagcccattaagaaagtactaaagttttatctctgtagttcctcaaattggcatctggtaatgtacattgtgaggtagactgataatgaaatgacagtgcaacatcttaaccaagaagtaaatatgacctcagtgtcctataaataatgtaagagcaggatttgaaacttggagagctgttttctcatttcatgtacacttgccccaaattgtctttgaagtcgtgtgcattgcacgttggatgagccagggaaattattacattaacaagcattttgtgtgtgcgtagtagttactttgtactgagagaacttgctttggggtgcaattaaacaataaactgattttatttgggagaaacaaggaagggtgcacttaactagcaacctaagcatgatttttcagcttttgcccttagggtttaaattacaattccaaaatgttagacatactgtattttttcgttcagtgtggctttaattttcccctcttgcagtttgttctgtaatgccttttacatttggacacatagtttatgctttttagattttggttgctttcttgccaaaataagtgttaactgtgtttcaaacttgattttctttcttttttctttttttttcttccagaatgtcttatttaaaaagaaagctaaaagcatacttctaagtcagagcctctattttggtgtaagacttgggatattttttacttcacattgaatatagccaggcacccaagaagtctgatggccacctgagtgcaggtgacaaggacctgacagagcccatgcagggctttagatttggacacacaagagttgataacttcctcatgaactccttgcctgatctaaactcatattatgggttctgactgtttgagtaatcgtcttcaaggttaaacctcttggcagttacccttttcacaaagtgcacagtgggaatcgagaatcgatagggttaattttggagcagtggcttataccattcacctctgtttttttgtgattatttcacagataatgagaccttaataacaaataggcgtaaaaaaattttcacattgaaatgatagaaacatttgatgtaataaaacttggttggcttgatattttaaggaattgaaacctagcaatcttattggagagacaagaattggtctccagctgcctttgatcaagattcgggtgcaagtggagcaggagccatatacctggagggaatgtgctttgtcacaccaaagaggattttttttttcttcaaacttgtatgttgcctaggtttcaaattctttgccgcaaggctgatctgctttcattaactggaattctgtaggagatactggtgacctaagctaagttgcactcagcatactcagtgtcaagctaatgaggttctattataaaggttctacttttaatctgagggaaaacatgttcagggcttctagaacactaaaaaatttggcttaaaccagtgttcagtctggtgccaaacttcgaatggaatacaaattcacataatctgaactttgttcacaggttatcctaatagagtaattcttcactttgctctattgaactgtcttaaggatttgtttaaacagctaagttacttgattaaaataatgataaaattgtaaaaaaaaaaaaa

SEQ ID NO: 6591 - protein, 431 aa, Homo sapiens
  ref <308>: DATABASE ACCESSION NUMBER: SWISS-Prot / P55010
  ref <309>: DATABASE ENTRY DATE: 2001-10-16
MSVNVNRSVSDQFYRYKMPRLIAKVEGKGNGIKTVIVNMVDVAKALNRPPTYPTKYFGCELGAQTQFDVKNDRYIVNGSHEANKLQDMLDGFIKKFVLCPECENPETDLHVNPKKQTIGNSCKACGYRGMLDTHHKLCTFILKNPPENSDSGTGKKEKEKKNRKGKDKENGSVSSSETPPPPPPPNEINPPPHTMEEEEDDDSGEDTTEEAQRRRMDEISDHAKVLTLSDDLERTIEERVNILFDFVKKKKEEGVIDSSDKEIVAEAERLDVKAMGPLVLTEVLFNEKIREQIKKYRRHFLRFCHNNKKAQRYLLHGLECVVAMHQAQLISKIPHILKEMYDADLLEEEVIISWSEKASKKYVSKELAKEIRVKAEPFIKWLKEAEEESSGGEEEDEDENIEVVYSKAASVPKVETVKSDNKDDDIDIDAI

SEQ ID NO: 6592 - DNA, 464 bp, Rattus norvegicus
  ref <308>: DATABASE ACCESSION NUMBER: EMBL / AI013194
  ref <309>: DATABASE ENTRY DATE: 2000-03-03
cctgtaccaatgtcactattctcaggtgggtttttgagaatgaatgtacagagtttatgatgtgtgtcaagcatgcctcggtacccacaggctttacaagaattacctattgtttgcttctttggattgacatgcagatctgtttcaggattctcacactcaggacagagaacaaattttttaatgaatccatccaacatgtcttgcagcttattcgcctcatgagatccattgacaatgtaacggtcattcttaacatcaaactgggtctgtgctcccagctcacaaccaaaatatttggtgggatacgttggaggccgattaagcgcctttgcaacgtcaaccatgttgactataactgtcttgattccatttcctttgccctcaaccttagcaatcaaacggggcatcttgtagcgatagaactggtctgacacgctgcggttgacgttgacagacatttt

SEQ ID NO: 6593 - protein, 429 aa, Rattus norvegicus; identical to SEQ ID NO: 6589
  ref <308>: DATABASE ACCESSION NUMBER: SWISS-Prot / Q07205
  ref <309>: DATABASE ENTRY DATE: 2001-10-16

SEQ ID NO: 6594 - DNA, 3899 bp, Homo sapiens; identical to SEQ ID NO: 6590
  ref <308>: DATABASE ACCESSION NUMBER: Refseq / NM_001969
  ref <309>: DATABASE ENTRY DATE: 2002-11-05

SEQ ID NO: 6595 - protein, 431 aa, Homo sapiens; identical to SEQ ID NO: 6591
  ref <308>: DATABASE ACCESSION NUMBER: SWISS-Prot / P55010
  ref <309>: DATABASE ENTRY DATE: 2001-10-16

SEQ ID NO: 6596 - DNA, 487 bp, Rattus norvegicus
  ref <308>: DATABASE ACCESSION NUMBER: EMBL / AI013297
  ref <309>: DATABASE ENTRY DATE: 2000-03-03
aaaggtcacatttattaggagattaaggggtgcattatccatggactataaatagtgcacagctgacacttcagtcacagtcaagcagaaatgtagccagctccaacctattttgtagacactcttgttcttttgttccaagaaaagtttgcaccgtaagacttggacttgggtttcggaaccttcctcccttccacgtcatagctccatccatgcttttctgcaaaggcaaccgcatcttctttggcactgaaggtgagaaccatgttggagaggggatcggccgttgatgcccaacccatcaaaggattttcccatctctctctggtatcaaactccatcttccatttcttcgtgttgtttactccagactgcatgttattgcgagcaggaacaaagattctgacctttctggttttgatgtgctcttctggaacaccagttagaggagtaacatcctggatggaactctgcagacggaaaccgc

SEQ ID NO: 6597 - protein, 162 aa, Rattus norvegicus
  ref <308>: DATABASE ACCESSION NUMBER: Refseq / NP_035017
  ref <309>: DATABASE ENTRY DATE: 2002-01-07
MLGRRAMATAAVSVCRVPSRLLSTSTWKLADNQTRDTQLITVDEKLDITTLTGVPEEHIKTRKVRIFVPARNNMQSGVNNTKKWKMEFDTRERWENPLMGWASTADPLSNMVLTFSAKEDAIAFAEKNGWSYDVEEKKVPKPKSKSYGANFSWNKRTRVSTK

SEQ ID NO: 6598 - DNA, 631 bp, Homo sapiens
  ref <308>: DATABASE ACCESSION NUMBER: EMBL / BC005270
  ref <309>: DATABASE ENTRY DATE: 2001-07-13
atcctggcgtttgcctgcagcaagatggcggcggtctcaatgtcagtggtactgaggcagacgttgtggcggagaagggcagtggctgtagctgccctttccgtttccagggttccgaccaggtcgttgaggacttcctcatggagattggcacaggaccagactcaagacacacaactcataacagttgatgaaaaattggatatcactactttaactggcgttccagaagagcatataaaaactagaaaagtcaggatctttgttcctgctcgcaataacatgcagtctggagtaaacaacacaaagaaatggaagatggagtttgataccagggagcgatgggaaaatcctttgatgggttgggcatcaacggctgatcccttatccaacatggttctaaccttcagtactaaagaagatgcagtttcctttgcagaaaaaaatggatggagctatgacattgaagagaggaaggttccaaaacccaagtccaagtcttatggtgcaaacttttcttggaacaaaagaacaagagtatccacaaaataggttggcactgactatatctctgcttgactgtgaataaagtcagctatgcaaaaaaaaaaaaaaaaaaaaaaaaaaaaaa

SEQ ID NO: 6599 - protein, 175 aa, Homo sapiens
  ref <308>: DATABASE ACCESSION NUMBER: SWISS-Prot / O43181
  ref <309>: DATABASE ENTRY DATE: 2002-06-15
MAAVSMSVVLRQTLWRRRAVAVAALSVSRVPTRSLRTSTWRLAQDQTQDTQLITVDEKLDITTLTGVPEEHIKTRKVRIFVPARNNMQSGVNNTKKWKMEFDTRERWENPLMGWASTADPLSNMVLTFSTKEDAVSFAEKNGWSYDIEERKVPKPKSKSYGANFSWNKRTRVSTK

SEQ ID NO: 6600 - DNA, 487 bp, Rattus norvegicus; identical to SEQ ID NO: 6596
  ref <308>: DATABASE ACCESSION NUMBER: EMBL / AI013297
  ref <309>: DATABASE ENTRY DATE: 2000-03-03

SEQ ID NO: 6601 - protein, 162 aa, Rattus norvegicus; identical to SEQ ID NO: 6597
  ref <308>: DATABASE ACCESSION NUMBER: Refseq / NP_035017
  ref <309>: DATABASE ENTRY DATE: 2002-01-07

SEQ ID NO: 6602 - DNA, 631 bp, Homo sapiens; identical to SEQ ID NO: 6598
  ref <308>: DATABASE ACCESSION NUMBER: EMBL / BC005270
  ref <309>: DATABASE ENTRY DATE: 2001-07-13

SEQ ID NO: 6603 - protein, 175 aa, Homo sapiens; identical to SEQ ID NO: 6599
  ref <308>: DATABASE ACCESSION NUMBER: SWISS-Prot / O43181
  ref <309>: DATABASE ENTRY DATE: 2002-06-15

SEQ ID NO: 6604 - DNA, 487 bp, Rattus norvegicus; identical to SEQ ID NO: 6596
  ref <308>: DATABASE ACCESSION NUMBER: EMBL / AI013297
  ref <309>: DATABASE ENTRY DATE: 2000-03-03

SEQ ID NO: 6605 - protein, 162 aa, Rattus norvegicus; identical to SEQ ID NO: 6597
  ref <308>: DATABASE ACCESSION NUMBER: Refseq / NP_035017
  ref <309>: DATABASE ENTRY DATE: 2002-01-07

SEQ ID NO: 6606 - DNA, 631 bp, Homo sapiens; identical to SEQ ID NO: 6598
  ref <308>: DATABASE ACCESSION NUMBER: EMBL / BC005270
  ref <309>: DATABASE ENTRY DATE: 2001-07-13

SEQ ID NO: 6607 - protein, 175 aa, Homo sapiens; identical to SEQ ID NO: 6599
  ref <308>: DATABASE ACCESSION NUMBER: SWISS-Prot / O43181
  ref <309>: DATABASE ENTRY DATE: 2002-06-15

SEQ ID NO: 6608 - DNA, 487 bp, Rattus norvegicus; identical to SEQ ID NO: 6596
  ref <308>: DATABASE ACCESSION NUMBER: EMBL / AI013297
  ref <309>: DATABASE ENTRY DATE: 2000-03-03

SEQ ID NO: 6609 - protein, 162 aa, Rattus norvegicus; identical to SEQ ID NO: 6597
  ref <308>: DATABASE ACCESSION NUMBER: Refseq / NP_035017
  ref <309>: DATABASE ENTRY DATE: 2002-01-07

SEQ ID NO: 6610 - DNA, 631 bp, Homo sapiens; identical to SEQ ID NO: 6598
  ref <308>: DATABASE ACCESSION NUMBER: EMBL / BC005270
  ref <309>: DATABASE ENTRY DATE: 2001-07-13

SEQ ID NO: 6611 - protein, 175 aa, Homo sapiens; identical to SEQ ID NO: 6599
  ref <308>: DATABASE ACCESSION NUMBER: SWISS-Prot / O43181
  ref <309>: DATABASE ENTRY DATE: 2002-06-15

SEQ ID NO: 6612 - DNA, 423 bp, Rattus norvegicus
  ref <308>: DATABASE ACCESSION NUMBER: EMBL / AI013472
  ref <309>: DATABASE ENTRY DATE: 2000-03-03
aaatgttttcaaaatccatcgggcaaaaagcttttccctacattctactgtctgatgagattggagagcagcagggacatgctgtcaagcagtcgcttcagcagaaagtgctctggaggccgcagcacctacaccatgttgtggtgattgctcctgtccatgatgtctacaggagacaggatctctctcctgatcgcgggggcatgcagtgagagggtcgtcttagtcttgaagaggtcagacacgaagaacactatgcagcaggccaccagagctccttgggcaaatcctgccaggacatcgctaggatggtgtttgtagtcagatacacgtgacaatcccgtgtagaaggccatcatgagcaaagtgaactgcaggagggggcggaggagccgggcctcacgccaggtgaagcgggcctgt

SEQ ID NO: 6613 - protein, 312 aa, Rattus norvegicus
  ref <308>: DATABASE ACCESSION NUMBER: SWISS-Prot / CAA69106
  ref <309>: DATABASE ENTRY DATE: 2001-12-01
MQSYKYDKAIVPESKNGGSPALNNNPRKGGSKRVLLICLDLFCLFMAALPFLIIETSTIKPYRRGFYCNDESIKYPLKVSETINDAVLCAVGIVIAILRIITGEFYRIYYLKEKSRSTIQNPYVAALYKQVGCFLFGCAISQSFTDIAKVSIGRLRPHFLSVCDPDFSQINCSEGYIQNYRCRGEDSKVQEARKSFFSGHASFSMFTMLYLVLYLQARFTWRGARLLRPLLQFTLLMMAFYTGLSRVSDYKHHPSDVLAGFAQGALVACCIVFFVSDLFKTKTTLSLPAPAIRREILSPVDIMDRSNHHNMV

SEQ ID NO: 6614 - DNA, 1451 bp, Homo sapiens
  ref <308>: DATABASE ACCESSION NUMBER: Refseq / NM_003713
  ref <309>: DATABASE ENTRY DATE: 2002-11-05
ggcacgaggggaaggtggccgagcgcccgcgctgcccactcgctcgctcgcgcactcagacgcgcgccacaacagcgcgccccaagctgcgcagctctgcaaaagtttctgctcgggatctggctctcttccccttggactttagaacgatttagggttgacagaggaaagcagaggcgcgcaggaggagcagaaaacaccaccttctgcagttggaggcaggcagccccggctgcactctagccgccgcgcccggagccggggccgacccgccactatccgcagcagcctcggccaggaggcgacccgggcgcctgggtgtgtggctgctgttgcgggacgtcttcgcggggcgggaggctcgcgccgcagccagcgccatgcaaaactacaagtacgacaaagcgatcgtcccggagagcaagaacggcggcagcccggcgctcaacaacaacccgaggaggagcggcagcaagcgggtgctgctcatctgcctcgacctcttctgcctcttcatggcgggcctccccttcctcatcatcgagacaagcaccatcaagccttaccaccgagggttttactgcaatgatgagagcatcaagtacccactgaaaactggtgagacaataaatgacgctgtgctctgtgccgtggggatcgtcattgccatcctcgcgatcatcacgggggaattctaccggatctattacctgaagaagtcgcggtcgacgattcagaacccctacgtggcagcactctataagcaagtgggctgcttcctctttggctgtgccatcagccagtctttcacagacattgccaaagtgtccatagggcgcctgcgtcctcacttcttgagtgtctgcaaccctgatttcagccagatcaactgctctgaaggctacattcagaactacagatgcagaggtgatgacagcaaagtccaggaagccaggaagtccttcttctctggccatgcctccttctccatgtacactatgctgtatttggtgctatacctgcaggcccgcttcacttggcgaggagcccgcctgctccggcccctcctgcagttcaccttgatcatgatggccttctacacgggactgtctcgcgtatcagaccacaagcaccatcccagtgatgttctggcaggatttgctcaaggagccctggtggcctgctgcatagttttcttcgtgtctgacctcttcaagactaagatgacgctctccctgcctgcccctgctatccggaaggaaatcctttcacctgtggacattattgacaggaacaatcaccacaacatgatgtaggtgccacccacctcctgagctgtttttgtaaaatgactgctgacagcaagttcttgctgctctccaatctcatcagacagtagaatgtagggaaaaacttttgcccgactgatttttaaaaaaaaaaaaaaaaaa

SEQ ID NO: 6615 - protein, 311 aa, Homo sapiens
  ref <308>: DATABASE ACCESSION NUMBER: Refseq / NP_003704
  ref <309>: DATABASE ENTRY DATE: 2002-11-05
MQNYKYDKAIVPESKNGGSPALNNNPRRSGSKRVLLICLDLFCLFMAGLPFLIIETSTIKPYHRGFYCNDESIKYPLKTGETINDAVLCAVGIVIAILAIITGEFYRIYYLKKSRSTIQNPYVAALYKQVGCFLFGCAISQSFTDIAKVSIGRLRPHFLSVCNPDFSQINCSEGYIQNYRCRGDDSKVQEARKSFFSGHASFSMYTMLYLVLYLQARFTWRGARLLRPLLQFTLIMMAFYTGLSRVSDHKHHPSDVLAGFAQGALVACCIVFFVSDLFKTKMTLSLPAPAIRKEILSPVDIIDRNNHHNMM

SEQ ID NO: 6616 - DNA, 399 bp, Rattus norvegicus
  ref <308>: DATABASE ACCESSION NUMBER: EMBL / AI014087
  ref <309>: DATABASE ENTRY DATE: 2000-03-03
accgtataacttcagttttaattttccatggtatttttctttctgtcttcatgaaatcacctctttacatgggctttggtggaggtcgtggtgcaacgccagcaggtctgaatcgtggtgggggtgttcggtccttccgggcctcacgagatcgattcctgacaaccttgctatgaatggcacagctcacgcagtagtgcagcttgacatagagcttgggaagcacgtaagcgtcgaagacgcttgcttcagatatgtccctgactgcagcggcttctacaatgttccgaatgacaaacttcttaatggccttatccttgggcacgcaccgggcgcagttcgtgcagcgaattggttgcacatggccgcgggcctttttggcacgaccgttgtttctcc

SEQ ID NO: 6617 - protein, 115 aa, Rattus norvegicus [sequence omitted]

SEQ ID NO: 6618 - DNA, 217 bp, Homo sapiens
  misc_feature (1)..(217): n=a, c, g or t
  ref <308>: DATABASE ACCESSION NUMBER: EMBL / AW022506
  ref <309>: DATABASE ENTRY DATE: 1999-11-13
gcacgaggtgcaattcacagcaaagtagtcaggaatcgatctcgtgaagcccgcaaggaccgaacacccccaccccgatttagacctgcgggtgctgccccacgtcccccaccaaagcccatgtaaggagctgagttcttaaagactgaagacaggctattctctggagaaaaataaaatggaaattgtacttaaaaaaaaaaaaaaaaaaannaaa

SEQ ID NO: 6619 - DNA, 410 bp, Rattus norvegicus
  ref <308>: DATABASE ACCESSION NUMBER: EMBL / AI014135
  ref <309>: DATABASE ENTRY DATE: 2000-03-03
agaacaacaaatcaaaatgtaaacttaaaatataaccaaaagagggacagctctttaggaaaaggaaaaaaccttaaatagtgaataaacaactacaaccacttaaccattgtaggcttaaaagcagccatcaataaagaaagcgttcaagctcaacatacatacttacacacactaattccacaaacctcaataaattcctatattacaaattgggctaatctatagacccatagatgaaatactgttaatatgagtaacaagaaccaattctcctagcacaagtgtatgacaacccggataaccattgtcaattatcgaatcataggtactaacccaacaataaaattacctatccctaactcgttagcccaacacaggcgtgctttaaggaaagattaacaaaaaaa

SEQ ID NO: 6620 - DNA, 2201 bp, Homo sapiens
  ref <308>: DATABASE ACCESSION NUMBER: EMBL / L22009
  ref <309>: DATABASE ENTRY DATE: 1999-07-02
ttttttttttcgtcttagccacgcagaagtcgcgtgtctagtttgtttcgacgccggaccgcgtaagagacgatgatgttgggcacggaaggtggagagggattcgtggtgaaggtccggggcttgccctggtcttgctcggccgatgaagtgcagaggtttttttctgactgcaaaattcaaaatggggctcaaggtattcgtttcatctacaccagagaaggcagaccaagtggcgaggcttttgttgaacttgaatcagaagatgaagtcaaattggccctgaaaaaagacagagaaactatgggacacagatatgttgaagtattcaagtcaaacaacgttgaaatggattgggtgttgaagcatactggtccaaatagtcctgacacggccaatgatggctttgtacggcttagaggacttccctttggatgtagcaaggaagaaattgttcagttcttctcagggttggaaatcgtgccaaatgggataacattgccggtggacttccaggggaggagtacgggggaggccttcgtgcagtttgcttcacaggaaatagctgaaaaggctctaaagaaacacaaggaaagaatagggcacaggtatattgaaatctttaagagcagtagagctgaagttagaactcattatgatccaccacgaaagcttatggccatgcagcggccaggtccttatgacagacctggggctggtagagggtataacagcattggcagaggagctggctttgagaggatgaggcgtggtgcttatggtggaggctatggaggctatgatgattacaatggctataatgatggctatggatttgggtcagatagatttggaagagacctcaattactgtttttcaggaatgtctgatcacagatacggggatggtggctctactttccagagcacaacaggacactgtgtacacatgcggggattaccttacagagctactgagaatgacatttataattttttttcaccgctcaaccctgtgagagtacacattgaaattggtcctgatggcagagtaactggtgaagcagatgtcgagttcgcaactcatgaagatgctgtggcagctatgtcaaaagacaaagcaaatatgcaacacagatatgtagaactcttcttgaattctacagcaggagcaagcggtggtgcttacgaacacagatatgtagaactcttcttgaattctacagcaggagcaagcggtggtgcttatggtagccaaatgatgggaggcatgggcttgtcaaaccagtccagctacgggggcccagccagccagcagctgagtgggggttacggaggcggctacggtggccagagcagcatgagtggatacgaccaagttttacaggaaaactccagtgattttcaatcaaacattgcataggtaaccaaggagcagtgaacagcagctactacagtagtggaagccgtgcatctatgggcgtgaacggaatgggagggttgtctagcatgtccagtatgagtggtggatggggaatgtaattgatcgatcctgatcactgactcttggtcaacctttttttttttttttttttctttaagaaaacttcagtttaacagtttctgcaatacaagcttgtgatttatgcttactctaagtggaaatcaggattgttatgaagacttaaggcccagtatttttgaatacaatactcatctaggatgtaacagtgaagctgagtaaactataactgttaaacttaagttccagcttttctcaagttagttataggatgtacttaagcagtaagcgtatttaggtaaaagcagttgaattatgttaaatgttgccctttgccacgttaaattgaacactgttttggatgcatgttgaaagacatgcttttattttttttgtaaaacaatataggagctgtgtctactattaaaagtgaaacattttggcatgtttgttaattctagtttcatttaataacctgtaaggcacgtaagtttaagctttttttttttttaagttaatgggaaaaatttgagacgcaataccaatacttaggattttggtcttggtgtttgtatgaaattctgaggccttgatttaaatctttcattgtattgtgatttccttttaggtatattgcgctaagtgaaacttgtcaaataaatcctccttttaaaaactgc

SEQ ID NO: 6621 - protein, 449 aa, Homo sapiens
  ref <308>: DATABASE ACCESSION NUMBER: SWISS-Prot / P31943
  ref <309>: DATABASE ENTRY DATE: 2001-10-16
MMLGTEGGEGFVVKVRGLPWSCSADEVQRFFSDCKIQNGAQGIRFIYTREGRPSGEAFVELESEDEVKLALKKDRETMGHRYVEVFKSNNVEMDWVLKHTGPNSPDTANDGFVRLRGLPFGCSKEEIVQFFSGLEIVPNGITLPVDFQGRSTGEAFVQFASQEIAEKALKKHKERIGHRYIEIFKSSRAEVRTHYDPPRKLMAMQRPGPYDRPGAGRGYNSIGRGAGFERMRRGAYGGGYGGYDDYNGYNDGYGFGSDRFGRDLNYCFSGMSDHRYGDGGSTFQSTTGHCVHMRGLPYRATENDIYNFFSPLNPVRVHIEIGPDGRVTGEADVEFATHEDAVAAMSKDKANMQHRYVELFLNSTAGASGGAYEHRYVELFLNSTAGASGGAYGSQMMGGMGLSNQSSYGGPASQQLSGGYGGGYGGQSSMSGYDQVLQENSSDFQSNIA

SEQ ID NO: 6622 - DNA, 410 bp, Rattus norvegicus; identical to SEQ ID NO: 6619
  ref <308>: DATABASE ACCESSION NUMBER: EMBL / AI014135
  ref <309>: DATABASE ENTRY DATE: 2000-03-03

SEQ ID NO: 6623 - DNA, 2201 bp, Homo sapiens; identical to SEQ ID NO: 6620
  ref <308>: DATABASE ACCESSION NUMBER: EMBL / L22009
  ref <309>: DATABASE ENTRY DATE: 1999-07-02

SEQ ID NO: 6624 - protein, 449 aa, Homo sapiens; identical to SEQ ID NO: 6621
  ref <308>: DATABASE ACCESSION NUMBER: SWISS-Prot / P31943
  ref <309>: DATABASE ENTRY DATE: 2001-10-16

SEQ ID NO: 6625 - DNA, 410 bp, Rattus norvegicus; identical to SEQ ID NO: 6619
  ref <308>: DATABASE ACCESSION NUMBER: EMBL / AI014135
  ref <309>: DATABASE ENTRY DATE: 2000-03-03

SEQ ID NO: 6626 - DNA, 2201 bp, Homo sapiens; identical to SEQ ID NO: 6620
  ref <308>: DATABASE ACCESSION NUMBER: EMBL / L22009
  ref <309>: DATABASE ENTRY DATE: 1999-07-02

SEQ ID NO: 6627 - protein, 449 aa, Homo sapiens; identical to SEQ ID NO: 6621
  ref <308>: DATABASE ACCESSION NUMBER: SWISS-Prot / P31943
  ref <309>: DATABASE ENTRY DATE: 2001-10-16

SEQ ID NO: 6628 - DNA, 410 bp, Rattus norvegicus; identical to SEQ ID NO: 6619
  ref <308>: DATABASE ACCESSION NUMBER: EMBL / AI014135
  ref <309>: DATABASE ENTRY DATE: 2000-03-03

SEQ ID NO: 6629 - DNA, 2201 bp, Homo sapiens; identical to SEQ ID NO: 6620
  ref <308>: DATABASE ACCESSION NUMBER: EMBL / L22009
  ref <309>: DATABASE ENTRY DATE: 1999-07-02

SEQ ID NO: 6630 - protein, 449 aa, Homo sapiens; identical to SEQ ID NO: 6621
  ref <308>: DATABASE ACCESSION NUMBER: SWISS-Prot / P31943
  ref <309>: DATABASE ENTRY DATE: 2001-10-16

SEQ ID NO: 6631 - DNA, 474 bp, Rattus norvegicus
  ref <308>: DATABASE ACCESSION NUMBER: EMBL / AI014163
  ref <309>: DATABASE ENTRY DATE: 2000-03-03
atgaccaagcatcacaaacacttttatttgtggttatcagttatttttacagaataaagaactcattaatttgtaacactgtacattaaattaaaatataacccatccctacatcaaaaattatctaagttgaccaagataaaaaaagtctctaaaagcttatatacattagaagtagcaaaaataataataaaggaagaaattagaaaacagacatcaaagtcagacatctagaagaattctccaacatctgctctcttatctcggcatttgcttcgggcttttgttcgagctttgaaagctgcagagttatataaatgcctttcaaaacgaggaatcttcatggttttaagtgttgcagcatcgagcatcacagggggtcccagctcaaatacattgcgaaggaattcatttgtctgcaagtggtactgcatccctgatccaagagcctctttaaacgtgtcataagtgtgc

SEQ ID NO: 6632 - protein, 449 aa, Rattus norvegicus
  ref <308>: DATABASE ACCESSION NUMBER: SWISS-Prot / P20695
  ref <309>: DATABASE ENTRY DATE: 2000-05-30
MPKNKKRNAPHRGGGGGGGSGAATSAATTGGPHRTVQPFSDEDASIETMSHCSGYSDPSSFAEDGPEVLDEEGTQEDLEYKLKGLIDLTLDKSAKTRQAALEGVKNALSSKVLYEFVLERRMTLTDSIERCLKKGKSDGQRAAAALASVLCIQLGPGLESEEILKTLGPILKKIICDGTASIQARQTCATCFGVCCFIATDDITELYSTLECLEGIFTKSYLKEKDTNVPCSTPNTVLHISSLLAWTLLLTICPISEVKKKLELHFHKLPSLLSCDDVNMRIAAGESLALLFELARGMESDFFYEDMDSLTQMLRALATDGNKHRAKVDKRKQRSVFRDVLRAVEERDFPTETVKFGPERMYIDSWVKKHTYDTFKEALGSGMQYHLQTNEFLRNVFELGPPVMLDAATLKTMKIPRFERHLYNSAAFKARTKARSKCRDKRADVGEFF

SEQ ID NO: 6633 - DNA, 675 bp, Homo sapiens
  ref <308>: DATABASE ACCESSION NUMBER: EMBL / AV733799
  ref <309>: DATABASE ENTRY DATE: 2000-10-06
atagtaatgactaactattttttatgcatttccataagcttccaagcctcctctcgtgtgatgatgtaaacatgagaatagctgctggtgaatctttggcacttctctttgaattggccagaggaatagagagtgtaagtatctaactggcagaggagcttgtgtcacaaggcccattgttccatcattaccttgcaattgagaattgggcaataactttggaacatggccagcttgagaacccagtgatttatttccctacttcttggcagtggtggtgtaatactttagagagcagaaaccagtaggggttggtacagcagtgtttgactgtggttcattatacttaatttttgctatctatagaactgaagtttagggatcctcatggagagagttttgtctaatataatctttatgaaactgcttggatttctcagatacccaatacatcaagctgatgaaggcatgtgatgcttcataattaatatcaaacaaatgaatagccaagatggtaaccactgctcattagacttggacatgtgctttgcagttacccattcactttgtcacttacagatgttagttcccatggcttggctctcgacgggatttgagttgggatcagttgtcagtcgacccaatttgctttgacactgtctttggttaacctcc

SEQ ID NO: 6634 - protein, 451 aa, Homo sapiens
  ref <308>: DATABASE ACCESSION NUMBER: SWISS-Prot / O00458
  ref <309>: DATABASE ENTRY DATE: 2000-05-30
MPKNKKRNTPHRGSSAGGGGSGAAAATAATAGGQHRNVQPFSDEDASIETMSHCSGYSDPSSFAEDGPEVLDEEGTQEDLEYKRKGLIDLTLDKSAKTRQAALEGIKNALASKMLYEFILERRMTLTDSIERCLKKGKSDEQRAAAALASVLCIQLGPGIESEEILKTLGPILKKIICDGSASMQARQTCATCFGVCCFIATDDITELYSTLECLENIFTKSYLKEKDTTVICSTPNTVLHISSLLAWTLLLTICPINEVKKKLEMHFHKLPSLLSCDDVNMRIAAGESLALLFELARGIESDFFYEDMESLTQMLRALATDGNKHRAKVDKRKQRSVFRDVLRAVEERDFPTETIKFGPERMYIDCWVKKHTYDTFKEVLGSGMQYHLQSNEFLRNVFELGPPVMLDAATLKTMKISRFERHLYNSAAFKARTKARSKCRDKRADVGEFF

SEQ ID NO: 6635 - DNA, 508 bp, Rattus norvegicus
  ref <308>: DATABASE ACCESSION NUMBER: EMBL / AI014169
  ref <309>: DATABASE ENTRY DATE: 2000-03-03
gccattaaaaaactttattttgatttttttttttttacaaaggatagccccactttggggtgaaaatatatttggttaagtacaaaatatagtttttaatcatacaaaaagatacacaaaatacaaaaacaacaaagacgacacctccatcagctcacactttctggctgcacagttctcgggtggagtgcttagagtggagcttggagctctgacacaggacacggaacaaagtgctaaggcggagtaagttttggagtgctagaggccacggcgagagcagaactttctcctaacactggacaggaaatgggtctgggagcttccatggaaacctgcagttctcactgtgcctccatcactgttagggcatctcaatgtaagagtgtcaccagggtccagctgtcagcagcaacccttcatatgagtagtgtcagaatcacagaagtctgtgtgttgggggaaagcctccaaaagtaataaccaagctgggcctttaacctcagca

SEQ ID NO: 6636 - DNA, 581 bp, Homo sapiens
  ref <308>: DATABASE ACCESSION NUMBER: EMBL / AW601963
  ref <309>: DATABASE ENTRY DATE: 2000-03-24
gttcaggatgctaataaaccctgggggtagcggcaatcatctgcatttttaccacatacacttgaataatccaaaatactgagagttgcttccctatgctcaacatccataggaccaaatttggaaaggtgaactgtagttggcttatatgctggccttaggtgctcttatgacctgtgcatagccatatttagctcactggctaagaggctgaaaagattctaccaccttcaggcgtgtggggaacatgaacaggaggctgacaaacaaggagggaagtttctattgtacctggtgagcgaattgacagaaaaggattctgtgaaggtgatgagatttccatccatgctgactttgagaatacatgttcccgaattgtggtccccaaagctgccattgtggcccgccacacttaccttgccaatggccagaccaaggtgctgactcagaagttgtcatcagtcagaggcaatcatattatctcagggacatgcgcatcatggcgtggcaagagccttcgggttcagaagatcaggccttctatcctggctgcaacatccttcgagttgaatattccttat

SEQ ID NO: 6637 - DNA, 378 bp, Rattus norvegicus
  ref <308>: DATABASE ACCESSION NUMBER: EMBL / AI029805
  ref <309>: DATABASE ENTRY DATE: 2000-03-03
tttttttttttgtctataaagcatttaacccccctgtacacaactcactccttttaaagaaaaaaattgaaatgtaaggctgtgtaagatttgtttttaaactgtacagtgtctttttttgtatagttaacacactaccgaatgtgtctttagctagccctgtcctggtggtattttcaatagccactaaccttgcctggtacagtctgggggttgtaaattggcatggaaattaaagcaggttcttgttggtgcacagcacaaattagttatatatggggacagtagtttggtttttggtttctttttttttttttgtttttgttttttttccttttgtttttttttccatcttcagttgtctctgatgcagcttat

SEQ ID NO: 6638 - protein, 214 aa, Rattus norvegicus; identical to SEQ ID NO: 3846
  ref <308>: DATABASE ACCESSION NUMBER: SWISS-Prot / P07155
  ref <309>: DATABASE ENTRY DATE: 2002-06-15

SEQ ID NO: 6639 - DNA, 578 bp, Homo sapiens; identical to SEQ ID NO: 3847
  ref <308>: DATABASE ACCESSION NUMBER: EMBL / AV701053
  ref <309>: DATABASE ENTRY DATE: 2000-10-03

SEQ ID NO: 6640 - protein, 214 aa, Homo sapiens; identical to SEQ ID NO: 3848
  ref <308>: DATABASE ACCESSION NUMBER: SWISS-Prot / P09429
  ref <309>: DATABASE ENTRY DATE: 2002-06-15

SEQ ID NO: 6641 - DNA, 378 bp, Rattus norvegicus; identical to SEQ ID NO: 6637
  ref <308>: DATABASE ACCESSION NUMBER: EMBL / AI029805
  ref <309>: DATABASE ENTRY DATE: 2000-03-03

SEQ ID NO: 6642 - protein, 214 aa, Rattus norvegicus; identical to SEQ ID NO: 3846
  ref <308>: DATABASE ACCESSION NUMBER: SWISS-Prot / P07155
  ref <309>: DATABASE ENTRY DATE: 2002-06-15

SEQ ID NO: 6643 - DNA, 578 bp, Homo sapiens; identical to SEQ ID NO: 3847
  ref <308>: DATABASE ACCESSION NUMBER: EMBL / AV701053
  ref <309>: DATABASE ENTRY DATE: 2000-10-03

SEQ ID NO: 6644 - protein, 214 aa, Homo sapiens; identical to SEQ ID NO: 3848
  ref <308>: DATABASE ACCESSION NUMBER: SWISS-Prot / P09429
  ref <309>: DATABASE ENTRY DATE: 2002-06-15

SEQ ID NO: 6645 - DNA, 508 bp, Rattus norvegicus
  ref <308>: DATABASE ACCESSION NUMBER: EMBL / AI030089
  ref <309>: DATABASE ENTRY DATE: 2000-03-03
tttttttttttttttcagagatgagttccacagattaaagtctttgcctaaggcaatgcacagagtcacatggaggattctgtttatgtgagtgcgcagacccacatttgatcccacccctcaaagccccggtgggccctgacataagtcttgtgatgtttgactgctaagcatgccctgtgctcatcttcatccattgggcctgacaccgaagcttcccgaagccggcgtggatctgccaactttggggataaaattgcagttcttggtacaatttcctactgaactgacaggcaggattctcgatgtgagtgcgatgcaacggtttttgttttgttctcagtagctattagtgctacgtgtttacagtgtgttctagttttaatttcgaagtaagcttttctgacactgagaggcatttgcaacaacttgactcttaccgctgttgtatataagctcatgaatatatttgattcttgttaacatcatcaacatcagcctcgtgccg

SEQ ID NO: 6646 - protein, 704 aa, Rattus norvegicus; identical to SEQ ID NO: 5996
  ref <308>: DATABASE ACCESSION NUMBER: SWISS-Prot / P41777
  ref <309>: DATABASE ENTRY DATE: 2002-06-15

SEQ ID NO: 6647 - DNA, 505 bp, Rattus norvegicus
  misc_feature (1)..(505): n=a, c, g or t
  ref <308>: DATABASE ACCESSION NUMBER: EMBL / AI030175
  ref <309>: DATABASE ENTRY DATE: 2000-03-03
tttttttttttttttctcggcttatgagtttattattcctaccattcaaaaagaaggttctgcattaatggcttccccttctggtccatttagcccttagatgctgagagagtgggctaagggcatagagcaatcacatttaggggttctggtcattggggtcacacttgatcataactttcagccccagtccctttttggctgtttcaaaggcttctacagccttctccagggggaacctatgggtcactaagggctttacattcaaagtcttcgatgcaagcatggaaactgccatcggccacgtgttgcagtatcgaaacacgcctttgatgtccacctcccgcacagctgcgtgcactaggggtaaattgatcatctcggggcccattcccacaaccaccaaggtcccgccagagtgagtggcatanatgcccgtctggacagaggactccgctcccgtgcattcgatggtgacctctggcttgctccccagcacactttc

SEQ ID NO: 6648 - protein, 399 aa, Rattus norvegicus
  ref <308>: DATABASE ACCESSION NUMBER: SWISS-Prot / P27867
  ref <309>: DATABASE ENTRY DATE: 2002-06-15
MVFSSRVFFFSRVPLLQTLGGLTSRNTSSPPDPADTSKQESDMAAPAKGENLSLVVHGPGDIRLENYPIPELGPNDVLLKMHSVGICGSDVHYWEHGRIGDFVVKKPMVLGHEAAGTVTKVGPMVKHLKPGDRVAIEPGVPREIDEFCKIGRYNLTPSIFFCATPPDDGNLCRFYKHSADFCYKLPDSVTFEEGALIEPLSVGIYACRRGSVSLGNKVLVCGAGPIGIVTLLVAKAMGASQVVVIDLSASRLAKAKEVGADFTIQVAKETPHDIAKKVESVLGSKPEVTIECTGAESSVQDGIYATHSGGTLVVVGMGPEMINLPLVHAAVREVDIKGVFRYCNTWPMAVSMLASKTLNVKPLVTHRFPLEKAVEAFETAKKGLGLKVMIKCDPNDQNP

SEQ ID NO: 6649 - DNA, 2519 bp, Homo sapiens
  ref <308>: DATABASE ACCESSION NUMBER: EMBL / L29008
  ref <309>: DATABASE ENTRY DATE: 1999-07-02
agtcccgcccctgcgtgcggcgcttctcccaggccccaccttccatccagtgccctggaccctcggctgggtagcgccaccagagcgaccaaacgtcccgcgccttccaggccgcactccagagccaaaagagctccatggcggcggcggccaagcccaacaacctttccctggtggtgcacggaccgggggacttgcgcctggagaactatcctatccctgaaccaggcccaaatgaggtcttgctgaggatgcattctgttggaatctgtggctcagatgtccactactgggagtatggtcgaattgggaattttattgtgaaaaagcccatggtgctgggacatgaagcttcgggaacagtcgaaaaagtgggatcatcggtaaagcacctaaaaccaggtgatcgtgttgccatcgagcctggtgctccccgagaaaatgatgaattctgcaagatgggccgatacaatctgtcaccttccatcttcttctgtgccacgccccccgatgacgggaacctctgccggttctataagcacaatgcagccttttgttacaagcttcctgacaatgtcacctttgaggaaggcgccctgatcgagccactttctgtggggatccatgcctgcaggagaggcggagttaccctgggacacaaggtccttgtgtgtggagctgggccaatcgggatggtcactttgctcgtggccaaagcaatgggagcagctcaagtagtggtgactgatctgtctgctacccgattgtccaaagccaaggagattggggctgatttagtcctccagatctccaaggagagccctcaggaaatcgccaggaaagtagaaggtctgctggggtgcaagccggaagtcaccatcgagtgcacgggggcagaggcctccatccaggcgggcatctacgccactcgctctggtgggaccctcgtgcttgtggggctgggctctgagatgaccaccgtacccctactgcatgcagccatccgggaggtggatatcaagggcgtgtttcgatactgcaacacgtggccagtggcgatttcgatgcttgcgtccaagtctgtgaatgtaaaacccctcgtcacccataggtttcctctggagaaagctctggaggcctttgaaacatttaaaaagggattggggttgaaaatcatgctcaagtgtgaccccagtgaccagaatccctgatgttaatgggctctgctcatccccacagtctcgggatctcagggcacaatggctggacaggggtgggctctgatgcagaactttctcttttgaatgttaagaataactaatacaattcattgtgaacagaagtccttaagcagaggaattggtgtgccttaaagatacaatctgggatagtttgggggaacttgtagccagaatgccctgttcatgctgagcaaagttcagcaagtagagcagagtttggcaggcaggtgccaggaactccccttcttcctggagtgccttcattgaggaaggaaatctggcccttgggtttcctggttccactgctactgacccagaggggaatgagggctgagttatgaaaagataacttcatgaagacttaactggcccagaagctgattttcatgaaaatctgccactcagggtctgggatgaaggcttgtcagcacttccagtttagaacgcaatgtttctagagacatattggctgtttgttttgatgataaaaggagaataagaaaaggcatcactttcctggatccaggataatttttaaaccaatcaaatgaaaaaaacaaacaaacaaaaaaggaaatgtcatgtgaggttaaaccagtttgcattcccctaatgtggaaaaagtaagaggactactcagcactgtttgaagattgcctcttctacagcttctgagaattgtgttatttcacttgccaagtgaaggaccccctccccaacatgccccagcccacccctaagcatggtcccttgtcaccaggcaaccaggaaactgctacttgtggacctcaccagagaccaggagggtttggttagctcacaggacttcccccaccccagaagattagcatcccatactagactcatactcaactcaactaggctcatactcaattgatggttattagacaattccatttctttctggttattataaacagaaaatctttcctcttctcattaccagtaaaggctcttggtatctttctgttggaatgatttctatgaacttgtcttattttaatggtgggttttttttctggtaagatttagacctaaatcgcatcatgccaacttgtgactttgagactattcatcaagaatgaggatatagtagccatgacatagcttgagctatagcctttaattccttactttggctatgggtggagggtgagtttgaagaggttctgattttcttgtaacctgggaaagccatgaccttgtgcccgattctttcagattgctttgggtaataaatattggtggtggtatctg

SEQ ID NO: 6650 - protein, 356 aa, Homo sapiens
  ref <308>: DATABASE ACCESSION NUMBER: SWISS-Prot / Q00796
  ref <309>: DATABASE ENTRY DATE: 2002-06-15
AAAAKPNNLSLVVHGPGDLRLENYPIPEPGPNEVLLRMHSVGICGSDVHYWEYGRIGNFIVKKPMVLGHEASGTVEKVGSSVKHLKPGDRVAIEPGAPRENDEFCKMGRYNLSPSIFFCATPPDDGNLCRFYKHNAAFCYKLPDNVTFEEGALIEPLSVGIHACRRGGVTLGHKVLVCGAGPIGMVTLLVAKAMGAAQVVVTDLSATRLSKAKEIGADLVLQISKESPQEIARKVEGLLGCKPEVTIECTGAEASIQAGIYATRSGGTLVLVGLGSEMTTVPLLHAAIREVDIKGVFRYCNTWPVAISMLASKSVNVKPLVTHRFPLEKALEAFETFKKGLGLKIMLKCDPSDQNP

SEQ ID NO: 6651 - DNA, 505 bp, Rattus norvegicus; identical to SEQ ID NO: 6647
  misc_feature (1)..(505): n=a, c, g or t
  ref <308>: DATABASE ACCESSION NUMBER: EMBL / AI030175
  ref <309>: DATABASE ENTRY DATE: 2000-03-03

SEQ ID NO: 6652 - protein, 399 aa, Rattus norvegicus; identical to SEQ ID NO: 6648
  ref <308>: DATABASE ACCESSION NUMBER: SWISS-Prot / P27867
  ref <309>: DATABASE ENTRY DATE: 2002-06-15

SEQ ID NO: 6653 - DNA, 2519 bp, Homo sapiens; identical to SEQ ID NO: 6649
  ref <308>: DATABASE ACCESSION NUMBER: EMBL / L29008
  ref <309>: DATABASE ENTRY DATE: 1999-07-02

SEQ ID NO: 6654 - protein, 356 aa, Homo sapiens; identical to SEQ ID NO: 6650
  ref <308>: DATABASE ACCESSION NUMBER: SWISS-Prot / Q00796
  ref <309>: DATABASE ENTRY DATE: 2002-06-15

SEQ ID NO: 6655 - DNA, 367 bp, Rattus norvegicus
  ref <308>: DATABASE ACCESSION NUMBER: EMBL / AI030286
  ref <309>: DATABASE ENTRY DATE: 2000-03-03
tttttttttttttttgtctgttttctgaaagagggacagtttattatcaattcacaattaaagcagcatgcaatttattattttttttaactttttgttttattcctggcaacggcaacaaaccacaacattatcgaggaatgttatgcagacttttaaagttgtgcgcaaatgactgtttcattctggtcatggatatgtccaataaatagattgtagaaccactgtactgtataaacttcatttatacatgcagttcataaaattatctttttcttaactgaataatttaccctgttatgtctatatacaaatagataatttttgtctcaatataatctatacaacataaatccctcgtgccgaa

SEQ ID NO: 6656 - protein, 249 aa, Rattus norvegicus
  ref <308>: DATABASE ACCESSION NUMBER: SWISS-Prot / P23363
  ref <309>: DATABASE ENTRY DATE: 2002-06-15
MTILFLTMVISYFGCMKAAPMKEANVHGQGNLAYPAVRTHGTLESVNGPRAGSRGLTTTSLADTFEHVIEELLDEDQKVRPNEENHKDADLYTSRVMLSSQVPLEPPLLFLLEEYKNYLDAANMSMRVRRHSDPARRGELSVCDSISEWVTAADKKTAVDMSGGTVTVLEKVPVSKGQLKQYFYETKCNPMGYTKEGCRGIDKRHWNSQCRTTQSYVRALTMDSKKRIGWRFIRIDTSCVCTLTIKRGR

SEQ ID NO: 6657 - DNA, 1353 bp, Homo sapiens
  ref <308>: DATABASE ACCESSION NUMBER: EMBL / X60201
  ref <309>: DATABASE ENTRY DATE: 1998-11-25
gaattcggggctgccgccgccgcgcccgggcgcacccgcccgctcgctgtcccgcgcaccccgtagcgcctcgggctcccgggccggacagaggagccagcccggtgcgcccctccacctcctgctcggggggctttaatgagacacccaccgctgctgtggggccggcggggagcagcaccgcgacggggaccggggctgggcgctggagccagaatcggaaccacgatgtgactccgccgccggggacccgtgaggtttgtgtggaccccgagttccaccaggtgagaagagtgatgaccatccttttccttactatggttatttcatactttggttgcatgaaggctgcccccatgaaagaagcaaacatccgaggacaaggtggcttggcctacccaggtgtgcggacccatgggactctggagagcgtgaatgggcccaaggcaggttcaagaggcttgacatcattggctgacactttcgaacacgtgatagaagagctgttggatgaggaccagaaagttcggcccaatgaagaaaacaataaggacgcagacttgtacacgtccagggtgatgctcagtagtcaagtgcctttggagcctcctcttctctttctgctggaggaatacaaaaattacctagatgctgcaaacatgtccatgagggtccggcgccactctgaccctgcccgccgaggggagctgagcgtgtgtgacagtattagtgagtgggtaacggcggcagacaaaaagactgcagtggacatgtcgggcgggacggtcacagtccttgaaaaggtccctgtatcaaaaggccaactgaagcaatacttctacgagaccaagtgcaatcccatgggttacacaaaagaaggctgcaggggcatagacaaaaggcattggaactcccagtgccgaactacccagtcgtacgtgcgggcccttaccatggatagcaaaaagagaattggctggcgattcataaggatagacacttcttgtgtatgtacattgaccattaaaaggggaagatagtggatttatgttgtatagattagattatattgagacaaaaattatctatttgtatatatacataacagggtaaattattcagttaagaaaaaaataattttatgaactgcatgtataaatgaagtttatacagtacagtggttctacaatctatttattggacatgtccatgaccagaagggaaacagtcatttgcgcacaacttaaaaagtctgcattacattccttgataatgttgtggtttgttgccgttgccaagaactgaaaacataaaaagttaaaaaaaataataaattgcatgctgcccgaattc

SEQ ID NO: 6658 - protein, 247 aa, Homo sapiens
  ref <308>: DATABASE ACCESSION NUMBER: SWISS-Prot / P23560
  ref <309>: DATABASE ENTRY DATE: 2002-06-15
MTILFLTMVISYFGCMKAAPMKEANIRGQGGLAYPGVRTHGTLESVNGPKAGSRGLTSLADTFEHVIEELLDEDQKVRPNEENNKDADLYTSRVMLSSQVPLEPPLLFLLEEYKNYLDAANMSMRVRRHSDPARRGELSVCDSISEWVTAADKKTAVDMSGGTVTVLEKVPVSKGQLKQYFYETKCNPMGYTKEGCRGIDKRHWNSQCRTTQSYVRALTMDSKKRIGWRFIRIDTSCVCTLTIKRGR

SEQ ID NO: 6659 - DNA, 531 bp, Rattus norvegicus
  ref <308>: DATABASE ACCESSION NUMBER: EMBL / AI043631
  ref <309>: DATABASE ENTRY DATE: 2000-03-03
tttttttttttttttttaaaatctacacaaagttttattgcaatcatacaaggttacattaggtcaaatacaacaaatactatgatgcaattttacatttattaaactacagtccaaagcacaaatttacacactctaaatacactaaacgtatctaatgaagtcacactggtcttccactcacatgtgatagatctgggtgaaagacatcaactttacaagacttttaacaggaatccttattataaaaactgtgtacttgtatgtaaacgatttgatggggaacccaattaatgggcttccatctccactaagtcatccattttgttgcatattttattttaaacgcttaacgggtgggtcaaactggtatgtttaaatctggatacattatctaaataaatcccctattacccccaatgaattatagatgaaagctgattttgtctggtcccaaacagctattactatgaatttgtttccaagaaaattaacagaataaagattgattgaatttttccccacactgga

SEQ ID NO: 6660 - protein, 448 aa, Rattus norvegicus; identical to SEQ ID NO: 2319
  ref <308>: DATABASE ACCESSION NUMBER: SWISS-Prot / Q63764
  ref <309>: DATABASE ENTRY DATE: 2002-06-15

SEQ ID NO: 6661 - DNA, 2619 bp, Homo sapiens; identical to SEQ ID NO: 2320
  ref <308>: DATABASE ACCESSION NUMBER: EMBL / D88674
  ref <309>: DATABASE ENTRY DATE: 1997-11-24

SEQ ID NO: 6662 - protein, 448 aa, Homo sapiens; identical to SEQ ID NO: 2321
  ref <308>: DATABASE ACCESSION NUMBER: SWISS-Prot / O14977
  ref <309>: DATABASE ENTRY DATE: 2002-06-15

SEQ ID NO: 6663 - DNA, 531 bp, Rattus norvegicus; identical to SEQ ID NO: 6659
  ref <308>: DATABASE ACCESSION NUMBER: EMBL / AI043631
  ref <309>: DATABASE ENTRY DATE: 2000-03-03

SEQ ID NO: 6664 - protein, 448 aa, Rattus norvegicus; identical to SEQ ID NO: 2319
  ref <308>: DATABASE ACCESSION NUMBER: SWISS-Prot / Q63764
  ref <309>: DATABASE ENTRY DATE: 2002-06-15

SEQ ID NO: 6665 - DNA, 2619 bp, Homo sapiens; identical to SEQ ID NO: 2320
  ref <308>: DATABASE ACCESSION NUMBER: EMBL / D88674
  ref <309>: DATABASE ENTRY DATE: 1997-11-24

SEQ ID NO: 6666 - protein, 448 aa, Homo sapiens; identical to SEQ ID NO: 2321
  ref <308>: DATABASE ACCESSION NUMBER: SWISS-Prot / O14977
  ref <309>: DATABASE ENTRY DATE: 2002-06-15

SEQ ID NO: 6667 - DNA, 363 bp, Rattus norvegicus
  ref <308>: DATABASE ACCESSION NUMBER: EMBL / AI044716
  ref <309>: DATABASE ENTRY DATE: 2000-03-03
cggccgcaaaggtgtgttggggaccaggaggttaaaaagataggccctccctcgatggtgggttctttgtgttggagctgaatggttacatggaaggagttgagaatttggataccagttctgagcttggtagaagaaactagggtcactctggctaacataagggtacagcatccttagtaacccgagcgtggctcgaagcgttcatgatttcatccaaaacacaacatgtaaacttactcagctaacaatggggaaatgtattgcttctgtgcgcagtggacttatgtgcaatttgttcaaaagggaacaagtcattgaggagaaacaagcccaatacttagagtcccaattttgtcttat

SEQ ID NO: 6668 - protein, 432 aa, Rattus norvegicus
  ref <308>: DATABASE ACCESSION NUMBER: SWISS-Prot / P47971
  ref <309>: DATABASE ENTRY DATE: 1998-12-15
MLAGRAARTCALLALCLLGSRAQDFGPTRFICTSVPVDADMCAASVAAGGAEELRSNVLQLRETVLQQKETILSQKETIRELTTKLGRCESQSTLDAGPGEARSGGGRKQPGSGKNTMGDLSRTPASETLSQLGQTLQSLKTRLENLEQYSRLNSSSQTNSLKDLLQSKIDDLERQVLSRVNTLEEGKGGPKNDTEERAKIESALTSLHQRISELEKGQKDNRPGDKFQLTFPLRTNYMYAKVKKSLPEMYAFTVCMWLKSSAAPGVGTPFSYAVPGQANELVLIEWGNNPMEILINDKVAKLPFVINDGKWHHICVTWTTRDGVWEAYQDGTQGGNGENLAPYHPIKPQGVLVLGQEQDTLGGGFDATQAFVGELAHFNIWDRKLTPGEVYNLATCSSKALSGNVIAWAESQIEIFGGATKWTFEACRQIN

SEQ ID NO: 6669 - DNA, 5071 bp, Homo sapiens
  ref <308>: DATABASE ACCESSION NUMBER: EMBL / U61849
  ref <309>: DATABASE ENTRY DATE: 2000-03-04
ggcctgatagcgcggcgtgtggaccggccgaagagcgcgcccagagcggcgccgtcgcgagccacagcccgagccggtcccagccgagccgagccccagccgagccgagccggcccgagcgctccggtgcccgcagccatgccggccggccgcgcgcgcacctgtgcgctgctcgccctctgcctcctggggccccaggatttcgggccgacgcgcttcatctgcacttcggtgccggtggacgccgacatgtgtgccgcgtccgtggccgcgggcggcgcggaggagctccggagcagcaatgtgctgcagctccgggagaccgtgctgcagcagaaggagaccatcctgagccagaaggagaccatccgcgagctgaccgccaagctgggccgctgcgagagccagagcacgctggaccccggagccggcgaggcccgggcgggcggcggccgcaagcagccgggctcgggcaagaacaccatgggcgacctgtcccggacaccggccgccgagacgctcagccaactcgggcaaactttgcaatcgctcaaaacccgcctggagaacctcgagcagtacagccgcctcaattcctccagccagaccaacagcctcaaggatctgctgcagagcaagatcgatgagctggagaggcaggtgctgtcccgggtgaacaccctggaggagggcaagggggggcccaagaacgacaccgaggagagggtcaagatcgagaccgccctgacctccctgcaccagcggatcagcgagctcgagaaaggtcagaaagacaaccgccctggagacaagttccagctcacattcccactgcggaccaactatatgtatgccaaggtgaagaagagcctgccagagatgtacgccttcactgtctgcatgtggctcaagtccagcgccacgccaggtgtgggcacgcccttctcctacgctgtgcccggccaggccaacgagctggtcctcattgagtggggcaacaaccccatggagatcctcatcaatgacaaggtggccaagctgccttttgtcatcaatgatggcaagtggcaccacatctgtgtcacctggaccacccgggacggggtctgggaggcctaccaggatggcacgcagggtggcagtggcgagaacttggcgccctatcaccccatcaagccccagggcgtgctggtgctgggccaggagcaggacactctgggtggtgggtttgatgccacccaggcatttgtgggtgagctggcccacttcaacatctgggaccgcaagctgacccccggggaggtgtacaacctggccacctgcagcaccaaggctctgtccggcaatgtcatcgcctgggctgaatcccacatcgagatctacggcggggccaccaagtggaccttcgaggcctgtcgccagatcaactgagcacggcaggccaggctgagccgcccgccctcgccccctgcttgtgcggcgatgatctgtttgtgcgtctcttctctcccttttccccaggaatgaaccgaggccgtcgccctgcacacgcacacgcacacagcctggttttgtcctcatgcacacgaagcagcccctgctcccatctgtccctgaggaagccccacttctctgtaggagcccggactctctcagcatgccccattcacagctgaagtgggtgctgcaacgtcttgaacaaggcagaagttggtgagaggatctgtgtgtgcgtgtctacatgtgtgtgtctacgtgtgtgcgtgcgtggctgggggaggccttttctttgaggacgtacctcatttccttctttcttctggctttggaaaaatctcatgatgaaaattcatatttgccaactttgttagctgcgtgcgtgctttggggttggtgcaacctcagtacacgcatttgtctttgtttgcaaacctttctcagagcgacatatctttatattgatgtaataaatgtcttttagtggtttgtcaaaggccgggggcgggggctctctacagagaatttttattttgtaatagaagtgaactgtctctgaaggtgaaggcaggccgtcctgggatggtaccctgtgctctcccgtggaggagaggggatggctgaggacactggcccttacccagggcgaacagcatccatccctgctgtttgcatcttgagagcagcatggggcctgggaggtcggcctgtgtgcccagctcagctagctctgccccaggacggccctgccctcgaccttcccacctcctcagatcctgcaaggctgggtctgcccctcccttctcacctctggagctgtgctgcactgcttcccagagagggccctgagagaggagcgtgccacccaccagggaagccgggccccagcacccctctcctttggcctcccggagtgcagaccagaggggaccttttaaggaaagaagccgtgtttcgatgaagacctggccacatggggcactgggacttcaacccagcccatcggtgggaaggtcctttttgggggactttgacagccatatccctcccagcacaccaggcgccaggtgagctggttcagacccctccagggtactccagagacctcacgtgtggagccaggcctggccaggcaggggcctgaaacccactcctccatctcatgggctcacggcctacacgagcccacaagctgccactggccggcgacactgacacctgagcagtgtccagaacctttttgcctttttttgttccccgtgaaaagcaacatggacatttccttctagtccttccaaggaggggagagaagtgtatgtgcatttgtgtgtgtgtgtgtgtgttgtgtgtgtgtgtgcgctaagtgagaaagagagcaggctcgggaggccctgcccagggtaggaggagcttcctgctttgcaccatctggtggtcgcaccctggagggcaccccgactctgtctccaggagtctcatcagcaaaccgctgacaagtctttctagaaattctactgcactgcctggctcagctgcacgctgcagacatttctgcaggaggagcaggtgtttctgtcttctgttccttctagggccacctgtccccttaaacacaggtccacgttgtgtcaagaacctagtgcatctgtgtgtgtctgtcagtgtctctgtgtcagtgttctcgtgggtgtctgcacggtaccggcccgccttctgcaatcatcactcccgcagagggggtgcagatcaggcgccgtgctgcggttgttgttcaacagtgctttttcttagatagcgtcttcctcagcgcccgtcggttgtggcatccttgatctcagggatcttctccgtttgcatgtcctcggagtggcgtgttccttctccctgggtccgacatgtgttcccgcacctgcatggactgccccggttctgtgttgtgtgccgagtgccgcccagtgttctgtgaccacccgtgtagctactgaaaatggctgggtaagcaagtcaagggtgttggaggaggtcaagagagagctcagtttccctctccccctccccaaacacaccaagaagcatttttaacgtgtaggttgagaacaagcctaaaggattcccacagctgggagccagcaagagagcttggagtcgcctctctagaccagatctagccccaccctcactccagccatctcggagcccttgtgtaggcaacgccggtgcgcggctgtgtggggtgctccctgccagcacctccggccagccccgcccctgccgatctactggaccgcagaccaccttctgcccccgtggccaggtgggagctgtccgttcaggaccatgagccatcctctgccctgactagcgaggggcagagcacaccccagtgcttacgcctccacccctgcagcctcctggcccgctcaccttcctcacccctcctctgacccacccatggtgccagggccgaagctgacctttagctccctcctgcccttgctagggtctgagccaagcccctcgactcctcactgtgttgacacttggcactttgctggccccgagaaggtcgatgacacagccgcaaatctaatccacgtagttcccatttactccttaatctgattgatgttccctcttgcactgaataatacatgcctctctcaggtaagccattttataaaacaagaagataaaaagcactgttgaggcagtgtttgcttttgccgagctggtgtccgacagctccctgggtgtccggggtgggagagctgttgacagaagctctccgggcctcagggcttagatcccacttgagtcgtaagccttcttgcttttgataacacagtattatttctcttactgtagaagaaaaagtttattaccaaacaagagtatttttatgaaagaaaaggacaaacctataaattaactcaacctatatctcccttgaaaatactttcaggctccaccaaaacgtagaactgaaagcatgtattttggaagaaagagatacattttgtatgctttcttttccttttgtagattcccagtttattttctaagactgcaaagatcactttgtcaccagccctgggacctgagaccaagggggtgtcttgtgggcagtgagggggtgaggagaggctggcatgaggttcagtcattccagtgagctccaaagaggggccacctgttctcaaaagcatgttggggaccaggaggtaaaactggccatttatggtgaacctgtgtcttggagctgacttactaagtggaatgagccgaggatttgaatatcagttctaaccttgatagaagaaccttgggttacatgtggttcacattaagaggatagaatcctttggaatcttatggcaaccaaatgtggcttgacgaagtcgtggtttcatctcttaaacacagtgtgtaaatttattcaactaacgatgggaaatgtattacttctgtacacagtggactgaagtgcaatttgttgaaagggaacaagtcattgaagagaaaaaaaaaaagcccaatacttagagtcccaattttgtctcatttgccaaaaaaa

SEQ ID NO: 6670 - protein, 430 aa, Homo sapiens
  ref <308>: DATABASE ACCESSION NUMBER: SWISS-Prot / Q15818
  ref <309>: DATABASE ENTRY DATE: 2001-10-16
MPAGRARTCALLALCLLGPQDFGPTRFICTSVPVDADMCAASVAAGGAEELRSSNVLQLRETVLQQKETILSQKETIRELTAKLGRCESQSTLDPGAGEARAGGGRKQPGSGKNTMGDLSRTPAAETLSQLGQTLQSLKTRLENLEQYSRLNSSSQTNSLKDLLQSKIDELERQVLSRVNTLEEGKGGPKNDTEERVKIETALTSLHQRISELEKGQKDNRPGDKFQLTFPLRTNYMYAKVKKSLPEMYAFTVCMWLKSSATPGVGTPFSYAVPGQANELVLIEWGNNPMEILINDKVAKLPFVINDGKWHHICVTWTTRDGVWEAYQDGTQGGSGENLAPYHPIKPQGVLVLGQEQDTLGGGFDATQAFVGELAHFNIWDRKLTPGEVYNLATCSTKALSGNVIAWAESHIEIYGGATKWTFEACRQIN

SEQ ID NO: 6671 - DNA, 388 bp, Rattus norvegicus
  ref <308>: DATABASE ACCESSION NUMBER: EMBL / AI044900
  ref <309>: DATABASE ENTRY DATE: 2000-03-03
tttttttttttttttttgagactgggtacccgcattgttctgaggaggatctgttctttagtgtactggaaacacgaggttaccagcaggcacaacagggaccctttggaacccttacaaaccagaagggtcacataaatgtactgcatgtgaggtggtgagggaaagggacaaggggaaggggttaagaagagaaatctctggtccactgtgactttcttcagcctggacagttgctcttaaaggggtagctttcttccagtgtactgtactcttcagagcagcagacggctgcagggtgtgcagccagcagcagacgtatcagaaagagtaagtcctaaccccttggttagaaaaacaggagacagaagttttaacacccacctta

SEQ ID NO: 6672 - protein, 699 aa, Rattus norvegicus; identical to SEQ ID NO: 2327
  ref <308>: DATABASE ACCESSION NUMBER: SWISS-Prot / P18163
  ref <309>: DATABASE ENTRY DATE: 2001-10-16

SEQ ID NO: 6673 - DNA, 3634 bp, Homo sapiens
  ref <308>: DATABASE ACCESSION NUMBER: EMBL / D10040
  ref <309>: DATABASE ENTRY DATE: 1998-08-17
tcaacacaggacaatgcaagcccatgagctgttccggtattttcgaatgccagagctggttgacttccgacagtacgtgcgtactcttccgaccaacacgcttatgggcttcggagcttttgcagcactcaccaccttctggtacgccacgagacccaaacccctgaagccgccatgcgacctctccatgcagtcagtggaagtggcgggtagtggtggtgcacgaagatccgcactacttgacagcgacgagcccttggtgtatttctatgatgatgtcacaacattatacgaaggtttccagaggggaatacaggtgtcaaataatggcccttgtttaggctctcggaaaccagaccaaccctatgaatggctttcatataaacaggttgcagaattgtcggagtgcataggctcagcactgatccagaagggcttcaagactgccccagatcagttcattggcatctttgctcaaaatagacctgagtgggtgattattgaacaaggatgctttgcttattcgatggtgatcgttccactttatgatacccttggaaatgaagccatcacgtacatagtcaacaaagctgaactctctctggtttttgttgacaagccagagaaggccaaactcttattagagggtgtagaaaataagttaataccaggccttaaaatcatagttgtcatggatgcctacggcagtgaactggtggaacgaggccagaggtgtggggtggaagtcaccagcatgaaggcgatggaggacctgggaagagccaacagacggaagcccaagcctccagcacctgaagatcttgcagtaatttgtttcacaagtggaactacaggcaaccccaaaggagcaatggtcactcaccgaaacatagtgagcgattgttcagcttttgtgaaagcaacagagaatacagtcaatccttgcccagatgatactttgatatctttcttgcctctcgcccatatgtttgagagagttgtagagtgtgtaatgctgtgtcatggagctaaaatcggatttttccaaggagatatcaggctgctcatggatgacctcaaggtgcttcaacccactgtcttccccgtggttccaagactgctgaaccggatgtttgaccgaattttcggacaagcaaacaccacgctgaagcgatggctcttggactttgcctccaagaggaaagaagcagagcttcgcagcggcatcatcagaaacaacagcctgtgggaccggctgatcttccacaaagtacagtcgagcctgggcggaagagtccggctgatggtgacaggagccgccccggtgtctgccactgtgctgacgttcctcagagcagccctgggctgtcagttttatgaaggatacggacagacagagtgcactgccgggtgctgcctaaccatgcctggagactggaccgcaggccatgttggggccccgatgccgtgcaatttgataaaacttgttgatgtggaagaaatgaattacatggctgccgagggcgagggcgaggtgtgtgtgaaagggccaaatgtatttcagggctacttgaaggacccagcgaaaacagcagaagctttggacaaagacggctggttacacacaggggacattggaaaatggttaccaaatggcaccttgaaaattatcgaccggaaaaagcacatatttaagctggcacaaggagaatacatagcccctgaaaagattgaaaatatctacatgcgaagtgagcctgttgctcaggtgtttgtccacggagaaagcctgcaggcatttctcattgcaattgtggtaccagatgttgagacattatgttcctgggcccaaaagagaggatttgaagggtcgtttgaggaactgtgcagaaataaggatgtcaaaaaagctatcctcgaagatatggtgagacttgggaaggattctggtctgaaaccatttgaacaggtcaaaggcatcacattgcaccctgaattattttctatcgacaatggccttctgactccaacaatgaaggcgaaaaggccagagctgcggaactatttcaggtcgcagatagatgacctctattccactatcaaggtttagtgtgaagaagaaagctcagaggaaatggcacagttccacaatctcttctcctgctgatggccttcatgttgttaattttgaatacagcaagtgtagggaaggaagcgttcgtgtttgacttgtccattcggggttcttctcataggaatgctagaggaaacagaacaccgccttacagtcacctcatgttgcagaccatgtttatggtaatacacactttccaaaatgagccttaaaaattgtaaaggggatactataaatgtgctaagttatttgagacttcctcagtttaaaaagtgggttttaaatcttctgtctccctgcttttctaatcaaggggttaggactttgctatctctgagatgtctgctacttgctgcaaattctgcagctgtctgctgctctaaagagtacagtgcactagagggaagtgttccctttaaaaataagaacaactgtcctggctggagaatctcacaagcggaccagagatctttttaaatccctgctactgtcccttctcacaggcattcacagaacccttctgattcgtaagggttacgaaactcatgttcttctccagtcccctgtggtttctgttggagcataaggtttccagtaagcgggagggcagatccaactcagaaccatgcagataaggagcctctggcaaatgggtgctcatcagaacgcgtggattctctttcatggcagaatgctcttggactcggttctccaggcctgattccccgactccatcctttttcaggggttatttaaaaatctgccttagattctatagtgaagacaagcatttcaagaaagagttacctggatcagccatgctcagctgtgacgcctgaataactgtctactttatcttcactgaaccactcactctgtgtaaaggccaacagatttttaatgtggttttcatatcaaaagatcatgttgggattaacttgcctttttccccaaaaaataaactctcaggcaagcatttctttaaagctattaagggagtatatacttgagtacttattgaaatggacagtaataagcaaatgttcttataatgctacctgatttctatgaaatgtgtttgacaagccaaaattctaggatgtagaaatctggaaagttcatttcctgggattcacttctccagggattttttaaagttaatttgggaaattaacagcagttcactttattgtgagtctttgccacatttgactgaattgagctgtcatttgtacatttaaagcagctgttttggggtctgtgagagtacatgtattatatacaagcacaacagggcttgcactaaagaattgtcattgtaataacactacttggtagcctaacttcatatatgtattcttaattgcacaaaaagtcaataatttgtcaccttggggttttgaatgtttgctttaagtgttggctatttctatgttttataaaccaaaacaaaatttccaaaaacaatgaaggaaaccaaaataaatatttctgcatttc

SEQ ID NO: 6674 - protein, 698 aa, Homo sapiens
  ref <308>: DATABASE ACCESSION NUMBER: SWISS-Prot / P33121
  ref <309>: DATABASE ENTRY DATE: 2001-10-16
MQAHELFRYFRMPELVDFRQYVRTLPTNTLMGFGAFAALTTFWYATRPKPLKPPCDLSMQSVEVAGSGGARRSALLDSDEPLVYFYDDVTTLYEGFQRGIQVSNNGPCLGSRKPDQPYEWLSYKQVAELSECIGSALIQKGFKTAPDQFIGIFAQNRPEWVIIEQGCFAYSMVIVPLYDTLGNEAITYIVNKAELSLVFVDKPEKAKLLLEGVENKLIPGLKIIVVMDAYGSELVERGQRCGVEVTSMKAMEDLGRANRRKPKPPAPEDLAVICFTSGTTGNPKGAMVTHRNIVSDCSAFVKATENTVNPCPDDTLISFLPLAHMFERVVECVMLCHGAKIGFFQGDIRLLMDDLKVLQPTVFPVVPRLLNRMFDRIFGQANTTLKRWLLDFASKRKEAELRSGIIRNNSLWDRLIFHKVQSSLGGRVRLMVTGAAPVSATVLTFLRAALGCQFYEGYGQTECTAGCCLTMPGDWTAGHVGAPMPCNLIKLVDVEEMNYMAAEGEGEVCVKGPNVFQGYLKDPAKTAEALDKDGWLHTGDIGKWLPNGTLKIIDRKKHIFKLAQGEYIAPEKIENIYMRSEPVAQVFVHGESLQAFLIAIVVPDVETLCSWAQKRGFEGSFEELCRNKDVKKAILEDMVRLGKDSGLKPFEQVKGITLHPELFSIDNGLLTPTMKAKRPELRNYFRSQIDDLYSTIKV

SEQ ID NO: 6675 - DNA, 388 bp, Rattus norvegicus; identical to SEQ ID NO: 6671
  ref <308>: DATABASE ACCESSION NUMBER: EMBL / AI044900
  ref <309>: DATABASE ENTRY DATE: 2000-03-03

SEQ ID NO: 6676 - protein, 699 aa, Rattus norvegicus; identical to SEQ ID NO: 2327
  ref <308>: DATABASE ACCESSION NUMBER: SWISS-Prot / P18163
  ref <309>: DATABASE ENTRY DATE: 2001-10-16

SEQ ID NO: 6677 - DNA, 3634 bp, Homo sapiens; identical to SEQ ID NO: 6673
  ref <308>: DATABASE ACCESSION NUMBER: EMBL / D10040
  ref <309>: DATABASE ENTRY DATE: 1998-08-17

SEQ ID NO: 6678 - protein, 698 aa, Homo sapiens; identical to SEQ ID NO: 6674
  ref <308>: DATABASE ACCESSION NUMBER: SWISS-Prot / P33121
  ref <309>: DATABASE ENTRY DATE: 2001-10-16

SEQ ID NO: 6679 - DNA, 392 bp, Rattus norvegicus
  ref <308>: DATABASE ACCESSION NUMBER: EMBL / AI059291
  ref <309>: DATABASE ENTRY DATE: 2000-03-03
taagcttgcggccgccggcggccccgacccgccggccctctcagcggtcgccggcatgagccacatccagatcccaccggggctcacggagctgctgcagggctacaccgtggaggtgcttcggcagcagccgcccgacctcgtcgacttcgcggtggagtacttcacacgcctgcgcgaggcccgccgccaggaatcagactcgttcatcgcccccccgacgacctttcacgcgcaggagtccagcggggtctccgtcatcgaggaggacggggagagtgaatcggactcggacgatgaggatctggaagttccgattcccagcaaatttactagacgagtatcagtctgtgcagaaacgtttaaccctgatgaagaagcctcgtgccgaa

SEQ ID NO: 6680 - protein, 370 aa, Rattus norvegicus
  ref <308>: DATABASE ACCESSION NUMBER: SWISS-Prot / P12368
  ref <309>: DATABASE ENTRY DATE: 2000-05-30
FAVEYFTRLREARRQESDSFIAPPTTFHAQESSGVPVIEEDGQSESDSDDEDLEVPIPAKFTRRVSVCAETFNPDEEEDNDPRVVHPKTDEQRCRLQEACKDILLFKNLDQEQLSQVLDAMFKRIVKTDEHVIDQGDDGDNFYVIERGTYDILVTKDNQTRSVGQYANRGSFGELALMYNTPRAATIVATSDGSLWGLDRVTFRRIIVKNNAKKRKMFESFIESVPLFKSLEMSERMKIVDVIGEKIYKDGERIITQGEKADSFYIIESGEVSILIRSKTKTNKNGGNQEVEIAHCHKGQYFGELALVTNKPRAASAYAVGDVKCLVMDVQAFERLLGPCMDIMKRNISHYEEQLVKMFGSNLDLLDPGQ

SEQ ID NO: 6681 - DNA, 1743 bp, Homo sapiens
  ref <308>: DATABASE ACCESSION NUMBER: EMBL / X14968
  ref <309>: DATABASE ENTRY DATE: 1997-03-11
ccaggtcggccgtggtagcgtagggttgcgcggcccggaaacgcagagccggccaaagagcggcgcgacgtgagccggggccgtgcgcgaagagacctcgcgggcgcggagcgaaaggccggcgtgagtgagcgcggagacagtggccgccggcggcccaacccgtctatcccttcggccgccgccggcatgagccacatccagatcccgccggggctcacggagctgctgcagggctacacggtggaggtgctgcgacagcagccgcctgacctcgtcgaattcgcagtggagtacttcacccgcctgcgcgaggcccgcgccccagcctcagtcctgcccgccgccaccccacgccagagcctgggccaccccccgccagaacccggcccggaccgtgtcgccgacgccaaaggggacagcgagtcggaggaggacgaggacttggaagttccagttcctagcagatttaatagacgagtatcagtctgtgctgagacctataaccctgatgaggaagaggaagatacagatccaagggtgattcatcctaaaactgatgaacagagatgcagacttcaggaagcttgcaaagatattctccttttcaaaaatcttgatcaggaacagctttctcaagttctcgatgccatgtttgaaaggatagtcaaagctgatgagcatgtcattgaccaaggagatgatggagacaacttttatgtcatagaacggggaacttatgacattttagtaacaaaagataatcaaacccgctctgttggtcaatatgacaaccgtggcagttttggagaactagctctgatgtacaacaccccgagagctgctaccattgttgctacctcagaaggctccctttggggactggaccgggtgacttttagaagaatcatagtgaaaaataatgcaaagaagaggaagatgtttgaatcatttattgagtctgtgcccctccttaaatcactagaggtgtcagaacgaatgaagattgtggatgtaataggagagaagatctataaggatggagaacgcataatcactcagggtgaaaaggctgatagcttttacatcatagagtctggcgaagtgagcatcttgattagaagcaggactaaatcaaacaaggatggtgggaaccaggaggtcgagattgcccgctgccataaggggcagtactttggagagcttgccctggtcaccaacaaacccagagctgcctcagcttatgcagttggagatgtcaaatgcttagttatggatgtacaagcattcgagaggcttctggggccctgcatggacatcatgaagaggaacatctcacactatgaggaacagctggtgaagatgtttggctccagcgtggatctgggcaacctcgggcagtaggtgtgccacaccccagagccttcttagtgtgacaccaaaaccttctggtcagccacagaacacatacagaaaacagacatgacagaactgttcctgccgttgccgccactgctgccattgctgtggttatgggcatttagaaaacttgaaagtcagcactaaaggatgggcagaggttcaacccacacctccactttgcttctgaaggcccattcattagaccacttgtaaagattactccaacccagtttttatatctttggttcaaaacggcatgtctctccaacaatttaagtgcctgatacaaagtccaaagtataaacatgctcctttcctctc

SEQ ID NO: 6682 - protein, 403 aa, Homo sapiens
  ref <308>: DATABASE ACCESSION NUMBER: SWISS-Prot / P13861
  ref <309>: DATABASE ENTRY DATE: 2001-10-16
SHIQIPPGLTELLQGYTVEVLRQQPPDLVEFAVEYFTRLREARAPASVLPAATPRQSLGHPPPEPGPDRVADAKGDSESEEDEDLEVPVPSRFNRRVSVCAETYNPDEEEEDTDPRVIHPKTDEQRCRLQEACKDILLFKNLDQEQLSQVLDAMFERIVKADEHVIDQGDDGDNFYVIERGTYDILVTKDNQTRSVGQYDNRGSFGELALMYNTPRAATIVATSEGSLWGLDRVTFRRIIVKNNAKKRKMFESFIESVPLLKSLEVSERMKIVDVIGEKIYKDGERIITQGEKADSFYIIESGEVSILIRSRTKSNKDGGNQEVEIARCHKGQYFGELALVTNKPRAASAYAVGDVKCLVMDVQAFERLLGPCMDIMKRNISHYEEQLVKMFGSSVDLGNLGQ

SEQ ID NO: 6683 - DNA, 529 bp, Rattus norvegicus
  ref <308>: DATABASE ACCESSION NUMBER: EMBL / AI070108
  ref <309>: DATABASE ENTRY DATE: 2000-03-03
tttttttttttttttttggcattttattggtttttattcatgaagtagagcttttacttcatcccagcgttttcctcagaggtagactttgatttgatttcaatgagttcttcgactcgagccaggacactttcaatcaagtcgaatgtgaagagggcggaatgtaagaccttaagctgcatctcaggaggcatagtggggatttcttctccgcctacagtcacagaacaaacacttttacacattgaggcagcttggctattttgttggctgtttttaatctctgcttcataatgtgcctttgacatattaagtcctacatgaagtggctgtagaaagttattttcaatctttccaagctctgtccataatccagtttggttgtcatcttcattatctttgataaccaaatacctcaacaaatttagtgaagccataatccggtctgagttctgcagtaaatctgtctcagcgccctcagggagggacaggaccaggtctaacagagaggtcagctgtgcgcctgcaa

SEQ ID NO: 6684 - protein, 596 aa, Rattus norvegicus
  ref <308>: DATABASE ACCESSION NUMBER: SWISS-Prot / AAH03446
  ref <309>: DATABASE ENTRY DATE: 2002-06-01
MAVEELQSIIKRCQILEEHDFKEEDFGLFQLAGQRCIEDGYINQLLEIIQDEKNKTIIKSMGWNLVGPVVRCLLRGREEDKREECFLIFDLLVKLCNPKELLLGLLELIEEPSGKQISQIILLLLQPLQTVIQKLPNNKAYSVGLALSTLWSQLSLLPVPHSEEQIQADDYGLCQCCKALIEFTKPFVEEVISDKENKENAKLKDELLKFCFKGLKCPLLTAQFLEQSEDVGNDPFRCFASEIIGFLSKIGHPVPQIILNHGRKKRTWDSLEFEEEEDKQLAESVASLTYLVFVQGIGIDQLPMVLSPSYLLQLNMEHIEVFLQRTEQSIYSKGLELLETSLLRLEDNSLCYQYLEIKSFLAVPQGLVKVMTLCPIETLRKKGLSMLQLFIDKLDSQGKYTLFRCLLNTSNHSGVEAFVIQNIKNQIDLSFKKTYNKWFAGAQLISLLDLVLSLPEGAETDLLQNSDRIMASLNLLRYLVIKDNEDDNQTGLWTELGKIENNFLKPLHIGLNMSKAHYEAEIKNSQQNNQVASMCKGVCSVTVGGEEIPSMPPEMQLKVLHSALFTFDLIESVLARVEELIEIKSKSTSEENVGIK

SEQ ID NO: 6685 - DNA, 1833 bp, Homo sapiens
  ref <308>: DATABASE ACCESSION NUMBER: Refseq / NM_007070
  ref <309>: DATABASE ENTRY DATE: 2002-02-10
agaagagcgggctaagacgccggaggaggtggcggcggctgggagaggcgagggttctggccgattttagcatcgaaactaggagaaataagaatggctgtagaggaacttcagtctataataaagagatgtcaaatcctagaagagcaagactttaaagaagaggattttggcctatttcagttagctgggcaaagatgcatagaagaagggcacacagaccagctattagaaattattcaaaatgaaaagaataaggtcatcatcaagaatatgggctggaatctcgttggtcctgttgttcgatgccttttgtgtaaagataaagaggatagtaaaagaaaagtttattttttgatctttgatttattggtaaagttatgcaatccaaaggaattattgttgggtttgcttgaactgattgaagagccctctggaaaacagatatcccaaagtattcttcttttgcttcagccattacaaacagtgattcagaaacttcataacaaggcatattcaattggattagcattgtctaccctttggaatcagctatctcttcttcctgttccatactcaaaagaacaaatacaaatggatgactatggcctttgtcagtgttgcaaggccttaatagagttcactaagccttttgtggaagaagtcattgataacaaagaaaactcactggaaaatgaaaagttaaaggatgaattactgaaattttgtttcaaaagcttgaaatgccctttgctgacagcacaattctttgaacagtctgaagaaggtggaaatgatcctttcaggtattttgcatcagaaataataggttttttatcagcaattggacaccctttccccaaaatgatttttaatcatggaaggaaaaagagaacttggaattaccttgaatttgaagaagaagaaaataaacagttagcagactcaatggcttctctggcatatctagtatttgtacagggcatccatattgatcagcttccaatggtcttaagcccattgtaccttttgcagtttaatatggggcacattgaagtctttttgcaaagaacagaagagtctgttatctccaaaggattggagctgctggagaatagtttattgagaatagaagacaatagtctactttaccagtacttagaaatcaagagttttcttactgtacctcagggcttagtgaaagtaatgacactttgccccattgagacactgaggaaaaagagtttagctatgcttcagctgtatattaacaagttggattcacaaggcaaatatacattatttagagaacacgtaacaacaaatggtttacaggaccacagttgatttcccttcttgatttggtactttttctcccagagggtgcagaaacagatttactgcaaaactcagataggattatggcttcattaaatttattgaggtatttggttatcaaagataatgaaaatgacaatcaaactggattatggacagaacttggaaatattgagaataatttcttaaagccacttcatataggacttaatatgtcaaaagcacattatgaagcagaaattaaaaatagccaagaggcccagaaatctaaagatctttgttctataactgtaagtggagaagagatccctaatatgcctcctgaaatgcagcttaaggtcctgcattcagctcttttcacatttgatttgattgaaagtgttctagctcgagtggaagaactcattgaaataaaaacaaagtctacctctgaagaaaatattgggataaagtgaaagttccatttcctaaataaaaactaataaaatatagtac

SEQ ID NO: 6686 - protein, 417 aa, Homo sapiens
  ref <308>: DATABASE ACCESSION NUMBER: SWISS-Prot / Q92990
  ref <309>: DATABASE ENTRY DATE: 2001-10-16
MAVEELQSIIKRCQILEEQDFKEEDFGLFQLAGQRCIEEGHTDQLLEIIQNEKNKVIIKNMGWNLVGPVVRCLLCKDKEDSKRKVYFLIFDLLVKLCNPKELLLGLLELIEEPSGKQISQSILLLLQPLQTVIQKLHNKAYSIGLALSTLWNQLSLLPVPYSKEQIQMDDYGLCQCCKALIEFTKPFVEEVIDNKENSLENEKLKDELLKFCFKSLKCPLLTAQFFEQSEEGGNDPFRYFASEIIGFLSAIGHPFPKMIFNHGRKKRTWNYLEFEEEENKQLADSMASLAYLVFVQGIHIDQLPMVLSPLYLLQFNMGHIEVFLQRTEESVISKGLELLENSLLRIEDNSLLYQYLEIKSFLTVPQGLVKVMTLCPIETLRKKSLAMLQLYINKLDSQGKYTLFREHVTTNGLQDHS

SEQ ID NO: 6687 - DNA, 545 bp, Rattus norvegicus
  ref <308>: DATABASE ACCESSION NUMBER: EMBL / AI070295
  ref <309>: DATABASE ENTRY DATE: 2000-03-03
tttttttttttttttttgttattccataccagtttattttagataatgtgcttcaaaaacgttttatcataaataacctttcacatcataaaataacttagtacgatttataataaaacttctgagaatttaacatctcatcaaaatacattaaactgtggcttgaaaatatgattaacccttttcacttttcttttatttgagggcatgaagaccaaaaaaaatacccaaaatattgctacacatttaaagtttcaacaaagcaatatttggtttactttactgtaacccggccatcctaaattaatagttttctttcttgcacagttctttgtagtttttttgtcccttttgacttggatttctgtttccacacagcttcctccttcagtctcacctctctctccttctgcaaagtcatctcctagccctcctgtagttgaactcagccccttgacatcagtttctgtaatccttgcatcagcgtggggagtgactgcttgagtaactacaaaggtatttcaaaacttcagtgcaatttggtt

SEQ ID NO: 6688 - protein, 165 aa, Rattus norvegicus; identical to SEQ ID NO: 3181
  ref <308>: DATABASE ACCESSION NUMBER: SWISS-Prot / P48317
  ref <309>: DATABASE ENTRY DATE: 2001-10-16

SEQ ID NO: 6689 - DNA, 1343 bp, Homo sapiens; identical to SEQ ID NO: 3182
  ref <308>: DATABASE ACCESSION NUMBER: EMBL / M60974
  ref <309>: DATABASE ENTRY DATE: 1999-07-02

SEQ ID NO: 6690 - protein, 165 aa, Homo sapiens; identical to SEQ ID NO: 3183
  ref <308>: DATABASE ACCESSION NUMBER: SWISS-Prot / P24522
  ref <309>: DATABASE ENTRY DATE: 2002-06-15

SEQ ID NO: 6691 - DNA, 545 bp, Rattus norvegicus; identical to SEQ ID NO: 6687
  ref <308>: DATABASE ACCESSION NUMBER: EMBL / AI070295
  ref <309>: DATABASE ENTRY DATE: 2000-03-03

SEQ ID NO: 6692 - protein, 165 aa, Rattus norvegicus; identical to SEQ ID NO: 3181
  ref <308>: DATABASE ACCESSION NUMBER: SWISS-Prot / P48317
  ref <309>: DATABASE ENTRY DATE: 2001-10-16

SEQ ID NO: 6693 - DNA, 1343 bp, Homo sapiens; identical to SEQ ID NO: 3182
  ref <308>: DATABASE ACCESSION NUMBER: EMBL / M60974
  ref <309>: DATABASE ENTRY DATE: 1999-07-02

SEQ ID NO: 6694 - protein, 165 aa, Homo sapiens; identical to SEQ ID NO: 3183
  ref <308>: DATABASE ACCESSION NUMBER: SWISS-Prot / P24522
  ref <309>: DATABASE ENTRY DATE: 2002-06-15

SEQ ID NO: 6695 - DNA, 545 bp, Rattus norvegicus; identical to SEQ ID NO: 6687
  ref <308>: DATABASE ACCESSION NUMBER: EMBL / AI070295
  ref <309>: DATABASE ENTRY DATE: 2000-03-03

SEQ ID NO: 6696 - protein, 165 aa, Rattus norvegicus; identical to SEQ ID NO: 3181
  ref <308>: DATABASE ACCESSION NUMBER: SWISS-Prot / P48317
  ref <309>: DATABASE ENTRY DATE: 2001-10-16

SEQ ID NO: 6697 - DNA, 1343 bp, Homo sapiens; identical to SEQ ID NO: 3182
  ref <308>: DATABASE ACCESSION NUMBER: EMBL / M60974
  ref <309>: DATABASE ENTRY DATE: 1999-07-02

SEQ ID NO: 6698 - protein, 165 aa, Homo sapiens; identical to SEQ ID NO: 3183
  ref <308>: DATABASE ACCESSION NUMBER: SWISS-Prot / P24522
  ref <309>: DATABASE ENTRY DATE: 2002-06-15

SEQ ID NO: 6699 - DNA, 545 bp, Rattus norvegicus; identical to SEQ ID NO: 6687
  ref <308>: DATABASE ACCESSION NUMBER: EMBL / AI070295
  ref <309>: DATABASE ENTRY DATE: 2000-03-03

SEQ ID NO: 6700 - protein, 165 aa, Rattus norvegicus; identical to SEQ ID NO: 3181
  ref <308>: DATABASE ACCESSION NUMBER: SWISS-Prot / P48317
  ref <309>: DATABASE ENTRY DATE: 2001-10-16

SEQ ID NO: 6701 - DNA, 1343 bp, Homo sapiens; identical to SEQ ID NO: 3182
  ref <308>: DATABASE ACCESSION NUMBER: EMBL / M60974
  ref <309>: DATABASE ENTRY DATE: 1999-07-02

SEQ ID NO: 6702 - protein, 165 aa, Homo sapiens; identical to SEQ ID NO: 3183
  ref <308>: DATABASE ACCESSION NUMBER: SWISS-Prot / P24522
  ref <309>: DATABASE ENTRY DATE: 2002-06-15

SEQ ID NO: 6703 - DNA, 561 bp, Rattus norvegicus
  ref <308>: DATABASE ACCESSION NUMBER: EMBL / AI070521
  ref <309>: DATABASE ENTRY DATE: 2000-03-03
tttttttttttttttttaattttaaaatggtttcttaaatttatttattttttctttaaacataacacgaggaaggtgttaaaactggtgtaatagctcaatagaataagtattccagattttgggagggatgaagaggaagatattcagaacccttcaccagaatccccccaacttgaccatagtggattaatgatgtgctttgtggacgtggttagtcaatgacaccagcttgacggatctttctttctgcaccaaatcccattgagttatctggtccccttggctgacgaagaaccattagacgtggagcactggcatcatccagggtgatgttctttaagcgattaaccaaccgatcaggtcgaggagctgcaacagctttggggccttcacagactcgccaaacattacaggcgctacatttcccagtgcgctgattaaggatcactgagaattccacctcatctcctgcctgtagctcaatgccatcctgaacttccttcacatggaaaaagagcttcttgctatctcctacttcatagttaataaagccaaact

SEQ ID NO: 6704 - protein, 798 aa, Rattus norvegicus; identical to SEQ ID NO: 6433
  ref <308>: DATABASE ACCESSION NUMBER: SWISS-Prot / P18395
  ref <309>: DATABASE ENTRY DATE: 2001-10-16

SEQ ID NO: 6705 - DNA, 2537 bp, Homo sapiens; identical to SEQ ID NO: 6434
  ref <308>: DATABASE ACCESSION NUMBER: EMBL / AY049788
  ref <309>: DATABASE ENTRY DATE: 2001-10-27

SEQ ID NO: 6706 - protein, 798 aa, Homo sapiens; identical to SEQ ID NO: 6435
  ref <308>: DATABASE ACCESSION NUMBER: SWISS-Prot / O75534
  ref <309>: DATABASE ENTRY DATE: 2001-10-16

SEQ ID NO: 6707 - DNA, 561 bp, Rattus norvegicus; identical to SEQ ID NO: 6703
  ref <308>: DATABASE ACCESSION NUMBER: EMBL / AI070521
  ref <309>: DATABASE ENTRY DATE: 2000-03-03

SEQ ID NO: 6708 - protein, 798 aa, Rattus norvegicus; identical to SEQ ID NO: 6433
  ref <308>: DATABASE ACCESSION NUMBER: SWISS-Prot / P18395
  ref <309>: DATABASE ENTRY DATE: 2001-10-16

SEQ ID NO: 6709 - DNA, 2537 bp, Homo sapiens; identical to SEQ ID NO: 6434
  ref <308>: DATABASE ACCESSION NUMBER: EMBL / AY049788
  ref <309>: DATABASE ENTRY DATE: 2001-10-27

SEQ ID NO: 6710 - protein, 798 aa, Homo sapiens; identical to SEQ ID NO: 6435
  ref <308>: DATABASE ACCESSION NUMBER: SWISS-Prot / O75534
  ref <309>: DATABASE ENTRY DATE: 2001-10-16

SEQ ID NO: 6711 - DNA, 366 bp, Rattus norvegicus
  ref <308>: DATABASE ACCESSION NUMBER: EMBL / AI070721
  ref <309>: DATABASE ENTRY DATE: 2000-03-03
tttttttttttttttttcatactgttttcccggatgcagctacgacgtttctgccaacgatacagataacagggcagcaagggcggtgagcatcagcaccggcagtgagctcagactgcagctgggaggagcagctttgattttgtggttatgtggctggaggcaccagcgagaccatcctttccgaaatcactatcagaaagacagaggtgtgtgctacccgacacattggatttcagcttctgagcctgcaaattcgcacagggtggtaaaacgtgtgtggggatctcattctcagaccctgctggccccagaaggcttgttcttgactggaggggctggctgccacatggtcacatctgagcc

SEQ ID NO: 6712 - protein, 468 aa, Rattus norvegicus
  ref <308>: DATABASE ACCESSION NUMBER: SWISS-Prot / Q62997
  ref <309>: DATABASE ENTRY DATE: 1998-07-15
MFLATLYFALPLLDLLMSAEVSGGDRLDCVKASDQCLKEQSCSTKYRTLRQCVAGKETNFSLTSGLEAKDECRSAMEALKQKSLYNCRCKRGMKKEKNCLRIYWSMYQSLQGNDLLEDSPYEPVNSRLSDIFRAVPFISDVFQQVEHISKGNNCLDAAKACNLDDTCKKYRSAYITPCTTSMSNEVCNRRKCHKALRQFFDKVPAKHSYGMLFCSCRDIACTERRRQTIVPVCSYEERERPNCLSLQDSCKTNYICRSRLADFFTNCQPESRSVSNCLKENYADCLLAYSGLIGTVMTPNYVDSSSLSVAPWCDCSNSGNDLEDCLKFLNFFKDNTCLKNAIQAFGNGSDVTMWQPAPPVQTTTATTTTAFRVKNKPLGPAGSENEIPTHVLPPCANLQAQKLKSNVSGSTHLCLSDSDFGKDGLAGASSHITTKSMAAPPSCSLSSLPVLMLTALAALLSVSLAETS

SEQ ID NO: 6713 - DNA, 1619 bp, Homo sapiens
  ref <308>: DATABASE ACCESSION NUMBER: EMBL / AF042080
  ref <309>: DATABASE ENTRY DATE: 2000-09-14
cagagcagcacagctgtccggggatcgctgcacgctgagctccctcggcaagacccagcggcggctcgggatttttttgggggggcggggaccagccccgcgccggcaccatgttcctggcgaccctgtacttcgcgctgccgctcttggacttgctcctgtcggccgaagtgagcggcggagaccgcctggattgcgtgaaagccagtgatcagtgcctgaaggagcagagctgcagcaccaagtaccgcacgctaaggcagtgcgtggcgggcaaggagaccaacttcagcctggcatccggcctggaggccaaggatgagtgccgcagcgccatggaggccctgaagcagaagtcgctctacaactgccgctgcaagcggggtatgaagaaggagaagaactgcctgcgcatttactggagcatgtaccagagcctgcagggaaatgatctgctggaggattccccatatgaaccagttaacagcagattgtcagatatattccgggtggtcccattcatatcagatgtttttcagcaagtggagcacattcccaaagggaacaactgcctggatgcagcgaaggcctgcaacctcgacgacatttgcaagaagtacaggtcggcgtacatcaccccgtgcaccaccagcgtgtccaacgatgtctgcaaccgccgcaagtgccacaaggccctccggcagttctttgacaaggtcccggccaagcacagctacggaatgctcttctgctcctgccgggacatcgcctgcacagagcggaggcgacagaccatcgtgcctgtgtgctcctatgaagagagggagaagcccaactgtttgaatttgcaggactcctgcaagacgaattacatctgcagatctcgccttgcggatttttttaccaactgccagccagagtcaaggtctgtcagcagctgtctaaaggaaaactacgctgactgcctcctcgcctactcggggcttattggcacagtcatgacccccaactacatagactccagtagcctcagtgtggccccatggtgtgactgcagcaacagtgggaacgacctagaagagtgcttgaaatttttgaatttcttcaaggacaatacatgtcttaaaaatgcaattcaagcctttggcaatggctccgatgtgaccgtgtggcagccagccttcccagtacagaccaccactgccactaccaccactgccctccgggttaagaacaagcccctggggccagcagggtctgagaatgaaattcccactcatgttttgccaccgtgtgcaaatttacaggcacagaagctgaaatccaatgtgtcgggcaatacacacctctgtatttccaatggtaattatgaaaaagaaggtctcggtgcttccagccacataaccacaaaatcaatggctgctcctccaagctgtggtctgagcccactgctggtcctggtggtaaccgctctgtccaccctattatctttaacagaaacatcatagctgcattaaaaaaatacaatatggacatgtaaaaagacaaaaaccaagttatctgtttcctgttctcttgtatagctgaaattccagtttaggagctcagttgagaaacag

SEQ ID NO: 6714 - protein, 465 aa, Homo sapiens
  ref <308>: DATABASE ACCESSION NUMBER: SWISS-Prot / P56159
  ref <309>: DATABASE ENTRY DATE: 2002-06-15
MFLATLYFALPLLDLLLSAEVSGGDRLDCVKASDQCLKEQSCSTKYRTLRQCVAGKETNFSLASGLEAKDECRSAMEALKQKSLYNCRCKRGMKKEKNCLRIYWSMYQSLQGNDLLEDSPYEPVNSRLSDIFRVVPFISDVFQQVEHIPKGNNCLDAAKACNLDDICKKYRSAYITPCTTSVSNDVCNRRKCHKALRQFFDKVPAKHSYGMLFCSCRDIACTERRRQTIVPVCSYEEREKPNCLNLQDSCKTNYICRSRLADFFTNCQPESRSVSSCLKENYADCLLAYSGLIGTVMTPNYIDSSSLSVAPWCDCSNSGNDLEECLKFLNFFKDNTCLKNAIQAFGNGSDVTVWQPAFPVQTTTATTTTALRVKNKPLGPAGSENEIPTHVLPPCANLQAQKLKSNVSGNTHLCISNGNYEKEGLGASSHITTKSMAAPPSCGLSPLLVLVVTALSTLLSLTETS

SEQ ID NO: 6715 - DNA, 448 bp, Rattus norvegicus
  ref <308>: DATABASE ACCESSION NUMBER: EMBL / AI070967
  ref <309>: DATABASE ENTRY DATE: 2000-03-03
cggccgcaaaggttttttttagagctgcggaacaggacgccctctgatgtgaaagagctggtcctggataactgtcggtcaattgaaggcaaaatcgaaggcctcacggatgagtttgaagaactggaattcctaagtacaatcaacgtaggcctcacctccatttccaacttaccaaagttaaacaaactcaagaagcttgaattaagcgaaaacagaatctcaggggacctggaagtattggcagagaaatgtccgaaccttaagcatctaaatttaagtggcaacaaaataaaagatctcagcacaatagagccgctgaagaagttagagaatctcaagagcctagacctgtttaactgtgaggtgaccaacctgaatgcctaccgagaaaacgtgttcaagctcctgccccaggtcatgtacctcgatggctatgacagagaca

SEQ ID NO: 6716 - protein, 247 aa, Rattus norvegicus
  ref <308>: DATABASE ACCESSION NUMBER: SWISS-Prot / P49911
  ref <309>: DATABASE ENTRY DATE: 2002-06-15
MEMDKRIYLELRNRTPSDVKELVLDNCRSIEGKIEGLTDEFEELEFLSTINVGLTSISNLPKLNKLKKLELSENRISGDLEVLAEKCPNLKHLNLSGNKIKDLSTIEPLKKLENLKSLDLFNCEVTNLNAYRENVFKLLPQVMYLDGYDRDNKEAPDSDVEGYVEDDDEEDEDEEEYDEYAQLVEDEEEEDEEEEGEEEDVSGEEEEDEEGYNDGEVDDEEDEEDAAEEEGSQKRKREPDDEGQEDD

SEQ ID NO: 6717 - DNA, 916 bp, Homo sapiens
  ref <308>: DATABASE ACCESSION NUMBER: EMBL / X75090
  ref <309>: DATABASE ENTRY DATE: 1994-07-19
gctggttgagccttcaaagtcctaaaacgcgcggccgtgggttcggggtttattgattgaattccgccggcgcgggagcctctgcagagagagagcgcgagagatggagatgggcagacggattcatttagagctgcggaacaggacgccctctgatgtgaaagaacttgtcctggacaacagtcggtcgaatgaaggcaaactcgaaggcctcacagatgaatttgaagaactggaattcttaagtacaatcaacgtaggcctcacctcaatcgcaaacttaccaaagttaaacaaacttaagaagcttgaactaagcgataacagagtctcagggggcctggaagtattggcagaaaagtgtccgaacctcacgcatctaaatttaagtggcaacaaaattaaagacctcagcacaatagagccactgaaaaagttagaaaacctcaagagcttagaccttttcaattgcgaggtaaccaacctgaacgactaccgagaaaatgtgttcaagctcctcccgcaactcacatatctcgacggctatgaccgggacgacaaggaggcccctgactcggatgctgagggctacgtggagggcctggatgatgaggaggaggatgaggatgaggaggagtatgatgaagatgctcaggtagtggaagacgaggaggacgaggatgaggaggaggaaggtgaagaggaggacgtgagtggagaggaggaggaggatgaagaaggttataacgatggagaggtagatgacgaggaagatgaagaagagcttggtgaagaagaaaggggtcagaagcgaaaacgagaacctgaagatgagggagaagatgatgactaagtggaataacctattttgaaaaattcctattgtgatttgactgtttttacccatatcccctct

SEQ ID NO: 6718 - protein, 249 aa, Homo sapiens
  ref <308>: DATABASE ACCESSION NUMBER: SWISS-Prot / P39687
  ref <309>: DATABASE ENTRY DATE: 2002-06-15
MEMGRRIHLELRNRTPSDVKELVLDNSRSNEGKLEGLTDEFEELEFLSTINVGLTSIANLPKLNKLKKLELSDNRVSGGLEVLAEKCPNLTHLNLSGNKIKDLSTIEPLKKLENLKSLDLFNCEVTNLNDYRENVFKLLPQLTYLDGYDRDDKEAPDSDAEGYVEGLDDEEEDEDEEEYDEDAQVVEDEEDEDEEEEGEEEDVSGEEEEDEEGYNDGEVDDEEDEEELGEEERGQKRKREPEDEGEDDD

SEQ ID NO: 6719 - DNA, 448 bp, Rattus norvegicus; identical to SEQ ID NO: 6715
  ref <308>: DATABASE ACCESSION NUMBER: EMBL / AI070967
  ref <309>: DATABASE ENTRY DATE: 2000-03-03

SEQ ID NO: 6720 - protein, 247 aa, Rattus norvegicus; identical to SEQ ID NO: 6716
  ref <308>: DATABASE ACCESSION NUMBER: SWISS-Prot / P49911
  ref <309>: DATABASE ENTRY DATE: 2002-06-15

SEQ ID NO: 6721 - DNA, 916 bp, Homo sapiens; identical to SEQ ID NO: 6717
  ref <308>: DATABASE ACCESSION NUMBER: EMBL / X75090
  ref <309>: DATABASE ENTRY DATE: 1994-07-19

SEQ ID NO: 6722 - protein, 249 aa, Homo sapiens; identical to SEQ ID NO: 6718
  ref <308>: DATABASE ACCESSION NUMBER: SWISS-Prot / P39687
  ref <309>: DATABASE ENTRY DATE: 2002-06-15

SEQ ID NO: 6723 - DNA, 465 bp, Rattus norvegicus
  ref <308>: DATABASE ACCESSION NUMBER: EMBL / AI071299
  ref <309>: DATABASE ENTRY DATE: 2000-03-03
tttttttttttttttttgaaagtttaggcattttaatctacacaaaaaactgcaagcaaactaatatctaaggtagagtaaaatgcctaaactttcaaaacaaaaggccaaaaaaaagaactttagctgcacttccaagcaattaaattaatgagagttccaatccttgggctccccttagcaatgtacagctgttcaacctcaaataccaacaacagtggaagaaatgatagttttctatacttagccacgtccacggagttgactgtaaagactaggaataataagcaagataactctaggagaagatgacacaaactcactttctagctgcatttctgtaccgtaatttcagcctctatattctcgaaaccaacgctttaaaagaatcacactgcaaagctggtctcaagtataaatggcaaaaacaaagtacctgatgtgtatgcctcgtgccgaattctt

SEQ ID NO: 6724 - protein, 480 aa, Rattus norvegicus
  ref <308>: DATABASE ACCESSION NUMBER: SWISS-Prot / O08876
  ref <309>: DATABASE ENTRY DATE: 2002-06-15
MLNFGASLQQASEGKMELISEKSKEGAHPWDKAEQSDFEAVEALMSMSCDWKSHFKKYLENRPVTPVSDTSEEDSLLPGTPDLQTVPAFCLTPPYSPSDFEPSQGSNLTAPAPPTGHFRSLSDAAKPPSIAPFKEEEKSPLAAPPLPKAQATSVIRHTADAQLCNHQSCPVKAASILNYQDNSFRRRTHINVEATRKNIPCAAVSPNRPKPEPSTAANGAEKAGTAPYDFAVPSSETVICRSSQPAPTSPVQKSVLMSSPTVSTGGVPPLPVICQMVPLPANNSLVTTVVPSSPPSQPPAVCSPVLFMGTQVPKGTVMFVVPQPVVQSPKPPVVSPNGTRLSPIAPAPGFSPSAARVTPQIDSSRVRSHICSHPGCGKTYFKSSHLKAHVRTHTGEKPFSCSWKGCERRFARSDELSRHRRTHTGEKKFACPMCDRRFMRSDHLTKHARRHLSAKKLPNWQMEVSKLNDIALPPATASAQ

SEQ ID NO: 6725 - DNA, 3228 bp, Homo sapiens
  ref <308>: DATABASE ACCESSION NUMBER: EMBL / S81439
  ref <309>: DATABASE ENTRY DATE: 2000-06-10
gtcggtctccgccagctaggatctcccccgccgtccgcccccgcccctcgtctgcctcccccgcccgcgcctccgcccgcgcttccctttcctgcctcgcgccccactccctttcctcccctccctgtttcccttcctgtccttcccagctcacgctctctttccctgccgcctgcctttcttttttcctttttttgcattggcgtcttggggctgttacacacacgcgcgctgtccattgcagcttacataaaggcgggcgcgattatgcaattatattgttagcgatatttcaagagcaatggctcgttttcttaggatttcaacacgaaggcatcatgcatttttgaaaaactagtattgagaataataccttgcaacgtaaagaatgttttttggtatttttacacaatctctactttgaccaaacgagtctggacagttttcttttaatggaaaataggagaaatggaggaaagaatggaaatgatttctgaaaggccaaaagagagtatgtattcctggaacaaaactgcagagaaaagtgattttgaagctgtagaagcacttatgtcaatgagctgcagttggaagtctgattttaagaaatacgttgaaaacagacctgttacaccagtatctgatttgtcagaggaagagaatctgcttccgggaacacctgattttcatacaatcccagcattttgtttgactccaccttacagtccttctgactttgaaccctctcaagtgtcaaatctgatggcaccagcgccatctactgtacacttcaagtcactctcagatactgccaaacctcacattgccgcacctttcaaagaggaagaaaagagcccagtatctgcccccaaactccccaaagctcaggcaacaagtgtgattcgtcatacagctgatgcccagctatgtaaccaccagacctgcccaatgaaagcagccagcatcctcaactatcagaacaattcttttagaagaagaacccacctaaatgttgaggctgcaagaaagaacataccatgtgccgctgtgtcaccaaacagatccaaatgtgagagaaacacagtggcagatgttgatgagaaagcaagtgctgcactttatgacttttctgtgccttcctcagagacggtcatctgcaggtctcagccagcccctgtgtccccacaacagaagtcagtgttggtctctccacctgcagtatctgcagggggagtgccacctatgccggtcatctgccagatggttccccttcctgccaacaaccctgttgtgacaacagtcgttcccagcactcctcccagccagccaccagctgtttgcccccctgttgtgttcatgggcacacaagtccccaaaggcgctgtcatgtttgtggtaccccagcccgttgtgcagagttcaaagcctccggtggtgagcccgaatggcaccagactctctcccattgcccctgctcctgggttttccccttcagcagcaaaagtcactcctcagattgattcatcaaggataaggagtcacatctgtagccacccaggatgtggcaagacatactttaaaagttcccatctgaaggcccacacgaggacgcacacaggagaaaagcctttcagctgtagctggaaaggttgtgaaaggaggtttgcccgttctgatgaactgtccagacacaggcgaacccacacgggtgagaagaaatttgcgtgccccatgtgtgaccggcggttcatgaggagtgaccatttgaccaagcatgcccggcgccatctatcagccaagaagctaccaaactggcagatggaagtgagcaagctaaatgacattgctctacctccaacccctgctcccacacagtgacagaccggaaagtgaagagtcagaactaactttggtctcagcgggagccagtggtgatgtaaaaatgcttccactgcaagtctgtggccccacaacgtggcttaaagcagaagccccacagcctggcacgaaggccccgtctgggttaggtgactaaaagggcttcggccacaggcaggtcacagaaaggcaggtttcatttcttatcacataagagagatgagaaagcttttattcctttgaatattttttgaaggtttcagatgaggtcaacacaggtagcacagattttgaatctgtgtgcatatttgttactttactttttgctgtttatacttgagaccaacttttcaatgtgattcttctaaagcactggtttcaagaatatggaggctggaaggaaataaacattacggtacagacatggagatgtaaaatgagtttgtattattacaaatattgtcatctttttctagagttatcttctttattattcctagtctttccagtcaacatcgtggatgtagtgattaaatatatctagaactatcatttttacactattgtgaatatttggaattgaacgactgtatattgctaagagggccaaagaattggaatcctccttaatttaattgctttgaagcatagctacaatttgtttttgcatttttgttttgaaagtttaacaaatgactgtatctaggcatttcattatgctttgaactttagtttgcctgcagtttcttgtgtagatttgaaaattgtataccaacgtgttttctgtagactctaagatacactgcactttgtttagaaaaaaaactgaagatgaaatatatattgtaaagaagggatattaagaatcttagataacttcttgaaaaagatggcttatgtcatcagcaaagtacctccatgttatgaggatataatgtgtgcttcattgaattagaaaattagtgaccattattcacaggtggacaaatgttgtcctgttaatttataggagttttttgggatgtggaggtagttgggtagaaaaattattagaacattcacttttgttaacagtatttctcttttattctgttatatagtggatgatatacacagtggcaaaacaaaagtacattgcttaaaatatatagtgaaaaatgtcactatatcttcccatttaacattgtttttgtatattgggtgtagatttctgacatcaaaacttggacccttggaaaacaaaagttttaattaaaaaaaatccttgtgacttacaatttgcacaatatttcttttgttgtactttatatcttgtttacaataaagaattccctttggcaaaaaaaaaaa

SEQ ID NO: 6726 - protein, 480 aa, Homo sapiens
  ref <308>: DATABASE ACCESSION NUMBER: SWISS-Prot / Q13118
  ref <309>: DATABASE ENTRY DATE: 2002-06-15
MLNFGASLQQTAEERMEMISERPKESMYSWNKTAEKSDFEAVEALMSMSCSWKSDFKKYVENRPVTPVSDLSEEENLLPGTPDFHTIPAFCLTPPYSPSDFEPSQVSNLMAPAPSTVHFKSLSDTAKPHIAAPFKEEEKSPVSAPKLPKAQATSVIRHTADAQLCNHQTCPMKAASILNYQNNSFRRRTHLNVEAARKNIPCAAVSPNRSKCERNTVADVDEKASAALYDFSVPSSETVICRSQPAPVSPQQKSVLVSPPAVSAGGVPPMPVICQMVPLPANNPVVTTVVPSTPPSQPPAVCPPVVFMGTQVPKGAVMFVVPQPVVQSSKPPVVSPNGTRLSPIAPAPGFSPSAAKVTPQIDSSRIRSHICSHPGCGKTYFKSSHLKAHTRTHTGEKPFSCSWKGCERRFARSDELSRHRRTHTGEKKFACPMCDRRFMRSDHLTKHARRHLSAKKLPNWQMEVSKLNDIALPPTPAPTQ

SEQ ID NO: 6727 - DNA, 446 bp, Rattus norvegicus
  ref <308>: DATABASE ACCESSION NUMBER: EMBL / AI071435
  ref <309>: DATABASE ENTRY DATE: 2000-03-03
tttttttttttttttttgcacagtaagtacttgtattgccacaggcagagtgcgcctgccgggagctgatgccactgtcccagtggagcctgaagatcagctgcagcgtgggcagtgtggcctgcaccgctctgccatgagagccaagtgtcagtcagggactggggcggtgagagctcacaggctgtgagtgaacagcagaggagggggccgggctgggctatgaaggtcacctcagaagcccagggagtggccgagggcacactctgttgaggcagagtcctggcaatggaggctgagtgaggtatctgaaagccttaagagacatcaggaacgggaaaggggtcccaggtgacagacactgtgtgactgcagagcccatgggagctttgggccctggggtctcaatcagaagttcggcttgtgtttcttcagctccaccatga

SEQ ID NO: 6728 - DNA, 364 bp, Rattus norvegicus
  ref <308>: DATABASE ACCESSION NUMBER: EMBL / AI072943
  ref <309>: DATABASE ENTRY DATE: 2000-03-03
tttttttttttttttttctttcttcactctttactgtgtaaaaataaacttaacaattcatgtcatctcagcaagaaaatgggaaaaaaaaaagcgagggtaccagtataaatagtgcacttccagaatggctgatgggtgtgggtttacccctttgatactcaaaaggctgcagatttgtatgaaaaatgtacagctttggttagcaaataatgaaaaagtaagatacatcgattcttccgtattttacaatatgtacattgtaacaatatcaactctagggggcgggggttgctttttttttttttttttttggcaaataagacaaaattgggactctaagtattgggcttgtttctcctca

SEQ ID NO: 6729 - protein, 432 aa, Rattus norvegicus; identical to SEQ ID NO: 6668
  ref <308>: DATABASE ACCESSION NUMBER: SWISS-Prot / P47971
  ref <309>: DATABASE ENTRY DATE: 1998-12-15

SEQ ID NO: 6730 - DNA, 5071 bp, Homo sapiens; identical to SEQ ID NO: 6669
  ref <308>: DATABASE ACCESSION NUMBER: EMBL / U61849
  ref <309>: DATABASE ENTRY DATE: 2000-03-04

SEQ ID NO: 6731 - protein, 430 aa, Homo sapiens; identical to SEQ ID NO: 6670
  ref <308>: DATABASE ACCESSION NUMBER: SWISS-Prot / Q15818
  ref <309>: DATABASE ENTRY DATE: 2001-10-16

SEQ ID NO: 6732 - DNA, 447 bp, Rattus norvegicus
  ref <308>: DATABASE ACCESSION NUMBER: EMBL / AI073164
  ref <309>: DATABASE ENTRY DATE: 2000-03-03
tttttttttttttttttagaagcacaagggtcttttatttttaatgcaactaaaagtgggaggctgaaagagaaatccctcaaatactgtgtgttctttttattcaagggttaggcgagcctttaacacctgtgtcaaaatctccacccctctctcacacacacatacatacacgtacacacacgcacgcccacacacacacccacacagagctacaaacacgaatcccagttcaattaaaaagatcagccagaagaatacaccagagttccatacaataacattttactctatgaatactggaaattatgaggggaaaagaaattatcactatatactagctcatcaattcactgtcctctcttttggataatgcactgcacattatattaaagtctttatactccagtaaatttttacttaaaagaaactattacagaaaatcat

SEQ ID NO: 6733 - protein, 338 aa, Rattus norvegicus
  ref <308>: DATABASE ACCESSION NUMBER: SWISS-Prot / P56603
  ref <309>: DATABASE ENTRY DATE: 1998-12-15
MSDFDSNPFADPDLNNPFKDPSVTQVTRNVPPGLDEYNPFSDSRTPPPGGVKMPNVPNTQPAIMKPTEEHPAYTQITKEHALAQAELLKRQEELERKAAELDRREREMQNLSQHGRKNNWPPLPSNFPVGPCFYQDFSVDIPVEFQKTVKLMYYLWMFHAVTLFLNIFGCLAWFCVDSSRAVDFGLSILWFLLFTPCSFVCWYRPLYGAFRSDSSFRFFVFFFVYICQFAVHVLQAAGFHNWGNCGWISSLTGLNKNIPVGIMMIIIAALFTASAVISLVMFKKVHGLYRTTGASFEKAQQEFATGVMSNKTVQTAAANAASTAATSAAQNAFKGNQM

SEQ ID NO: 6734 - DNA, 1926 bp, Homo sapiens
  ref <308>: DATABASE ACCESSION NUMBER: Refseq / NM_004866
  ref <309>: DATABASE ENTRY DATE: 2002-07-31
ggggcgacgtgagcgcgcaggggggcggcggcctcgcctcgtctctctctctgcgcctgggtcgggtgggtgacgccgagagccagagagatgtcggatttcgacagtaacccgtttgccgacccggatctcaacaatcccttcaaggatccatcagttacacaagtgacaagaaatgttccaccaggacttgatgaatataatccattctcggattctagaacacctccaccaggcggtgtgaagatgcctaatgtacccaatacacaaccagcaataatgaaaccaacagaggaacatccagcttatacacagattgcaaaggaacatgcattggcccaagctgaacttcttaagcgccaggaagaactagaaagaaaagccgcagaattagatcgtcgggaacgagaaatgcaaaacctcagtcaacatggtagaaaaaataattggccacctcttcctagcaattttcctgtcggaccttgtttctatcaggatttttctgtagacattcctgtagaattccaaaagacagtaaagcttatgtactacttgtggatgttccatgcagtaacactgtttctaaatatcttcggatgcttggcttggttttgtgttgattctgcaagagcggttgattttggattgagtatcctgtggttcttgctttttactccttgttcatttgtctgttggtacagaccactttatggagctttcaggagtgacagttcatttagattctttgtattcttcttcgtctatatttgtcagtttgctgtacatgtactccaagctgcaggatttcataactggggcaattgtggttggatttcatcccttactggtctcaaccaaaatattcctgttggaatcatgatgataatcatagcagcacttttcacagcatcagcagtcatctcactagttatgttcaaaaaagtacatggactatatcgcacaacaggtgctagttttgagaaggcccaacaggagtttgcaacaggtgtgatgtccaacaaaactgtccagaccgcagctgcaaatgcagcttcaactgcagcatctagtgcagctcagaatgctttcaagggtaaccagatttaagaatcttcaaacaatacactgttaccttttgactgtacctttttctccagttactgtattctacaaatatttttatgttcaaaacacacagtacagacagcatggatatttcctgttcacttgtgcatgggctaaaaccaggaaaacttccttgtcttattactttacctaatagtttcttaatatttcagtgccccttgcagaaaaaatattacatgctaaataaatattctccatatttttgggggatgacattcagtgaattatttcagtggtgacccactgaaaattaataatggtacttatgattaaaaacgcatttaatactaactgcagtagttctttcaagaatctttagagataaggattgcacattggaaaagtaaaccatgtttcattcctttttccctatttatattgaaagaaataggccagcagagacttagggattttaaattggcttgctttttagctgtttcagtcaccagtgaagagcctatgtgcattttgtagtagataatgtaaaatttgtcatctttttcttttcttttttttagaatagctgatattttgataacaatctctaatttgcatgggcaccacatttcttatattaaaagaattagtgttttggcttctgtactgcttatggttgtaggattcaggggttaatggaatcacagaaatgatattctgcaagaatttcttttaaataaaaagtttgggggtgcaatataagaagtttatataatatgcagtacattatccaaaagagaaggtagttaatgcagtagaaagtagtggtaataattccttttt

SEQ ID NO: 6735 - protein, 338 aa, Homo sapiens
  ref <308>: DATABASE ACCESSION NUMBER: SWISS-Prot / O15126
  ref <309>: DATABASE ENTRY DATE: 2002-06-15
MSDFDSNPFADPDLNNPFKDPSVTQVTRNVPPGLDEYNPFSDSRTPPPGGVKMPNVPNTQPAIMKPTEEHPAYTQIAKEHALAQAELLKRQEELERKAAELDRREREMQNLSQHGRKNNWPPLPSNFPVGPCFYQDFSVDIPVEFQKTVKLMYYLWMFHAVTLFLNIFGCLAWFCVDSARAVDFGLSILWFLLFTPCSFVCWYRPLYGAFRSDSSFRFFVFFFVYICQFAVHVLQAAGFHNWGNCGWISSLTGLNQNIPVGIMMIIIAALFTASAVISLVMFKKVHGLYRTTGASFEKAQQEFATGVMSNKTVQTAAANAASTAASSAAQNAFKGNQI

SEQ ID NO: 6736 - DNA, 356 bp, Rattus norvegicus
  ref <308>: DATABASE ACCESSION NUMBER: EMBL / AI073204
  ref <309>: DATABASE ENTRY DATE: 2000-03-03
tttttttttttttttttcatttttcctttttttaattgttaaattgaattttataccaatgtttaaacttaaattgggtgttagcttgaggtgttttgggggagtttgcggtaatggttttgctgtaacgtgtgtttggaactctgctgaagggctgctgaaaagcacggtgctggtaacagtccaacagtccgcggctgctcattcttgccgactcctccctctgacgcaggttagcattgaaggtggtatggaagcctgcatgcgtgttcaactcttcctcttccctcctcctcggcctccctcatcccttcctccttcgctcgctcaacctcttttgttcagtcctcgtgccg

SEQ ID NO: 6737 - protein, 255 aa, Rattus norvegicus; identical to SEQ ID NO: 1950
  ref <308>: DATABASE ACCESSION NUMBER: SWISS-Prot / P42655
  ref <309>: DATABASE ENTRY DATE: 2002-06-15

SEQ ID NO: 6738 - DNA, 1723 bp, Homo sapiens; identical to SEQ ID NO: 6454
  ref <308>: DATABASE ACCESSION NUMBER: EMBL / BC000179
  ref <309>: DATABASE ENTRY DATE: 2001-07-13

SEQ ID NO: 6739 - protein, 255 aa, Homo sapiens; identical to SEQ ID NO: 1950

SEQ ID NO: 6740 - DNA, 364 bp, Rattus norvegicus
  ref <308>: DATABASE ACCESSION NUMBER: EMBL / AI101103
  ref <309>: DATABASE ENTRY DATE: 2000-03-03
tcctggtgggaggaggcagcagatcaggcagatgggagggagggagacccccgggaatgtcagctgaatgccccacacgaaaactggggagcaggaatgtagggagagaccccaagtggcagaattattggtccatcataacacactgaactccaagacacttacacaccagctgggggagggagaggagggtacaagaggtgtggaaaatggggtaagggaagcaaactagactagaggggctgggaggaggcaactttggggtcctagttccccaaaagcccaagctccccaccacctgcagataatgtcgtgcaaataaaagtgtgataagaggaccaatggaaactaactctttcgaaaa

SEQ ID NO: 6741 - protein, 115 aa, Rattus norvegicus; identical to SEQ ID NO: 3454
  ref <308>: DATABASE ACCESSION NUMBER: SWISS-Prot / Q64357
  ref <309>: DATABASE ENTRY DATE: 2002-06-15

SEQ ID NO: 6742 - DNA, 6885 bp, Homo sapiens; identical to SEQ ID NO: 3455
  misc_feature (1)..(6885): n=a, c, g or t
  ref <308>: DATABASE ACCESSION NUMBER: EMBL / AF135372
  ref <309>: DATABASE ENTRY DATE: 2000-09-22

SEQ ID NO: 6743 - protein, 115 aa, Homo sapiens; identical to SEQ ID NO: 3456
  ref <308>: DATABASE ACCESSION NUMBER: SWISS-Prot / P19065
  ref <309>: DATABASE ENTRY DATE: 2002-06-15

SEQ ID NO: 6744 - DNA, 616 bp, Rattus norvegicus
  ref <308>: DATABASE ACCESSION NUMBER: EMBL / AI101320
  ref <309>: DATABASE ENTRY DATE: 2000-03-03
tgctatgacctggtcaatgacttctactgtgtctgcgatgatggctggaagggcaagacctgccactcacgcgagttccagtgtgacgcctacacctgcagcaacggtggcacatgctatgacagcggcgacaccttccgctgcgcgtgccccccaggctggaagggcagcacctgcacgatcgccaagaacagcagctgcgtgcccaatccctgtgtgaatggaggcacctgtgtgggcagtggagactctttctcctgcatctgccgggatggctgggagggccgcacctgcacacacaacaccaatgactgcaaccctctgccctgctacaacggaggcatctgtgtggatggcgtcaactggttccgctgcgagtgtgcacctggctttgcgggtcctgactgccgtatcaacatcgatgagtgccagtcctcaccctgtgcctacggagccacgtgtgtagatgagatcaatgggtaccgctgcagctgcccaccaggacgttccggccccagatgccaggaagtggtcatattcacgaggccctgctggtcccggggcgtgtccttcccacatgggaagttcctgggtagaagactgcaacagctgccgc

SEQ ID NO: 6745 - protein, 1202 aa, Rattus norvegicus
  ref <308>: DATABASE ACCESSION NUMBER: SWISS-Prot / P97607
  ref <309>: DATABASE ENTRY DATE: 2002-06-15
GACCDGDGRTTRAGGCGRDECDTYVRVCLKEYQAKVTPTGPCSYGYGATPVLGSNSFYLPPAGAAGDRARARSRTGGHQDPGLVVIPFQFAWPRSFTLIVEAWDWDNDTTPDEELLIERVSHAGMINPEDRWKSLHFSGHVAHLELQIRVRCDENYYSATCNKFCRPRNDFFGHYTCDQYGNKACMDGWMGKECKEAVCKQGCNLLHGGCTVPGECRCSYGWQGKFCDECVPYPGCVHGSCVEPWHCDCETNWGGLLCDKDLNYCGSHHPCVNGGTCINAEPDQYLCACPDGYLGKNCERAEHACASNPCANGGSCHEVLSGFECHCPSGWSGPTCALDIDECASNPCAAGGTCVDQVDGFECICPEQWVGATCQLDANECEGKPCLNAFSCKNLIGGYYCDCLPGWKGANCHININDCHGQCQHGGTCKDLVNGYQCVCPRGFGGRHCELEYYKCASSPCRRGGICEDLVDGFRCHCPRGLSGPLCEVDVDLWCEPNPCLNGARCYNLEDDYYCACPEDFGGKNCSVPRETCPGGACRVIDGCGFEAGSRAHGAAPSGVCGPHGHCVSLPGGNFSCICDSGFTGTYCHENIDDCMGQPCRNGGTCIDEVDSFACFCPSGWEGELCDINPNDCLPDPCHSRGRCYDLVNDFYCVCDDGWKDKTCHSREFQCDAYTCSNGGTCYDSGDTFRCACPPGWKGSTCTIAKNSSCVPNPCVNGGTCVGSGDSFSCICRDGWEGRTCTHNTNDCNPLPCYNGGICVDGVNWFRCECAPGFAGPDCRINIDECQSSPCAYGATCVDEINGYRCSCPPGRSGPRCQEVVIFTRPCWSRGVSFPHGSSWVEDCNSCRCLDGHRDCSKVWCGWKPCLLSPQPSALSAQCPPGQQCREKAMGQCLQPPCENWGECTAEDPLPPSTPCLPRTTHLDNNCARLTLHFNRDQVPQGTTVGAICSGIRALPATRAAARDRLLLLLCDRASSGASAVEVAVSFSPARDLPDSSLIQSTAHAIVAAITQRGNSSLLLAVTEVKVETVVMGGSSTGLLVPVLCSVFSVLWLACMVICVWWTRKRRKERERSRLPRDESANNQWAPLNPIRNPIERPGSSGLGTGGHKDVLYQCKNFTPPPRRAGEALPGPASHGAGGEDEEDEELSRGDGRLSRSREVPLTQIHQRPQLLPGKASLLAPGPKVDNRAVRSTKDVRCAGRE

SEQ ID NO: 6746 - DNA, 4860 bp, Homo sapiens
  ref <308>: DATABASE ACCESSION NUMBER: EMBL / AF029779
  ref <309>: DATABASE ENTRY DATE: 1999-07-05
ctcatgcatatgcaggtgcgcgggtgacgaatgggcgagcgagctgtcagtctcgttccgaacttgttggctgcggtgccgggagcgcgggcgcgcagagcccgaggccgggacccgctgccttcaccgccgccgccgtcgccgccgggtgggagccgggccgggcagccggagcgcggccgccagcgagccggagctgccgccgcccctgcacgcccgccgcccaggcccgcgcgccggacgctgcgctcgaccccgcccgcgccgccgccgccgccgcctctgccgctgccgctgcctctgcgggcgctcggagggcgggcgggcgctgggaggccggcgcggcggctgggagccgggcgcgggcggcggcggcggggccgggcgggcgggtcgcgggggcaatgcgggcgcagggccgggggcgccttccccggcggctgctgctgctgctggcgctctgggtgcaggcggcgcggcccatgggctatttcgagctgcagctgagcgcgctgcggaacgtgaacggggagctgctgagcggcgcctgctgtgacggcgacggccggacaacgcgcgcggggggctgcggccacgacgagtgcgacacgtacgtgcgcgtgtgccttaaggagtaccaggccaaggtgacgcccacggggccctgcagctacggccacggcgccacgcccgtgctgggcggcaactccttctacctgccgccggcgggcgctgcgggggaccgagcgcgggcgcgggcccgggccggcggcgaccaggacccgggcctcgtcgtcatccccttccagttcgcctggccgcgctcctttaccctcatcgtggaggcctgggactgggacaacgataccaccccgaatgaggagctgctgatcgagcgagtgtcgcatgccggcatgatcaacccggaggaccgctggaagagcctgcacttcagcggccacgtggcgcacctggagctgcagatccgcgtgcgctgcgacgagaactactacagcgccacttgcaacaagttctgccggccccgcaacgactttttcggccactacacctgcgaccagtacggcaacaaggcctgcatggacggctggatgggcaaggagtgcaaggaagctgtgtgtaaacaagggtgtaatttgctccacgggggatgcaccgtgcctggggagtgcaggtgcagctacggctggcaagggaggttctgcgatgagtgtgtcccctaccccggctgcgtgcatggcagttgtgtggagccctggcagtgcaactgtgagaccaactggggcggcctgctctgtgacaaagacctgaactactgtggcagccaccacccctgcaccaacggaggcacgtgcatcaacgccgagcctgaccagtaccgctgcacctgccctgacggctactcgggcaggaactgtgagaaggctgagcacgcctgcacctccaacccgtgtgccaacgggggctcttgccatgaggtgccgtccggcttcgaatgccactgcccatcgggctggagcgggcccacctgtgcccttgacatcgatgagtgtgcttcgaacccgtgtgcggccggtggcacctgtgtggaccaggtggacggctttgagtgcatctgccccgagcagtgggtgggggccacctgccagctggacgtcaacgactgtcgcgggcagtgtcagcatgggggcacctgcaaggacctggtgaacgggtaccagtgtgtgtgcccacggggcttcggaggccggcattgcgagctggaacgagacaagtgtgccagcagcccctgccacagcggcggcctctgcgaggacctggccgacggcttccactgccactgcccccagggcttctccgggcctctctgtgaggtggatgtcgacctttgtgagccaagcccctgccggaacggcgctcgctgctataacctggagggtgactattactgcgcctgccctgatgactttggtggcaagaactgctccgtgccccgcgagccgtgccctggcggggcctgcagagtgatcgatggctgcgggtcagacgcggggcctgggatgcctggcacagcagcctccggcgtgtgtggcccccatggacgctgcgtcagccagccagggggcaacttttcctgcatctgtgacagtggctttactggcacctactgccatgagaacattgacgactgcctgggccagccctgccgcaatgggggcacatgcatcgatgaggtggacgccttccgctgcttctgccccagcggctgggagggcgagctctgcgacaccaatcccaacgactgccttcccgatccctgccacagccgcggccgctgctacgacctggtcaatgacttctactgtgcgtgcgacgacggctggaagggcaagacctgccactcacgcgagttccagtgcgatgcctacacctgcagcaacggtggcacctgctacgacagcggcgacaccttccgctgcgcctgcccccccggctggaagggcagcacctgcgccgtcgccaagaacagcagctgcctgcccaacccctgtgtgaatggtggcacctgcgtgggcagcggggcctccttctcctgcatctgccgggacggctgggagggtcgtacttgcactcacaataccaacgactgcaaccctctgccttgctacaatggtggcatctgtgttgacggcgtcaactggttccgctgcgagtgtgcacctggcttcgcggggcctgactgccgcatcaacatcgacgagtgccagtcctcgccctgtgcctacggggccacgtgtgtggatgagatcaacgggtatcgctgtagctgcccacccggccgagccggcccccggtgccaggaagtgatcgggttcgggagatcctgctggtcccggggcactccgttcccacacggaagctcctgggtggaagactgcaacagctgccgctgcctggatggccgccgtgactgcagcaaggtgtggtgcggatggaagccttgtctgctggccggccagcccgaggccctgagcgcccagtgcccactggggcaaaggtgcctggagaaggccccaggccagtgtctgcgaccaccctgtgaggcctggggggagtgcggcgcagaagagccaccgagcaccccctgcctgccacgctccggccacctggacaataactgtgcccgcctcaccttgcatttcaaccgtgaccacgtgccccagggcaccacggtgggcgccatttgctccgggatccgctccctgccagccacaagggctgtggcacgggaccgcctgctggtgttgctttgcgaccgggcgtcctcgggggccagtgccgtggaggtggccgtgtccttcagccctgccagggacctgcctgacagcagcctgatccagggcgcggcccacgccatcgtggccgccatcacccagcgggggaacagctcactgctcctggctgtcaccgaggtcaaggtggagacggttgttacgggcggctcttccacaggtctgctggtgcctgtgctgtgtggtgccttcagcgtgctgtggctggcgtgcgtggtcctgtgcgtgtggtggacacgcaagcgcaggaaagagcgggagaggagccggctgccgcgggaggagagcgccaacaaccagtgggccccgctcaaccccatccgcaaccccatcgagcggccggggggccacaaggacgtgctctaccagtgcaagaacttcacgccgccgccgcgcagggcggacgaggcgctgcccgggccggccggccacgcggccgtcagggaggatgaggaggacgaggatctgggccgcggtgaggaggactccctggaggcggagaagttcctctcacacaaattcaccaaagatcctggccgctcgccggggaggccggcccactgggcctcaggccccaaagtggacaaccgcgcggtcaggagcatcaatgaggcccgctacgccggcaaggagtaggggcggctgccagctgggccgggacccagggccctcggtgggagccatgccgtctgccggacccggaggccgaggccatgtgcatagtttctttattttgtgtaaaaaaaccaccaaaaacaaaaaccaaatgtttattttctacgtttctttaaccttgtataaattattcagtaactgtcaggctgaaaacaatggagtattctcggatagttgctatttttgtaaagtttccgtgcgtggcactcgctgtatgaaaggagagagcaaagggtgtctgcgtcgtcaccaaatcgtagcgtttgttaccagaggttgtgcactgtttacagaatcttccttttattcctcactcgggtttctctgtggctccaggccaaagtgccggtgagacccatggctgtgttggtgtggcccatggctgttggtgggacccgtggctgatggtgtggcctgtggctgtcggtgggactcgtggctgtcaatgggacctgtggctgtcggtgggacctacggtggtcggtgggaccctggttattgatgtggccctggctgccggcacggcccgtggctgttgacgcacctgtggttgttagtggggcctgaggtcatcggcgtggcccaaggccggcaggtcaacctcgcgcttgctggccagtccaccctgcctgccgtctgtgcttcctcctgcccagaacgcccgctccagcgatctctccactgtgctttcagaagtgcccttcctgctgcgaagttctcccatcctgggacggcggcagtattgaagctcgtgacaagtgccttcacacagaaccctcggaactgtccacgcgttccgtgggaacaaggggtt

SEQ ID NO: 6747 - protein, 1238 aa, Homo sapiens [sequence omitted]

SEQ ID NO: 6748 - DNA, 512 bp, Rattus norvegicus
  ref <308>: DATABASE ACCESSION NUMBER: EMBL / AI101743
  ref <309>: DATABASE ENTRY DATE: 2000-03-03
attaagatacagatctatgaacagaacaattatttgctagctagattacagttccttgtaaaaataatatgtgaaaaattagtagaaaatgaaaatctgaaagttatctgaatctgaaaatgttaagcaatttctgctgcacattaccgtggatcgtttcaaagaaggctggagcatgactgcgtagacagaacgtaatgattctggttttattaaagcacgcagtgggtccttcagagcttggcatagtctttcagaatcatctgtagcttctggctcagcatgatgtttcgactgaatcgtaattggccaccgctttcccgcctctccttcttatttcttccacgaccttgtctgcggcagaagagcctttcccaacgcctttgaagtcccctcctaagtcattcacaacaactaatgctcctctttctgcaaaagccagggcataagctctgcccaaccctcccccggcgccggtgaccaggaccacacgcccgtcgaacctcagaggc

SEQ ID NO: 6749 - protein, 735 aa, Rattus norvegicus
  ref <308>: DATABASE ACCESSION NUMBER: Refseq / NP_077368
  ref <309>: DATABASE ENTRY DATE: 2001-03-07
MASPLRFDGRVVLVTGAGGGLGRAYALAFAERGALVVVNDLGGDFKGVGKGSSAADKVVEEIRRRGGKAVANYDSGEAGEKLVKTALDTFGRIDVVVNNAGILRDRSFSRISDEDWDIIQRVHLRGSFQVTRAAWDHMKKQNYGRIIMTASASGIYSNFGQANYSAAKLGLLGLANTLVIEGRKNNIHCNTIAPNAGSRMTETVMPEDLVEALKPEYVAPLVLWLCHESCEENGGLFEVGAGWIGKLRWERTLGAIVRKRNQPMTPEAVRDNWVKICDFSNASKPKSIQESTGGIIEVLHKIDSEGISQNHTGQVASADASGFAGVVGHKLPSFSSSYTELQCIMYALGVGASVKNPKDLKFVYEGSADFSCLPTFGVIVAQKSLTSGGLAEVPGLSINFAKVLHGEQYLELYKPLPRSGELKCEAVIADILDKGSGIVIVMDVYSYSGKELICYNQFSVFVVGSGGFGGKRTSEKLKAAVAVPDRPPDAVLRDTTSLNQAALYRLSGDSNPLHIDPSFASIAGFEKPILHGLCTFGFSARHVLQQFADNDVSRFKAIKVRFAKPVYPGQTLQTEMWKEGNRIHFQTKVQETGDIVISNAYVDLVPTSGVSAQTPSEGGALQSALVFGEIGRRLKDVGREVVKKVNAVFEWHITKNGNVAAKWTIDLKNGSGEVYQGPAKGSADTTITISDEDFMEVVLGKLNPQNAFFSGRLKARGNIMLSQKLQMILKDYAKL

SEQ ID NO: 6750 - DNA, 2593 bp, Homo sapiens
  ref <308>: DATABASE ACCESSION NUMBER: Refseq / NM_000414
  ref <309>: DATABASE ENTRY DATE: 2002-11-05
ggccagcgcgtctgcttgttcgtgtgtgtgtcgttgcaggccttattcatgggctcaccgctgaggttcgacgggcgggtggtactggtcaccggcgcgggggcaggattgggccgagcctatgccctggcttttgcagaaagaggagcgttagttgttgtgaatgatttgggaggggacttcaaaggagttggtaaaggctccttagctgctgataaggttgttgaagaaataagaaggagaggtggaaaagcagtggccaactatgattcagtggaagaaggagagaaggttgtgaagacagccctggatgcttttggaagaatagatgttgtggtcaacaatgctggaattctgagggatcgttcctttgctaggataagtgatgaagactgggatataatccacagagttcatttgcggggttcattccaagtgacacgggcagcatgggaacacatgaagaaacagaagtatggaaggattattatgacttcatcagcttcaggaatatatggcaactttggccaggccaattatagtgctgcaaagttgggtcttctgggccttgcaaattctcttgcaattgaaggcaggaaaagcaacattcattgtaacaccattgctcctaatgcgggatcacggatgactcagacagttatgcctgaagatcttgtggaagccctgaagccagagtatgtggcacctcttgtcctttggctttgtcacgagagttgtgaggagaatggtggcttgtttgaggttggagcaggatggattggaaaattacgctgggagcggactcttggagctattgtaagacaaaagaatcacccaatgactcctgaggcagtcaaggctaactggaagaagatctgtgactttgagaatgccagcaagcctcagagtatccaagaatcaactggcagtataattgaagttctgagtaaaatagattcagaaggaggagtttcagcaaatcatactagtcgtgcaacgtctacagcaacatcaggatttgctggagctattggccagaaactccctccattttcttatgcttatacggaactggaagctattatgtatgcccttggagtgggagcgtcaatcaaggatccaaaagatttgaaatttatttatgaaggaagttctgatttctcctgtttgcccaccttcggagttatcataggtcagaaatctatgatgggtggaggattagcagaaattcctggactttcaatcaactttgcaaaggttcttcatggagagcagtacttagagttatataaaccacttcccagagcaggaaaattaaaatgtgaagcagttgttgctgatgtcctagataaaggatccggtgtagtgattattatggatgtctattcttattctgagaaggaacttatatgccacaatcagttctctctctttcttgttggctctggaggctttggtggaaaacggacatcagacaaagtcaaggtagctgtagccatacctaatagacctcctgatgctgtacttacagataccacctctcttaatcaggctgctttgtaccgcctcagtggagactggaatcccttacacattgatcctaactttgctagtctagcaggttttgacaagcccatattacatggattatgtacatttggattttctgccaggcgtgtgttacagcagtttgcagataatgatgtgtcaagattcaaggcaattaaggctcgttttgcaaaaccagtatatccaggacaaactctacaaactgagatgtggaaggaaggaaacagaattcattttcaaaccaaggtccaagaaactggagacattgtcatttcaaatgcatatgtggatcttgcaccaacatctggtacttcagctaagacaccctctgagggcgggaagcttcagagtacctttgtatttgaggaaataggacgccgcctaaaggatattgggcctgaggtggtgaagaaagtaaatgctgtatttgagtggcatataaccaaaggcggaaatattggggctaagtggactattgacctgaaaagtggttctggaaaagtgtaccaaggccctgcaaaaggtgctgctgatacaacaatcatactttcagatgaagatttcatggaggtggtcctgggcaagcttgaccctcagaaggcattctttagtggcaggctgaaggccagagggaacatcatgctgagccagaaacttcagatgattcttaaagactacgccaagctctgaagggcacactacactattaataaaaatggaatcattaaatactctcttcacccaaatatgcttgattattctgcaaaagtgattagaactaagatgcaggggaaattgcttaacattttcagatatcagataactgcagattttcattttctactaattttcatgtatcattatttttacaaggaactatatataagctagcacatgattatccttctgttcttagatctgtatcttcataataaaaaattttgcccaagtcctgtttccttagaatttgtgatagcattgataagttgaaaggaaaattaaatcaataaaggcctttgatacc

SEQ ID NO: 6751 - protein, 736 aa, Homo sapiens
  ref <308>: DATABASE ACCESSION NUMBER: SWISS-Prot / P51659
  ref <309>: DATABASE ENTRY DATE: 2002-06-15
MGSPLRFDGRVVLVTGAGAGLGRAYALAFAERGALVVVNDLGGDFKGVGKGSLAADKVVEEIRRRGGKAVANYDSVEEGEKVVKTALDAFGRIDVVVNNAGILRDRSFARISDEDWDIIHRVHLRGSFQVTRAAWEHMKKQKYGRIIMTSSASGIYGNFGQANYSAAKLGLLGLANSLAIEGRKSNIHCNTIAPNAGSRMTQTVMPEDLVEALKPEYVAPLVLWLCHESCEENGGLFEVGAGWIGKLRWERTLGAIVRQKNHPMTPEAVKANWKKICDFENASKPQSIQESTGSIIEVLSKIDSEGGVSANHTSRATSTATSGFAGAIGQKLPPFSYAYTELEAIMYALGVGASIKDPKDLKFIYEGSSDFSCLPTFGVIIGQKSMMGGGLAEIPGLSINFAKVLHGEQYLELYKPLPRAGKLKCEAVVADVLDKGSGVVIIMDVYSYSEKELICHNQFSLFLVGSGGFGGKRTSDKVKVAVAIPNRPPDAVLTDTTSLNQAALYRLSGDWNPLHIDPNFASLAGFDKPILHGLCTFGFSARRVLQQFADNDVSRFKAIKARFAKPVYPGQTLQTEMWKEGNRIHFQTKVQETGDIVISNAYVDLAPTSGTSAKTPSEGGKLQSTFVFEEIGRRLKDIGPEVVKKVNAVFEWHITKGGNIGAKWTIDLKSGSGKVYQGPAKGAADTTIILSDEDFMEVVLGKLDPQKAFFSGRLKARGNIMLSQKLQMILKDYAKL

SEQ ID NO: 6752 - DNA, 583 bp, Rattus norvegicus
  ref <308>: DATABASE ACCESSION NUMBER: EMBL / AI102031
  ref <309>: DATABASE ENTRY DATE: 2000-03-03
tttttttttttgggtttgtccggtttttcatttttgtttgtttcgctgcattttgaacactagggcttattttcaaacagcacacggttggtctgcagagcggaccaggctgggccacagtgcaggccctgcccagggcagctgccagaagaggacccaagccctgtccggtggcgcggccaagcgtcaggcaagtgcggcggtggctctgcacccccggcccgccctgaacatgcgggcatcgggaactcaactaggagggggacacagcagcttcgggaatactggagaagtccactgaactgggtcggacggctttttggaaaaccacctcatctttgggggtacacctcttggcttaggtttccgctccccaatttcccgacacttttcaagagtttcaaaacaaaacaaaaaacagaaaagaagaggaagaaaaacaaaaaaaaaaaaagcacacatcttttgggaaaaggttcttcacacaccggaaggctgcagaggctctcccgtcactgcacccgctctgtgaaattctccgggaagacgccgcggaatttctccagttccttgggctgattcc

SEQ ID NO: 6753 - protein, 588 aa, Rattus norvegicus
  ref <308>: DATABASE ACCESSION NUMBER: SWISS-Prot / O08839
  ref <309>: DATABASE ENTRY DATE: 2001-10-16
MAEMGSKGVTAGKIASNVQKKLTRAQEKVLQKLGKADETKDEQFEQCVQNFNKQLTEGTRLQKDLRTYLASVKAMHEASKKLSECLQEVYEPEWPGRDEANKIAENNDLLWMDYHQKLVDQALLTMDTYLGQFPDIKSRIAKRGRKLVDYDSARHHYESLQTAKKKDEAKIAKPVSLLEKAAPQWCQGKLQAHLVAQTNLLRNQAEEELIKAQKVFEEMNVDLQEELPSLWNSRVGFYVNTFQSIAGLEENFHKEMSKLNQNLNDVLVSLEKQHGSNTFTVKAQPSDSAPEKGNKSPSPPPDGSPAATPEIRVNHEPEPASGASPGATIPKSPSQLRKGPPVPPPPKHTPSKEMKQEQILSLFDDAFVPEISVTTPSQFEAPGPFSEQASLLDLDFEPLPPVASPVKAPTPSGQSIPWDLWEPTESQAGVLPSGEPSSAEGSFAVAWPSQTAEPGPAQPAEASEVVGGTQEPGETAASEATSSSLPAVVVETFSATVNGAVEGSTTTGRLDLPPGFMFKVQAQHDYTATDTDELQLKAGDVVLVIPFQNPEEQDEGWLMGVKESDWNQHKELEKCRGVFPENFTERVQ

SEQ ID NO: 6754 - DNA, 1921 bp, Homo sapiens
  ref <308>: DATABASE ACCESSION NUMBER: EMBL / U68485
  ref <309>: DATABASE ENTRY DATE: 2000-03-04
ccccgcgcgagagcggcccttgccaccgggcgaggcctgcgccgcgatggcagagatgggcagtaaaggggtgacggcgggaaagatcgccagcaacgtgcagaagaagctcacccgcgcgcaggagaaggttctccagaagctggggaaggcagatgagaccaaggatgagcagtttgagcagtgcgtccagaatttcaacaagcagctgacggagggcacccggctgcagaaggatctccggacctacctggcctccgtcaaagccatgcacgaggcttccaagaagctgaatgagtgtctgcaggaggtgtatgagcccgattggcccggcagggatgaggcaaacaagatcgcagagaacaacgacctgctgtggatggattaccaccagaagctggtggaccaggcgctgctgaccatggacacgtacctgggccagttccccgacatcaagtcacgcattgccaagcgggggcgcaagctggtggactacgacagtgcccggcaccactacgagtcccttcaaactgccaaaaagaaggatgaagccaaaattgccaaggccgaggaggagctcatcaaagcccagaaggtgtttgaggagatgaatgtggatctgcaggaggagctgccgtccctgtggaacagccgcgtaggtttctacgtcaacacgttccagagcatcgcgggcctggaggaaaacttccacaaggagatgagcaagctcaaccagaacctcaatgatgtgctggtcggcctggagaagcaacacgggagcaacaccttcacggtcaaggcccagcccagaaagaaaagtaaactgttttcgcggctgcgcagaaagaagaacagtgacaacgcgcctgcaaaagggaacaagagcccttcgcctccagatggctcccctgccgccacccccgagatcagagtcaaccacgagccagagccggccggcggggccacgcccggggccaccctccccaagtccccatctcagccagcagaggcctcggaggtggcgggtgggacccaacctgcggctggagcccaggagccaggggagacggcggcaagtgaagcagcctccagctctcttcctgctgtcgtggtggagaccttcccagcaactgtgaatggcaccgtggagggcggcagtggggccgggcgcttggacctgcccccaggtttcatgttcaaggtacaggcccagcacgactacacggccactgacacagacgagctgcagctcaaggctggtgatgtggtgctggtgatccccttccagaaccctgaagagcaggatgaaggctggctcatgggcgtgaaggagagcgactggaaccagcacaaggagctggagaagtgccgtggcgtcttccccgagaacttcactgagagggtcccatgacggcggggcccaggcagcctccgggcgtgtgaagaacacctcctcccgaaaaatgtgtggttcttttttttgttttgttttcgtttttcatcttttgaagagcaaagggaaatcaagaggagacccccaggcagaggggcgttctcccaaagtttaggtcgttttccaaagagccgcgtcccggcaagtccggcggaattcaccagtgttcctgaagctgctgtgtcctctagttgagtttctggcgcccctgcctgtgcccgcatgtgtgcctggccgcagggcggggctgggggctgccgagccaccatacttaactgaagcttcggccgcaccacccggggaagggtcctcttttcctggcagctgctgtgggtggggcccagacaccagcctagcctgctctgccccgcagacggtctgtgtgctgtttgaaaataaatcttagtgttcaaaacaaaatgaaacaaaaaaaaaaatgataaaaactctcaaaaaaacaaggaattc

SEQ ID NO: 6755 - protein, 593 aa, Homo sapiens
  ref <308>: DATABASE ACCESSION NUMBER: SWISS-Prot / Q99688
  ref <309>: DATABASE ENTRY DATE: 2001-10-16
MAEMGSKGVTAGKIASNVQKKLTRAQEKVLQKLGKADETKDEQFEQCVQNFNKQLTEGTRLQKDLRTYLASVKAMHEASKKLNECLQEVYEPDWPGRDEANKIAENNDLLWMDYHQKLVDQALLTMDTYLGQFPDIKSRIAKRGRKLVDYDSARHHYESLQTAKKKDEAKIAKPVSLLEKAAPQWCQGKLQAHLVAQTNLLRNQAEEELIKAQKVFEEMNVDLQEELPSLWNSRVGFYVNTFQSIAGLEENFHKEMSKLNQNLNDVLVGLEKQHGSNTFTVKAQPSDNAPAKGNKSPSPPDGSPAATPEIRVNHEPEPAGGATPGATLPKSPSQLRKGPPVPPPPKHTPSKEVKQEQILSLFEDTFVPEISVTTPSQFEAPGPFSEQASLLDLDFDPLPPVTSPVKAPTPSGQSIPWDLWEPTESPAGSLPSGEPSAAEGTFAVSWPSQTAEPGPAQPAEASEVAGGTQPAAGAQEPGETAASEAASSSLPAVVVETFPATVNGTVEGGSGAGRLDLPPGFMFKVQAQHDYTATDTDELQLKAGDVVLVIPFQNPEEQDEGWLMGVKESDWNQHKELEKCRGVFPENFTERVP

SEQ ID NO: 6756 - DNA, 583 bp, Rattus norvegicus; identical to SEQ ID NO: 6752
  ref <308>: DATABASE ACCESSION NUMBER: EMBL / AI102031
  ref <309>: DATABASE ENTRY DATE: 2000-03-03

SEQ ID NO: 6757 - protein, 588 aa, Rattus norvegicus; identical to SEQ ID NO: 6753
  ref <308>: DATABASE ACCESSION NUMBER: SWISS-Prot / O08839
  ref <309>: DATABASE ENTRY DATE: 2001-10-16

SEQ ID NO: 6758 - DNA, 1921 bp, Homo sapiens; identical to SEQ ID NO: 6754
  ref <308>: DATABASE ACCESSION NUMBER: EMBL / U68485
  ref <309>: DATABASE ENTRY DATE: 2000-03-04

SEQ ID NO: 6759 - protein, 593 aa, Homo sapiens; identical to SEQ ID NO: 6755
  ref <308>: DATABASE ACCESSION NUMBER: SWISS-Prot / Q99688
  ref <309>: DATABASE ENTRY DATE: 2001-10-16

SEQ ID NO: 6760 - DNA, 583 bp, Rattus norvegicus; identical to SEQ ID NO: 6752
  ref <308>: DATABASE ACCESSION NUMBER: EMBL / AI102031
  ref <309>: DATABASE ENTRY DATE: 2000-03-03

SEQ ID NO: 6761 - protein, 588 aa, Rattus norvegicus; identical to SEQ ID NO: 6753
  ref <308>: DATABASE ACCESSION NUMBER: SWISS-Prot / O08839
  ref <309>: DATABASE ENTRY DATE: 2001-10-16

SEQ ID NO: 6762 - DNA, 1921 bp, Homo sapiens; identical to SEQ ID NO: 6754
  ref <308>: DATABASE ACCESSION NUMBER: EMBL / U68485
  ref <309>: DATABASE ENTRY DATE: 2000-03-04

SEQ ID NO: 6763 - protein, 593 aa, Homo sapiens; identical to SEQ ID NO: 6755
  ref <308>: DATABASE ACCESSION NUMBER: SWISS-Prot / Q99688
  ref <309>: DATABASE ENTRY DATE: 2001-10-16

SEQ ID NO: 6764 - DNA, 583 bp, Rattus norvegicus; identical to SEQ ID NO: 6752
  ref <308>: DATABASE ACCESSION NUMBER: EMBL / AI102031
  ref <309>: DATABASE ENTRY DATE: 2000-03-03

SEQ ID NO: 6765 - protein, 588 aa, Rattus norvegicus; identical to SEQ ID NO: 6753
  ref <308>: DATABASE ACCESSION NUMBER: SWISS-Prot / O08839
  ref <309>: DATABASE ENTRY DATE: 2001-10-16

SEQ ID NO: 6766 - DNA, 1921 bp, Homo sapiens; identical to SEQ ID NO: 6754
  ref <308>: DATABASE ACCESSION NUMBER: EMBL / U68485
  ref <309>: DATABASE ENTRY DATE: 2000-03-04

SEQ ID NO: 6767 - protein, 593 aa, Homo sapiens; identical to SEQ ID NO: 6755
  ref <308>: DATABASE ACCESSION NUMBER: SWISS-Prot / Q99688
  ref <309>: DATABASE ENTRY DATE: 2001-10-16

SEQ ID NO: 6768 - DNA, 549 bp, Rattus norvegicus
  ref <308>: DATABASE ACCESSION NUMBER: EMBL / AI102044
  ref <309>: DATABASE ENTRY DATE: 2000-03-03
attgtggggttagtacctatgattcgataattgacaatggttatccgggttgtcatacacttgggctaggaaaattggttcttgttactcatattaacagtttttcatctatgggtctataaattaccccaatttgtaatataggaatttattgaggtttggggaattagtgtgtgtaagtatgtatgttgagcttgaaccctttctttattgatggctgcttttaaccctacaatggttaaggggttgtagttgtttattcactatttaagggtttttccttttcctaaaaagctggccctcttttggttatattttaagtttacattttgatttgttgttctgatggtaagcttaaagttgaactgaaattcttttttgggcaaccagctttcaccaagctcgataggcttttcacctttacctaaaaatcttcccactattttgctacataaacgggttgattcatgaaattgtttttaggtagctcgtttggtttcggggttcttagcttaaattctttttgttaaggattttctagttaattca

SEQ ID NO: 6769 - DNA, 2201 bp, Homo sapiens; identical to SEQ ID NO: 6620
  ref <308>: DATABASE ACCESSION NUMBER: EMBL / L22009
  ref <309>: DATABASE ENTRY DATE: 1999-07-02

SEQ ID NO: 6770 - protein, 449 aa, Homo sapiens; identical to SEQ ID NO: 6621
  ref <308>: DATABASE ACCESSION NUMBER: SWISS-Prot / P31943
  ref <309>: DATABASE ENTRY DATE: 2001-10-16

SEQ ID NO: 6771 - DNA, 602 bp, Rattus norvegicus
  ref <308>: DATABASE ACCESSION NUMBER: EMBL / AI102103
  ref <309>: DATABASE ENTRY DATE: 2000-03-03
gatggctaactaaggactttatttcaaacaaaaattaaaaattaaaaaaaaaaaaaaatgagagctatttccctgggtgtgaggaaaggatcagggtgagaaatttccccatggctaagccaataccctcaatatattagagggatcgtgtcagttcccttccttacccccatgatggggaacctaagcaagtgcaggacccacctgtcgggaatgtgggctaggggtcagcccccaaatggggacagagttgggcagcagcatggccaaacataggattaagtcctaagtaccaagaacccactcctcccatcttgctgggacccagggaaagtaaaagatggttttgtagaaaacctctgagatccccgaggggaagaaggttccagtcctcctcatgttcatcatctctgttctctggagggcagtgagtcctgggatctgtcaggtggcaatactgacacagcaagaggtggggaagccccagcaagtctggaccccatggttggctctcctaccctttggccagctctcatggttaccacatgatcctttgtgttttttgccttccatttcccttgggtaggtggttaggtaggtgg

SEQ ID NO: 6772 - protein, 816 aa, Rattus norvegicus; identical to SEQ ID NO: 2216
  ref <308>: DATABASE ACCESSION NUMBER: SWISS-Prot / BAA18969
  ref <309>: DATABASE ENTRY DATE: 2002-10-01

SEQ ID NO: 6773 - DNA, 334 bp, Homo sapiens; identical to SEQ ID NO: 2217
  ref <308>: DATABASE ACCESSION NUMBER: EMBL / AI205643
  ref <309>: DATABASE ENTRY DATE: 2000-03-03

SEQ ID NO: 6774 - protein, 828 aa, Homo sapiens
  ref <308>: DATABASE ACCESSION NUMBER: SWISS-Prot / BAA21661
  ref <309>: DATABASE ENTRY DATE: 2002-10-01
MRFLEARSLAVAMGDTVVEPAPLKPTSEPTSGPPGNNGGSLLSVITEGVGELSVIDPEVAQKACQEVLEKVKLLHGGVAVSSRGTPLELVNGDGVDSEIRCLDDPPAQIREEEDEMGAAVASGTAKGARRRRQNNSAKQSWLLRLFESKLFDISMAISYLYNSKEPGVQAYIGNRLFCFRNEDVDFYLPQLLNMYIHMDEDVGDAIKPYIVHRCRQSINFSLQCALLLGAYSSDMHISTQRHSRGTKLRKLILSDELKPAHRKRELPSLSPAPDTGLSPSKRTHQRSKSDATASISLSSNLKRTASNPKVENEDEELSSSTESIDNSFSSPVRLAPEREFIKSLMAIGKRLATLPTKEQKTQRLISELSLLNHKLPARVWLPTAGFDHHVVRVPHTQAVVLNSKDKAPYLIYVEVLECENFDTTSVPARIPENRIRSTRSVENLPECGITHEQRAGSFSTVPNYDNDDEAWSVDDIGELQVELPEVHTNSCDNISQFSVDSITSQESKEPVFIAAGDIRRRLSEQLAHTPTAFKRDPEDPSAVALKEPWQEKVRRIREGSPYGHLPNWRLLSVIVKCGDDLRQELLAFQVLKQLQSIWEQERVPLWIKPYKILVISADSGMIEPVVNAVSIHQVKKQSQLSLLDYFLQEHGSYTTEAFLSAQRNFVQSCAGYCLVCYLLQVKDRHNGNILLDAEGHIIHIDFGFILSSSPRNLGFETSAFKLTTEFVDVMGGLDGDMFNYYKMLMLQGLIAARKHMDKVVQIVEIMQQGSQLPCFHGSSTIRNLKERFHMSMTEEQLQLLVEQMVDGSMRSITTKLYDGFQYLTNGIM

SEQ ID NO: 6775 - DNA, 602 bp, Rattus norvegicus; identical to SEQ ID NO: 6771
  ref <308>: DATABASE ACCESSION NUMBER: EMBL / AI102103
  ref <309>: DATABASE ENTRY DATE: 2000-03-03

SEQ ID NO: 6776 - protein, 816 aa, Rattus norvegicus; identical to SEQ ID NO: 2216
  ref <308>: DATABASE ACCESSION NUMBER: SWISS-Prot / BAA18969
  ref <309>: DATABASE ENTRY DATE: 2002-10-01

SEQ ID NO: 6777 - DNA, 334 bp, Homo sapiens; identical to SEQ ID NO: 2217
  ref <308>: DATABASE ACCESSION NUMBER: EMBL / AI205643
  ref <309>: DATABASE ENTRY DATE: 2000-03-03

SEQ ID NO: 6778 - protein, 828 aa, Homo sapiens; identical to SEQ ID NO: 6774
  ref <308>: DATABASE ACCESSION NUMBER: SWISS-Prot / BAA21661
  ref <309>: DATABASE ENTRY DATE: 2002-10-01

SEQ ID NO: 6779 - DNA, 405 bp, Rattus norvegicus
  ref <308>: DATABASE ACCESSION NUMBER: EMBL / AI102562
  ref <309>: DATABASE ENTRY DATE: 2000-03-03
ggcttttattattcacatgctcggtagaaaacggggtttagtaaactgggtggaggtgtacggcaagactctgagttggtccggaaattatttacacctgagggcagcagcactgttcgtcacttcaggcacagcacgtgcacttgtccgaggcacctttgcaaacacagccctgggcacatttggagcagcccacggggcagcaggagcagcagctcttcttgcaggaggtgcatttgcagtttttgcagccgcaggagctggaccaggtgcaggagccgccggtggagcaggaccagttggggtccattccgagatctggtgaatctggagcaacggggtaagctacaagaaggcagtccctcgtgccgaattcttggcctctagggccaaattccctatagg

SEQ ID NO: 6780 - protein, 61 aa, Rattus norvegicus
  ref <308>: DATABASE ACCESSION NUMBER: SWISS-Prot / P02803
  ref <309>: DATABASE ENTRY DATE: 2002-06-15
MDPNCSCSTGGSCTCSSSCGCKNCKCTSCKKSCCSCCPVGCSKCAQGCVCKGASDKCTCCA

SEQ ID NO: 6781 - DNA, 625 bp, Homo sapiens
  ref <308>: DATABASE ACCESSION NUMBER: EMBL / BG260238
  ref <309>: DATABASE ENTRY DATE: 2001-03-09
gctgtgggaagaggccgagcgtggctttatcttgcactcatgcaaaagaaactggcagattatctgaaagtgcttatagacaataaacatctcttaagcgagttctatgagcctgaggctttaatgatggaggaagaagggatggtgattgttggtctgctggtgggactcaatgttctcgatgccaatctctgtttgaaaggagaagacttggattctcaggtggagtaatagatttttccctctaccttaaggatgtgcaggatcttgatggtggcaaggagcatgaaagaattactgatgtccttgatcaaaaaaattatgtggaagaacttaaccggcacttgagctgcacagttggggatcttcaaaccaagatagatggcttggaaaagactaactcaaagcttcaagaagagctttcagctgcaacagaccgaatttgctcacttcaagaagaacagcagcagttaagagaacaaaatgaattaattcgagaaagaagtgaaaagagtgtagagataacaaaacaggataccaaagttgagctggagacttacaagcaaactcggcaaggtctggatgaaatgtacagtgatgtgtggaagcagtaaagaggagaaaa

SEQ ID NO: 6782 - DNA, 522 bp, Rattus norvegicus
  ref <308>: DATABASE ACCESSION NUMBER: EMBL / AI102620
  ref <309>: DATABASE ENTRY DATE: 2000-03-03
aaacaccaaaataggtacaaatactataaaattggttcaaaggggtaaaaattttaattaaaatatctcgatatatttaaaataacaaaggatacatttaagccaaattttcttaacccagagtttttttttgtagcatttgcttacatagtaaggtgctaataggagttagcccttaagccctggaagtcttaggaatcatagtcacacagcacatagaatttcattgtgagagtgaactttggtagaagaaaaatctataggacacctgaggtagtagaaactggaataaacagcagtagacgttatttacaacttgagtaccaaataacattaaaaacacaaaaataattacacaatacaattttcagtccagctttgatccaaagaaaacaagaatatcacatcacatttgcatcgaaaacaaaacagcacaattaccagcaagccgaggggactgcaaacaaactcaaacacggtgggtcctgacatctggggacagtctgagtttgaaatgtggca

SEQ ID NO: 6783 - protein, 1493 aa, Rattus norvegicus
  ref <308>: DATABASE ACCESSION NUMBER: SWISS-Prot / AAD25049
  ref <309>: DATABASE ENTRY DATE: 2002-06-15
MAAAAGDRASSSGFPGAAAASPEAGGGGGGGGALQGSGAPAAGAAGLLREPGSAGRERADWRRRQLRKVRSVELDQLPEQPLFLAAASPPCPSTSPSPEPADAAAGASRFQPAAGPPPPGAASRCGSHSAELAAARDSGARSPAGAEPPSAAAPSGREMENKETLKGLHKMEDRPEERMIREKLKATCMPAWKHEWLERRNRRGPVVVKPIPIKGDGSEVNNLAAEPQGEGQAGSAAPAPKGRRSPSPGSSPSGRSVKPESPGVRRKRVSPVPFQSGRITPPRRAPSPDGFSPYSPEETSRRVNKVMRARLYLLQQIGPNSFLIGGDSPDNKYRVFIGPQNCSCGRGAFCIHLLFVMLRVFQLEPSDPMLWRKTLKNFEVESLFQKYHSRRSSRIKAPSRNTIQKFVSRMSNSHTLSSSSTSTSSSENSIKDEEEQMCPICLLGMLDEESLTVCEDGCRNKLHHHCMSIWAEECRRNREPLICPLCRSKWRSHDFYSHELSSPVESPASLRAVQQPSSPQQPVAGSQRRNQESSFNLTHFGTQQIPSAYKDLAEPWIQVFGMELVGCLFSRNWNVREMALRRLSHDVSGALLLANGESTGNSGGGSGGSLSAGAASGSSQPSISGDVVEACCSVLSIVCADPVYKVYVAALKTLRAMLVYTPCHSLAERIKLQRLLRPVVDTILVKCADANSRTSQLSISTVLELCKGQAGELAVGREILKAGSIGVGGVDYVLSCILGNQAESNNWQELLGRLCLIDRLLLEFPAEFYPHIVSTDVSQAEPVEIRYKKLLSLLTFALQSIDNSHSMVGKLSRRIYLSSARMVTAVPAVFSKLVTMLNASGSTHFTRMRRRLMAIADEVEIAEVIQLGVEDTVDGHQDSLQAVAPTSCLENSSLEHTVHREKTGKGLSATRLSASSEDISDRLAGVSVGLPSSTTTEQPKPAVQTKGRPHSQCLNSSPLSHAQLMFPAPSAPCSSAPSVPDISKHRPQAFVPCKIPSASPQTQRKFSLQFQRNCSEHRDSDQLSPVFTQSRPPPSSNIHRPKPSRPVPGSTSKLGDATKSSMTLDLGSASRCDDSFGGGGNSGNAVIPSDETVFTPVEDKCRLDVNTELNSSIEDLLEASMPSSDTTVTFKSEVAVLSPEKAENDDTYKDDVNHNQKCKEKMEAEEEEALAIAMAMSASQDALPIVPQLQVENGEDIIIIQQDTPETLPGHTKAKQPYREDAEWLKGQQIGLGAFSSCYQAQDVGTGTLMAVKQVTYVRNTSSEQEEVVEALREEIRMMGHLNHPNIIRMLGATCEKSNYNLFIEWMAGGSVAHLLSKYGAFKESVVINYTEQLLRGLSYLHENQIIHRDVKGANLLIDSTGQRLRIADFGAAARLASKGTGAGEFQGQLLGTIAFMAPEVLRGQQYGRSCDVWSVGCAIIEMACAKPPWNAEKHSNHLALIFKIASATTAPSIPSHLSPGLRDVAVRCLELQPQDRPPSRELLKHPVFRTTW

SEQ ID NO: 6784 - DNA, 313 bp, Homo sapiens
  ref <308>: DATABASE ACCESSION NUMBER: EMBL / AA834992
  ref <309>: DATABASE ENTRY DATE: 2000-03-03
tttgttcaaaaacttttatttactataaagacaaaaacaccaaaataggtacaaatactataaaatcggttcaatggggtaaaaattttaattaaaatatctcaatatatttaaaataacaaaggatacatttaagccaaattttcttaacccagagattttttttttttttttttgtaacatttgcttacacagtaaggtgctaatagaagttagcccttaagccctggaaatcttaggaatcatagtcacacagcaaatataatttcattgtgaaagtgaactttggtagaagaaaaatctataggacacc

SEQ ID NO: 6785 - protein, 1495 aa, Homo sapiens
  ref <308>: DATABASE ACCESSION NUMBER: SWISS-Prot / Q13233
  ref <309>: DATABASE ENTRY DATE: 2001-10-16
PSPEAGGGGGALKASSARAAAAGLLREAGSGGRERADWRRRQLRKVRSVELDQLPEQPLFLAASPPASSTSPSPEPADAAGSGTGFQPVAVPPPHGAASRRGAHLTESVAAPDSGASSPAAAEPGEKRAPAAEPSPAAAPAGREMENKETLKGLHKMDDRPEERMIREKLKATCMPAWKHEWLERRNRRGPVVVKPIPVKGDGSEMNHLAAESPGEVQASAASPASKGRRSPSPGNSPSGRTVKSESPGVRRKRVSPVPFQSGRITPPRRAPSPDGFSPYSPEETNRRVNKVMRARLYLLQQIGPNSFLIGGDSPDNKYRVFIGPQNCSCAHGTFCIHLLFVMLRVFQLEPSDPMLWRKTLKNFEVESLFQKYHSRRSSRIKAPSRNTIQKFVSRMSNSHTLSSSSTSTSSSENSIKDEEEQMCPICLLGMLDEESLTVCEDGCRNKLHHHCMSIWAEECRRNREPLICPLCRSKWRSHDFYSHELSSPVDSPSSLRAAQQQTVQQQPLAGSRRNQESNFNLTHYGTQQIPPAYKDLAEPWIQVFGMELVGCLFSRNWNVREMALRRLSHDVSGALLLANGESTGNSGGSSGSSPSGGATSGSSQTSISGDVVEACCSVLSMVCADPVYKVYVAALKTLRAMLVYTPCHSLAERIKLQRLLQPVVDTILVKCADANSRTSQLSISTLLELCKGQAGELAVGREILKAGSIGIGGVDYVLNCILGNQTESNNWQELLGRLCLIDRLLLEFPAEFYPHIVSTDVSQAEPVEIRYKKLLSLLTFALQSIDNSHSMVGKLSRRIYLSSARMVTTVPHVFSKLLEMLSVSSVSTHFTRMRRRLMAYADEVEIAEAIQLGVEDTLQRQQHNSFCRHLFPTTIWKPQRTVPLECTVHLEKTGKGLCATKLSASSEDISERLARISVGPSSSTTTTTTTTEQPKPMVQTKGRPHSQCLNSSPLSHHSQLMFPALSTPSSSTPSVPAGTATDVSKHRLQGFIPCRIPSASPQTQRKFSLQFHRNCPENKDSDKLSPVFTQSRPLPSSNIHRPKPSRPTPGNTSKQGDPSKNSMTLDLNSSSKCDDSFGLSSNSSNCCYTSDETVFTPVEEKCRLDVNTELNSSIEDLLEASMPSSDTTVTFKSEVAVLSPEKAENDDTYKDDVNHNQKCKEKMEAEEEEALAIAMAMSASQVALPIVPQLQVENGEDIIIIQQDTPETLPGHTKAKQPYREDTEWLKGQQIGLGAFSSCYQAQDVGTGTLMAVKQVTYVRNTSSEQEEVVEALREEIRMMSHLNHPNIIRMLGATCEKSNYNLFIEWMAGGSVAHLLSKYGAFKESVVINYTEQLLRGLSYLHENQIIHRDVKGANLLIDSTGQRLRIADFGAAARLASKGTGAGEFQGQLLGTIAFMAPEVLRGQQYGRSCDVWSVGCAIIEMACAKPPWNAEKHSNHLALIFKIASATTAPSIPSHLSPGLRDVALRCLELQPQDRPPSRELLKHPVFRTTW

SEQ ID NO: 6786 - DNA, 458 bp, Rattus norvegicus
  ref <308>: DATABASE ACCESSION NUMBER: EMBL / AI102838
  ref <309>: DATABASE ENTRY DATE: 2000-03-03
ccggagctggggaccgaattttaggctttcttgattgactggctggcacggctggagaatccgacttcacgaagagcagagggctggcaagaggagggcagttgagcagcagagcttccttagccaagtcagagggctgccacgtctctgcttccaaaggtctcctgctgctgggagcagggtgatggccccaggttagcggaagtctgcgttgaaagctctgccaatgactagccgcctcacctcactggtcccacctacgatctcgtacagtttggcatctcgaagaaagcggcccatggggaagtcattgatgtagccatttccacctaaacattgaatgccatccagggctacttgtgtggcacactcggctgtatacagaatcacaccagcacagtccttggcagtgatgtggccctcgtcacaggccctggcgacattgtagacatactgtc

SEQ ID NO: 6787 - protein, 424 aa, Rattus norvegicus; identical to SEQ ID NO: 2578
  ref <308>: DATABASE ACCESSION NUMBER: SWISS-Prot / P12007
  ref <309>: DATABASE ENTRY DATE: 2002-06-15

SEQ ID NO: 6788 - DNA, 2562 bp, Homo sapiens; identical to SEQ ID NO: 2579
  ref <308>: DATABASE ACCESSION NUMBER: EMBL / AK022777
  ref <309>: DATABASE ENTRY DATE: 2002-08-06

SEQ ID NO: 6789 - protein, 423 aa, Homo sapiens; identical to SEQ ID NO: 2580
  ref <308>: DATABASE ACCESSION NUMBER: SWISS-Prot / P26440
  ref <309>: DATABASE ENTRY DATE: 2002-06-15

SEQ ID NO: 6790 - DNA, 458 bp, Rattus norvegicus; identical to SEQ ID NO: 6786
  ref <308>: DATABASE ACCESSION NUMBER: EMBL / AI102838
  ref <309>: DATABASE ENTRY DATE: 2000-03-03

SEQ ID NO: 6791 - protein, 424 aa, Rattus norvegicus; identical to SEQ ID NO: 2578
  ref <308>: DATABASE ACCESSION NUMBER: SWISS-Prot / P12007
  ref <309>: DATABASE ENTRY DATE: 2002-06-15

SEQ ID NO: 6792 - DNA, 2562 bp, Homo sapiens; identical to SEQ ID NO: 2579
  ref <308>: DATABASE ACCESSION NUMBER: EMBL / AK022777
  ref <309>: DATABASE ENTRY DATE: 2002-08-06

SEQ ID NO: 6793 - protein, 423 aa, Homo sapiens; identical to SEQ ID NO: 2580
  ref <308>: DATABASE ACCESSION NUMBER: SWISS-Prot / P26440
  ref <309>: DATABASE ENTRY DATE: 2002-06-15

SEQ ID NO: 6794 - DNA, 528 bp, Rattus norvegicus
  ref <308>: DATABASE ACCESSION NUMBER: EMBL / AI103074
  ref <309>: DATABASE ENTRY DATE: 2000-03-03
gccaaaattttatttattcatttcttgcatttgaagtactcctcgatgacatccttggcctgagattctttgccatagtccttaactacaacgcaactgcaaccaaccactttccgtggcttcccctctcgatcgattttacagaggcctacccattcccctagtttcttgttgtcatcaacctttatcaggttgatctggtgctcggcacagagcgcctccaccagcttgacatacatgggctcatcacagttggatgcaagcacgcagagatgggcttggcgcttgtctaaggctttggcagcttcgcgtatgccacgtgctaggccatcgtggatgagggcggtcttcagcacctcttgtagagcagtgttgacgtccattacacctccagcagctatgccttcctcggccatggcggtggattacgggtgacgccgaatcttgaacgcacccgagcttccgcctccgcggaacttggcgcctcgtgccgaattcttggcctcgagggccaaattccctatagtg

SEQ ID NO: 6795 - protein, 131 aa, Rattus norvegicus
  ref <308>: DATABASE ACCESSION NUMBER: SWISS-Prot / P09388
  ref <309>: DATABASE ENTRY DATE: 1999-07-15
AEEGIAAGGVMDVNTALQEVLKTALIHDGLARGIREAAKALDKRQAHLCVLASNCDEPMYVKLVEALLAEHQINLIKVDDNKKLGEWVGLCKIDREGKPRKVVGCSCVVVKDYGKESQAKDVIEEYFKCKK

SEQ ID NO: 6796 - DNA, 540 bp, Homo sapiens
  misc_feature (1)..(540): n=a, c, g or t
  ref <308>: DATABASE ACCESSION NUMBER: EMBL / AW138253
  ref <309>: DATABASE ENTRY DATE: 2000-03-04
tttttttttttttatttgtttttaatttattttgtcatatttttgtaaaacggcagaaatgcaataaaaactatatttcaacagtgcccgaggtcagagcagtggaaaagggagtgggggtgggggagtctgggtggctggggcctangttgggaaccccctccccccatcctggtacaggctggcttgacccatgagggcctcctcccaaaaactgggtcttggccacagatggaaaactccaggctgcgccgcctctgagacggcccagatttggaggccaacttcagccctggcttcagccactagacaaaggaaggaatctctaagtgctgaaaagaggcgacaatgtgtgcacaggccccagtcctgagtaagactccttctcaaagaggacagcgcggtggtttgcaaaacgtggccccttctgggacacccgcctcctggaacatcgtctggggagccagaaacagtgggaagagcttgtgggatgaacatcagaaggcacctggcacctgagcctcctgcagtccccgactt

SEQ ID NO: 6797 - DNA, 437 bp, Rattus norvegicus
  ref <308>: DATABASE ACCESSION NUMBER: EMBL / AI103874
  ref <309>: DATABASE ENTRY DATE: 2000-03-03
gaagtaaactaaatttattatcttcttacaagaatgctttagttgtttggttttgtttcaagtcctgtgccttttaactttcaccataaagtattattttttacatgtccttgacaaaggcttgataagcagttcaactctttgggcaaagtcactagctcttatccgaattagaatacaggacacagaataagtcaagacaatccatgacatttttattgagcctttagtttatgaggtaaaggaaaagcagctctcttgaatactttacatagctgtaggaaaatatttgagacttaaagggagttacaggggattatgtttctcaaaagttgagatcaagtaaacaagctttaaattgtttaaattttccagttgatctttccttacaatagtaacaagctcgaattagccacattaggtttttatgtttgcag

SEQ ID NO: 6798 - protein, 224 aa, Rattus norvegicus
  ref <308>: DATABASE ACCESSION NUMBER: SWISS-Prot / AAH02122
  ref <309>: DATABASE ENTRY DATE: 2002-11-28
MAAAVPQRAWTVEQLRSEQLPKKDIIKFLQDHGSDSFLAEHKLLGNIKNVAKTANKDHLVNAYNHLFESKRFKGTETISKVSEQVKNVKLSDDKPKDSKSEETLDEGPPKYTKSILKKGDKTNFPKKGDVVHCWYTGTLPDGTVFDTNIQTSSKKKKNAKPLSFKVGVGKVIRGWDEALLTMSKGEKARLEIEPEWAYGKKGQPDAKIPPNTKLIFEVELVDID

SEQ ID NO: 6799 - DNA, 964 bp, Homo sapiens
  ref <308>: DATABASE ACCESSION NUMBER: EMBL / M96256
  ref <309>: DATABASE ENTRY DATE: 1999-07-02
gaaagcggaggcagcgggggaagatggcggcggccgttccacagcgggcgtggaccgtggagcagctgcgcagtgagcagctgcccaagaaggatattatcaagtttctgcaggaacacggttcagattcgtttcttgcagaacataaattattaggaaacattaaaaatgtggccaagacagctaacaaggaccacttggttacagcctataaccatctttttgaaactaagcgttttaagggtactgaaagtataagtaaagtgtctgagcaagtaaaaaatgtgaagcttaatgaagataaacccaaagaaaccaagtctgaagagaccctggatgagggtccaccaaaatatactaaatctgttctgaaaaagggagataaaaccaactttcccaaaaagggagatgttgttcactgctggtatacaggaacactacaagatgggactgtttttgatactaatattcaaacaagtgcaaagaagaagaaaaatgccaagcctttaagttttaaggtcggagtaggcaaagttatcagaggatgggatgaagctctcttgactatgagtaaaggagaaaaggctcgactggagattgaaccagaatgggcttacggaaagaaaggacagcctgatgccaaaattccaccaaatgcaaaactcacttttgaagtggaattagtggatattgattgaaataggcagtgcttcagctctaaggatattagcaacaatgataaaacttggccttgaagaaatttacacaactagttagaacttgttactattgtaaaggaagagtcaactggaaaattcaaggagttaataaaatttgtttacttggtcccagcttttgagagataaatcccttatgaatccctggtctaaaatactttcctacagctgtgtaaaatactggtcaaggagaactttttccttttacctcatgttgtaaacttaag

SEQ ID NO: 6800 - protein, 224 aa, Homo sapiens
  ref <308>: DATABASE ACCESSION NUMBER: SWISS-Prot / Q00688
  ref <309>: DATABASE ENTRY DATE: 2002-06-15
MAAAVPQRAWTVEQLRSEQLPKKDIIKFLQEHGSDSFLAEHKLLGNIKNVAKTANKDHLVTAYNHLFETKRFKGTESISKVSEQVKNVKLNEDKPKETKSEETLDEGPPKYTKSVLKKGDKTNFPKKGDVVHCWYTGTLQDGTVFDTNIQTSAKKKKNAKPLSFKVGVGKVIRGWDEALLTMSKGEKARLEIEPEWAYGKKGQPDAKIPPNAKLTFEVELVDID

SEQ ID NO: 6801 - DNA, 437 bp, Rattus norvegicus; identical to SEQ ID NO: 6797
  ref <308>: DATABASE ACCESSION NUMBER: EMBL / AI103874
  ref <309>: DATABASE ENTRY DATE: 2000-03-03

SEQ ID NO: 6802 - protein, 224 aa, Rattus norvegicus; identical to SEQ ID NO: 6798
  ref <308>: DATABASE ACCESSION NUMBER: SWISS-Prot / AAH02122
  ref <309>: DATABASE ENTRY DATE: 2002-11-28

SEQ ID NO: 6803 - DNA, 964 bp, Homo sapiens; identical to SEQ ID NO: 6799
  ref <308>: DATABASE ACCESSION NUMBER: EMBL / M96256
  ref <309>: DATABASE ENTRY DATE: 1999-07-02

SEQ ID NO: 6804 - protein, 224 aa, Homo sapiens; identical to SEQ ID NO: 6800
  ref <308>: DATABASE ACCESSION NUMBER: SWISS-Prot / Q00688
  ref <309>: DATABASE ENTRY DATE: 2002-06-15

SEQ ID NO: 6805 - DNA, 652 bp, Rattus norvegicus
  ref <308>: DATABASE ACCESSION NUMBER: EMBL / AI103957
  ref <309>: DATABASE ENTRY DATE: 2000-03-03
agcatgcctgattttttcctcctttattaaatgactgtttcaagatttaattacagttgaaggttacacgttagaaagaataagtgcattgaaggcataagagtgcttacaaacccagctcttgaaatggaggcaggaaagggacaaggattaaaaagatgggagcgatgtgacccacagtgggcagagtgggtggacatggccttctagcttggctatgtggcctctggacaagtagctatggaggaggtttggctcagcaggcagaactctccaggggtcccagaagtacagggccctgccagctagggccagctccacctctacgtccccacatacgccacctatgtgtggtgtcggctccaaaaggtgacaggaaaagttcagaacaaaaaagactcaaaagtaaaaaggctaagtgtagcagagtaatacagaaatagtatatacacaggccatggcccccaaggtggccgctggtcattccagggaccatctggtgcgaagcgaagggcctcagtacacggagctgttccggatgccacagcacagcaccatgctcagaatcatctcgaagatcataatgacagctaccacaatggctgcaattccaataaggtacagcttcccagaaaagagctcatcgattttc

SEQ ID NO: 6806 - protein, 236 aa, Rattus norvegicus
  ref <308>: DATABASE ACCESSION NUMBER: SWISS-Prot / Q62745
  ref <309>: DATABASE ENTRY DATE: 2001-10-16
MGVEGCTKCIKYLLFVFNFVFWLAGGVILGVALWLRHDPQTTTLLYLELGDKPAPSTFYVGIYILIAVGAVMMFVGFLGCYGAIQESQCLLGTFFTCLVILFACEVAAGIWGFVNKDQIAKDVKQFYDQALQQAVMDDDANNAKAVVKTFHETLNCCGSNTLTTLTTAVLRNSLCPSSSNSFTQLLKEDCHQKIDELFSGKLYLIGIAAIVVAVIMIFEMILSMVLCCGIRNSSVY

SEQ ID NO: 6807 - DNA, 1332 bp, Homo sapiens
  ref <308>: DATABASE ACCESSION NUMBER: Refseq / NM_004356
  ref <309>: DATABASE ENTRY DATE: 2002-11-05
ccggcccgcgccccgcaggccgcccgccgcccgcgccgccatgggagtggagggctgcaccaagtgcatcaagtacctgctcttcgtcttcaatttcgtcttctggctggctggaggcgtgatcctgggtgtggccctgtggctccgccatgacccgcagaccaccaacctcctgtatctggagctgggagacaagcccgcgcccaacaccttctatgtaggcatctacatcctcatcgctgtgggcgctgtcatgatgttcgttggcttcctgggctgctacggggccatccaggaatcccagtgcctgctggggacgttcttcacctgcctggtcatcctgtttgcctgtgaggtggccgccggcatctggggctttgtcaacaaggaccagatcgccaaggatgtgaagcagttctatgaccaggccctacagcaggccgtggtggatgatgacgccaacaacgccaaggctgtggtgaagaccttccacgagacgcttgactgctgtggctccagcacactgactgctttgaccacctcagtgctcaagaacaatttgtgtccctcgggcagcaacatcatcagcaacctcttcaaggaggactgccaccagaagatcgatgacctcttctccgggaagctgtacctcatcggcattgctgccatcgtggtcgctgtgatcatgatcttcgagatgatcctgagcatggtgctgtgctgtggcatccggaacagctccgtgtactgaggccccgcagctctggccacagggacctctgcagtgccccctaagtgacccggacacttccgagggggccatcaccgcctgtgtatataacgtttccggtattactctgctacacgtagcctttttacttttggggttttgtttttgttctgaactttcctgttaccttttcagggctgacgtcacatgtaggtggcgtgtatgagtggagacgggcctgggtcttggggactggagggcaggggtccttctgccctggggtcccagggtgctctgcctgctcagccaggcctctcctgggagccactcgcccagagactcagcttggccaacttggggggctgtgtccacccagcccgcccgtcctgtgggctgcacagctcaccttgttccctcctgccccggttcgagagccgagtctgtgggcactctctgccttcatgcacctgtcctttctaacacgtcgccttcaactgtaatcacaacatcctgactccgtcatttaataaagaaggaacatcaggcatgctaaaaaaaaaaaaaaaaaaaaaaaaaaaaaaaaaaaaaaaaaaaaaaaaaaa

SEQ ID NO: 6808 - protein, 236 aa, Homo sapiens
  ref <308>: DATABASE ACCESSION NUMBER: SWISS-Prot / P18582
  ref <309>: DATABASE ENTRY DATE: 2002-06-15
MGVEGCTKCIKYLLFVFNFVFWLAGGVILGVALWLRHDPQTTNLLYLELGDKPAPNTFYVGIYILIAVGAVMMFVGFLGCYGAIQESQCLLGTFFTCLVILFACEVAAGIWGFVNKDQIAKDVKQFYDQALQQAVVDDDANNAKAVVKTFHETLDCCGSSTLTALTTSVLKNNLCPSGSNIISNLFKEDCHQKIDDLFSGKLYLIGIAAIVVAVIMIFEMILSMVLCCGIRNSSVY

SEQ ID NO: 6809 - DNA, 652 bp, Rattus norvegicus; identical to SEQ ID NO: 6805
  ref <308>: DATABASE ACCESSION NUMBER: EMBL / AI103957
  ref <309>: DATABASE ENTRY DATE: 2000-03-03

SEQ ID NO: 6810 - protein, 236 aa, Rattus norvegicus; identical to SEQ ID NO: 6806
  ref <308>: DATABASE ACCESSION NUMBER: SWISS-Prot / Q62745
  ref <309>: DATABASE ENTRY DATE: 2001-10-16

SEQ ID NO: 6811 - DNA, 1332 bp, Homo sapiens; identical to SEQ ID NO: 6807
  ref <308>: DATABASE ACCESSION NUMBER: Refseq / NM_004356
  ref <309>: DATABASE ENTRY DATE: 2002-11-05

SEQ ID NO: 6812 - protein, 236 aa, Homo sapiens; identical to SEQ ID NO: 6808
  ref <308>: DATABASE ACCESSION NUMBER: SWISS-Prot / P18582
  ref <309>: DATABASE ENTRY DATE: 2002-06-15

SEQ ID NO: 6813 - DNA, 315 bp, Rattus norvegicus
  ref <308>: DATABASE ACCESSION NUMBER: EMBL / AI104035
  ref <309>: DATABASE ENTRY DATE: 2000-03-03
tttccagtgggtttttattagtagttgcatcatgattcagggtcccagggtagggaccatcatatactgagggcccccttttctaacggggagaagggcaaagagcagaggaaaggtgggcggagccaggtcagatcttcccaggaaatgtgccttcggctatgcgggcatcccaggctgagacccatgagacggggcaaagggacttgtacactcgccgggaccactcccaccctcgtgccgaattcttggcctcgagggccaaattccctatagggagtcgtattaaattcggaatcatgtcaaagctgtttc

SEQ ID NO: 6814 - protein, 86 aa, Rattus norvegicus
  ref <308>: DATABASE ACCESSION NUMBER: Refseq / NP_079904
  ref <309>: DATABASE ENTRY DATE: 2002-01-07
MAEDIKTKIKNYKTAPFDSRFPNQNQTKNCWQNYLDFHRCEKAMTAKGGDVSVCEWYRRVYKSLCPVSWVSAWDDRIAEGTFPGKI

SEQ ID NO: 6815 - DNA, 1007 bp, Homo sapiens; identical to SEQ ID NO: 6385
  misc_feature (1)..(1007): n=a, c, g or t
  ref <308>: DATABASE ACCESSION NUMBER: EMBL / AL528775
  ref <309>: DATABASE ENTRY DATE: 2001-02-11

SEQ ID NO: 6816 - DNA, 488 bp, Rattus norvegicus
  ref <308>: DATABASE ACCESSION NUMBER: EMBL / AI104389
  ref <309>: DATABASE ENTRY DATE: 2000-03-03
ttatccagaggaatatgtattaaaactcactaaaaaccagcaaatattgcaactgagataaaaatttacactcaaacagaactataaaaatttacacgtaaacaaaactatcattaaggacccagggctgagaagggcaggtggccttttctgaggagtcgtcactccttgatgttctgaagcagcttcagcaggtgtgactcaatgacctgttgaacacttctgtagcccagagctacagccaagtccatagaattatagccagagtctgtttcaattgttgggtcagctccattttccaacagcatcttcacgcacttcccgtggttcccgtggacagcataaagcaaaggggtgcctccgttccagtcatactcatttacgtcaactccacagtctagcagcattttgacaatgtctgtgtagcccttactgcaggccaacgacagggcactttctcgaccttttcctaagagctggggatctgc

SEQ ID NO: 6817 - protein, 498 aa, Rattus norvegicus
  ref <308>: DATABASE ACCESSION NUMBER: SWISS-Prot / P04177
  ref <309>: DATABASE ENTRY DATE: 2002-06-15
MPTPSAPSPQPKGFRRAVSEQDAKQAEAVTSPRFIGRRQSLIEDARKEREAAAAAAAAAVASSEPGNPLEAVVFEERDGNAVLNLLFSLRGTKPSSLSRAVKVFETFEAKIHHLETRPAQRPLAGSPHLEYFVRFEVPSGDLAALLSSVRRVSDDVRSAREDKVPWFPRKVSELDKCHHLVTKFDPDLDLDHPGFSDQVYRQRRKLIAEIAFQYKHGEPIPHVEYTAEEIATWKEVYVTLKGLYATHACREHLEGFQLLERYCGYREDSIPQLEDVSRFLKERTGFQLRPVAGLLSARDFLASLAFRVFQCTQYIRHASSPMHSPEPDCCHELLGHVPMLADRTFAQFSQDIGLASLGASDEEIEKLSTVYWFTVEFGLCKQNGELKAYGAGLLSSYGELLHSLSEEPEVRAFDPDTAAVQPYQDQTYQPVYFVSESFNDAKDKLRNYASRIQRPFSVKFDPYTLAIDVLDSPHTIQRSLEGVQDELHTLAHALSAIS

SEQ ID NO: 6818 - DNA, 1809 bp, Homo sapiens
  ref <308>: DATABASE ACCESSION NUMBER: EMBL / AK022876
  ref <309>: DATABASE ENTRY DATE: 2002-08-06
agtgacgtcgcggccaaaacaagcccgggcttggaggcctgtactgaagctggcctcagatgggaaggcccgactcgctgtctgctgtcgtcggtggtcgcgagaccttgcactctcaccgggtcggcctccagcccctgtgcccgggatccgctcgccgcggatgagcgagagtttcttcctgggacttttcgggcacagctggccggtggcgacataacggactttctttcctgcaagagtctcccctccagcgggagacagcgggctcctgtctcgggacgctgggacacctgtcgcctatttttaaatatccagattccaagaacacactggatactgctcttacaaaaccaagaggaaatcatgaagaaatgttttagttattgaaactacagttgaaatcatggatacatcaacaaatctggatattggagcccagcttatcgtggaagagtgtcccagcacttatagcctaactggcatgccagacattaaaatagaacatccactggacccaaattcagaagaagggtcagctcagggtgttgccatgggaatgaaattcatattgcctaaccgatttgatatgaatgtgtgttctcgatttgtgaagtccttaaatgaagaagatagtaaaaatattcaagatcaggttaactctgacctggaggtggcatctgtcctatttaaagctgaatgcaatatccatacatctccttctccgggaattcaagtaaggcatgtctacaccccctctacaacaaagcatttctcacccataaaacagtcaaccactttaaccaacaaacacagaggaaatgaggtctctaccacacctctgttagcaaattctttgtctgttcaccagttggctgctcagggagagatgctctatctggctactcgtatcgaacaagaaaatgttatcaatcacacggatgaagaaggatttactcctctgatgtgggctgcagcacacgggcaaatagctgtggtagagttcctacttcagaatggtgctgatccccaacttttaggaaaaggtcgagaaagtgcactgtcgttggcctgtagtaaaggctacacagatattgtcaaaatgctgcttgattgtggagttgatgtaaatgaatatgattggaatggaggaacacctctgctttatgctgtacatggaaatcatgtgaaatgtgtaaagatgctcttagaaagtggggctgatccaacaattgaaactgactctggatataattctatggatctagctgtagccctaggctatagaagtgttcaacaggttattgagtcacatttgttgaagctgcttcaaaatatcaaggagtagacacagtcatcagaaaatgtctgcccttttgtttacttcttggtccttataaatgatagttttgtttacttataaatttttacctcagttgcaatatttactggtttttagtaggttttaataaatatttctctgagtaattcactggtttataataaatgtaatactctttttataactatgttttactgtatatttaaaattataaattaatgttttcgtggcatgtaaatttttatggtacagatagttatcatcagtctttgtatcaagtgctgtaatttgacattttcagaaattattctaccctagtcatcttcactcgtgtattaagtcattcactttatatagggtttgctataaatccctagaaaaaaattgttcttattgttgaataaaaaagtgcacagtgtgattgtttacaaaatgatattataaataaataaaatacttcttctgtc

SEQ ID NO: 6819 - protein, 314 aa, Homo sapiens
  misc_feature (1)..(314): Xaa=Unknown amino acid
MDTSTNLDIGAQLIVEECPSTYSLTGMPDIKIEHPLDPNSEEGSAQGVAMGMKFILPNRFDMNVCSRFVKSLNEEDSKNIQDQVNSDLEVASVLFKAECNIHTSPSPGIQVRHVYTPSTTKHFSPIKQSTTLTNKHRGNEVSTTPLLANSLSVHQLAAQGEMLYLATRIEQENVINHTDEEGFTPLMWAAAHGQIAVVEFLLQNGADPQLLGKGRESALSLACSKGYTDIVKMLLDCGVDVNEYDWNGGTPLLYAVHGNHVKCVKMLLESGADPTIETDSGYNSMDLAVALGYRSVQQVIESHLLKLLQNIKEX

SEQ ID NO: 6820 - DNA, 488 bp, Rattus norvegicus; identical to SEQ ID NO: 6816
  ref <308>: DATABASE ACCESSION NUMBER: EMBL / AI104389
  ref <309>: DATABASE ENTRY DATE: 2000-03-03

SEQ ID NO: 6821 - protein, 498 aa, Rattus norvegicus; identical to SEQ ID NO: 6817
  ref <308>: DATABASE ACCESSION NUMBER: SWISS-Prot / P04177
  ref <309>: DATABASE ENTRY DATE: 2002-06-15

SEQ ID NO: 6822 - DNA, 1809 bp, Homo sapiens; identical to SEQ ID NO: 6818
  ref <308>: DATABASE ACCESSION NUMBER: EMBL / AK022876
  ref <309>: DATABASE ENTRY DATE: 2002-08-06

SEQ ID NO: 6823 - protein, 314 aa, Homo sapiens; identical to SEQ ID NO: 6819
  misc_feature (1)..(314): Xaa=Unknown amino acid

SEQ ID NO: 6824 - DNA, 585 bp, Rattus norvegicus
  ref <308>: DATABASE ACCESSION NUMBER: EMBL / AI104513
  ref <309>: DATABASE ENTRY DATE: 2000-03-03
cccgaggccttctgcaccccgtctcggctcccagccccgctgccgctgtctgttccattcgctgctattctcatgggtcacatgagacagatgaggagtttgatgctcgctgggtgacatacttcaacaagccagacattgatgcctgggagttgcgtaaagggatgaatacacttgttggctatgatctggttcctgagcccaaaatcattgatgctgctttgagggcatgtagacggttaaatgattttgctagtgctgttcgcatcttggaggttgttaaggacaaagcaggacctcataaggaaatctacccctatgtcatccaggaacttagaccaactttaaatgaattgggaatctccactccagaggaactgggccttgacaaagtgtaaactcccttcgatgggcttcccaaggacttaactgctattgctacttgattgaaacagttgcctggaaatgttttatttgaacaaattttcctttgcgtatcaaaccatgtaacttggactttaataaagggaaatgagtttgacccgaaaaaaaaaataaataaaaaaaaaaagttgtcctcgtgcc

SEQ ID NO: 6825 - protein, 146 aa, Rattus norvegicus
  ref <308>: DATABASE ACCESSION NUMBER: SWISS-Prot / P11240
  ref <309>: DATABASE ENTRY DATE: 2000-05-30
MLAAALRRCTAAAAARGLLHPVSAPSPAAAVCSIRCYSHGSHETDEEFDARWVTYFNKPDIDAWELRKGMNTLVGYDLVPEPKIIDAALRACRRLNDFASAVRILEVVKDKAGPHKEIYPYVIQELRPTLNELGISTPEELGLDKV

SEQ ID NO: 6826 - DNA, 647 bp, Homo sapiens
  ref <308>: DATABASE ACCESSION NUMBER: EMBL / M22760
  ref <309>: DATABASE ENTRY DATE: 1999-07-02
gggcgccgccatcgccgtcatgctgggcgccgctctccgccgctgcgctgtggccgcaaccacccgggccgaccctcgaggcctcctgcactccgcccggacccccggccccgccgtggctatccagtcagttcgctgctattcccatgggtcacaggagacagatgaggagtttgatgctcgctgggtaacatacttcaacaagccagatatagatgcctgggaattgcgtaaagggataaacacacttgttacctatgatatggttccagagcccaaaatcattgatgctgctttgcgggcatgcagacggttaaatgattttgctagtctagttcgaatcctagaggttgttaaggacaaagcaggacctcataaggaaatctacccctatgtcatccaggaacttagaccaactttaaatgaactgggaatctccactccggaggaactgggccttgacaaagtgtaaaccgcatggatgggcttccccaaggatttattgacattgctacttgagtgtgaacagttacctggaaatactgatgataacatattaccttattttgaacaagtttccctttattgagtaccaagccatgtaatggtaacttggactttaataaaagggaaatgagtttgaactg

SEQ ID NO: 6827 - protein, 150 aa, Homo sapiens
  ref <308>: DATABASE ACCESSION NUMBER: SWISS-Prot / P20674
  ref <309>: DATABASE ENTRY DATE: 2000-05-30
MLGAALRRCAVAATTRADPRGLLHSARTPGPAVAIQSVRCYSHGSQETDEEFDARWVTYFNKPDIDAWELRKGINTLVTYDMVPEPKIIDAALRACRRLNDFASLVRILEVVKDKAGPHKEIYPYVIQELRPTLNELGISTPEELGLDKV

SEQ ID NO: 6828 - DNA, 585 bp, Rattus norvegicus; identical to SEQ ID NO: 6824
  ref <308>: DATABASE ACCESSION NUMBER: EMBL / AI104513
  ref <309>: DATABASE ENTRY DATE: 2000-03-03

SEQ ID NO: 6829 - protein, 146 aa, Rattus norvegicus; identical to SEQ ID NO: 6825
  ref <308>: DATABASE ACCESSION NUMBER: SWISS-Prot / P11240
  ref <309>: DATABASE ENTRY DATE: 2000-05-30

SEQ ID NO: 6830 - DNA, 647 bp, Homo sapiens; identical to SEQ ID NO: 6826
  ref <308>: DATABASE ACCESSION NUMBER: EMBL / M22760
  ref <309>: DATABASE ENTRY DATE: 1999-07-02

SEQ ID NO: 6831 - protein, 150 aa, Homo sapiens; identical to SEQ ID NO: 6827
  ref <308>: DATABASE ACCESSION NUMBER: SWISS-Prot / P20674
  ref <309>: DATABASE ENTRY DATE: 2000-05-30

SEQ ID NO: 6832 - DNA, 532 bp, Rattus norvegicus
  ref <308>: DATABASE ACCESSION NUMBER: EMBL / AI104520
  ref <309>: DATABASE ENTRY DATE: 2000-03-03
cagttcaagttatttatttaagccatctcctcttacgagcaaagggatggaggagcaaagtaatggtcaccatctgataaaggaaagatgagctgagcatccaatgggctttcgtggtccacacacaagagtcagggtccaaatcagtgctgtggtcccttgtcgcctgggcgaagagccaggttctctttactcatcttcatagccagtcggaagcgggttcatgtgaggattgtggaagagggtatggttaccatctccccaggggaagggcttagtcctgatgcggagatgggggtaggcgacgaactcgggtctctcgtgctcttcgtgtcgcgacttcaggaaaacgttgagcatgctcactcccaccccgggcagcgccacgaagtaggtgagggccttccaaatacgagctgaaccctcctcgccgtgggcgccactcgacatgggccgccccacccgtgggagggcccggcccagcagcccagagactcgagacgcactcagcaccgccgacgcccctcgggcc

SEQ ID NO: 6833 - protein, 111 aa, Rattus norvegicus
  ref <308>: DATABASE ACCESSION NUMBER: SWISS-Prot / P10818
  ref <309>: DATABASE ENTRY DATE: 2002-06-15
MASAVLSASRVSGLLGRALPRVGRPMSSGAHGEEGSARIWKALTYFVALPGVGVSMLNVFLKSRHEEHERPEFVAYPHLRIRTKPFPWGDGNHTLFHNPHMNPLPTGYEDE

SEQ ID NO: 6834 - DNA, 613 bp, Rattus norvegicus
  ref <308>: DATABASE ACCESSION NUMBER: EMBL / AI104524
  ref <309>: DATABASE ENTRY DATE: 2000-03-03
aatttttatttcaaaagcttggatagcttcaatatccaggtcgtggcaaaatcaggacacgtgtaaaataccttacaatacattagattcccaaaaggtaccaaaaagtacagtaaaattaacacttccattactggaaatgtatgacacaaataatataaaattaaaaggtgaaaaaggtgacactggtttcctaagatacagtttactctttacaaccagggtccacaggtccaggctgcagagcggcagcaggaagcagaccctccaatctagaacagggtaacctggtaataaaatcagccccctaatgccgctctgacctctgagacgccacacgctgcctacaacaactagagctctggaatagtaaacaggagagtgatttccgggggaaattttaaataagatgcacatgggacaggccataaaagtttgccaagttaaatttggtacataattgtgttcactccgcgtccaaacaaagcgtgtgcggtcgtcactcggccgctcctgctgcctctcagtatggcttgtagttattctgatgaccaccacgtcgctggctcttcccgtaatttgtactaccctgactgtagtcgtagccggggcc

SEQ ID NO: 6835 - protein, 331 aa, Rattus norvegicus
  ref <308>: DATABASE ACCESSION NUMBER: Refseq / NP_112620
  ref <309>: DATABASE ENTRY DATE: 2002-11-05
MSDAAEEQPMETTGATENGHEAAPEGEAPVEPSPGSGPATPAGSVGGTTAAPSGNQNGAEGDQINASKNEEDAGKMFVGGLSWDTSKKDLKDYFTKFGEVVDCTIKMDPNTGRSRGFGFILFKDSSSVEKVLDQKEHRLDGRVIDPKKAMAMKKDPVKKIFVGGLNPEATEEKIREYFGQFGEIEAIELPIDPKLNKRRGFVFITFKEEDPVKKVLEKKFHTVSGSKCEIKVAQPKEVYQQQQYGSGGRGNRNRGNRGSGGGQSQSWNQGYGNYWNQGYGYQQGYGPGYGGYDYSPYGYYGYGPGYDYSQGSTNYGKSQRRGGHQNNYKPY

SEQ ID NO: 6836 - DNA, 263 bp, Homo sapiens
  ref <308>: DATABASE ACCESSION NUMBER: EMBL / BF000687
  ref <309>: DATABASE ENTRY DATE: 2000-10-13
aatatcccagctcaggccaccaacgaacatttttcccgcgtactcctagttcttgctggcgttgatctggtcgccctcggcgccgctctgattcccgatcgggggcattttttttcttacagctaaaatgaacacccagtcaccaactacagccctgccctgcccctcctcccactggcctgctcatcttcccgcactgcaaacctggctgcctttagcctccctcccttagcgtagtgtcccaaggtcacctagcctgcttt

SEQ ID NO: 6837 - protein, 282 aa, Homo sapiens
  ref <308>: DATABASE ACCESSION NUMBER: SWISS-Prot / Q9Y2D1
  ref <309>: DATABASE ENTRY DATE: 2002-06-15
MSLLATLGLELDRALLPASGLGWLVDYGKLPPAPAPLAPYEVLGGALEGGLPVGGEPLAGDGFSDWMTERVDFTALLPLEPPLPPGTLPQPSPTPPDLEAMASLLKKELEQMEDFFLDAPPLPPPSPPPLPPPPLPPAPSLPLSLPSFDLPQPPVLDTLDLLAIYCRNEAGQEEVGMPPLPPPQQPPPPSPPQPSRLAPYPHPATTRGDRKQKKRDQNKSAALRYRQRKRAEGEALEGECQGLEARNRELKERAESVEREIQYVKDLLIEVYKARSQRTRSC

SEQ ID NO: 6838 - DNA, 479 bp, Rattus norvegicus
  ref <308>: DATABASE ACCESSION NUMBER: EMBL / AI104679
  ref <309>: DATABASE ENTRY DATE: 2000-03-03
gaagagcacaagtatttttatttctttcttttttttttcttttttttcctttttttcggagctggggaccaaacccagggccttgcgcttgctaggcaagcgctctaccactgagctaaatccccaaccccttttttatttctttaacaatgcaaaatatacacgttgacttgactaggacatattcacatgtaaattttttctcatatccacaactctggatagatcagaggaatgacaaagatcatcacaggaagcagactgtagtatctccaaagtttattccagtccatttcttcttttatactccaaaacatcttcgttgtgttggtggatgagataaatccacatgaaaatcgaggtgcccaaggtcagcccaactttcacccagttaggtttggcattgactggctcccggacatagaactttgaccgtgttgaagagcatctcggcagcctggcgggggccagcagccgga

SEQ ID NO: 6839 - protein, 76 aa, Rattus norvegicus
  ref <308>: DATABASE ACCESSION NUMBER: Refseq / NP_079799
  ref <309>: DATABASE ENTRY DATE: 2002-09-19
MAPSVVLRSFSRLLAPARLPSCSSTRSKFYVREPVNAKPNWLAVGLSVGASVFMWIYLIQTHNEDVLEYKRRNGLE

SEQ ID NO: 6840 - DNA, 479 bp, Rattus norvegicus; identical to SEQ ID NO: 6838
  ref <308>: DATABASE ACCESSION NUMBER: EMBL / AI104679
  ref <309>: DATABASE ENTRY DATE: 2000-03-03

SEQ ID NO: 6841 - protein, 76 aa, Rattus norvegicus; identical to SEQ ID NO: 6839
  ref <308>: DATABASE ACCESSION NUMBER: Refseq / NP_079799
  ref <309>: DATABASE ENTRY DATE: 2002-09-19

SEQ ID NO: 6842 - DNA, 331 bp, Rattus norvegicus
  ref <308>: DATABASE ACCESSION NUMBER: EMBL / AI104707
  ref <309>: DATABASE ENTRY DATE: 2000-03-03
cattctaaatctaactttttgcatactgtcacaaatcagctcttcctaactttaagatacgggctacccctctagaagactggtgttggtttgtgctcttacagtacatgtgatcgcaaagccttgtgatagctgcctcttaaggaaccctctgctcaggcagggtcgctggggatcatggtaggctgagcagtttccacactgggctgtcttttccttttggctcccctgcaccatgtactcccattttgaggtggaactgaggagaatcttaaaagcatgagctcgccagcagcccatgtggagcagagccatgggtgtacacctggcc

SEQ ID NO: 6843 - protein, 151 aa, Rattus norvegicus
  ref <308>: DATABASE ACCESSION NUMBER: SWISS-Prot / P51638
  ref <309>: DATABASE ENTRY DATE: 1997-11-01
MMTEEHTDLEARIIKDIHCKEIDLVNRDPKNINEDIVKVDFEDVIAEPEGTYSFDGVWRVSYTTFTVSKYWCYRLLSTLLGVPLALLWGFLFACISFCHIWAVVPCIKSYLIEIQCISHIYSLCIRTFCNPLFAALGQVCSNIKVVLRREG

SEQ ID NO: 6844 - DNA, 1358 bp, Homo sapiens
  ref <308>: DATABASE ACCESSION NUMBER: EMBL / AF043101
  ref <309>: DATABASE ENTRY DATE: 1998-04-28
atggcagaagagcacacagatctcgaggcccagatcgtcaaggatatccactgcaaggagattgacctggtgaaccgagaccccaagaacattaacgaggacatagtcaaggtggattttgaagacgtgatcgcagagcctgtgggcacctacagctttgacggcgtgtggaaggtgagctacaccaccttcactgtctccaagtactggtgctaccgtctgttgtccacgctgctgggcgtcccactggccctgctctggggcttcctgttcgcctgcatctccttctgccacatctgggcggtggtgccatgcattaagagctacctgatcgagatccagtgcatcagccacatctactcactctgcatccgcaccttctgcaacccactcttcgcggccctgggccaggtctgcagcagcatcaaggtggtgctgcggaaggaggtctaaagccaggtggggcaacagcggtggcagggcagggggtggtgggccagactggtccccgggggacttcttcacaggggctgctggcgagctctttctctttagggactgctccataccccatggatggagcacacggtgtagggaagccagaaagaaaagacggcccagccacagaagcacaatggcccttcgctctcccccagccccaccatgatgccccatgcctgggcgtgggaagatcatttgccaagaggcagctactgcaagtctttgcgttcacttgtactgtaacaacataaaccagcacgcggttcccacccggggccaacctctccacgcgcactcaggaaagtgaccagtgaccactggcgttaggaaggtggctccagtaaagggttttggctgcatttggggaatgctgcattttgttcgtgcctgtaagattggtttgtgtcctgaccagctccaaaatatacttcactgccctgaaaacagacacagggagagttggttgtctcttcacttggccaaatgtaagtgaagaacagagtctttttcttcttcggattctattgtttgctggaaccgtacacgttccttggaagatcatgtttaagtgactcctgttgcctgagcacaaaaatgggcaccaatggaggaaaatgacccttgggctggcaggggcagtgaccttccagggtaccactgagggaagggcctgggttcaagcctcccggaacctcccctttggctaaccgagcccctgaaatgcccagtactgccatttgacatgagggtaccttcgccctcaggagatgtgacgaaggaacaaggtctaatttgtgcgtgtgtggactcactatggaaataaaatgcagtagaaagagcaaaaaaaaaaaaaaaaa

SEQ ID NO: 6845 - protein, 151 aa, Homo sapiens
  ref <308>: DATABASE ACCESSION NUMBER: SWISS-Prot / P56539
  ref <309>: DATABASE ENTRY DATE: 2002-06-15
MMAEEHTDLEAQIVKDIHCKEIDLVNRDPKNINEDIVKVDFEDVIAEPVGTYSFDGVWKVSYTTFTVSKYWCYRLLSTLLGVPLALLWGFLFACISFCHIWAVVPCIKSYLIEIQCISHIYSLCIRTFCNPLFAALGQVCSSIKVVLRKEV

SEQ ID NO: 6846 - DNA, 572 bp, Rattus norvegicus
  ref <308>: DATABASE ACCESSION NUMBER: EMBL / AI105044
  ref <309>: DATABASE ENTRY DATE: 2000-03-03
cacagaatagtattgtttattaatcatacaaggtgaatcatgtaattccagaattttaaagtgactttcagtatgtttataagtattttcacaatttctctaaaaagaaaaaaatcagggctagagatacagccagtacttatctagcatgcatgaggctcagagttcaatccctgcactgcacagaatgaaaatggttcatatgtaggagggtcaagatcatcatgggcggtggtggcacccagcactccagaggcagagggaggtggataatgagttcaaggtcaacttggtctacacagcaagggcagcgcatggactacacagagaaaacctgtcttgaaaaactaaaaaacaaaaaagactggctaaaacccaagttccaagttcgaatgtaggaccaggacctgagccaagtgacatccttgcgtggagctcccaaggacctgagagccgctaacttgcagatgagctctattcacccaggtccttcaccacagaagatcggcttcctaccatacagtaaagacctttagcacacagaaatcatgctcacagctaggcaagtcccg

SEQ ID NO: 6847 - protein, 22 aa, Rattus norvegicus
  ref <308>: DATABASE ACCESSION NUMBER: SWISS-Prot / AAC13319
  ref <309>: DATABASE ENTRY DATE: 1998-11-01
PPTYEPFSFCAVQGLNSEPHAC

SEQ ID NO: 6848 - DNA, 707 bp, Rattus norvegicus
  ref <308>: DATABASE ACCESSION NUMBER: EMBL / AI105054
  ref <309>: DATABASE ENTRY DATE: 2000-03-03
aaaattaagtaatttatttataaaataacaaaaatttatgaacagatctgtttattgtgaaaatggtcttggtacatatgaggaactttatatactttgaggacagcattcagaactgttaagataaaagacaaactataattttaaactcattcttgatttaggggaaaggctataaattacgggctggaatgaattcagcatgaactcaaattctacaaacataaagcatgaaagagtacaaaaacgtcggagtccaatcagcccacacctaaattttaaccttacactttcgaggaccgtttgttcattcttagagactagtcttcttttgagacaggttgattttatctccaaggctcaaggccattccctgactttttgcacgaattcttatatggccagtaacagcagcatctggtccctggtgaactggcttctcaatgctgacatttgcaagtgcatcctctccaaatatagagcgagcatataggttggctgccatgaagccacagtagccagaaagggccttctctggagtcaggcacttcatgttggtggacttgaggatgtgctgtaaataatcattcaggtcagtcacgttggtgttaactgtcactttattttcccattcaaattcggcccacatctgacggaactcagcatcagtgcaagttgcaagctggatatagtccatgatgtcaatg

SEQ ID NO: 6849 - protein, 953 aa, Rattus norvegicus
  ref <308>: DATABASE ACCESSION NUMBER: SWISS-Prot / P23514
  ref <309>: DATABASE ENTRY DATE: 1997-11-01
MTAAENVCYTLINVPMDSEPPSEISLKNDLEKGDVKSKTEALKKVIIMILNGEKLPGLLMTIIRFVLPLQDHTIKKLLLVFWEIVPKTTPDGRLLHEMILVCDAYRKDLQHPNEFIRGSTLRFLCKLKEAELLEPLMPAIRACLEHRHSYVRRNAVLAIYTIYRNFENLIPDAPELIHDFLVNEKDASCKRNAFMMLIHADQDRALDYLSTCIDQVQTFGDILQLVIVELIYKVCHANPSERARFIRCIYNLLQSSSPAVKYEAAGTLVTLSSAPTAIKAAAQCYIDLIIKESDNNVKLIVLDRLVELKEHPAHERVLQDLVMDILRVLSTPDLEVRKKTLQLALDLVSSRNVEELVIVLKKEVIKTNNVSEHEDTDKYRQLLVRTLHSCSVRFPDMAANVIPVLMEFLSDSNEAAAADVLEFVREAIQRFDNLRMLIVEKMLEVFHAIKSVKIYRGALWILGEYCSTKEDIQSVMTEVRRSLGEIPIVESEIKKEAGELKPEEEITVGPVQKLVTEMGTYATQSALSSSRPTKKEEDRPPLRGFLLDGDFFVAASLATTLTKIALRYVALVQEKKKQNSFVAEAMLLMATILHLGKSSLPKKPITDDDVDRISLCLKVLSECSPLMNDIFNKECRQSLSQMLSAKLEEEKLSQKKESEKRNVTVQPDDPISFMQLTAKNEMNCKEDQFQLSLLAAMGNTQRKEAADPLASKLNKVTQLTGFSDPVYAEAYVHVNQYDIVLDVLVVNQTSDTLQNCTLELATLGDLKLVEKPSPLTLAPHDFANIKANVKVASTENGIIFGNIVYDVSGAASDRNCVVLSDIHIDIMDYIQPATCTDAEFRQMWAEFEWENKVTVNTNVTDLNDYLQHILKSTNMKCLTPEKALSGYCGFMAANLYARSIFGEDALANVSIEKPVHQGPDAAVTGHIRIRAKSQGMALSLGDKINLSQKKTSL

SEQ ID NO: 6850 - DNA, 1637 bp, Homo sapiens
  ref <308>: DATABASE ACCESSION NUMBER: EMBL / AK001203
  ref <309>: DATABASE ENTRY DATE: 2002-08-06
ctataacttattacagtcatccagccctgctgtaaaatatgaagctgctgggacattagtgacactctctagtgcaccaactgcaatcaaggctgctgctcagtgttacattgatttaattattaaggagagcgacaacaatgtaaaactcatagttttggatcgcttgatagaattaaaagagcatcctgctcatgaacgagtactacaggatctggttatggatatcctaagagtattgagcacaccagacttagaagtacgaaagaaaactctgcagttagcactggatcttgtctcttctagaaatgttgaaaagctggttattgtcctgaagaaggaagtgataaaaacaaataatgtgtctgagcatgaagatactgacaaatacagacaactcctagtgcgaacattgcattcctgttctgtccgatttccagatatggctgcaaatgttattcctgtgttaatggaatttctcagtgacaacaacgaagcagcagctgctgatgtcttggagtttgttcgtgaagccattcagcgctttgataacctgagaatgcttattgttgagaagatgcttgaagtctttcatgctattaaatctgtcaagatttaccgaggagcattatggatcctgggagaatactgtagtaccaaggaagacattcagagtgtgatgactgagatccgcaggtcccttggagagatcccaattgtagagtcagaaataaagaaagaagctggtgaattaaaacctgaagaagaaatacctgtagggccagttcagaaattggttactgaaatgggtacctatgcaactcagagtgcccttagcagttctagacccaccaagaaagaggaagacagacctcccttgagaggattccttctggatggagatttctttgttgctgcctcccttgccacaactctgaccaagattgcattgcgctatgtagctttggttcaggagaagaaaaagcaaaattcttttgttgctgaggctatgttgctcatggctactatcctgcatttgggaaaatcctctcttcctaagaagccaattactgatgatgatgtggatcgaatttccctgtgcctcaaggtcttgtctgaatgttcacctttaatgaatgacattttcaataaggaatgcagacagtccctttctcacatgttatctgctaaactagaagaagagaaattatcccaaaagaaagaatctgaaaagaggaatgtgacagtacagcctgatgaccccatttccttcatgcaactaactgctaagaatgaaatgaactgcaaggaagatcagtttcagctgagtttactggcagcaatgggtaacacacagaggaaagaggcagcagatcccctagcatctaaacttaacaaggtcacccaattgacaggtttctcagatcctgtatatgcagaagcttacgttcatgtcaaccaatatgatattgtcctggatgtacttgttgtgaaccaaaccagtgatactttgcagaattgcacattagaactagctacactaggggatctgaaacttgtggaaaagccgtctcctttgactcttgctcctcatgacttcgcaaatattaaagctaacgtcaaagtagcatcaacag

SEQ ID NO: 6851 - protein, 953 aa, Homo sapiens [sequence omitted]

SEQ ID NO: 6852 - DNA, 638 bp, Rattus norvegicus
  ref <308>: DATABASE ACCESSION NUMBER: EMBL / AI105448
  ref <309>: DATABASE ENTRY DATE: 2000-03-03
gaatttatagagttgatattacctttattttatttaatgttacattaggcatcattgtttcattctgtatgaggtaaaattgatacaactgtgtgcttaaatccatagttacaatcaagttcacaactgcaggctacaaagtggtttgtgacatttattacaattacatttttactgtgcaagtgttgcaagaatttctcatggtgaggtgtaccccaaaatttgtgtatctctggaaaggggctcatagaaatttgtgggtagggctcacagaaatatcaggcaggactgttccaagacccttcaccaggcctcaggagttcctagttgcttacaaataggtccctgttatatgaccgtaatgaaagaaattccatgatcctccttcctggattcccaagcagaagtggagtccaagatgatttgtcatagtatacctcatctttgcgcagaactgtgcctttgatgatctccagggcgcattcctccttgggagcagcttgactcaagattatcccagaggtttctttcaaagctgtttctgtgtctatgaagccgaggacacagagagtgatggacacgttgaccttggtcatcaagtgttcttttctaatggtggaaaagaacccatccagagc

SEQ ID NO: 6853 - protein, 287 aa, Rattus norvegicus
  ref <308>: DATABASE ACCESSION NUMBER: SWISS-Prot / P16232
  ref <309>: DATABASE ENTRY DATE: 2002-06-15
MKKYLLPVLVLCLGYYYSTNEEFRPEMLQGKKVIVTGASKGIGREMAYHLSKMGAHVVLTARSEEGLQKVVSRCLELGAASAHYIAGTMEDMAFAERFVVEAGKLLGGLDMLILNHITQTTMSLFHDDIHSVRRSMEVNFLSYVVLSTAALPMLKQSNGSIAIISSMAGKMTQPLIASYSASKFALDGFFSTIRKEHLMTKVNVSITLCVLGFIDTETALKETSGIILSQAAPKQECALEIKGTVLRKDEVYYDKSSWTPLLLGNPGRRIMEFLSLRSYNRDLFVSN

SEQ ID NO: 6854 - DNA, 1375 bp, Homo sapiens
  ref <308>: DATABASE ACCESSION NUMBER: Refseq / NM_005525
  ref <309>: DATABASE ENTRY DATE: 2002-11-05
attcagaggctgctgcctgcttaggaggttgtagaaagctctgtaggttctctctgtgtgtcctacaggagtcttcaggccagctccctgtcggatggcttttatgaaaaaatatctcctccccattctggggctcttcatggcctactactactattctgcaaacgaggaattcagaccagagatgctccaaggaaagaaagtgattgtcacaggggccagcaaagggatcggaagagagatggcttatcatctggcgaagatgggagcccatgtggtggtgacagcgaggtcaaaagaaactctacagaaggtggtatcccactgcctggagcttggagcagcctcagcacactacattgctggcaccatggaagacatgaccttcgcagagcaatttgttgcccaagcaggaaagctcatgggaggactagacatgctcattctcaaccacatcaccaacacttctttgaatctttttcatgatgatattcaccatgtgcgcaaaagcatggaagtcaacttcctcagttacgtggtcctgactgtagctgccttgcccatgctgaagcagagcaatggaagcattgttgtcgtctcctctctggctgggaaagtggcttatccaatggttgctgcctattctgcaagcaagtttgctttggatgggttcttctcctccatcagaaaggaatattcagtgtccagggtcaatgtatcaatcactctctgtgttcttggcctcatagacacagaaacagccatgaaggcagtttctgggatagtccatatgcaagcagctccaaaggaggaatgtgccctggagatcatcaaagggggagctctgcgccaagaagaagtgtattatgacagctcactctggaccactcttctgatcagaaatccatgcaggaagatcctggaatttctctactcaacgagctataatatggacagattcataaacaagtaggaactccctgagggctgggcatgctgagggattttgggactgttctgtctcatgtttatctgagctcttatctatgaagacatcttcccagagtgtccccagagacatgcaagtcatgggtcacacctgacaaatggaaggagttcctctaacatttgcaaaatggaaatgtaataataatgaatgtcatgcaccgctgcagccagcagttgtaaaattgttagtaaacataggtataattaccagatagttatattaaatttatatcttatatataataatatgtgatgattaatacaatattaattataataaaggtcacataaactttataaattcataactggtagctataacttgagcttattcaggatggttctttaaaccataaactgtacaatg

SEQ ID NO: 6855 - protein, 292 aa, Homo sapiens
  ref <308>: DATABASE ACCESSION NUMBER: SWISS-Prot / P28845
  ref <309>: DATABASE ENTRY DATE: 2002-06-15
MAFMKKYLLPILGLFMAYYYYSANEEFRPEMLQGKKVIVTGASKGIGREMAYHLAKMGAHVVVTARSKETLQKVVSHCLELGAASAHYIAGTMEDMTFAEQFVAQAGKLMGGLDMLILNHITNTSLNLFHDDIHHVRKSMEVNFLSYVVLTVAALPMLKQSNGSIVVVSSLAGKVAYPMVAAYSASKFALDGFFSSIRKEYSVSRVNVSITLCVLGLIDTETAMKAVSGIVHMQAAPKEECALEIIKGGALRQEEVYYDSSLWTTLLIRNPCRKILEFLYSTSYNMDRFINK

SEQ ID NO: 6856 - DNA, 332 bp, Rattus norvegicus
  misc_feature (1)..(332): n=a, c, g or t
  ref <308>: DATABASE ACCESSION NUMBER: EMBL / AI113289
  ref <309>: DATABASE ENTRY DATE: 2000-03-03
tttttttttttttttttccaaaaacaaacgaaccacanaaaggggaggagtgaggtgagagcaacaagagtatttggcatttcctctacttctcctgaacaggttaaggccctgagattagactctgttcttgggaccaggggctccttcaaagcccagtgcacagatgcccctcctggggctggcccttccagttccaccacaggcttgtaagctgttgtttcttctacaccaggttagacgccgcagaccaaatcctaacctgngcagtggcagcgcccaccacgctcatgcctcacagcagtctgtcagtgaaaacatacccggtaaca

SEQ ID NO: 6857 - protein, 432 aa, Rattus norvegicus
  ref <308>: DATABASE ACCESSION NUMBER: SWISS-Prot / P20417
  ref <309>: DATABASE ENTRY DATE: 2001-10-16
MEMEKEFEQIDKAGNWAAIYQDIRHEASDFPCRIAKLPKNKNRNRYRDVSPFDHSRIKLHQEDNDYINASLIKMEEAQRSYILTQGPLPNTCGHFWEMVWEQKSRGVVMLNRIMEKGSLKCAQYWPQKEEKEMVFDDTNLKLTLISEDVKSYYTVRQLELENLATQEAREILHFHYTTWPDFGVPESPASFLNFLFKVRESGSLSPEHGPIVVHCSAGIGRSGTFCLADTCLLLMDKRKDPSSVDIKKVLLEMRRFRMGLIQTADQLRFSYLAVIEGAKFIMGDSSVQDQWKELSHEDLEPPPEHVPPPPRPPKRTLEPHNGKCKELFSNHQWVSEESCEDEDILAREESRAPSIAVHSMSSMSQDTEVRKRMVGGGLQSAQASVPTEEELSPTEEEQKAHRPVHWKPFLVNVCMATALATGAYLCYRVCFH

SEQ ID NO: 6858 - DNA, 524 bp, Homo sapiens
  ref <308>: DATABASE ACCESSION NUMBER: EMBL / AI803199
  ref <309>: DATABASE ENTRY DATE: 1999-12-15
ccagaaataacaaaaagctgctttttataaaggttaaaaacaacaatgtgttgtaattctatttttttccaaaaacaaaggaataaaaaaaaaaagagagagagaaacagacgtatttggcattttctctacttactcctgaataggttaaggccctgagattagactcttatattcttgggaccagagggctccttaaaaccccagtgcatcgatccttaattctcttgttagcccttccacagttccagactttaaaaacctttgatctgtttcttctgagactggctcagatgcaccacagaactgaatcctaccatcgggctagcggccagtgctctctgcacacgagcatctcgccagcgcgtctgtcagtggaaacataccctgtagcagaggtaagcgccggccgtgaggaccgtagccacgcacatgttgaccaggaagggcttccagtaactcagtgcatggtcctcgtccttctcgggcagtgacggctcccctttgcttgggaggcagcctgg

SEQ ID NO: 6859 - protein, 435 aa, Homo sapiens
  ref <308>: DATABASE ACCESSION NUMBER: Refseq / NP_002818
  ref <309>: DATABASE ENTRY DATE: 2002-01-09
MEMEKEFEQIDKSGSWAAIYQDIRHEASDFPCRVAKLPKNKNRNRYRDVSPFDHSRIKLHQEDNDYINASLIKMEEAQRSYILTQGPLPNTCGHFWEMVWEQKSRGVVMLNRVMEKGSLKCAQYWPQKEEKEMIFEDTNLKLTLISEDIKSYYTVRQLELENLTTQETREILHFHYTTWPDFGVPESPASFLNFLFKVRESGSLSPEHGPVVVHCSAGIGRSGTFCLADTCLLLMDKRKDPSSVDIKKVLLEMRKFRMGLIQTADQLRFSYLAVIEGAKFIMGDSSVQDQWKELSHEDLEPPPEHIPPPPRPPKRILEPHNGKCREFFPNHQWVKEETQEDKDCPIKEEKGSPLNAAPYGIESMSQDTEVRSRVVGGSLRGAQAASPAKGEPSLPEKDEDHALSYWKPFLVNMCVATVLTAGAYLCYRFLFNSNT

SEQ ID NO: 6860 - DNA, 295 bp, Rattus norvegicus
  ref <308>: DATABASE ACCESSION NUMBER: EMBL / AI136175
  ref <309>: DATABASE ENTRY DATE: 2000-03-03
cggccgcaaaggtttttccttatccattttgggtaagcatcaggatagggaagcacacgtgacaagccaaagataatatgactctatgtttcctgtcaaagaggaacagcaaatgttctttatgtgtttttccccaccgtcagcacagtgtttacaagcttttaaaatattagtctgttgcaatatgctgttttatcactgagcaaagtcactcagggacacagacagccttggtattcattcctttaaatcaacaaaagcttctggtcttcttgagaaggggactaagagagca

SEQ ID NO: 6861 - protein, 211 aa, Rattus norvegicus
  ref <308>: DATABASE ACCESSION NUMBER: SWISS-Prot / AAA42000
  ref <309>: DATABASE ENTRY DATE: 2003-02-01
MQTPHKEHLYKLLVIGDLGVGKTSIIKRYVHQNFSSHYRATIGVDFALKVLHWDPETVVRLQLWDIAGQERFGNMTRVYYREAMGAFIVFDVTRPATFEAVAKWKNDLDSKLTLPNGKPVSVVLLANKCDQGKDVLVNNGLKMDQFCKEHGFVGWFETSAKENINIDEASRCLVKHILANECDFIESIEPDIVKPHLTSPKVVSCSGCAKS

SEQ ID NO: 6862 - DNA, 1412 bp, Homo sapiens
  ref <308>: DATABASE ACCESSION NUMBER: EMBL / AF235022
  ref <309>: DATABASE ENTRY DATE: 2000-11-08
ggctgcgcttccctggtcaggcacggcacgtctggccggccgccaggatgcaggccccgcacaaggagcacctgtacaagttgctggtgattggcgacctgggcgtggggaagaccagtatcatcaagcgctacgtgcaccagaacttctcctcgcactaccgggccacaatcggcgtggacttcgcgctcaaggtgctccactgggacccggagactgtggtgcgcctgcagctctgggatatcgcaggtcaagaaagatttggaaacatgacgagggtctattaccgagaagctatgggtgcatttattgtcttcgatgtcaccaggccagccacatttgaagcagtggcaaagtggaaaaatgatttggactccaagttaagtctccctaatggcaaaccggtttcagtggttttgttggccaacaaatgtgaccaggggaaggatgtgctcatgaacaatggcctcaagatggaccagttctgcaaggagcacggtttcgtaggatggtttgaaacatcagcaaaggaaaatataaacattgatgaagcctccagatgcctggtgaaacacatacttgcaaatgagtgtgacctaatggagtctattgagccggacgtcgtgaagccccatctcacatcaaccaaggttgccagctgctctggctgtgccaaatcctagtaggcacctttgctggtgtctggtaggaatgacctcattgttccacaaattgtgcctctatttttaccattttgggtaaacgtcaggatagatataccacatgtggcaagccaaagatctatgcctctgttttttcaatgagagagaaatagcaaatgttctttctatgctttcctcaccatcatcacagtgtttacaaacttttgaaaatatttagtctgttacaaacttctgtcatgtagctgaccaaaatcctgcagggccacagtcggcactgttatttgcttcttttaatcagcaaaggcctcaagtcttaaaataaaaggggagaagaacaaactagctgtcaagtcaaggactggctttcaccttgccctggtgtctttttccagatttcaatatattctctgatggcctgacaggcctattaagtagatgtgatattttcttccaagatgacctccattctcggcagacctaagagttgcctctgagttagctctttggaatcgtgaacacaggtgtgctatattgtccttgtcctaactgtcacttgccatggcctgaatgttggcttaactgaatattgtatgaaaagacatgcctccatatgtgcctttctgttagctctctttgactcaagctgtggggctcctctatacatgctatacatgtaatatatattatatatatttttgcaagtgaacaataaaacattaaaagataaaa

SEQ ID NO: 6863 - protein, 211 aa, Homo sapiens
  ref <308>: DATABASE ACCESSION NUMBER: SWISS-Prot / P57729
  ref <309>: DATABASE ENTRY DATE: 2002-06-15
MQAPHKEHLYKLLVIGDLGVGKTSIIKRYVHQNFSSHYRATIGVDFALKVLHWDPETVVRLQLWDIAGQERFGNMTRVYYREAMGAFIVFDVTRPATFEAVAKWKNDLDSKLSLPNGKPVSVVLLANKCDQGKDVLMNNGLKMDQFCKEHGFVGWFETSAKENINIDEASRCLVKHILANECDLMESIEPDVVKPHLTSTKVASCSGCAKS

SEQ ID NO: 6864 - DNA, 435 bp, Rattus norvegicus
  ref <308>: DATABASE ACCESSION NUMBER: EMBL / AI136396
  ref <309>: DATABASE ENTRY DATE: 2000-03-03
tttttttttttttttgtattccaacccagagctgatggctttgttttgtttgacaggaaaggacaaagaaaccacaactccacagtggccaaggctcaagtagcacggactgtgctatgtacccaaacggagaaaccttgtctgacgggggatttgggggagccatggggtcctctagtcagtggcaggatctgaggtcaccgcatcttcgcattcctcaaagcctgggaccggcttctgcagaaagtgtgtggtggcctggatcaccttatcaggtccgatgttgtacacagggtgagtgggctgcagaacattttcaggcacacccatgaccacatcgtgcagcatggctccacttccaaaatgctgggcaatggacaggccgctcaggcagtagcaagtatggtagaagtcacgtgacttgccaggtttgtc

SEQ ID NO: 6865 - protein, 437 aa, Rattus norvegicus
  ref <308>: DATABASE ACCESSION NUMBER: SWISS-Prot / Q02293
  ref <309>: DATABASE ENTRY DATE: 2002-06-15
MASSSSFTYYCPPSSSPVWSEPLYSLRPEHARERLQDDSVETVTSIEQAKVEEKIQEVFSSYKFNHLVPRLVLQREKHFHYLKRGLRQLTDAYECLDASRPWLCYWILHSLELLDEPIPQIVATDVCQFLELCQSPDGGFGGGPGQYPHLAPTYAAVNALCIIGTEEAYNVINREKLLQYLYSLKQPDGSFLMHVGGEVDVRSAYCAASVASLTNIITPDLFEGTAEWIARCQNWEGGIGGVPGMEAHGGYTFCGLAALVILKKERSLNLKSLLQWVTSRQMRFEGGFQGRCNKLVDGCYSFWQAGLLPLLHRALHAQGDPALSMSHWMFHQQALQEYILMCCQCPAGGLLDKPGKSRDFYHTCYCLSGLSIAQHFGSGAMLHDVVMGVPENVLQPTHPVYNIGPDKVIQATTHFLQKPVPGFEECEDAVTSDPATD

SEQ ID NO: 6866 - DNA, 2069 bp, Homo sapiens
  ref <308>: DATABASE ACCESSION NUMBER: EMBL / AK024087
  ref <309>: DATABASE ENTRY DATE: 2002-08-06
tctaaatgtcacctggccactgtccctcacctagtgctcaaccttggaaacccttttcctctgtgtctctttttaaagaaatttaataaattcttattgtctgtttggaatattcaacaatttaggctgggtgcggtggcccatgcctgtaatcccagtactttgggaggccaaaagagggtgggtcacctgaggtcaggagttagagagcagcctgaccaacatagtgaaaccatgtctctactaaaaatacaagaattagccaggcatggtggtgcatgcctgtaatcccagctactcgggaggctgaggcaggacaatcgcctcctgggttcacgccattctcctgcctcagcctcctgagtagctgggactacaggcgcccaccaccatgtccggctaatttttttgtatttttagtagagacagggtttcaccgtgttggccgggatggtctcgatctcctgacctcgtgatcaacccccctcagcctcccaaagtgctgggattacaggcataagccatcgtgcctggcccaccataggaatttatatactgacatatatataagatttttagctcagttctttttatgatacagttaccttatatgcccacttagtgaaatactatatggctattcacagtgatggctatgcagattatgtaatagaatagaaaatttatgcctatagtggtataagtgaaaaacataagctacacagttataataactaggtagaaaaacgcatagaaccaaaaagactggaagaaagaacaattagctttcaggtgccatttaccaattgttgggcatctttttttttaaaaatgatttattgtcaggcatcttttagcccaggtatcaaaatataaaattgaccaaggacttagtgtacatcctatatgtatatatatttttaatcgatttctatgcagatgtttctgcacacctgtccgtgatttgtccctccttcccacttgataactgtgtggcccacagaattctttgaccatagtgattggacttcagagtgaagaagtccagttgcttgtcagtaccttagtagtattaccagaatacccagtttttgctagggtatcatatgatgcaggagggcagttactagtaatgtttcttaggtaaattctttgagctgagagacaagttagagaattccctttggagatcaattaaatttaggcttagaaaagtagaagaaacagactttattacccattaagagttctctgagctaatcagtctggttaacaagttatagagatatgctagagggaatgtctcttgaagtccagggtagagttatggaccaagttgggagcagctaccgaggtcagtctgggaaggtaagctaaacagctaggctggttcactgcctgccagagatgtggttgaggatcaccatccacgttaacagggtgcatttcaagaaagtgaaagtgccactttgaattgctgctctttgacacatgtcaaagttcaggagaagggacatgctgtgcgtaggacatggggaagatagcagttgtaccaagaatgaatggaagaggaaggggagcaggaaaccttgactattcccccaggtgagaaagtggaattaggtcattgatacttggctggatctgccgggcccttactgaccctttgcccttcaacaggtgaccctgcccttagcatgagccactggatgttccatcagcaggccctgcaggagtacatcctgatgtgctgccagtgccctgcgggggggcttctggataaacctggcaagtgagtgttttctctctggggagggaggggagaggggaggagagagcagaggggcgtgcacctcaggcctactcagagccagatctcaagagcagaggtgtcaccttcagcacctgcatagcgctaggttgtatgggaaaaagcacccagttgggagcaccccttgaggccattgatcctggcacctccagctgcccgtcttgtcccccagcctgcatgcaaccccctcccccagacagggaaacagattgctgggtagataactcttctttttttt

SEQ ID NO: 6867 - protein, 437 aa, Homo sapiens
  ref <308>: DATABASE ACCESSION NUMBER: Refseq / NP_002019
  ref <309>: DATABASE ENTRY DATE: 2002-11-05
MASPSSFTYYCPPSSSPVWSEPLYSLRPEHARERLQDDSVETVTSIEQAKVEEKIQEVFSSYKFNHLVPRLVLQREKHFHYLKRGLRQLTDAYECLDASRPWLCYWILHSLELLDEPIPQIVATDVCQFLELCQSPEGGFGGGPGQYPHLAPTYAAVNALCIIGTEEAYDIINREKLLQYLYSLKQPDGSFLMHVGGEVDVRSAYCAASVASLTNIITPDLFEGTAEWIARCQNWEGGIGGVPGMEAHGGYTFCGLAALVILKRERSLNLKSLLQWVTSRQMRFEGGFQGRCNKLVDGCYSFWQAGLLPLLHRALHAQGDPALSMSHWMFHQQALQEYILMCCQCPAGGLLDKPGKSRDFYHTCYCLSGLSIAQHFGSGAMLHDVVLGVPENALQPTHPVYNIGPDKVIQATTYFLQKPVPGFEELKDETSAEPATD

SEQ ID NO: 6868 - DNA, 449 bp, Rattus norvegicus
  ref <308>: DATABASE ACCESSION NUMBER: EMBL / AI136891
  ref <309>: DATABASE ENTRY DATE: 2000-03-03
ttttttttttttttcttgaaaaaacggggtttattgatttttaaactgcaaatagtcgttacaaaaagtttttttttcttttaaataaattcacacaaagaaagagaaatagaaagcgacggtagtgaccagcaagaggaataataattacattcatctttatgtgtgtgccagttgtttacatcaacatcggaaaactccaacctggagtccagaacctcaaatctgcaagcggaatgtcttgagatgggcacatggaattcaaagggtttttctctctctctcttttttttttttttgttttcccttttagaagctatacataaatggtggttttccttctgtactgtcacagaacttatacattctcagtcctacctgtgaaaggcctaaggagaaaaaaaaacctttgcggccgctccaacatcagaacctcgtgccgaattctt

SEQ ID NO: 6869 - protein, 338 aa, Rattus norvegicus
  ref <308>: DATABASE ACCESSION NUMBER: SWISS-Prot / P17431
  ref <309>: DATABASE ENTRY DATE: 2002-06-15
MTTTLVSATIFDLSEVLCKGNKMLNYSTPSAGGCLLDRKAVGTPAGGGFPRRHSVTLPSSKFHQNQLLSSLKGEPAPTLSSRDSRFRDRSFSEGGERLLPTQKQPGSGQVNSSRYKTELCRPFEENGACKYGDKCQFAHGIHELRSLTRHPKYKTELCRTFHTIGFCPYGPRCHFIHNAEERRALAGGRDLSADRPRLQHSFSFAGFPSAAATAAATGLLDSPTSITPPPILSADDLLGSPTLPDGTNNPFAFSSQELASLFAPSMGLPGGGSPTTFLFRPMSESPHMFDSPPSPQDSLSDHEGYLSSSSSSHSGSDSPTLDNSRRLPIFSRLSISDD

SEQ ID NO: 6870 - DNA, 290 bp, Homo sapiens
  ref <308>: DATABASE ACCESSION NUMBER: EMBL / AI902540
  ref <309>: DATABASE ENTRY DATE: 2001-08-31
gacggagacatcagctgcgtgagtccagtaacagtcgtgcacagagacgaaggtcaggcccttcctgtagcagtgcagggcggtgagcatcatgtgggaggagtccagcgagtggatgaagtggcagcggggcccgtaggggcaaaagccgatggtgtggaaggtgcggcacagctccgtcttgtacttggggtggcgggtcaggctgcggagctcgtggatgccgtgtgcgaactggcacttgtccccgtacttacaggcaccgttttcctcaaaggggcggcacagct

SEQ ID NO: 6871 - protein, 1230 aa, Homo sapiens [sequence omitted]

SEQ ID NO: 6872 - DNA, 376 bp, Rattus norvegicus
  ref <308>: DATABASE ACCESSION NUMBER: EMBL / AI136977
  ref <309>: DATABASE ENTRY DATE: 2000-03-03
tttttttttttttttttaattcactcaaaattcttcagtttttacaaaactaacagggtggagtagggaagggagcagggaggcagccgcaggggtgggtaggcggagaggcaggctatgcttctgtcttcacctgagcctggttgcctgccacattgttcggctcacccttcatctcagcatcagtgggatggtccacctcaaatacaagtgtggcatttggttgccacagcaatatcccaagccttgatgacctccccttttcccaggtcaaaggagaatttgtccttgcggtccaaactggagtcaaactttgtgccatctagcagccagccagtgtagtggacaaagactcggtcccccctcgtgccgaatt

SEQ ID NO: 6873 - DNA, 2156 bp, Homo sapiens
  ref <308>: DATABASE ACCESSION NUMBER: EMBL / M88279
  ref <309>: DATABASE ENTRY DATE: 1999-07-02
cccggcctcccgcacgccccgcaggtagcgcccccgcccgcggcccagagtgcgctcgcgccggcaccagctcccggataaacggcgcgccgcgcggagatgacagccgaggagatgaaggcgaccgagagcggggcgcagtcggcgccgctgcccatggagggagtggacatcagccccaaacaggacgaaggcgtgctgaaggtcatcaagagagagggcacaggtacagagatgcccatgattggggaccgagtctttgtccactacactggctggctattagatggcacaaagtttgactccagtctggatcgcaaggacaaattctcctttgacctgggaaaaggggaggtcatcaaggcttgggacattgccatagccaccatgaaggtgggggaggtgtgccacatcacctgcaaaccagaatatgcctacggttcagcaggcagtcctccaaagattccccccaatgccacgcttgtatttgaggtggagttgtttgagtttaagggagaagatctgacggaagaggaagatggcggaatcattcgcagaatacagactcgcggtgaaggctatgctaagcccaatgagggtgctatcgtggaggttgcactggaagggtactacaaggacaagctctttgaccagcgggagctccgctttgagattggcgagggggagaacctggatctgccttatggtctggagagggccattcagcgcatggagaaaggagaacattccatcgtgtacctcaagcccagctatgcttttggcagtgttgggaaggaaaagttccaaatcccaccaaatgctgagctgaaatatgaattacacctcaagagttttgaaaaggccaaggagtcttgggagatgaattcagaagagaagctggaacagagcaccatagtgaaagagcggggcactgtgtacttcaaggaaggtaaatacaagcaagctttactacagtataagaagatcgtgtcttggctggaatatgagtctagtttttccaatgaggaagcacagaaagcacaggcccttcgactggcctctcacctcaacctggccatgtgtcatctgaaactacaggccttctctgctgccattgaaagctgtaacaaggccctagaactggacagcaacaacgagaagggcctcttccgccggggagaggcccacctggccgtgaatgactttgaactggcacgggctgatttccagaaggtcctgcagctctaccccaacaacaaagccgccaagacccagctggctgtgtgccagcagcggatccgaaggcagcttgcccgggagaagaagctctatgccaatatgtttgagaggctggctgaggaggagaacaaggccaaggcagaggcttcctcaggagaccatcccactgacacagagatgaaggaggagcagaagagcaacacggcagggagccagtctcaggtggagacagaagcatagcccctctccaccagccctactcctgcggctgcctgccccccagtctccccactccaccctgttagttttgtaaaaactgaagaattttgagtgaattagacctttatttttctatctggttggatggtggctttaggggaagggggaaaggtgtaggctgggggattgaggtggggaatcattttagctggtgtcagcccctcttcccttcctccattgcacatgaacatatgtccatccatatatattcatcagaatgttaatttattttgctccctctgttaggtccattttctaagggtagaagaggcaagtggtagggatgaggtctgataagaacccagggtggagagggagactcctgggcagccgttttcctcatcctttccctctcccagtccatttccaaatgtggcctccatgtgggtgctagggacatgggaaaaaccactgctatgccatttcttctctctgttcccttcctcacccccgacggtgtggctgatgatgtcttctggtgtcatggtgaccaccccctgttccctgttctggtatttcccctgtcagtttcccctctcggccaggttgtgtcccaaaatcccctcagcctcttctctgcacgttgctgaaggtccaggcttgcctcaagttccatgcttgagcaataaagtggaaac

SEQ ID NO: 6874 - protein, 458 aa, Homo sapiens
  ref <308>: DATABASE ACCESSION NUMBER: SWISS-Prot / Q02790
  ref <309>: DATABASE ENTRY DATE: 2002-06-15
TAEEMKATESGAQSAPLPMEGVDISPKQDEGVLKVIKREGTGTEMPMIGDRVFVHYTGWLLDGTKFDSSLDRKDKFSFDLGKGEVIKAWDIAIATMKVGEVCHITCKPEYAYGSAGSPPKIPPNATLVFEVELFEFKGEDLTEEEDGGIIRRIQTRGEGYAKPNEGAIVEVALEGYYKDKLFDQRELRFEIGEGENLDLPYGLERAIQRMEKGEHSIVYLKPSYAFGSVGKEKFQIPPNAELKYELHLKSFEKAKESWEMNSEEKLEQSTIVKERGTVYFKEGKYKQALLQYKKIVSWLEYESSFSNEEAQKAQALRLASHLNLAMCHLKLQAFSAAIESCNKALELDSNNEKGLFRRGEAHLAVNDFELARADFQKVLQLYPNNKAAKTQLAVCQQRIRRQLAREKKLYANMFERLAEEENKAKAEASSGDHPTDTEMKEEQKSNTAGSQSQVETEA

SEQ ID NO: 6875 - DNA, 376 bp, Rattus norvegicus; identical to SEQ ID NO: 6872
  ref <308>: DATABASE ACCESSION NUMBER: EMBL / AI136977
  ref <309>: DATABASE ENTRY DATE: 2000-03-03

SEQ ID NO: 6876 - DNA, 2156 bp, Homo sapiens; identical to SEQ ID NO: 6873
  ref <308>: DATABASE ACCESSION NUMBER: EMBL / M88279
  ref <309>: DATABASE ENTRY DATE: 1999-07-02

SEQ ID NO: 6877 - protein, 458 aa, Homo sapiens; identical to SEQ ID NO: 6874
  ref <308>: DATABASE ACCESSION NUMBER: SWISS-Prot / Q02790
  ref <309>: DATABASE ENTRY DATE: 2002-06-15

SEQ ID NO: 6878 - DNA, 376 bp, Rattus norvegicus; identical to SEQ ID NO: 6872
  ref <308>: DATABASE ACCESSION NUMBER: EMBL / AI136977
  ref <309>: DATABASE ENTRY DATE: 2000-03-03

SEQ ID NO: 6879 - DNA, 2156 bp, Homo sapiens; identical to SEQ ID NO: 6873
  ref <308>: DATABASE ACCESSION NUMBER: EMBL / M88279
  ref <309>: DATABASE ENTRY DATE: 1999-07-02

SEQ ID NO: 6880 - protein, 458 aa, Homo sapiens; identical to SEQ ID NO: 6874
  ref <308>: DATABASE ACCESSION NUMBER: SWISS-Prot / Q02790
  ref <309>: DATABASE ENTRY DATE: 2002-06-15

SEQ ID NO: 6881 - DNA, 376 bp, Rattus norvegicus; identical to SEQ ID NO: 6872
  ref <308>: DATABASE ACCESSION NUMBER: EMBL / AI136977
  ref <309>: DATABASE ENTRY DATE: 2000-03-03

SEQ ID NO: 6882 - DNA, 2156 bp, Homo sapiens; identical to SEQ ID NO: 6873
  ref <308>: DATABASE ACCESSION NUMBER: EMBL / M88279
  ref <309>: DATABASE ENTRY DATE: 1999-07-02

SEQ ID NO: 6883 - protein, 458 aa, Homo sapiens; identical to SEQ ID NO: 6874
  ref <308>: DATABASE ACCESSION NUMBER: SWISS-Prot / Q02790
  ref <309>: DATABASE ENTRY DATE: 2002-06-15

SEQ ID NO: 6884 - DNA, 376 bp, Rattus norvegicus; identical to SEQ ID NO: 6872
  ref <308>: DATABASE ACCESSION NUMBER: EMBL / AI136977
  ref <309>: DATABASE ENTRY DATE: 2000-03-03

SEQ ID NO: 6885 - DNA, 2156 bp, Homo sapiens; identical to SEQ ID NO: 6873
  ref <308>: DATABASE ACCESSION NUMBER: EMBL / M88279
  ref <309>: DATABASE ENTRY DATE: 1999-07-02

SEQ ID NO: 6886 - protein, 458 aa, Homo sapiens; identical to SEQ ID NO: 6874
  ref <308>: DATABASE ACCESSION NUMBER: SWISS-Prot / Q02790
  ref <309>: DATABASE ENTRY DATE: 2002-06-15

SEQ ID NO: 6887 - DNA, 376 bp, Rattus norvegicus; identical to SEQ ID NO: 6872
  ref <308>: DATABASE ACCESSION NUMBER: EMBL / AI136977
  ref <309>: DATABASE ENTRY DATE: 2000-03-03

SEQ ID NO: 6888 - DNA, 2156 bp, Homo sapiens; identical to SEQ ID NO: 6873
  ref <308>: DATABASE ACCESSION NUMBER: EMBL / M88279
  ref <309>: DATABASE ENTRY DATE: 1999-07-02

SEQ ID NO: 6889 - protein, 458 aa, Homo sapiens; identical to SEQ ID NO: 6874
  ref <308>: DATABASE ACCESSION NUMBER: SWISS-Prot / Q02790
  ref <309>: DATABASE ENTRY DATE: 2002-06-15

SEQ ID NO: 6890 - DNA, 590 bp, Rattus norvegicus
  misc_feature (1)..(590): n=a, c, g or t
  ref <308>: DATABASE ACCESSION NUMBER: EMBL / AI137790
  ref <309>: DATABASE ENTRY DATE: 2000-03-03
tttttttttttttttttctctgtgcacacagctttattggatatcgctggagcgtccccaagtggctctgattactggtgtgacaggaggaggtggtgcctcactggagatacagacaatgatggctgacattanatgactggggtgggggcccagcacctanggagagagtattaccatctagtcacgaacactctctgcactgccctgatggagagacaacagccagaccccgtcacagcagcagagggagcggagcgctcttcagcactggggagctagcctggagctttgccattgcctgctgttccaaggtccaacaggactggagcaggatcttccctcaagtccagccagcctgtggggtcacctgcaaagtcccagtgccttcaggatggtgtcttgccaggggtggcccctgtcttctttgatgctcccttcagcagcgcaagcttcttaggcaggctggagctggccttcatcaccacatcatgctcaatcttcttccggattcctacttccaggctcttcttcaacttttgctgctgcacaacgcgcgccttcttgggagcgatgactcgaccgccttt

SEQ ID NO: 6891 - protein, 93 aa, Rattus norvegicus
  ref <308>: DATABASE ACCESSION NUMBER: SWISS-Prot / Q05310
  ref <309>: DATABASE ENTRY DATE: 1995-11-01
MAQGQRKFQAQKPKSKAAAAERSRGPRKGGRVIGPKKARVVQQQKLKKSLEVGIRKKIEHDVVMKASSSLPKKLALLKGASKKTGATPGKTPS

SEQ ID NO: 6892 - DNA, 616 bp, Homo sapiens
  ref <308>: DATABASE ACCESSION NUMBER: Refseq / NM_014047
  ref <309>: DATABASE ENTRY DATE: 2001-12-10
gaccggaccatggcgcaggggcagcgcaagtttcaggcgcacaaacccgcaaagagtaagacggcagcggcagcctctgaaaagaatcggggcccaagaaaaggcggtcgtgttatcgctcccaagaaggcgcgcgtcgtgcagcagcaaaagctcaagaagaacctagaagtcggaatccggaagaagatcgaacatgacgtggtgatgaaagccagcagcagcctgcccaagaagctggcactgctgaaggccccagccaagaagaaaggggcagctgccgccacctcctccaagacaccttcctgaggacgctggccccagtgcaggccaacatcccaccccctacctccatatgggaccttgcaagtcatcccacaggctgcactgtcaggaagaggaccctgtcccccagcactgggcttcacctagaacttcagtgggggccaagggtgctgagaacccagcaatgaccaggaagatacagtcactaacttcatctgtccccgtgccccttcccaggtcctgcctccacaggtttaacccagaacaataaacctggctttgtcagtaaaaaaaaaaaaaaaaaaaaaaaaaaaaaaaaaaaaaaaaaaaa

SEQ ID NO: 6893 - protein, 99 aa, Homo sapiens
  ref <308>: DATABASE ACCESSION NUMBER: SWISS-Prot / AAD44484
  ref <309>: DATABASE ENTRY DATE: 2002-06-15
MAQGQRKFQAHKPAKSKTAAAASEKNRGPRKGGRVIAPKKARVVQQQKLKKNLEVGIRKKIEHDVVMKASSSLPKKLALLKAPAKKKGAAAATSSKTPS

SEQ ID NO: 6894 - DNA, 475 bp, Rattus norvegicus
  ref <308>: DATABASE ACCESSION NUMBER: EMBL / AI144767
  ref <309>: DATABASE ENTRY DATE: 2000-03-03
tttttttttttttttctgaccactttttaaatagatttatttctacggctcgcaaatggttatatgaacacatctcatgcacacttcattagggacattctcttagtctttttaacagcatgacacgataatcagattccaacaccgttaaacttaacaaagcatacctttcaaccagggacttgtggtacgagctcctgttttcaaaagctattttgcccaagcataggtacacgttggatcacatttcaaacactatacatgttaggaggatgttaggaatacaaatgtagaagagatatttaaagcaggactcacagctgtttagaggaaatagaaaattttttcctttttttggggggatggtggtggtgggggagtcctcattatcaatcacttcatagagggcctgctgatgcacgaagagctgaattgattggtataaatattttcccatatacataatgtatcataa

SEQ ID NO: 6895 - protein, 284 aa, Rattus norvegicus; identical to SEQ ID NO: 3319
  ref <308>: DATABASE ACCESSION NUMBER: SWISS-Prot / Q63582
  ref <309>: DATABASE ENTRY DATE: 2002-06-15

SEQ ID NO: 6896 - DNA, 2301 bp, Homo sapiens
  ref <308>: DATABASE ACCESSION NUMBER: EMBL / X03541
  ref <309>: DATABASE ENTRY DATE: 1993-09-12
gtcgaccggagggcaggaggagcaggaggagcaggagcaggaggagcaggaggagcaggaggagcaggaggagcaggaggagcaggaacaggaggaggaggaggaggagaaggaggagcaggaagagcaggaggaggaggagcaggagcaggaggagcaggagggagaggaggctgcaacgccgagcggaggaggcaggaaccggagcgcgagcagtagctgggtgggcaccatggctgggatcaccaccatcgaggcggtgaagcgcaagatccaggttctgcagcagcaggcagatgatgcagaggagcgagctgagcgcctccagcgagaagttgagggagaaaggcgggcccgggaacaggctgaggctgaggtggcctccttgaaccgtaggatccagctggttgaagaagagctggaccgtgctcaggagcgcctggccactgccctgcaaaagctggaagaagctgaaaaagctgctgatgagagtgagagaggtatgaaggttattgaaaaccgggccttaaaagatgaagaaaagatggaactccaggaaatccaactcgaagaagctaagcacattgcagaagaggcagataggaagtatgaagaggtggctcgtaagttggtgatcattgaaggagacttggaacgcacagaggaacgagctgagctggcagagtcgcgttgccgagagatggatgagcagattagactgatggaccagaacctgaagtgtctgagtgctgccgaagaaaagtactctcaaaaagaagataaatatgaggaagaaatcaagattcttactgataaactcaaggaggcagagacccgtgctgagtttgctgagagatcggtagccaagctggaaaagacaattgatgacctggaagacactaacagcacatctggagacccggtggagaagaaggacgaaacaccttttggggtctcggtggctgtgggcctggccgtctttgcctgcctcttcctttctacgctgctccttgtgctcaacaaatgtggacggagaaacaagtttgggatcaaccgcccggctgtgctggctccagaggatgggctggccatgtccctgcatttcatgacattgggtggcagctccctgtcccccaccgagggcaaaggctctgggctccaaggccacatcatcgagaacccacaatacttcagtgatgcctgtgttcaccacatcaagcgccgggacatcgtgctcaagtgggagctgggggagggcgcctttgggaaggtcttccttgctgagtgccacaacctcctgcctgagcaggacaagatgctggtggctgtcaaggcactgaaggaggcgtccgagagtgctcggcaggacttccaacgtgaggctgagctgctcaccatgctgcagcaccagcacatcgtgcgcttcttcggcgtctgcaccgagggccgccccctgctcatggtcttcgagtatatgcggcacggggacctcaaccgcttcctccgatcccatggacccgatgccaagctgctggctggtggggaggatgtggctccaggccccctgggtctggggcagctgctggccgtggctagccaggtcgctgcggggatggtgtacctggcgggtctgcattttgtgcaccgggacctggccacacgcaactgtctagtgggccagggactggtggtcaagattggtgattttggcatgagcagggatatctacagcaccgactattaccgtgtgggaggccgcaccatgctgcccattcgctggatgccgcccgagagcatcctgtaccgtaagttcaccaccgagagcgacgtgtggagcttcggcgtggtgctctgggagatcttcacctacggcaagcagccctggtaccagctctccaacacggaggcaatcgactgcatcacgcagggacgtgagttggagcggccacgtgcctgcccaccagaggtctacgccatcatgcggggctgctggcagcgggagcccagcaacgccacagcatcaaggatgtgcacgcccggctgcaagccctggcctaggcacctcctgtctacctggatgtcctgggctagggggccggcccaggggctgggagtggttagccggaatactggggcctgccctcagcatcccccatagctcccagcagccccagggtgatctcgaagtatctaattcgccctcagcatgtgggaagggacaggtgggggctgggagtagaggatgttcctgcttctctaggcaaggtcccgtcgtagcaattatatttattatgggaattc

SEQ ID NO: 6897 - protein, 796 aa, Homo sapiens
  ref <308>: DATABASE ACCESSION NUMBER: SWISS-Prot / P04629
  ref <309>: DATABASE ENTRY DATE: 2002-06-15
MLRGGRRGQLGWHSWAAGPGSLLAWLILASAGAAPCPDACCPHGSSGLRCTRDGALDSLHHLPGAENLTELYIENQQHLQHLELRDLRGLGELRNLTIVKSGLRFVAPDAFHFTPRLSRLNLSFNALESLSWKTVQGLSLQELVLSGNPLHCSCALRWLQRWEEEGLGGVPEQKLQCHGQGPLAHMPNASCGVPTLKVQVPNASVDVGDDVLLRCQVEGRGLEQAGWILTELEQSATVMKSGGLPSLGLTLANVTSDLNRKNLTCWAENDVGRAEVSVQVNVSFPASVQLHTAVEMHHWCIPFSVDGQPAPSLRWLFNGSVLNETSFIFTEFLEPAANETVRHGCLRLNQPTHVNNGNYTLLAANPFGQASASIMAAFMDNPFEFNPEDPIPVSFSPVDTNSTSGDPVEKKDETPFGVSVAVGLAVFACLFLSTLLLVLNKCGRRNKFGINRPAVLAPEDGLAMSLHFMTLGGSSLSPTEGKGSGLQGHIIENPQYFSDACVHHIKRRDIVLKWELGEGAFGKVFLAECHNLLPEQDKMLVAVKALKEASESARQDFQREAELLTMLQHQHIVRFFGVCTEGRPLLMVFEYMRHGDLNRFLRSHGPDAKLLAGGEDVAPGPLGLGQLLAVASQVAAGMVYLAGLHFVHRDLATRNCLVGQGLVVKIGDFGMSRDIYSTDYYRVGGRTMLPIRWMPPESILYRKFTTESDVWSFGVVLWEIFTYGKQPWYQLSNTEAIDCITQGRELERPRACPPEVYAIMRGCWQREPQQRHSIKDVHARLQALAQAPPVYLDVLG

SEQ ID NO: 6898 - DNA, 403 bp, Rattus norvegicus
  ref <308>: DATABASE ACCESSION NUMBER: EMBL / AI146195
  ref <309>: DATABASE ENTRY DATE: 2000-03-03
cggccgctgcatcccggcggtggcgaggaggggggcacaaagctggctgcgctgcgagggaagaagactggaagcatgagttcagacagcagccaagcggtgatcaccacccctcctcctcccagcatgcctcacaaagagaggtattttgaccgaatcaatgaaagtgatccagaataccttcgagagaggaacatgtctcctgatctacggcaggacttcaatatgatggagcagaggaagcgagtcactcagatcctgcagagtcctgcctttcgggaagacctagagtgcctcatccaagaacagatgaagaaaggccacgacccgaccggattgctagcgttacagcagatcgccgactacatcatggccaactccttcaccggtttttcttcacctc

SEQ ID NO: 6899 - protein, 705 aa, Rattus norvegicus
  ref <308>: DATABASE ACCESSION NUMBER: SWISS-Prot / Q62847
  ref <309>: DATABASE ENTRY DATE: 2001-10-16
MSSDSSQAVITTPPPPSMPHKERYFDRINESDPEYLRERNMSPDLREDFNMMEQRKRVTQILQSPAFREDLECLTQEQMKKGHDPTGLLALQQIADYIMANSFTGFSSPPLSLGMVTPINDLPGADTSSYVKGEKLTRCELASLYRLADLFGWAHLANTYISVRVSKEQDHIIIIPRGLPFSEATASALVKVNIIGEVVDQGSTNLKIDHSGFSPHAAIYSTRPDVKCVIHIHTLATAAVSSMKCGILPISQESLILGDVAYYDYQGSLDEEEERIELQKVLGPSCKVLVLRNHGVVALGETLEEAFHYIFNVQMACEIQVQAVAGAGGVDNLLILDLQKYKAFTHGVAMTGGGGVNMGSHQKWKVGEIEFEGLMRTLDNLGYRTGYAYRHPLVREKPRHKSDVEIPATVTAFSFEDDSVPLSPLKYMAQRQQREKTRWLNSPNTYMKVNVPEESRNGETSPRTKITWMKAEDPSKVSSGTPIKIEDPNQFVPLNTNPTEVLEKRNKIREQNRYDLKTAGPQSQLLAGIVVDKPPSTMRFEDDDQGPPAPPNPFSHLMEGELEEYTKTIERQQQGLDDAEQESLSDDAASVSQIQSQTQSPQSVPERLEENHELFSKSFTSVDVPVIVNGKDEMHDVEDELAQRVSRLTTSTTIENIEITIKSPDRTEEVLSPDGSPSKSPSKKKKKFRTPSFLKKNKKKEKVEA

SEQ ID NO: 6900 - DNA, 2864 bp, Homo sapiens
  ref <308>: DATABASE ACCESSION NUMBER: Refseq / NM_016824
  ref <309>: DATABASE ENTRY DATE: 2001-02-03
agataacaagagtaatccacagacttaaaacatgagctcagatgccagccaaggcgtgattaccactcctcctcctcccagcatgcctcacaaagagagatattttgaccgcatcaatgaaaatgacccagaatacattagggagaggaacatgtctcctgatctacgacaagacttcaacatgatggagcagaggaaacgagttactcagatcctgcaaagtcctgcctttcgggaagacttggaatgccttattcaagaacagatgaagaaaggccacaacccaactggattactagcattacagcagattgcagattacatcatggccaattctttctcgggtttttcttcacctcctctcagtcttggcatggtcacacctatcaatgaccttcctggtgcagatacatcctcatatgtgaagggagaaaaacttactcgctgtaaacttgccagcctgtacagacttgtagacttgtttggatgggcacacctggcaaatacctatatctcagtaagaataagtaaggagcaagaccacattataataattcccagaggcctatctttttctgaagctacagcctccaatttggtgaaagtcaatataataggagaagtggttgaccagggaagtaccaatttgaaaattgaccatacaggattcagtccccatgctgcaatctattcaacacgtcctgatgttaagtgtgtcatacacatccatacccttgcaacagcagctgtatcctccatgaaatgtgggatccttccaatttctcaagagtctcttcttctgggagatgttgcctattatgactaccaagggtcacttgaagaacaggaggagagaattcaactgcagaaggttctgggaccaagttgtaaggtgctggtactcaggaatcatggtgtggttgcacttggagaaacattagaggaggcttttcattatatttttaatgtgcaactagcctgtgagattcaggtgcaggccctagcaggtgcaggtggagtagacaatctccatgtactggactttcagaagtataaagctttcacttacactgtagcagcgtctggtggaggaggtgtgaatatgggttcccatcaaaaatggaaggttggcgaaattgagtttgaagggcttatgaggactctggacaacttggggtatagaacaggctatgcttacaggcatcctctcattcgagagaagcctaggcacaagagtgatgtggaaatcccagcaactgtgactgctttttcctttgaagacgatacagtgccactctctcctctcaaatacatggcacagaggcaacagcgtgaaaaaacaagatggctgaactcaccaaatacttacatgaaagtgaatgtgcctgaggagtctcggaacggagaaaccagtccccgaaccaaaatcacgtggatgaaagcagaagactcatctaaagttagtggtggaacacctatcaaaattgaagatccaaatcagtttgttcctttaaacacaaacccgaatgaggtactagaaaagagaaataagattcgggaacaaaatcgatatgacttgaaaacagcaggaccacaatctcagttgcttgctggaattgttgtggataagccaccttctactatgcaatttgaagatgatgatcatggcccaccagctcctcctaacccatttagtcatctcacagaaggagaacttgaagagtataagaggacaatcgaacgtaaacaacaaggcctagaagatgctgagcaggaattactctcagatgacgcttcatctgtttcacaaattcagtctcaaactcagtcaccgcaaaatgtccctgaaaaattagaagaaaaccatgagctgttttccaagagcttcatctccatggaagtgcctgtcatggtagtaaatggcaaggatgatatgcatgatgttgaagatgagcttgctaagcgagtgagtaggttaagcacaagtacaaccatagaaaacatcgagattactattaagtctccagagaaaatcgaagaagtcctgtcacctgaaggctccccttcaaaatcgccatccaagaaaaagaagaaattccgcactccttcttttctgaaaaagaacaaaaaaaaggagaaagttgaggcctaaataaagtctttttataattattattataacaatgtgacattgcacatctaaataccacatttaagttgatcattaatatgcaatggtagatcagattgggggatgtagcaaactggactttaagaactggaaagaggttttacaaaagaaaaactttcagattcatctctcattttatatgtccagaaatggctttgaattttaagcaattactagttttaattagctctgccctcatgaagtattattataattcaccataaacagctatctgtctgaattacttcaggccttctccataatatctgttagaaagaaattgccagtgagcaagtgagaatttttatttctcaatacctgcttcacttgataatcatattataattttttatcatgattattgactatatttttggagtcccattgtttcagtgggcattaacagaatgctttaaaaacttctaagacaagaatctatagcattagtatacactggcacataattttttaaaaagttttaagaaaagattcatttggaattttattcacagtataaaatttcctcacctgaagtaactttgtttgccaaaaaagttgttttaataaactataatttttgaaaacttccttttttattagtttagaaagccccttatttttcaacaaaggggattttgtacacataacatgggttatttagtttaactctggc

SEQ ID NO: 6901 - protein, 706 aa, Homo sapiens
  ref <308>: DATABASE ACCESSION NUMBER: SWISS-Prot / Q9UEY8
  ref <309>: DATABASE ENTRY DATE: 2001-10-16
MSSDASQGVITTPPPPSMPHKERYFDRINENDPEYIRERNMSPDLRQDFNMMEQRKRVTQILQSPAFREDLECLIQEQMKKGHNPTGLLALQQIADYIMANSFSGFSSPPLSLGMVTPINDLPGADTSSYVKGEKLTRCKLASLYRLVDLFGWAHLANTYISVRISKEQDHIIIIPRGLSFSEATASNLVKVNIIGEVVDQGSTNLKIDHTGFSPHAAIYSTRPDVKCVIHIHTLATAAVSSMKCGILPISQESLLLGDVAYYDYQGSLEEQEERIQLQKVLGPSCKVLVLRNHGVVALGETLEEAFHYIFNVQLACEIQVQALAGAGGVDNLHVLDFQKYKAFTYTVAASGGGGVNMGSHQKWKVGEIEFEGLMRTLDNLGYRTGYAYRHPLIREKPRHKSDVEIPATVTAFSFEDDTVPLSPLKYMAQRQQREKTRWLNSPNTYMKVNVPEESRNGETSPRTKITWMKAEDSSKVSGGTPIKIEDPNQFVPLNTNPNEVLEKRNKIREQNRYDLKTAGPQSQLLAGIVVDKPPSTMQFEDDDHGPPAPPNPFSHLTEGELEEYKRTIERKQQGLEDAEQELLSDDASSVSQIQSQTQSPQNVPEKLEENHELFSKSFISMEVPVMVVNGKDDMHDVEDELAKRVSRLSTSTTIENIEITIKSPEKIEEVLSPEGSPSKSPSKKKKKFRTPSFLKKNKKKEKVEA

SEQ ID NO: 6902 - DNA, 601 bp, Rattus norvegicus
  ref <308>: DATABASE ACCESSION NUMBER: EMBL / AI169005
  ref <309>: DATABASE ENTRY DATE: 2000-03-03
atagaaaacccagatttatttaactattacaaagacaaaatatcattgagagtactttgcagacttcatttcagatgatttactctgtgacagtcaaggacctaagctaggagaatgtaacagagctgatggtaaatgcggaggaacagaagtagcacacaagcatttgtcatgacgagatgtggttgagccccagtagagggcccatgcgtccgtggagaatgctaaaggctgtgccctcagaggcctttgctttttatctcagggatcagagagtcctcctaagtcccagagacatctaagctccccacctcacttttgcccagcgtgagcactgtgcacacgacacacaggcctcgtagctgacagattgcacacagcaaaggcaggaattagaggccctctcagaagataactagacacaggaagcttaggggtaaatgagaaactacaaaaacccgttcagttaattcacctttgttaatagaggtcagagtcttttctgctggtgacagcttgctgtctcattatagtttgtcttgagaaatgagttttggaaaagaaaaaagcctttcaccagctccattctggagtgaagagg

SEQ ID NO: 6903 - protein, 236 aa, Rattus norvegicus; identical to SEQ ID NO: 1712
  ref <308>: DATABASE ACCESSION NUMBER: SWISS-Prot / Q04753
  ref <309>: DATABASE ENTRY DATE: 2001-10-16

SEQ ID NO: 6904 - DNA, 421 bp, Homo sapiens; identical to SEQ ID NO: 1713
  ref <308>: DATABASE ACCESSION NUMBER: EMBL / AA832121
  ref <309>: DATABASE ENTRY DATE: 2000-03-03

SEQ ID NO: 6905 - protein, 237 aa, Homo sapiens; identical to SEQ ID NO: 1714
  ref <308>: DATABASE ACCESSION NUMBER: Refseq / NP_001284
  ref <309>: DATABASE ENTRY DATE: 2000-10-31

SEQ ID NO: 6906 - DNA, 581 bp, Rattus norvegicus
  ref <308>: DATABASE ACCESSION NUMBER: EMBL / AI169370
  ref <309>: DATABASE ENTRY DATE: 2000-03-03
cttaaagcttttactttgagacgtcatggaaaacttaagaggtacacatggagaagacatgatcacagaagggaaacagcatagaagcatcgatgcctgcagctagtgctggagctggagttgagtttgacatgatacagggactgcaggaatgaactagtattcctctccttcttcctcaccctcaccctccacagaatccacaccaacctcctcataatccttctctagggcagccatgtcctcacgggcctcagagaactctccctcctccatgccctcacccacgtaccagtgcacaaaggcacgcttggcatacatcagatcaaacttgtgatccaggcgagcccaagcctcagcaatggctgtggtgttgctcagcatacacacagctctctggaccttggccaggtcgccaccaggtaccacagtgggaggctggtaattaatgccaaccttgaagccagtggggcaccagtccacaaactggatgctgcgcttggtcttgatggtggcaatggcagcattgacatctttggggaccacatcaccacggtacagcaggcagcaagccatgtatt

SEQ ID NO: 6907 - protein, 451 aa, Rattus norvegicus; identical to SEQ ID NO: 5831
  ref <308>: DATABASE ACCESSION NUMBER: SWISS-Prot / P02551
  ref <309>: DATABASE ENTRY DATE: 2002-06-15

SEQ ID NO: 6908 - DNA, 1636 bp, Homo sapiens
  ref <308>: DATABASE ACCESSION NUMBER: EMBL / BC006379
  ref <309>: DATABASE ENTRY DATE: 2001-07-13
ggcacgaggctcgactcttagcttgtcggggacggtaaccgggacccggtgtctgctcctgtcgccttcgcctcctaatccctagccactatgcgtgagtgcatctccatccacgttggccaggctggtgtccagattggcaatgcctgctgggagctctactgcctggaacacggcatccagcccgatggccagatgccaagtgacaagaccattgggggaggagatgactccttcaacaccttcttcagtgagacgggcgctggcaagcacgtgccccgggctgtgtttgtagacttggaacccacagtcattgatgaagttcgcactggcacctaccgccagctcttccaccctgagcagctcatcacaggcaaggaagatgctgccaataactatgcccgagggcactacaccattggcaaggagatcattgaccttgtgttggaccgaattcgcaagctggctgaccagtgcaccggtcttcagggcttcttggttttccacagctttggtgggggaactggttctgggttcacctccctgctcatggaacgtctctcagttgattatggcaagaagtccaagctggagttctccatttacccagcaccccaggtttccacagctgtagttgagccctacaactccatcctcaccacccacaccaccctggagcactctgattgtgccttcatggtagacaatgaggccatctatgacatctgtcgtagaaacctcgatatcgagcgcccaacctacactaaccttaaccgccttattagccagattgtgtcctccatcactgcttccctgagatttgatggagccctgaatgttgacctgacagaattccagaccaacctggtgccctacccccgcatccacttccctctggccacatatgcccctgtcatctctgctgagaaagcctaccatgaacagctttctgtagcagagatcaccaatgcttgctttgagccagccaaccagatggtgaaatgtgaccctcgccatggtaaatacatggcttgctgcctgttgtaccgtggtgacgtggttcccaaagatgtcaatgctgccattgccaccatcaaaaccaagcgcagcatccagtttgtggattggtgccccactggcttcaaggttggcatcaactaccagcctcccactgtggtgcctggtggagacctggccaaggtacagagagctgtgtgcatgctgagcaacaccacagccattgctgaggcctgggctcgcctggaccacaagtttgacctgatgtatgccaagcgtgcctttgttcactggtacgtgggtgaggggatggaggaaggcgagttttcagaggcccgtgaagatatggctgcccttgagaaggattatgaggaggttggtgtggattctgttgaaggagagggtgaggaagaaggagaggaatactaattatccattccttttggccctgcagcatgtcatgctcccagaatttcagcttcagcttaactgacagacgttaaagctttctggttagattgttttcacttggtgatcatgtcttttccatgtgtacctgtaatatttttccatcatatctcaaagtaaagtcattaacatcaaaaaaaaaaaaaaaaaa

SEQ ID NO: 6909 - protein, 451 aa, Homo sapiens [sequence omitted]

SEQ ID NO: 6910 - DNA, 542 bp, Rattus norvegicus
  ref <308>: DATABASE ACCESSION NUMBER: EMBL / AI170613
  ref <309>: DATABASE ENTRY DATE: 2000-03-03
ttatattatttatttggaaatgtttgtaacagtacagtgaaactaaatttcagagacaatggctgtcagtttaggcatcatccgtttattatagaagggtaggcatgggaaattatttacatgatgaaatagttcagaatatcagtggaatgggcagcttcatgtgacaccatttcaacagtgatttcagtcgacatactttccaacaatgtcgccatctctatatacgaagtaatccttgtcgtctagtactactttggtgcctccatattctgggagaagaactttatctccaactttcacactgacaggctgaatctctcttgtgcctttcctttcccgcctgatcccacagccacgaccgttgcttgcaatacgtttccttgagacttttctggaagcataatgccacctttggtcacagtttcagcggcactcctttcaaccaatactctgtcaaatagcggaagatacttcctaaaagcttgtccagccatgacttacgccgccgcagctccggactctgcactcggactcctgct

SEQ ID NO: 6911 - protein, 101 aa, Rattus norvegicus
  ref <308>: DATABASE ACCESSION NUMBER: SWISS-Prot / P26772
  ref <309>: DATABASE ENTRY DATE: 1996-02-01
AGQAFRKFLPLFDRVLVERSAAETVTKGGIMLPEKSQGKVLQATVVAVGSGGKGKGGEIQPVSVKVGDKVLLPEYGGTKVVLDDKDYFLFRDGDILGKYVD

SEQ ID NO: 6912 - DNA, 309 bp, Homo sapiens
  ref <308>: DATABASE ACCESSION NUMBER: EMBL / X75821
  ref <309>: DATABASE ENTRY DATE: 1995-07-21
atggcaggacaagcgtttagaaagtttcttccactctttgaccgagtattggttgaaaggagtgctgctgaaactgtaaccaaaggaggcattatgcttccagaaaaatctcaaggaaaagtattgcaagcaacagtagtcgctgttggatcgggttctaaaggaaagggtggagagattcaaccagttagcgtgaaagttggagataaagttcttctcccagaatatggaggcaccaaagtagttctagatgacaaggattatttcctatttagagatggtgacattcttggaaagtacgtagactga

SEQ ID NO: 6913 - protein, 101 aa, Homo sapiens [sequence omitted]

SEQ ID NO: 6914 - DNA, 542 bp, Rattus norvegicus; identical to SEQ ID NO: 6910
  ref <308>: DATABASE ACCESSION NUMBER: EMBL / AI170613
  ref <309>: DATABASE ENTRY DATE: 2000-03-03

SEQ ID NO: 6915 - protein, 101 aa, Rattus norvegicus; identical to SEQ ID NO: 6911
  ref <308>: DATABASE ACCESSION NUMBER: SWISS-Prot / P26772
  ref <309>: DATABASE ENTRY DATE: 1996-02-01

SEQ ID NO: 6916 - DNA, 309 bp, Homo sapiens; identical to SEQ ID NO: 6912
  ref <308>: DATABASE ACCESSION NUMBER: EMBL / X75821
  ref <309>: DATABASE ENTRY DATE: 1995-07-21

SEQ ID NO: 6917 - protein, 101 aa, Homo sapiens [sequence omitted]

SEQ ID NO: 6918 - DNA, 542 bp, Rattus norvegicus; identical to SEQ ID NO: 6910
  ref <308>: DATABASE ACCESSION NUMBER: EMBL / AI170613
  ref <309>: DATABASE ENTRY DATE: 2000-03-03

SEQ ID NO: 6919 - protein, 101 aa, Rattus norvegicus; identical to SEQ ID NO: 6911
  ref <308>: DATABASE ACCESSION NUMBER: SWISS-Prot / P26772
  ref <309>: DATABASE ENTRY DATE: 1996-02-01

SEQ ID NO: 6920 - DNA, 309 bp, Homo sapiens; identical to SEQ ID NO: 6912
  ref <308>: DATABASE ACCESSION NUMBER: EMBL / X75821
  ref <309>: DATABASE ENTRY DATE: 1995-07-21

SEQ ID NO: 6921 - protein, 101 aa, Homo sapiens [sequence omitted]

SEQ ID NO: 6922 - DNA, 542 bp, Rattus norvegicus; identical to SEQ ID NO: 6910
  ref <308>: DATABASE ACCESSION NUMBER: EMBL / AI170613
  ref <309>: DATABASE ENTRY DATE: 2000-03-03

SEQ ID NO: 6923 - protein, 101 aa, Rattus norvegicus; identical to SEQ ID NO: 6911
  ref <308>: DATABASE ACCESSION NUMBER: SWISS-Prot / P26772
  ref <309>: DATABASE ENTRY DATE: 1996-02-01

SEQ ID NO: 6924 - DNA, 309 bp, Homo sapiens; identical to SEQ ID NO: 6912
  ref <308>: DATABASE ACCESSION NUMBER: EMBL / X75821
  ref <309>: DATABASE ENTRY DATE: 1995-07-21

SEQ ID NO: 6925 - protein, 101 aa, Homo sapiens [sequence omitted]

SEQ ID NO: 6926 - DNA, 542 bp, Rattus norvegicus; identical to SEQ ID NO: 6910
  ref <308>: DATABASE ACCESSION NUMBER: EMBL / AI170613
  ref <309>: DATABASE ENTRY DATE: 2000-03-03

SEQ ID NO: 6927 - protein, 101 aa, Rattus norvegicus; identical to SEQ ID NO: 6911
  ref <308>: DATABASE ACCESSION NUMBER: SWISS-Prot / P26772
  ref <309>: DATABASE ENTRY DATE: 1996-02-01

SEQ ID NO: 6928 - DNA, 309 bp, Homo sapiens; identical to SEQ ID NO: 6912
  ref <308>: DATABASE ACCESSION NUMBER: EMBL / X75821
  ref <309>: DATABASE ENTRY DATE: 1995-07-21

SEQ ID NO: 6929 - protein, 101 aa, Homo sapiens [sequence omitted]

SEQ ID NO: 6930 - DNA, 542 bp, Rattus norvegicus; identical to SEQ ID NO: 6910
  ref <308>: DATABASE ACCESSION NUMBER: EMBL / AI170613
  ref <309>: DATABASE ENTRY DATE: 2000-03-03

SEQ ID NO: 6931 - protein, 101 aa, Rattus norvegicus; identical to SEQ ID NO: 6911
  ref <308>: DATABASE ACCESSION NUMBER: SWISS-Prot / P26772
  ref <309>: DATABASE ENTRY DATE: 1996-02-01

SEQ ID NO: 6932 - DNA, 309 bp, Homo sapiens; identical to SEQ ID NO: 6912
  ref <308>: DATABASE ACCESSION NUMBER: EMBL / X75821
  ref <309>: DATABASE ENTRY DATE: 1995-07-21

SEQ ID NO: 6933 - protein, 101 aa, Homo sapiens [sequence omitted]

SEQ ID NO: 6934 - DNA, 648 bp, Rattus norvegicus
  ref <308>: DATABASE ACCESSION NUMBER: EMBL / AI170685
  ref <309>: DATABASE ENTRY DATE: 2000-03-03
acaccaactgctttttattatcaagtttcagaaacctttcacaaaatggttttaaaaaaaagccaaaaaactttacaaccatggctaatgtaattttttccattgttcccagtcagcttcaaacccattgtgtgcaaagcccagttttccatgcatctaatgatagatacaggctatgaattctttattctatttgtagcagcttatgcaggtgcagccaaacacacagcttcaggacgaattgtacaaactttacaatgctggatctgagtttaaaataggaaacataaactctacacaaaactgataaaaatcaagcagataccaggactgaaacttataacccacatgtgaaagggagtcttatttcaagtgctttactctgctatagaacagtcgaaatgaagacgtaaagctccgtggttagtttaaattatacactctgtggatactataccaagtttagaagttacacatagatcagcagatgtccatcagttcatctggactcatcaggtactccagcagctggcaaatccggcaaatgtggagaaaatccaccgtgcagttgcctgcagtttactgatgggcacactgcactccaggtccatgatggctgctgctttcctcatcagagctgtcgttgta

SEQ ID NO: 6935 - protein, 412 aa, Rattus norvegicus
  ref <308>: DATABASE ACCESSION NUMBER: SWISS-Prot / O35824
  ref <309>: DATABASE ENTRY DATE: 2001-10-16
MANVADTKLYDILGVPPGASENELKKAYRKLAKEYHPDKNPNAGDKFKEISFAYEVLSNPEKRELYDRYGEQGLREGSGGGGGMDDIFSHIFGGGLFGFMGNQSRSRNGRRRGEDMMHPLKVSLEDLYNGKTTKLQLSKNVLCSACSGQGGKSGAVQKCSACRGRGVRIMIRQLAPGMVQQMQSVCSDCNGEGEVINEKDRCKKCEGKKVIKEVKILEVHVDKGMKHGQRITFTGEADQAPGVEPGDIVLFVQEKEHEVFQRDGNDLHMTYKIGLVEALCGFQFTFKHLDARQIVVKYPPGKVIEPGCVRVVRGEGMPQYRNPFEKGDLYIKFDVQFPENNWINPDKLSELEDLLPSRPEVPNVIGETEEVELQEFDSTRGSGGGQRREAYNDSSDEESSSHHGPGVQCAHQ

SEQ ID NO: 6936 - DNA, 1993 bp, Homo sapiens
  ref <308>: DATABASE ACCESSION NUMBER: Refseq / NM_005880
  ref <309>: DATABASE ENTRY DATE: 2002-11-04
ccgctctgtctgcttcgccaccttctccccgagcactgcccggccggccgccatggctaacgtggctgacacgaagctgtacgacatcctgggcgtcccgcccggcgccagcgagaacgagctgaagaaggcatacagaaagttagccaaggaatatcatcctgataagaatccaaatgcaggagacaaatttaaagaaataagttttgcatatgaagtactatcaaatcctgagaagcgtgagttatatgacagatacggagagcaaggtcttcgggaaggcagcggcggaggtggtggcatggatgatattttctctcacatttttggtgggggattgttcggcttcatgggcaatcagagtagaagtcgaaatggcagaagaagaggagaggacatgatgcatccactcaaagtatctttagaagatctgtataatggcaagacaaccaaactacaacttagcaagaatgtgctctgtagtgcatgcagtggccaaggcggaaagtctggagctgtccaaaagtgtagtgcttgtcgaggtcgaggtgtgcgcatcatgatcagacagctggctccagggatggtacaacagatgcagtctgtgtgctctgattgtaatggagaaggagaggtaattaatgaaaaagaccgctgtaaaaaatgtgaagggaagaaggtgattaaagaagtcaagattcttgaagtccacgtagacaaaggcatgaaacatggacagagaattacattcactggggaagcagaccaggccccaggagtggaacccggagacattgttcttttgctacaggagaaagaacatgaggtatttcagagagatgggaatgatttgcacatgacatataaaataggacttgttgaagctctatgtggatttcagttcacatttaagcaccttgatggacgtcagattgtggtgaaatacccccctggcaaagtaattgaaccagggtgtgttcgtgtagttcgaggtgaagggatgccgcagtatcgtaatccctttgaaaaaggtgatctttacataaagtttgatgtgcagtttcctgaaaacaactggatcaacccagacaagctttctgaactagaagatcttctgccatctagaccggaagttcctaacataattggagaaacagaggaggtagagcttcaggaatttgatagcactcgaggctcaggaggtggtcagaggcgtgaagcctataatgatagctctgatgaagaaagcagcagccatcatggacctggagtgcagtgtgcccatcagtaaactctgcaaacaaattgcacaggtggattttctttccacatttgcctgatttgttctcagcaatccagctggagtgtcttatcaatcccagatgaactgagggacatctgttggtctatgtataacttttaaaattggtatagtatctacagagtgtataatttaaactaaccacaaagctttacatcttcattttgactgttccatagcaaaataaagcacttgaaaggaaacaaaactccctttcacacatggattattataagtttcaatcctggtatctgtgcttgatttttatcagttttgtgtaaatttttatgtttcatattttaaatttaaatcccacattgtaaagtttgtacaatttgtcctgaagctttgtgtttggctgcacctgcataagctgctacaaataaaataaaaaatttcatagcctgtatctatcatttaaatgcatggaaaaaaatgggctttgcacacaatgggtttggagctgactgggaacaatggaaaaaattacattagctgtggttgtaaagtttttttgtttttgggttttgttttttttttgttttttttttttttttttttaccattttgtgaaaggtttttgaaaatcgataataaaaagcggttggtgtaaatttaaaaaaaaaaaaaaaaaaaaaaaaaaaaaaaaaaaaaaaaaaaaaaaaaaaaaaa

SEQ ID NO: 6937 - protein, 412 aa, Homo sapiens
  ref <308>: DATABASE ACCESSION NUMBER: SWISS-Prot / O60884
  ref <309>: DATABASE ENTRY DATE: 2002-06-15
MANVADTKLYDILGVPPGASENELKKAYRKLAKEYHPDKNPNAGDKFKEISFAYEVLSNPEKRELYDRYGEQGLREGSGGGGGMDDIFSHIFGGGLFGFMGNQSRSRNGRRRGEDMMHPLKVSLEDLYNGKTTKLQLSKNVLCSACSGQGGKSGAVQKCSACRGRGVRIMIRQLAPGMVQQMQSVCSDCNGEGEVINEKDRCKKCEGKKVIKEVKILEVHVDKGMKHGQRITFTGEADQAPGVEPGDIVLLLQEKEHEVFQRDGNDLHMTYKIGLVEALCGFQFTFKHLDGRQIVVKYPPGKVIEPGCVRVVRGEGMPQYRNPFEKGDLYIKFDVQFPENNWINPDKLSELEDLLPSRPEVPNIIGETEEVELQEFDSTRGSGGGQRREAYNDSSDEESSSHHGPGVQCAHQ

SEQ ID NO: 6938 - DNA, 596 bp, Rattus norvegicus
  misc_feature (1)..(596): n=a, c, g or t
  ref <308>: DATABASE ACCESSION NUMBER: EMBL / AI171167
  ref <309>: DATABASE ENTRY DATE: 2000-03-03
caagttttttttttctgttctgttcgtaccaaaaaaagaaaatctagaaggatttagtgcattcaaatctctacaaaacacaaacgaggaaataatctgataaagacatggagcacattttaatttctaattctaaatctccacgtatgtcttaaaagctttgaaagtacaagtttaaggcatcaaaatgactaattatagacgataataacagtctggatcctaggaggcaactggaggcgttttaattggaaataagcatttgagataatgttaatagcagtgcagaaaaatgaagttaaaaacaaaatcagtgttaagaagccttccgtcctgcaccttgcttttaatcatctcctccacagagaatgagcagaaccttcctgtagtctccagaagtgtcgcccttgataaaagagtacaaagacttcccgtagagcctcttgaagtttgcccggatgtccagcatgtcaatctctgctcgagacaccatcactctgatgagggtgctgtcgtcagtgcctaagcccttcatggatttataaagcctttcagcanaataggcaggtttattcctcatgcacttcactatagcc

SEQ ID NO: 6939 - protein, 318 aa, Rattus norvegicus
  ref <308>: DATABASE ACCESSION NUMBER: SWISS-Prot / P55260
  ref <309>: DATABASE ENTRY DATE: 2002-06-15
ETKGGTVKAASGFNATEDAQVLRKAMKGLGTDEDAIIGVLACRNTAQRQEIRTAYKSTIGRDLLEDLKSELSSNFEQVILGMMTPTVLYDVQELRRAMKGAGTDEGCLIEILASRNPEEIRRINQTYQQQYGRSLEEDICSDTSFMFQRVLVSLTAGGRDEGNYLDDALVRQDAQDLYEAGEKRWGTDEVKFLSILCSRNRNHLLHVFDEYKRISQKDIEQSIKSETSGSFEDALLAIVKCMRNKPAYFAERLYKSMKGLGTDDSTLIRVMVSRPEIDMLDIPANFKRVYGKSLYSFIKGDTSGDYRKVLLILCGGDD

SEQ ID NO: 6940 - DNA, 1976 bp, Homo sapiens
  ref <308>: DATABASE ACCESSION NUMBER: EMBL / M82809
  ref <309>: DATABASE ENTRY DATE: 2000-03-04
gcagaggaggagcgcacgccggcctcgaagaacttctgcttgggtggctgaactctgatcttgacctagagtcatggccatggcaaccaaaggaggtactgtcaaagctgcttcaggattcaatgccatggaagatgcccagaccctgaggaaggccatgaaagggctcggcaccgatgaagacgccattattagcgtccttgcctaccgcaacaccgcccagcgccaggagatcaggacagcctacaagagcaccatcggcagggacttgatagacgacctgaagtcagaactgagtggcaacttcgagcaggtgattgtggggatgatgacgcccacggtgctgtatgacgtgcaagagctgcgaagggccatgaagggagccggcactgatgagggctgcctaattgagatcctggcctcccggacccctgaggagatccggcgcataagccaaacctaccagcagcaatatggacggagccttgaagatgacattcgctctgacacatcgttcatgttccagcgagtgctggtgtctctgtcagctggtgggagggatgaaggaaattatctggacgatgctctcgtgagacaggatgcccaggacctgtatgaggctggagagaagaaatgggggacagatgaggtgaaatttctaactgttctctgttcccggaaccgaaatcacctgttgcatgtgtttgatgaatacaaaaggatatcacagaaggatattgaacagagtattaaatctgaaacatctggtagctttgaagatgctctgctggctatagtaaagtgcatgaggaacaaatctgcatattttgctgaaaagctctataaatcgatgaagggcttgggcaccgatgataacaccctcatcagagtgatggtttctcgagcagaaattgacatgttggatatccgggcacacttcaagagactctatggaaagtctctgtactcgttcatcaagggtgacacatctggagactacaggaaagtactgcttgttctctgtggaggagatgattaaaataaaaatcccagaaggacaggaggattctcaacactttgaatttttttaacttcatttttctacactgctattatcattatctcagaatgcttatttccaattaaaacgcctacagctgcctcctagaatatagactgtctgtattattattcacctataattagtcattatgatgctttaaagctgtacttgcatttcaaagcttataagatataaatggagattttaaagtagaaataaatatgtattccatgtttttaaaagattactttctactttgtgtttcacagacattgaatatattaaattattccatattttcttttcagtgaaaaattttttaaatggaagactgttctaaaatcacttttttccctaatccaatttttagagtggctagtagtttcttcatttgaaattgtaagcatccggtcagtaagaatgcccatccagttttctatatttcatagtcaaagccttgaaagcatctacaaatctctttttttaggttttgtccatagcatcagttgatccttactaagtttttcatgggagacttccttcatcacatcttatgttgaaatcactttctgtagtcaaagtataccaaaaccaatttatctgaactaaattctaaagtatggttatacaaaccatatacatctggttaccaaacataaatgctgaacattccatattattatagttaatgtcttaatccagcttgcaagtgaatggaaaaaaaaataagcttcaaactaggtattctgggaatgatgtaatgctctgaatttagtatgatataaagaaaacttttttgtgctaaaaatactttttaaaatcaattttgttgattgtagtaatttctatttgcactgtgcctttcaactccagaaacattctaagatgtacttggatttaattaaaaagttca

SEQ ID NO: 6941 - protein, 318 aa, Homo sapiens
  ref <308>: DATABASE ACCESSION NUMBER: SWISS-Prot / P09525
  ref <309>: DATABASE ENTRY DATE: 2002-06-15
ATKGGTVKAASGFNAMEDAQTLRKAMKGLGTDEDAIISVLAYRNTAQRQEIRTAYKSTIGRDLIDDLKSELSGNFEQVIVGMMTPTVLYDVQELRRAMKGAGTDEGCLIEILASRTPEEIRRISQTYQQQYGRSLEDDIRSDTSFMFQRVLVSLSAGGRDEGNYLDDALVRQDAQDLYEAGEKKWGTDEVKFLTVLCSRNRNHLLHVFDEYKRISQKDIEQSIKSETSGSFEDALLAIVKCMRNKSAYFAEKLYKSMKGLGTDDNTLIRVMVSRAEIDMLDIRAHFKRLYGKSLYSFIKGDTSGDYRKVLLVLCGGDD

SEQ ID NO: 6942 - DNA, 593 bp, Rattus norvegicus
  ref <308>: DATABASE ACCESSION NUMBER: EMBL / AI171243
  ref <309>: DATABASE ENTRY DATE: 2000-03-03
atattttaattttctttttattcagaccatatattgaagtatcgattttaaaaaatttataaaaagacttagatgtaaactgtcatagtagatttacaaaaaatatatataaaaaagcaaattaaatattagaaattataggagtctctcccttaaactgaaggagtcttctttaataactttcaatgtagcttactggcaatcttaagaaattcaagaagctcattcatgttgtgtaagccctaaaggaaaaaactgaggaaactcattgataattttcacagcttcattgtaaagttcaagatcaaagcgattacaatcttccttaaacaggatataagatgcacatagtatggttgccttggctgtcaccttcccgactacttctacgattccagagatttcttcatccagtggctccatcaattcaatggttccattctttccttctccatctgaaagaataaacatttttccagtgggatgaatcttttccagcttccccacgaagcacacgggtcggtcgatatactgtgataacatgctggcgttgacgcgcgctttggggagttccattatgtccaccatgattc

SEQ ID NO: 6943 - protein, 1175 aa, Rattus norvegicus
  ref <308>: DATABASE ACCESSION NUMBER: SWISS-Prot / Q62728
  ref <309>: DATABASE ENTRY DATE: 2001-10-16
MPLPFGLKLKRTRRYTVSSKSCLVARIQLLNNEFVEFTLSVESTGQESLEAVAQRLELREITYFSLWYYNKQNQRRWVDLEKPLKKQLDKHALEPTVYFGVVFYVPSVSQLQQEITRYQYYLQLKKDVLEGNLPCTLEQAIQLAGLAVQADFGDFDQYESQDFLQKFALLPVGWLQDEKLLEEAAQKVALLHQKYRGLTAPEAEMLYMQEVERMDGYGEESYPAKDSQGSDISIGACLDGIFVKHKNGRPPVVFRWHDIANMSHNKSFFALELANKEETIQFQTEDMETAKYVWRLCVARHKFYRLNQCNLQTQAATLNSVRRGSSSRMSLPKPQPYAMPPPPQLHYNGHYTEPFASSQDNVFVPNKNGFYCHSQTSLDRTQIDLSGRIRNGSVYSAHSTNSLNTPQPYLQPSPMSSNPSIPGSDVMRPDYIPSHRHSALIPPSYRPTPDYESVMKRLNRGMVHADRHSHSLRNLNIGSSYAYSRPDALVYSQPEIREHPHLASPQSAHYPFNLNYSFHSQAPYPYPVERRPVVGAVSVPELTNVQLQAQDYPAPNIMRTQVYRPPPPYPYPRPANSTPDLSRHLYISSSNPDLITRRVHHSVQTFQEDSLPVAHSLQEVSEPLTAARHAHLQKRNSIEIAGLTHGFEGLRLKEETMSASAADVAPRTFSAGSQSSVFSDKVKQEGTEEQGSGGYSHKKSLSDATMLIHSSEEDEDLEDDSSREHAVSEPRLTAAFSQEQQLNYPCASVTPVTGPLHIFEPKSHVTEPEKRAKDISPVHLVMETHQPRRHGLLTPSMSESDLTTSGRYRARRDSLKKRPVSDLLSGKKNTVEGLPPLGGMKKTRADAKKIGPLKLAALNGLSLSRLPLPDEGKEVSTRATNDERCKVLEQRLEQGTVFTEYERILKKRLVDGECSTARLPENAERNRFQDVLPYDDARVELVPTKENNTGYINASHIKVSVSGIEWDYIATQGPLQNTCQDFWQMVWEQGVAIIAMVTAEEEGGREKSFRYWPRLGSRHNTVTYGRFKITTRFRTDSGCYATTGLKMKHLLTGQERTVWHLQYTDWPEHGCPEDLKGFLSYLEEIQSVRRHTNSTSEPRSPNPPLLVHCSAGVGRTGVVILSEIMVACLEHNEVLDIPRVLELLRQQRMMLVQTLSQYTFVYRVLIQFLKSSRLI

SEQ ID NO: 6944 - DNA, 3309 bp, Homo sapiens
  ref <308>: DATABASE ACCESSION NUMBER: EMBL / AF069072
  ref <309>: DATABASE ENTRY DATE: 2000-03-03
gcggcgcgcccgagcctagtccccacgccgcggcgcgcccgggctccctgctgatcccagaacaatcaaccatgacgaccgaatctggatcagactcggaatccaagccggaccaggaggccgagccccaggaggcggcgggggcgcaggggcggcgggggccgtgccggagccgcccaaggaggagcagcagcaggccctggagcagttcgccgccgctgcagcgcacagcaccccggtgcgagggaggtcactgacaaggaacaggagtttgctgccagggctgcaaaacagctcgaatatcagcaattagaagacgataaactttctcagaaatcatctagcagtaaactctctcggtctccattaaagattgtcaaaaagcctaaaagcatgcagtgcaaagtgatacttctcgatggatcagaatatacctgtgatgtagagaaacgctccagaggacaagtgctgtttgataaagtgtgtgaacacttgaacttgctagagaaagactactttgggcttacgtatcgagatgctgaaaaccagaagaattggttggaccctgctaaggaaataaaaaaacaggttcgaagtggtgcttggcacttttcatttaatgtgaaattttatccaccagaccctgcccaactatctgaagatatcaccaggtactacctctgcttgcagttgcgagatgacatcgtgtccggaaggctgccctgctcctttgttaccctggccttgctgggctcctacactgtccagtcagagctcggagactatgacccagatgaatgtgggagcgattacattagtgagttccgctttgcaccaaaccacactaaagaactggaagacaaagtgatcgagctgcacaagagccacagaggaatgacgccagcagaagcagagatgcatttcttggaaaatgccaaaaaattatcaatgtatggggtagatttacatcatgctaaggactcagaaggggtagaaattatgttaggagtttgtgcaagtggtctgttgatatatcgcgaccggctgcgaataaacagatttgcctggcccaaggttctaaagatttcatacaaacggaacaacttttacattaagatccggccgggagagtttgaacaatttgaaagcaccattgggtttaagctgccaaaccatcgagctgccaagcgtttatggaaagtatgtgttgagcatcatacatttttcagactactgttaccagaagcacctcccaagaaattcctaaccttgggttccaagtttcgttatagtggcaggacacaagcgcaaacgagaagagccagtgcgttgatagatcgcccagcaccttactttgaacgctcatccagcaaacgttataccatgtctcgcagcttggatggagcatcagtgaatgaaaaccatgaaatatacatgaaggattctatgtctgctgcagaggttggtactggccagtacgccacaacaaaaggcatctctcagaccaacttgatcaccactgtgactccggagaagaaggctgaggaggagcgggacgaggaagaggacaaacggaggaagggggaagaagtcacgcccatctcggccatccagcacgagggaaagactgacagtgagcgcacggacaccgcagccgacggggagaccactgccactgaggagctagaaaaaactcaagatgacctgatgaaacatcaaaccaacattagcgagctgaaaagaaccttcttagaaacctcaacagacactgccgtaacgaatgaatgggagaagaggctttccacctcccccgtgcgactggccgccaggcaggaggatgcccccatgatcgaaccacttgtccctgaagagaaaatggaaaccaagacggagtccagtggatagagacggaacccaccgtgcaccacctgccgcttagcactgagaaggtggtgcaggagaccgtgttggtggaggagcggcgtgtggtgcacgcgagtggggatgcttcttactcggcgggagacagcggggatgctgcagcacagcccgcattcacaggcattaaagggaaagagggctctgcttgacggagggggctaaagaggaaggaggggaggaggtcgctaaagctgtcctggaacaggaagagacagccgctgcttcccgtgagcgacaagaggagcagagtgcagccatccacatttcagaaactttggaacaaaaacctcattttgagtcctcaacggtgaagacggaaaccatcagttttggcagtgtttcaccgggaggagtaaagctagaaatttccacaagaagtgccagtagttcacaccgaaaccaaaaccatcacatatgaatcatcacaggtcgatccaggcacagatctggagccaggcgtgctgatgagtgcacagacgatcacatctgaaaccaccagtaccaccaccactacccacatcaccaaaactgtgaaagggggcatttcagagacaagaattgagaagcgaatagtcatcacgggggatgcagacattgaccatgaccaggcgctggctcaggcaattaaagaggccaaagagcagcaccctgacatgtcagtgaccaaagtagtggtccataaagagacagagatcacaccagaagatggagaggattgaccagaggaataacttagcttgcacatgaatgcagtcatgcaaaccgttaggaaaaccagagcctatatggagttccctcttctaacccaactgtacttgtatctgtccgtggaaaatttcagtccagaagaattgaccttgaccattaataaagacactggcagagagatcttcccataataaagcaatctgattcagcatcactaaaccgataatgcatgaagcaacgataaaattacaaaagagcagcatttttaattttcacaaaatgtctcagttttcagctatacctgctcgttcataaccaacaatataaaccgtggtctcatgtaacacataaacaattcatgcctttcatagtttattattattaaagtctaaacaaaattgcaatttcttaggtaaccttatatttacaataaatgaagattaccctcaaatgctagaagctgtctaggtccgtccggtgtgtcagatttcctcagattagatgtgccaataaccaagtttattcagtaaacaacttgtacttgtttcatctggtttattactctcacccataaacagtaatgactctctgaccctctggaaatatgtaatgcttccaatcttgctttgtgtatctcatttaatttgttccggttaagga

SEQ ID NO: 6945 - protein, 1087 aa, Homo sapiens
  ref <308>: DATABASE ACCESSION NUMBER: SWISS-Prot / Q9Y2J2
  ref <309>: DATABASE ENTRY DATE: 2002-06-15
MTTESGSDSESKPDQEAEPQEAAGAQGRAGAPVPEPPKEEQQQALEQFAAAAAHSTPVRREVTDKEQEFAARAAKQLEYQQLEDDKLSQKSSSSKLSRSPLKIVKKPKSMQCKVILLDGSEYTCDVEKRSRGQVLFDKVCEHLNLLEKDYFGLTYRDAENQKNWLDPAKEIKKQVRSGAWHFSFNVKFYPPDPAQLSEDITRYYLCLQLRDDIVSGRLPCSFVTLALLGSYTVQSELGDYDPDECGSDYISEFRFAPNHTKELEDKVIELHKSHRGMTPAEAEMHFLENAKKLSMYGVDLHHAKDSEGVEIMLGVCASGLLIYRDRLRINRFAWPKVLKISYKRNNFYIKIRPGEFEQFESTIGFKLPNHRAAKRLWKVCVEHHTFFRLLLPEAPPKKFLTLGSKFRYSGRTQAQTRRASALIDRPAPYFERSSSKRYTMSRSLDGEVGTGQYATTKGISQTNLITTVTPEKKAEEERDEEEDKRRKGEEVTPISAIRHEGKSPGLGTDSCPLSPPSTHCAPTSPTELRRRCKENDCKLPGYEPSRAEHLPGEPALDSDGPGRPYLGDQDVAFSYRQQTGKGTTLFSFSLQLPESFPSLLDDDGYLSFPNLSETNLLPQSLQHYLPIRSPSLVPCFLFIFFFLLSASFSVPYALTLSFPLALCLCYLEPKAASLSASLDNDPSDSSEEETDSERTDTAADGETTATESDQEEDAELKAQELEKTQDDLMKHQTNISELKRTFLETSTDTAVTNEWEKRLSTSPVRLAARQEDAPMIEPLVPEETKQSSGEKLMDGSEIFSLLESARKPTEFIGGVTSTSQSWVQKMETKTESSGIETEPTVHHLPLSTEKVVQETVLVEERRVVHASGDASYSAGDSGDAAAQPAFTGIKGKEGSALTEGAKEEGGEEVAKAVLEQEETAAASRERQEEQSAAIHISETLEQKPHFESSTVKTETISFGSVSPGGVKLEISTKEVPVVHTETKTITYESSQVDPGTDLEPGVLMSAQTITSETTSTTTTTHITKTVKGGISETRIEKRIVITGDADIDHDQALAQAIKEAKEQHPDMSVTKVVVHKETEITPEDGED

SEQ ID NO: 6946 - DNA, 593 bp, Rattus norvegicus; identical to SEQ ID NO: 6942
  ref <308>: DATABASE ACCESSION NUMBER: EMBL / AI171243
  ref <309>: DATABASE ENTRY DATE: 2000-03-03

SEQ ID NO: 6947 - protein, 1175 aa, Rattus norvegicus; identical to SEQ ID NO: 6943
  ref <308>: DATABASE ACCESSION NUMBER: SWISS-Prot / Q62728
  ref <309>: DATABASE ENTRY DATE: 2001-10-16

SEQ ID NO: 6948 - DNA, 3309 bp, Homo sapiens; identical to SEQ ID NO: 6944
  ref <308>: DATABASE ACCESSION NUMBER: EMBL / AF069072
  ref <309>: DATABASE ENTRY DATE: 2000-03-03

SEQ ID NO: 6949 - protein, 1087 aa, Homo sapiens; identical to SEQ ID NO: 6945
  ref <308>: DATABASE ACCESSION NUMBER: SWISS-Prot / Q9Y2J2
  ref <309>: DATABASE ENTRY DATE: 2002-06-15

SEQ ID NO: 6950 - DNA, 589 bp, Rattus norvegicus
  ref <308>: DATABASE ACCESSION NUMBER: EMBL / AI171268
  ref <309>: DATABASE ENTRY DATE: 2000-03-03
aagtgttcaaaaattgtttattatgcaaaatgttaacttttataaaaagtttaatatacatcacatggttacagaaagtcaccttcctgtaaaaaaaaggtacaaaagctatatactctattatagagttcataatcagggcaacagagcttttctccaaggaaaccagaagaccagctcttatgctgccttggcagtgtgtgcagggcagccactcgtgtaccccccacacccttctcgacaccccattttcggaaaaaagccagtctttttaagacttgagtcagggtggggacagagtgacgttgcccagctgctgaccagcgagtgctagctagctcttcaggccacccaagttcagtccttcgctctcgggctccaggtccagcctcgaggcatgagttcagggtaaatgaagagggctgtggcaagatcgaagctcatccatgcccctcaggcttccggctggagagagggtcccagagtcccagggtcccaagcggaacgggcgccagcacctgcgttcgggaagtgccaggacgaccgggtcagtggcaaaaactcctcttgtccttggagatcacaagtt

SEQ ID NO: 6951 - protein, 119 aa, Rattus norvegicus; identical to SEQ ID NO: 370
  ref <308>: DATABASE ACCESSION NUMBER: SWISS-Prot / P41138
  ref <309>: DATABASE ENTRY DATE: 2001-10-16

SEQ ID NO: 6952 - DNA, 982 bp, Homo sapiens; identical to SEQ ID NO: 371
  ref <308>: DATABASE ACCESSION NUMBER: EMBL / X66924
  ref <309>: DATABASE ENTRY DATE: 1993-11-18

SEQ ID NO: 6953 - protein, 119 aa, Homo sapiens; identical to SEQ ID NO: 372
  ref <308>: DATABASE ACCESSION NUMBER: SWISS-Prot / Q02535
  ref <309>: DATABASE ENTRY DATE: 2002-06-15

SEQ ID NO: 6954 - DNA, 490 bp, Rattus norvegicus
  ref <308>: DATABASE ACCESSION NUMBER: EMBL / AI171462
  ref <309>: DATABASE ENTRY DATE: 2000-03-03
gacttttgaaatcagatttactcaggggtggctggatttgggggtgggttccaatccatcgttgcctggcccgtgtcaattactaacaaaggtcaaatacaatatgtcagacctaaagccacagaaggagggtgtaaaacgttctgttccggagagaagaactagaggtcaacgacgtgggacttcacctagagtttagcctattaaattagtagtaacaaaacaacacatcggggatttaaaataacacctggtagttccttccaacatacacagaaatagcatcagagaagcttttgaataccacctaactgcattatggccttataggtcgaaggaaccaatgaaaataatggacctccattccacaccccatccttctccctctacatcaaacctacgcccgatttcgagtgagagttttaagtgtccacatttcttaagccacatttcgagcaaatcacgtcaattttggatgcttgtcttcatc

SEQ ID NO: 6955 - protein, 76 aa, Rattus norvegicus
  ref <308>: DATABASE ACCESSION NUMBER: SWISS-Prot / Q07490
  ref <309>: DATABASE ENTRY DATE: 2000-05-30
MGRAMVVRLGLGLLLLALLLPTQIYCNQTSVAPFSGNQSISAAPNPTNATTRSGCSSLQSTAGLLALSLSLLHLYC

SEQ ID NO: 6956 - DNA, 284 bp, Homo sapiens
  misc_feature (1)..(284): n=a, c, g or t
  ref <308>: DATABASE ACCESSION NUMBER: EMBL / AI860750
  ref <309>: DATABASE ENTRY DATE: 2000-03-09
tttttttttttttttttttttttttttttttttttttttttggccctttcaaccatttttttttatttacaggtgggggtcaaggcaaatcaattccataaaaagttactatgaatcaaagcgtaaatacccaaacccaatttacaatccaaaataaatgtccagcattctggaataaagcaagaggggtcattccccccccccagnngcttcaaaactggtcgatctgtttggtcccatggggttttctaaaaaaggaaaaaaaggactttgggcatcaaaac

SEQ ID NO: 6957 - DNA, 490 bp, Rattus norvegicus; identical to SEQ ID NO: 6954
  ref <308>: DATABASE ACCESSION NUMBER: EMBL / AI171462
  ref <309>: DATABASE ENTRY DATE: 2000-03-03

SEQ ID NO: 6958 - protein, 76 aa, Rattus norvegicus; identical to SEQ ID NO: 6955
  ref <308>: DATABASE ACCESSION NUMBER: SWISS-Prot / Q07490
  ref <309>: DATABASE ENTRY DATE: 2000-05-30

SEQ ID NO: 6959 - DNA, 284 bp, Homo sapiens; identical to SEQ ID NO: 6956
  misc_feature (1)..(284): n=a, c, g or t
  ref <308>: DATABASE ACCESSION NUMBER: EMBL / AI860750
  ref <309>: DATABASE ENTRY DATE: 2000-03-09

SEQ ID NO: 6960 - DNA, 708 bp, Rattus norvegicus
  misc_feature (1)..(708): n=a, c, g or t
  ref <308>: DATABASE ACCESSION NUMBER: EMBL / AI171630
  ref <309>: DATABASE ENTRY DATE: 2000-03-03
gaatctgaaaaataggctttactttaaccagtggtattgtctgacatcctatggcataccagatcacaaccaagttcacaaatacacatacacagcagtcttctcattcccttgtcttccaatggagaaactgggtggcggcagcatcgcaccatggatgccaggagctcttctgccagctctagcttcaagtccgggccctggggcacagtcctaacacagcatggccacatgtgcaaaggcatcctcaatacaataaccacgcctggcgttcaaacccagacgttgctactaaccattgtgaggggatgacgtggagctggactgcatactgaggcggtgaggcctggccagtcggcctccttctgggctccagatgatgcagggtcctaccctgccccacagaactgcatgtccctgcactgatagagaatggagacaccttgacctaaatacgagacctgtttcgtccaacactggaattggctttacactttcttacatccaacagaccaatcacattctcgtgcttcatgtgcttcagcagccgcagctccctgtaggtccttttggcgtgaatgatggactgaaacggtctcgacagcttcttcactgccacacgatgtcccgtctntgtatcaaaagcagcacacaccgagccgtaggctcccgagcccaccggggacaggttctggtatcgctcgggca

SEQ ID NO: 6961 - protein, 360 aa, Rattus norvegicus
  ref <308>: DATABASE ACCESSION NUMBER: SWISS-Prot / P70618
  ref <309>: DATABASE ENTRY DATE: 2000-05-30
MSQERPTFYRQELNKTVWEVPERYQNLSPVGSGAYGSVCAAFDTKTGHRVAVKKLSRPFQSIIHAKRTYRELRLLKHMKHENVIGLLDVFTPARSLEEFNDVYLVTHLMGADLNNIVKCQKLTDDHVQFLIYQILRGLKYIHSADIIHRDLKPSNLAVNEDCELKILDFGLARHTDDEMTGYVATRWYRAPEIMLNWMHYNQTVDIWSVGCIMAELLTGRTLFPGTDHIDQLKLILRLVGTPGAELLKKISSESARNYIQSLAQMPKMNFANVFIGANPLAVDLLEKMLVLDSDKRITAAQALAHAYFAQYHDPDDEPVAEPYDQSFESRDFLIDEWKSLTYDEVISFVPPPLDQEEMES

SEQ ID NO: 6962 - DNA, 3757 bp, Homo sapiens
  ref <308>: DATABASE ACCESSION NUMBER: EMBL / L35263
  ref <309>: DATABASE ENTRY DATE: 1999-07-02
ggaaccgcgaccactggagccttagcgggcgcagcagctggaacgggagtactgcgacgcagcccggagtcggccttgtaggggcgaaggtgcagggagatcgcggcgggcgcagtcttgagcgccggagcgcgtccctgcccttagcggggcttgccccagtcgcaggggcacatccagccgctgcggctgacagcagccgcgcgcgcgggagtctgcggggtcgcggcagccgcacctgcgcgggcgaccagcgcaaggtccccgcccggctgggcgggcagcaagggccggggagagggtgcgggtgcaggcgggggccccacagggccaccttcttgcccggcggctgccgctggaaaatgtctcaggagaggcccacgttctaccggcaggagctgaacaagacaatctgggaggtgcccgagcgttaccagaacctgtctccagtgggctctggcgcctatggctctgtgtgtgctgcttttgacacaaaaacggggttacgtgtggcagtgaagaagctctccagaccatttcagtccatcattcatgcgaaaagaacctacagagaactgcggttacttaaacatatgaaacatgaaaatgtgattggtctgttggacgtttttacacctgcaaggtctctggaggaattcaatgatgtgtatctggtgacccatctcatgggggcagatctgaacaacattgtgaaatgtcagaagcttacagatgaccatgttcagttccttatctaccaaattctccgaggtctaaagtatatacattcagctgacataattcacagggacctaaaacctagtaatctagctgtgaatgaagactgtgagctgaagattctggattttggactggctcggcacacagatgatgaaatgacaggctacgtggccactaggtggtacagggctcctgagatcatgctgaactggatgcattacaaccagacagttgatatttggtcagtgggatgcataatggccgagctgttgactggaagaacattgtttcctggtacagaccatattaaccagcttcagcagattatgcgtctgacaggaacaccccccgcttatctcattaacaggatgccaagccatgaggcaagaaactatattcagtctttgactcagatgccgaagatgaactttgcgaatgtatttattggtgccaatcccctggctgtcgacttgctggagaagatgcttgtattggactcagataagagaattacagcggcccaagcccttgcacatgcctactttgctcagtaccacgatcctgatgatgaaccagtggccgatccttatgatcagtcctttgaaagcagggacctccttatagatgagtggaaaagcctgacctatgatgaagtcatcagctttgtgccaccaccccttgaccaagaagagatggagtcctgagcacctggtttctgttctgttgatcccacttcactgtgaggggaaggccttttcacgggaactctccaaatattattcaagtgcctcttgttgcagagatttcctccatggtggaagggggtgtgcgtgcgtgtgcgtgcgtgttagtgtgtgtgcatgtgtgtgtctgtctttgtgggagggtaagacaatatgaacaaactatgatcacagtgactttacaggaggttgtggatgctccagggcagcctccaccttgctcttctttctgagagttggctcaggcagacaagagctgctgtccttttaggaatatgttcaatgcaaagtaaaaaaatatgaattgtccccaatcccggtcatgcttttgccactttggcttctcctgtgaccccaccttgacggtggggcgtagacttgacaacatcccacagtggcacggagagaaggcccataccttctggttgcttcagacctgacaccgtccctcagtgatacgtacagccaaaaaggaccaactggcttctgtgcactagcctgtgattaacttgcttagtatggttctcagatcttgacagtatatttgaaactgtaaatatgtttgtgccttaaaaggagagaagaaagtgtagatagttaaaagactgcagctgctgaagttctgagccgggcaagtcgagagggctgttggacagctgcttgtgggcccggagtaatcaggcagccttcataggcggtcatgtgtgcatgtgagcacatgcgtatatgtgcgtctctctttctccctcacccccaggtgttgccatttctctgcttacccttcacctttggtgcagaggtttcttgaatatctgccccagtagtcagaagcaggttcttgatgtcatgtacttcctgtgtactctttatttctagcagagtgaggatgtgttttgcacgtcttgctatttgagcatgcacagctgcttgtcctgctctcttcaggaggccctggtgtcaggcaggtttgccagtgaagacttcttgggtagtttagatcccatgtcacctcagctgatattatggcaagtgatatcacctctcttcagcccctagtgctattctgtgttgaacacaattgatacttcaggtgcttttgatgtgaaaatcatgaaaagaggaacaggtggatgtatagcatttttattcatgccatctgttttcaaccaactatttttgaggaattatcatgggaaaagaccagggcttttcccaggaatatcccaaacttcggaaacaagttattctcttcactcccaataactaatgctaagaaatgctgaaaatcaaagtaaaaaattaaagcccataaggccagaaactccttttgctgtctttctctaaatatgattactttaaaataaaaaagtaacaaggtgtcttttccactcctatggaaaagggtcttcttggcagcttaacattgacttcttggtttggggagaaataaattttgtttcagaattttgtatattgtaggaatccctttgagaatgtgattccttttgatggggagaaagggcaaattattttaatattttgtattttcaactttataaagataaaatatcctcaggggtggagaagtgtcgttttcataacttgctgaatttcaggcattttgttctacatgaggactcatatatttaagccttttgtgtaataagaaagtataaagtcacttccagtgttggctgtgtgacagaatcttgtatttgggccaaggtgtttccatttctcaatcagtgcagtgatacatgtactccagagggacagggtggaccccctgagtcaactggagcaagaaggaaggaggcagactgatggcgattccctctcacccgggactctccccctttcaaggaaagtgaacctttaaagtaaaggcctcatctcctttattgcagttcaaatcctcaccatccacagcaagatgaattttatcagccatgtttggttgtaaatgctcgtgtgatttcctacagaaatactgctctgaatattttgtaataaaggtctttgcacatgtgaccacatacgtgttaggaggctgcatgctctggaagcctggactctaagctggagctcttggaagagctcttcggtttctgagcataatgctcccatctcctgatttctctgaacagaaaacaaaagagagaatgagggaaattgctattttatttgtattcatgaacttggctgtaatcagttatgccgtataggatgtcagacaataccactggttaaaataaagcctatttttcaaattt

SEQ ID NO: 6963 - protein, 360 aa, Homo sapiens
  ref <308>: DATABASE ACCESSION NUMBER: SWISS-Prot / Q16539
  ref <309>: DATABASE ENTRY DATE: 2002-06-15
MSQERPTFYRQELNKTIWEVPERYQNLSPVGSGAYGSVCAAFDTKTGLRVAVKKLSRPFQSIIHAKRTYRELRLLKHMKHENVIGLLDVFTPARSLEEFNDVYLVTHLMGADLNNIVKCQKLTDDHVQFLIYQILRGLKYIHSADIIHRDLKPSNLAVNEDCELKILDFGLARHTDDEMTGYVATRWYRAPEIMLNWMHYNQTVDIWSVGCIMAELLTGRTLFPGTDHIDQLKLILRLVGTPGAELLKKISSESARNYIQSLTQMPKMNFANVFIGANPLAVDLLEKMLVLDSDKRITAAQALAHAYFAQYHDPDDEPVADPYDQSFESRDLLIDEWKSLTYDEVISFVPPPLDQEEMES

SEQ ID NO: 6964 - DNA, 663 bp, Rattus norvegicus
  ref <308>: DATABASE ACCESSION NUMBER: EMBL / AI171966
  ref <309>: DATABASE ENTRY DATE: 2000-03-03
gtaattccacaccagtttatttcttaggtgtgatcgtgacacagtgccttctgtgacaaggtggggctttcaggagggcactgaaccccctcctcagagcagctcacctcagaaaacacccgaggcagatttgattacgaataccccccaggccaccaatatttacatgggaaagtggaactgagtagaggaattatgacacaagaaagtggggtgtcctgaagatgctggggggcatgaaggcaccatcaaaagtctggatctccttctcagcgcggggctctgccctctagggccgtccttccgggtaggtggatccagggagaggagtgtagctggaggagtgagacttgcgccatctgaagaagccaagacagaagatgatgaagcccaggcccagggtggctgcagacacagagaccttcactgtctggatgggggacagcccgggtgtccagttcgcgcggatgggctcaggggtcccgctgtgctgtaccacgcaggtgtagatgtcccagtaggaaggggttaaggctaggtaggagacggtctggtatgtccagtccccgttaggctgagccgtcttctccttgttgctgtgggaagttacaagctgcccgttcttcatccacacgacggtcacatccgctggatagaaacccc

SEQ ID NO: 6965 - protein, 261 aa, Rattus norvegicus
  ref <308>: DATABASE ACCESSION NUMBER: SWISS-Prot / CAA89832
  ref <309>: DATABASE ENTRY DATE: 2003-02-01
MAALWPLLLALGLGCIGAGGFVAHVESTCLLDDEGTPMDFTYCISFNKDLLACWDPEEGQIVPCEYGVLFKLAEFISNILNKEEGLIQRLKNGLQDCSTHTQPFWNALTHRTRTPSVQVAQTAPFNTREPVMLACYVWGFYPADVTVVWMKNGQLVTSHSNKEKTAQPNGDWTYQTVSYLALTPSYWDIYTCVVQHSGTPEPIRANWTPGLSPIQTVKVSVSAATLGLGFIIFCLGFFRWRKSHSSSYTPLPGSTYPEGRP

SEQ ID NO: 6966 - DNA, 1362 bp, Homo sapiens
  ref <308>: DATABASE ACCESSION NUMBER: EMBL / U15085
  ref <309>: DATABASE ENTRY DATE: 1997-02-17
cctgtttgggacactggactcccgtgagctggaaggaacagatttaatatctaggggctgggtatccccacatcactcatttggggggtcaagggacccgggcaatatagtattctgctcagtgtctggagatcatctacccaggctggggcttctgggacaggcgaggacccacggaccctggaagagctggtccaggggactgaactcccggcatctttacagagcagagcatgatcacattcctgccgctgctgctggggctcagcctgggctgcacaggagcaggtggcttcgtggcccatgtggaaagcacctgtctgttggatgatgctgggactccaaaggatttcacatactgcatctccttcaacaaggatctgctgacctgctgggatccagaggagaataagatggccccttgcgaatttggggtgctgaatagcttggcgaatgtcctctcacagcacctcaaccaaaaagacaccctgatgcagcgcttgcgcaatgggcttcagaattgtgccacacacacccagcccttctggggatcactgaccaacaggacacggccaccatctgtgcaagtagccaaaaccactccttttaacacgagggagcctgtgatgctggcctgctatgtgtggggcttctatccagcagaagtgactatcacgtggaggaagaacgggaagcttgtcatgcctcacagcagtgcgcacaagactgcccagcccaatggagactggacataccagaccctctcccatttagccttaaccccctcttacggggacacttacacctgtgtggtagagcacattggggctcctgagcccatccttcgggactggacacctgggctgtcccccatgcagaccctgaaggtttctgtgtctgcagtgactctgggcctgggcctcatcatcttctctcttggtgtgatcagctggcggagagctggccactctagttacactcctcttcctgggtccaattattcagaaggatggcacatttcctagaggcagaatcctacaacttccactccaagtgagaaggagattcaaactcaatgatgctaccatgcctctccaacatcttcaaccccctgacattatcttggatcctatggtttctccatccaattctttgaatttcccagtctcccctatgtaaaacttagcaacttgggggacctcattcctgggactatgctgtaaccaaattattgtccaaggctatatttctgggatgaatataatctgaggaagggagttaaagaccctcctggggctctcagtgtgccatagaggacagcaactggtgattgtttcagagaaataaactttggtggaaaaa

SEQ ID NO: 6967 - protein, 263 aa, Homo sapiens
  ref <308>: DATABASE ACCESSION NUMBER: SWISS-Prot / P28068
  ref <309>: DATABASE ENTRY DATE: 2001-10-16
MITFLPLLLGLSLGCTGAGGFVAHVESTCLLDDAGTPKDFTYCISFNKDLLTCWDPEENKMAPCEFGVLNSLANVLSQHLNQKDTLMQRLRNGLQNCATHTQPFWGSLTNRTRPPSVQVAKTTPFNTREPVMLACYVWGFYPAEVTITWRKNGKLVMPHSSAHKTAQPNGDWTYQTLSHLALTPSYGDTYTCVVEHIGAPEPILRDWTPGLSPMQTLKVSVSAVTLGLGLIIFSLGVISWRRAGHSSYTPLPGSNYSEGWHIS

SEQ ID NO: 6968 - DNA, 550 bp, Rattus norvegicus
  ref <308>: DATABASE ACCESSION NUMBER: EMBL / AI172017
  ref <309>: DATABASE ENTRY DATE: 2000-03-03
agggctcagagaactgaccccgaggctttatctgctgatttttattgctcatttgtttaagcactgagggtggaacccagcatccagcacagaaggacccagtgagcgtgtgtgcgtgcgcgtggtagtctgcacagagctcctcccttccccagtttactggggacgctccccacacaccggccaccaaccctgccctgtttatcaaatcctgactttcttggcccaagacgctttggtgaaggggttttctcttggcaggcgcagtgtgcttggtggtggcttttctcaggatcttgttgggtttttgggcgctggctgaggaagcctgcacgccactttacgagttcttctgtggcactttgacggtgaccgtcttcacttccgtgtaggcctgcaggccatactcgcccagctccctgccgctccccgacatcttatagccaccaaatggggactgggccccaaacacatcgtagcagttgatccacacagtcccagcctgcagagcttgggacaggtaattggccttgtccaggtcctttgtgaa

SEQ ID NO: 6969 - protein, 519 aa, Rattus norvegicus
  ref <308>: DATABASE ACCESSION NUMBER: SWISS-Prot / P11884
  ref <309>: DATABASE ENTRY DATE: 2002-06-15
MLRAALSTARRGPRLSRLLSAAATSAVPAPNQQPEVFCNQIFINNEWHDAVSKKTFPTVNPSTGEVICQVAEGNKEDVDKAVKAAQAAFQLGSPWRRMDASDRGRLLYRLADLIERDRTYLAALETLDNGKPYVISYLVDLDMVLKCLRYYAGWADKYHGKTIPIDGDFFSYTRHEPVGVCGQIIPWNFPLLMQAWKLGPALATGNVVVMKVAEQTPLTALYVANLIKEAGFPPGVVNIVPGFGPTAGAAIASHEDVDKVAFTGSTEVGHLIQVAAGSSNLKRVTLELGGKSPNIIMSDADMDWAVEQAHFALFFNQGQCCCAGSRTFVQEDVYDEFVERSVARAKSRVVGNPFDSRTEQGPQVDETQFKKILGYIKSGQQEGAKLLCGGGAAADRGYFIQPTVFGDVKDGMTIAKEEIFGPVMQILKFKTIEEVVGRANNSKYGLAAAVFTKDLDKANYLSQALQAGTVWINCYDVFGAQSPFGGYKMSGSGRELGEYGLQAYTEVKTVTVKVPQKNS

SEQ ID NO: 6970 - DNA, 1603 bp, Homo sapiens
  ref <308>: DATABASE ACCESSION NUMBER: EMBL / K03001
  ref <309>: DATABASE ENTRY DATE: 1999-07-02
ctggcggccttggagaccctggacaatggcaagccctatgtcatctcctacctggtggatttggacatggtcctcaaatgtctccggtattatgccggctgggctgataagtaccacgggaaaaccatccccattgacggagacttcttcagctacacacgccatgaacctgtgggggtgtgcgggcagatcattccgtggaatttcccgctcctgatgcaagcatggaagctgggcccagccttggcaactggaaacgtggttgtgatgaaggtagctgagcagacacccctcaccgccctctatgtggccaacctgatcaaggaggctggctttccccctggtgtggtcaacattgtgcctggatttggccccacggctggggccgccattgcctcccatgaggatgtggacaaagtggcattcacaggctccactgagattggccgcgtaatccaggttgctgctgggagcagcaacctcaagagagtgaccttggagctgggggggaagagccccaacatcatcatgtcagatgccgatatggattgggccgtggaacaggcccacttcgccctgttcttcaaccagggccagtgctgctgtgccggctcccggaccttcgtgcaggaggacatctatgatgagtttgtggtgcggagcgttgcccgggccaagtctcgggtggtcgggaacccctttgatagcaagaccgagcaggggccgcaggtggatgaaactcagtttaagaagatcctcggctacatcaacacggggaagcaagagggggcgaagctgctgtgtggtgggggcattgctgctgaccgtggttacttcatccagcccactgtgtttggagatgtgcaggatggcatgaccatcgccaaggaggagatcttcgggccagtgatgcagatcctgaagttcaagaccatagaggaggttgttgggagagccaacaattccacgtacgggctggccgcagctgtcttcacaaaggatttggacaaggccaattacctgtcccaggccctccaggcgggcactgtgtgggtcaactgctatgatgtgtttggagcccagtcaccctttggtggctacaagatgtcggggagtggccgggagttgggcgagtacgggctgcaggcatacactgaagtgaaaactgtcacagtcaaagtgcctcagaagaactcataagaatcatgcaagcttcctccctcagccattgatggaaagttcagcaagatcagcaacaaaaccaagaaaaatgatccttgcgtgctgaatatctgaaaagagaaatttttcctacaaaatctcttgggtcaagaaagttctagaatttgaattgataaacatggtgggttggctgagggtaagagtatatgaggaaccttttaaacgacaacaatactgctagctttcaggatgatttttaaaaaatagattcaaatgtgttatcctctctctgaaacgcttcctataactcgagtttataggggaagaaaaagctattgtttacaattatatcaccattaaggcaactgctacaccctgctttgtattctgggctaagattcattaaaaactagctgctctt

SEQ ID NO: 6971 - protein, 517 aa, Homo sapiens
  ref <308>: DATABASE ACCESSION NUMBER: SWISS-Prot / P05091
  ref <309>: DATABASE ENTRY DATE: 2002-06-15
MLRAAARFGPRLGRRLLSAAATQAVPAPNQQPEVFCNQIFINNEWHDAVSRKTFPTVNPSTGEVICQVAEGDKEDVDKAVKAARAAFQLGSPWRRMDASHRGRLLNRLADLIERDRTYLAALETLDNGKPYVISYLVDLDMVLKCLRYYAGWADKYHGKTIPIDGDFFSYTRHEPVGVCGQIIPWNFPLLMQAWKLGPALATGNVVVMKVAEQTPLTALYVANLIKEAGFPPGVVNIVPGFGPTAGAAIASHEDVDKVAFTGSTEIGRVIQVAAGSSNLKRVTLELGGKSPNIIMSDADMDWAVEQAHFALFFNQGQCCCAGSRTFVQEDIYDEFVERSVARAKSRVVGNPFDSKTEQGPQVDETQFKKILGYINTGKQEGAKLLCGGGIAADRGYFIQPTVFGDVQDGMTIAKEEIFGPVMQILKFKTIEEVVGRANNSTYGLAAAVFTKDLDKANYLSQALQAGTVWVNCYDVFGAQSPFGGYKMSGSGRELGEYGLQAYTEVKTVTVKVPQKNS

SEQ ID NO: 6972 - DNA, 550 bp, Rattus norvegicus; identical to SEQ ID NO: 6968
  ref <308>: DATABASE ACCESSION NUMBER: EMBL / AI172017
  ref <309>: DATABASE ENTRY DATE: 2000-03-03

SEQ ID NO: 6973 - protein, 519 aa, Rattus norvegicus; identical to SEQ ID NO: 6969
  ref <308>: DATABASE ACCESSION NUMBER: SWISS-Prot / P11884
  ref <309>: DATABASE ENTRY DATE: 2002-06-15

SEQ ID NO: 6974 - DNA, 1603 bp, Homo sapiens; identical to SEQ ID NO: 6970
  ref <308>: DATABASE ACCESSION NUMBER: EMBL / K03001
  ref <309>: DATABASE ENTRY DATE: 1999-07-02

SEQ ID NO: 6975 - protein, 517 aa, Homo sapiens; identical to SEQ ID NO: 6971
  ref <308>: DATABASE ACCESSION NUMBER: SWISS-Prot / P05091
  ref <309>: DATABASE ENTRY DATE: 2002-06-15

SEQ ID NO: 6976 - DNA, 471 bp, Rattus norvegicus
  ref <308>: DATABASE ACCESSION NUMBER: EMBL / AI172247
  ref <309>: DATABASE ENTRY DATE: 2000-03-03
gccttccatgatgcaaacgtaggtggaggtttttatgtccctctgctgtctcgctgaaaactatgagtgtgactctggggttaaagcatggcactttgagtgacttgagcgatgtaagctttctgaatatggcatgcagatctagaggaactttggtttaagattcaggaggtgtgtgaggattctggttacatacaccattgagtgagtagggacataacacaaatgcttcctaaactcatttcaaacacgtggtcaaagtggactcgaaatcatccaagctgctgattcgccccttaggccaacagctccccatttgcttattggtttgtttgcagctcttatttggatcaaaattgcccatcttcttgaaaatgtcatcctgctgagtcccacgcggcatgcggaaatctggatactacaggatgtgcttgtggctccaaggaatccttgctgcggtacaaaccactg

SEQ ID NO: 6977 - protein, 1330 aa, Rattus norvegicus
  ref <308>: DATABASE ACCESSION NUMBER: SWISS-Prot / P22985
  ref <309>: DATABASE ENTRY DATE: 2002-06-15
TADELVFFVNGKKVVEKNADPETTLLVYLRRKLGLCGTKLGCGEGGCGACTVMISKYDRLQNKIVHFSVNACLAPICSLHHVAVTTVEGIGNTQKLHPVQERIARSHGSQCGFCTPGIVMSMYTLLRNQPEPTVEEIENAFQGNLCRCTGYRPILQGFRTFAKDGGCCGGSGNNPNCCMNQTKDQTVSLSPSLFNPEDFKPLDPTQEPIFPPELLRLKDTPQKKLRFEGERVTWIQASTMEELLDLKAQHPDAKLVVGNTEIGIEMKFKNMLFPLIVCPAWIPELNSVVHGPEGISFGASCPLSLVESVLAEEIAKLPEQKTEVFRGVMEQLRWFAGKQVKSVASIGGNIITASPISDLNPVFMASGAKLTLVSRGTRRTVRMDHTFFPGYRKTLLRPEEILLSIEIPYSKEGEFFSAFKQASRREDDIAKVTSGMRVLFKPGTIEVQELSLCFGGMADRTISALKTTPKQLSKSWNEELLQSVCAGLAEELQLAPDAPGGMVEFRRTLTLSFFFKFYLTVLQKLGRADLEDMCGKLDPTFASATLLFQKDPPANVQLFQEVPKDQSEEDMVGRPLPHLAANMQASGEAVYCDDIPRYENELSLRLVTSTRAHAKITSIDTSEAKKVPGFVCFLTAEDVPNSNATGLFNDETVFAKDEVTCVGHIIGAVVADTPEHAQRAARGVKITYEDLPAIITIQDAINNNSFYGSEIKIEKGDLKKGFSEADNVVSGELYIGGQEHFYLETNCTIAVPKGEAGEMELFVSTQNTMKTQSFVAKMLGVPDNRIVVRVKRMGGGFGGKETRSTVVSTALALAAHKTGRPVRCMLDRDEDMLITGGRHPFLAKYKVGFMKTGTVVALEVAHFSNGGNTEDLSRSIMERALFHMDNAYKIPNIRGTGRICKTNLPSNTAFRGFGGPQGMLIAEYWMSEVAITCGLPAEEVRRKNMYKEGDLTHFNQKLEGFTLPRCWDECIASSQYLARKREVEKFNRENCWKKRGLCIIPTKFGISFTLPFLNQGGALVHVYTDGSVLLTHGGTEMGQGLHTKMVQVASRALKIPTSKIHISETSTNTVPNTSPTAASASADLNGQGVYEACQTILKRLEPFKKKKPTGPWEAWVMDAYTSAVSLSATGFYKTPNLGYSFETNSGNPFHYFSYGVACSEVEIDCLTGDHKNLRTDIVMDVGSSLNPAIDIGQVEGAFVQGLGLFTMEELHYSPEGSLHTRGPSTYKIPAFGSIPIEFRVSLLRDCPNKRAIYASKAVGEPPLFLASSIFFAIKDAIRAARAQHGDNAKQLFQLDSPATPEKIRNACVDQFTTLCVTGVPENCKSWSVRI

SEQ ID NO: 6978 - DNA, 4404 bp, Homo sapiens
  ref <308>: DATABASE ACCESSION NUMBER: EMBL / D11456
  ref <309>: DATABASE ENTRY DATE: 2000-09-26
cgaattccgtctcttaggagtgaggtacctggagttcggggaccccaacctgtgacaatgacagcagacaaattggttttctttgtgaatggcagaaaggtggtggagaaaaatgcagatccagagacaacccttttggcctacctgagaagaaagttggggctgagtggaaccaagctcggctgtggagaggggggctgcggggcttgcacagtgatgctctccaagtatgatcgtctgcagaacaagatcgtccacttttctgccaatgcctgcctggcccccatctgctccttgcaccatgttgcagtgacaactgtggaaggaataggaagcaccaagacgaggctgcatcctgtgcaggagagaattgccaaaagccacggctcccagtgcgggttctgcacccctggcatcgtcatgagtatgtacacactgctccggaatcagcccgagcccaccatggaggagattgagaatgccttccaaggaaatctgtgccgctgcacaggctacagacccatcctccagggcttccggacctttgccagggatggtggatgctgtggaggagatgggaataatccaaattgctgcatgaaccagaagaaagaccactcagtcagcctctcgccatctttattcaaaccagaggagttcacgcccctggatccaacccaggagcccatttttcccccagagttgctgaggctgaaagacactcctcggaagcagctgcgatttgaaggggagcgtgtgacgtggatacaggcctcaaccctcaaggagctgctggacctcaaggctcagcaccctgacgccaagctggtcgtggggaacacggagattggcattgagatgaagttcaagaatatgctgtttcctatgattgtctgcccagcctggatccctgagctgaattcggtagaacatggacccgacggtatctcctttggagctgcttgccccctgagcattgtggaaaaaaccctggtggatgctgttgctaagcttcctgcccaaaagacagaggtgttcagaggggtcctggagcagctgcgctggtttgctgggaagcaagtcaagtctgtggcgtccgttggagggaacatcatcactgccagccccatctccgacctcaaccccgtgttcatggccagtggggccaagctgacacttgtgtccagaggcaccaggagaactgtccagatggaccacaccttcttccctggctacagaaagaccctgctgagcccggaggagatactgctctccatagagatcccctacagcagggagggggagtatttctcagcattcaagcaggcctcccggagagaagatgacattgccaaggtaaccagtggcatgagagttttattcaagccaggaaccacagaggtacaggagctggccctttgctatggtggaatggccaacagaaccatctcagccctcaagaccactcagaggcagctttccaagctctggaaggaggagctgctgcaggacgtgtgtgcaggactggcagaggagctgcatctgcctcccgatgcccctggtggcatggtggacttccggtgcaccctcaccctcagcttcttcttcaagttctacctgacagtccttcagaagctgggccaagagaacctggaagacaagtgtggtaaactggaccccactttcgccagtgcaactttactgtttcagaaagaccccccagccgatgtccagctcttccaagaggtgcccaagggtcagtctgaggaggacatggtgggccggcccctgccccacctggcagcggacatgcaggcctctggtgaggccgtgtactgtgacgacattcctcgctacgagaatgagctgtctctccggctggtcaccagcacccgggcccacgccaagatcaagtccatagatacatcagaagctaagaaggttccagggtttgtttgtttcatttccgctgatgatgttcctgggagtaacataactggaatttgtaatgatgagacagtctttgcgaaggataaggttacttgtgttgggcatatcattggtgctgtggttgctgacaccccggaacacacacagagagctgcccaaggggtgaaaatcacctatgaagaactaccagccattatcacaattgaggatgctataaagaacaactccttttatggacctgagctgaagatcgagaaaggggacctaaagaaggggttttccgaagcagataatgttgtgtcaggggagatatacatcggtggccaagagcacttctacctggagactcactgcaccattgctgttccaaaaggcgaggcaggggagatggagctctttgtgtctacacagaacaccatgaagacccagagctttgttgcaaaaatgttgggggttccagcaaaccggattgtggttcgagtgaagagaatgggaggaggctttggaggcaaggagacccggagcactgtggtgtccacggcagtggccctggctgcatataagaccggccgccctgtgcgatgcatgctggaccgtgatgaggacatgctgataactggtggcagacatcccttcctggccagatacaaggttggcttcatgaagactgggacagttgtggctcttgaggtggaccacttcagcaatgtggggaacacccaggatctctctcagagtattatggaacgagctttattccacatggacaactgctataaaatccccaacatccggggcactgggcggctgtgcaaaaccaaccttccctccaacacggccttccggggctttggggggccccaggggatgctcattgccgagtgctggatgagtgaagttgcagtgacctgtgggatgcctgcagaggaggtgcggagaaaaaacctgtacaaagaaggggacctgacacacttcaaccagaagcttgagggtttcaccttgcccagatgctgggaagaatgcctagcaagctctcagtatcatgctcggaagagtgaggttgacaagttcaacaaggagaattgttggaaaaagagaggattgtgcataattcccaccaagtttggaataagcttcacagttccttttctgaatcaggcaggagccctacttcatgtgtacacagatggctctgtgctgctgacccacggggggactgagatgggccaaggccttcataccaaaatggtccaggtggccagtagagctctgaaaatccccacctctaagatttatatcagcgagacaagcactaacactgtgcccaacacctctcccacggctgcctctgtcagcgctgacctcaatggacaggccgtctatgcggcttgtcagaccatcttgaaaaggctggaaccctacaagaagaagaatcccagtggctcctgggaagactgggtcacagctgcctacatggacacagtgagcttgtctgccactgggttttatagaacacccaatctgggctacagctttgagactaactcagggaaccccttccactacttcagctatggggtggcttgctctgaagtagaaatcgactgcctaacaggagatcataagaacctccgcacagatattgtcatggatgttggctccagtctaaaccctgccattgatattggacaggtggaaggggcatttgtccagggccttggcctcttcaccctagaggagctacactattcccccgaggggagcctgcacacccgtggccctagcacctacaagatcccggcatttggcagcatccccattgagttcagggtgtccctgctccgcgactgccccaacaagaaggccatctatgcatcgaaggctgttggagagccgcccctcttcctggctgcttctatcttctttgccatcaaagatgccatccgtgcagctcgagctcagcacacaggtaataacgtgaaggaactcttccggctagacagccctgccaccccggagaagatccgcaatgcctgcgtggacaagttcaccaccctgtgtgtcactggtgtcccagaaaactgcaaaccctggtctgtgagggtctaaagagagagtcctcagcagagtcttcttgtgctgcctttgggcttccatggagcaggaggaacataccacagaacatggatctattaaagtcacagaatgacagacctgtgatttgtcaagatgggatttggaagacaagtgaatgcaatggaagattttgatcaaaaatgtaatttgtaaacacaatgataagcaaattcaaaactgttatgcctaaatggtgaatatgcaattaggatcattttctgtctgttttaatcatgtatctggaatagggtcgggaagggtttgtgctattccccacttactggacagcctgtataacctcaaaaaaaaaaaaaaaaa

SEQ ID NO: 6979 - protein, 1332 aa, Homo sapiens
  ref <308>: DATABASE ACCESSION NUMBER: SWISS-Prot / P47989
  ref <309>: DATABASE ENTRY DATE: 2002-06-15
TADKLVFFVNGRKVVEKNADPETTLLAYLRRKLGLSGTKLGCGEGGCGACTVMLSKYDRLQNKIVHFSANACLAPICSLHHVAVTTVEGIGSTKTRLHPVQERIAKSHGSQCGFCTPGIVMSMYTLLRNQPEPTMEEIENAFQGNLCRCTGYRPILQGFRTFARDGGCCGGDGNNPNCCMNQKKDHSVSLSPSLFKPEEFTPLDPTQEPIFPPELLRLKDTPRKQLRFEGERVTWIQASTLKELLDLKAQHPDAKLVVGNTEIGIEMKFKNMLFPMIVCPAWIPELNSVEHGPDGISFGAACPLSIVEKTLVDAVAKLPAQKTEVFRGVLEQLRWFAGKQVKSVASVGGNIITASPISDLNPVFMASGAKLTLVSRGTRRTVQMDHTFFPGYRKTLLSPEEILLSIEIPYSREGEYFSAFKQASRREDDIAKVTSGMRVLFKPGTTEVQELALCYGGMANRTISALKTTQRQLSKLWKEELLQDVCAGLAEELHLPPDAPGGMVDFRCTLTLSFFFKFYLTVLQKLGQENLEDKCGKLDPTFASATLLFQKDPPADVQLFQEVPKGQSEEDMVGRPLPHLAADMQASGEAVYCDDIPRYENELSLRLVTSTRAHAKIKSIDTSEAKKVPGFVCFISADDVPGSNITGICNDETVFAKDKVTCVGHIIGAVVADTPEHTQRAAQGVKITYEELPAIITIEDAIKNNSFYGPELKIEKGDLKKGFSEADNVVSGEIYIGGQEHFYLETHCTIAVPKGEAGEMELFVSTQNTMKTQSFVAKMLGVPANRIVVRVKRMGGGFGGKETRSTVVSTAVALAAYKTGRPVRCMLDRDEDMLITGGRHPFLARYKVGFMKTGTVVALEVDHFSNVGNTQDLSQSIMERALFHMDNCYKIPNIRGTGRLCKTNLPSNTAFRGFGGPQGMLIAECWMSEVAVTCGMPAEEVRRKNLYKEGDLTHFNQKLEGFTLPRCWEECLASSQYHARKSEVDKFNKENCWKKRGLCIIPTKFGISFTVPFLNQAGALLHVYTDGSVLLTHGGTEMGQGLHTKMVQVASRALKIPTSKIYISETSTNTVPNTSPTAASVSADLNGQAVYAACQTILKRLEPYKKKNPSGSWEDWVTAAYMDTVSLSATGFYRTPNLGYSFETNSGNPFHYFSYGVACSEVEIDCLTGDHKNLRTDIVMDVGSSLNPAIDIGQVEGAFVQGLGLFTLEELHYSPEGSLHTRGPSTYKIPAFGSIPIEFRVSLLRDCPNKKAIYASKAVGEPPLFLAASIFFAIKDAIRAARAQHTGNNVKELFRLDSPATPEKIRNACVDKFTTLCVTGVPENCKPWSVRV

SEQ ID NO: 6980 - DNA, 617 bp, Rattus norvegicus
  ref <308>: DATABASE ACCESSION NUMBER: EMBL / AI172411
  ref <309>: DATABASE ENTRY DATE: 2000-03-03
gctgcagaaagacgtttattgggcagatggggtgcgagagatgccagtggacagagtgagaagaaggcatgtcctccagagagggggatggtgtccctgcctgggagcctaagcctgaatgcactaagggctggcaccacagacgggctcaggggaggcccgcccacaagggcttcgggcccctccttcatggagacaccacccctgacttggagcacatggccatcgtgctcaccgttgtctcggctcttctcaggagcactgtgggatggggttggagacttaggagggtccttcaggagggatgaaggaggctggtggcatagtgagcccggatgtgtcatgtgggcatatgggagatgctggccccaagaatgatgttcaggtttgagcaggaccattggacttagaacttgtgtttgctttgggcttatttggaacgggaagctggagaaagtgtgaaggtgttgtaccaaaccgtgagcacagatggtctgtccctgggttccaggcaggcagtgcatggcacacagtgggacagttgccacatgtgcacagtggtacaggcacacagttgtgccaagcttgtcttttatgtaataaggaagggaatctgg

SEQ ID NO: 6981 - protein, 226 aa, Rattus norvegicus
  ref <308>: DATABASE ACCESSION NUMBER: SWISS-Prot / P23764
  ref <309>: DATABASE ENTRY DATE: 2001-10-16
MSRILRASCLLSLLLAGFVPPGRGQEKSKTDCHGGMSGTIYEYGALTIDGEEYIPFKQYAGKYILFVNVASYCGLTDQYLELNALQEELGPFGLVILGFPCNQFGKQEPGENSEILPSLKYVRPGGGFVPNFQLFEKGDVNGEKEQKFYTFLKNSCPPTAELLGSPGRLFWEPMKIHDIRWNFEKFLVGPDGIPIMRWYHRTTVSNVKMDILSYMRRQAALGARGK

SEQ ID NO: 6982 - DNA, 373 bp, Homo sapiens
  ref <308>: DATABASE ACCESSION NUMBER: EMBL / AI245240
  ref <309>: DATABASE ENTRY DATE: 2000-03-03
tttttttttttttttttttttttttttttggcggcaaaaaggctttaacggggcaaacggggggagccccaacccaggggaccagggaggggggagggcacgccccccgaaggagcagggggggcatccctgcccaggggcctaaccctgaaggcactaagggctggcccctcaaacaggctcagggaggcccgcccacaagggcttggggcccctccctcatgaaaaccccacccctgccagggggcccggggcccttgctatcacatctgcctgtggtgaactcaaggaggtgatccctctcagggaaaactgggggggggggaggacccttgggagggcccttcaggaaataggaaggggggggtgggga

SEQ ID NO: 6983 - protein, 226 aa, Homo sapiens
  ref <308>: DATABASE ACCESSION NUMBER: SWISS-Prot / P22352
  ref <309>: DATABASE ENTRY DATE: 2002-06-15
MARLLQASCLLSLLLAGFVSQSRGQEKSKMDCHGGISGTIYEYGALTIDGEEYIPFKQYAGKYVLFVNVASYCGLTGQYIELNALQEELAPFGLVILGFPCNQFGKQEPGENSEILPTLKYVRPGGGFVPNFQLFEKGDVNGEKEQKFYTFLKNSCPPTSELLGTSDRLFWEPMKVHDIRWNFEKFLVGPDGIPIMRWHHRTTVSNVKMDILSYMRRQAALGVKRK

SEQ ID NO: 6984 - DNA, 441 bp, Rattus norvegicus
  ref <308>: DATABASE ACCESSION NUMBER: EMBL / AI175764
  ref <309>: DATABASE ENTRY DATE: 2000-03-03
atgcttaaaaatatatatgtattggggcatggttaatcctggctaattaaaatatgcattacctcaaaacatgatcaaagctttctcataatactgtaccggaatagtttaaatgcatcattaacattccgattgcattatccagtagttaatcaacagaatattaaatctttgcccaaaaaacttttggaacaggaactcaaaagcccaaaactcagctactcttggggctcccatctccagttctcttaatcctggctaaaacagcggccttaaaaacttttttccggtcgtaagccaggcccagggcagccatgcagtcgatgaaaaacgtggtgaaattgatgtgccagcggtactcactggcaaagtagtcctaggggaaggcctgatggtagttgtggaaacccttgcccacggtacccagggaaaccaggatgt

SEQ ID NO: 6985 - protein, 358 aa, Rattus norvegicus
  ref <308>: DATABASE ACCESSION NUMBER: SWISS-Prot / P07308
  ref <309>: DATABASE ENTRY DATE: 2002-06-15
MPAHMLQEISSSYTTTTTITEPPSGNLQNGREKMKKVPLYLEEDIRPEMREDIHDPSYQDEEGPPPKLEYVWRNIILMALLHVGALYGITLIPSSKVYTLLWGIFYYLISALGITAGAHRLWSHRTYKARLPLRIFLIIANTMAFQNDVYEWARDHRAHHKFSETHADPHNSRRGFFFSHVGWLLVRKHPAVKEKGGKLDMSDLKAEKLVMFQRRYYKPGLLLMCFILPTLVPWYCWGETFLHSLFVSTFLRYTLVLNATWLVNSAAHLYGYRPYDKNIQSRENILVSLGSVGEGFHNYHHAFPYDYSASEYRWHINFTTFFIDCMAALGLAYDRKKVSKAAVLARIKRTGDGSHKSS

SEQ ID NO: 6986 - DNA, 5221 bp, Homo sapiens; identical to SEQ ID NO: 758
  ref <308>: DATABASE ACCESSION NUMBER: EMBL / AF097514
  ref <309>: DATABASE ENTRY DATE: 2000-03-03

SEQ ID NO: 6987 - protein, 359 aa, Homo sapiens; identical to SEQ ID NO: 759
  ref <308>: DATABASE ACCESSION NUMBER: SWISS-Prot / O00767
  ref <309>: DATABASE ENTRY DATE: 2002-06-15

SEQ ID NO: 6988 - DNA, 448 bp, Rattus norvegicus
  ref <308>: DATABASE ACCESSION NUMBER: EMBL / AI175935
  ref <309>: DATABASE ENTRY DATE: 2000-03-03
gaaagaagaagacattgcactgactccgttacatttattgaggaggtaggggaggacggcagaggggtgacaggagatttacctacatggagagggtcagggggtctgaggggctgtgcaggaatgcagtgactgtctctctaggcaaagaggagagggggcgtctgtaagtacctggtgcaaatcctgtaataaaacctaccttcacgaatgggtacagtggaatactacctgcggcattcatacgtgcttctaaacttttctatatacagtatatggtcacttttttataaatgtacagcttgggtggggggggagatctttcttcttataagcacaacattaaacataaaaccaacatgggccagccacattacaagcaaagaccaagggaaagcaagaccatcagtcagcccagcacccaacttcctccccaccagcagtctta

SEQ ID NO: 6989 - DNA, 586 bp, Rattus norvegicus
  misc_feature (1)..(586): n=a, c, g or t
  ref <308>: DATABASE ACCESSION NUMBER: EMBL / AI176021
  ref <309>: DATABASE ENTRY DATE: 2000-03-03
cctgtcaccattgccagggctgggaacgccggagagttgctctctccccttctcctgcctccaacacggcggcggcggcggcggcacgtccagggacccgggccggtgttaagcctcccgtccgccgccgccgcaccccccctggcccgggctccggaggccgccggaggaggcagccgctgcgaggattatccgtcttctccccattccgctgcttcggctgccaggcctctggctgctgaggagaagcaggcccagtcgctgcaaccatccagcagccgccgcagcagccattacccggctgcggtccagggccaagcggcagcagagcgaggggcatcagcgaccgccaagtccagagccatttccatcctgcagaagaagcctcgccaccagcagcttctgccatctctctcctcctttttcttcagccacaggctcccagacatgacagccatcatcaaagagatcgttagcagaaacaaaaggagatatcaagaggatggattcgacttagacttgacctatatttatccaaatattattgctatgggatttcctgcagaaagacttgaangtgtataca

SEQ ID NO: 6990 - protein, 403 aa, Rattus norvegicus
  ref <308>: DATABASE ACCESSION NUMBER: Refseq / NP_032986
  ref <309>: DATABASE ENTRY DATE: 2002-01-07
MTAIIKEIVSRNKRRYQEDGFDLDLTYIYPNIIAMGFPAERLEGVYRNNIDDVVRFLDSKHKNHYKIYNLCAERHYDTAKFNCRVAQYPFEDHNPPQLELIKPFCEDLDQWLSEDDNHVAAIHCKAGKGRTGVMICAYLLHRGKFLKAQEALDFYGEVRTRDKKGVTIPSQRRYVYYYSYLLKNHLDYRPVALLFHKMMFETIPMFSGGTCNPQFVVCQLKVKIYSSNSGPTRREDKFMYFEFPQPLPVCGDIKVEFFHKQNKMLKKDKMFHFWVNTFFIPGPEETSEKVENGSLCDQEIDSICSIERADNDKEYLVLTLTKNDLDKANKDKANRYFSPNFKVKLYFTKTVEEPSNPEASSSTSVTPDVSDNEPDHYRYSDTTDSDPENEPFDEDQHSQITKV

SEQ ID NO: 6991 - DNA, 804 bp, Homo sapiens; identical to SEQ ID NO: 6438
  ref <308>: DATABASE ACCESSION NUMBER: EMBL / BI823499
  ref <309>: DATABASE ENTRY DATE: 2001-10-08

SEQ ID NO: 6992 - DNA, 587 bp, Rattus norvegicus
  ref <308>: DATABASE ACCESSION NUMBER: EMBL / AI176052
  ref <309>: DATABASE ENTRY DATE: 2000-03-03
tctgactaactgaacaaaggttagatgattaccagttgctctctctcttttttttttttttttttttttttttttttggttcttttttttttttggttcttttttttttcggagctggggaccgaacccagggccttgtacttcctaggcaagcgctttaccactgagctaaatccccaaccccaccagttgctctcttaattgtgctctgagtttgtttgtttcaacatgtctgacgttttgaattgcacatccatggaagacaactagataaacacacggtcagccttagtttctgactcattaggcagagccattaggactaaatcataattttcagagaagtcttaggaaaagagcttcgaaatacagaggccaggggaggagtggaggaggccctgcttcatcccgccaagtgccttcctcagggagtaacagaggctttttggatggtttctggaactttcatttgcaggaaggagtattcgtggggccaaatcttgttggtttctgttcccgaaaatgtttccaacaccccttttttctgggaatactgcaggaccggctttgtctgggctttatacgcc

SEQ ID NO: 6993 - protein, 226 aa, Rattus norvegicus
  ref <308>: DATABASE ACCESSION NUMBER: SWISS-Prot / P29411
  ref <309>: DATABASE ENTRY DATE: 2002-06-15
GASGRLLRAVIMGAPGSGKGTGSSRITKHFELKHLSSGDLLRQNMLQGTEIAVLAKSFIDQGKLIPDDDMTRLALHELKNLTQCSWLLDGFPRTLPQAEALDRVYQIDTVINLNVPFEVIKLRLTARWIHPASGRVYNIEFNPPKTVGIDDLTGEPLIQREDDKPETVIKRLKAYEAQTEPVLQYYQKKGVLETFSGTETNKIRPHVYSFLQMKVPETIQKASVTP

SEQ ID NO: 6994 - DNA, 684 bp, Homo sapiens
  ref <308>: DATABASE ACCESSION NUMBER: EMBL / AB021870
  ref <309>: DATABASE ENTRY DATE: 2002-01-22
atgggggcgtcggggcggctgctgcgagcggtgatcatgggggccccgggctcgggcaagggcaccgtgtcgtcccgcatcactacacacttcgagctgaagcacctctcccgcggggacctgctccgggacaacatgctgcggggcacagaaattggcgtgttagcccaggctttcattgaccaagggaaactcatcccagattatgtcacgactcggctggcccttcatgagctgaaaaacctcacccagtatagctggctgttggatggttttccaaggacacttccacaggcagaagccctagatagagcttatcagatcgacacagtgattaacctgaatgtgccctttgaggtcattaaacaacgccttactgctcgctggattcatcccgccagtggccgagtctataacattgaattcaaccctcccaaaactgtgggcattgatgacctgactggggagcctctcattcagcgtgaggatgataaaccagagacggttatcaagagactaaaggcttatgaagaccaaacaaagccagtcctggaatattaccagaaaaaaggggtgttggaaacattctccggaacagaaaccaacaagatttggccctatgtatatgctttcctacaaactaaagttccacaaagaagccagaaagcttcagttactccatga

SEQ ID NO: 6995 - protein, 226 aa, Homo sapiens
  ref <308>: DATABASE ACCESSION NUMBER: SWISS-Prot / Q9UIJ7
  ref <309>: DATABASE ENTRY DATE: 2002-06-15
GASGRLLRAVIMGAPGSGKGTVSSRITTHFELKHLSRGDLLRDNMLRGTEIGVLAQAFIDQGKLIPDYVTTRLALHELKNLTQYSWLLDGFPRTLPQAEALDRAYQIDTVINLNVPFEVIKQRLTARWIHPASGRVYNIEFNPPKTVGIDDLTGEPLIQREDDKPETVIKRLKAYEDQTKPVLEYYQKKGVLETFSGTETNKIWPYVYAFLQTKVPQRSQKASVTP

SEQ ID NO: 6996 - DNA, 469 bp, Rattus norvegicus
  ref <308>: DATABASE ACCESSION NUMBER: EMBL / AI176170
  ref <309>: DATABASE ENTRY DATE: 2000-03-03
gaaaaaagccagcataaagcacttttattgcaataataaaacttgaaccgcatatgtagtgcaaaggcaggggacaaaagctttctctcaccaaatcactacacgggacagcagagggtgaaaaggaactgaaggaggaaaagccaggaagctgggatcagcagagagccaagcatcaaaacctgggagatgctgaagctgtgatgaccagcatcattttcttagagaacactcaaggatttgttgtggtggctgggcatccactgggtggtgagtctacaaacagcaccttcagtttaaactttccaccgaagttctagaatttagtaagtggagcgtgatagttacaagattacaaaagtccagaaaatccattagaaaaaccataggatgaaaaacaaattaagccaggtcacaaagaaggcttcaaaggtccctgccgacccagggacagatattgtagtgttca

SEQ ID NO: 6997 - protein, 107 aa, Rattus norvegicus
  ref <308>: DATABASE ACCESSION NUMBER: SWISS-Prot / Q62658
  ref <309>: DATABASE ENTRY DATE: 2002-06-15
GVQVETISSGDGRTFPKRGQTCVVHYTGMLEDGKKFDSSRDRNKPFKFTLGKQEVIRGWEEGVAQMSVGQRAKLIISPDYAYGATGHPGIIPPHATLVFDVELLKLE

SEQ ID NO: 6998 - DNA, 540 bp, Rattus norvegicus
  ref <308>: DATABASE ACCESSION NUMBER: EMBL / AI176351
  ref <309>: DATABASE ENTRY DATE: 2000-03-03
ttgagttctctgataaatacatagagttttaatgatcagtattcgatagtggatgaagacatgcattagttagactagaaatgccacacatttgttcatatatttgttcactataaaattttctgtttcgaaatttaacgttttggttcccattttagaatacacaataatcaggaggatacatgatggggagccagttttcagtaaaagacgcacaatgggtccatccgagtaatttcatcagttgaatacaatttttccagttttcttttgttggtttttcttctacgagtttggttgcaaacttaaggcctctcccgtacatcttatttactaatgcatgcttgtatgcaaatgtcaaaaccttagtgtcaaaaagatctgtccactttgtagtttcccaataggtttctgatagagattccaaggtactttctccttcctcttcttttgcttctgcatcttcagctgctgccccatcgtggggctgtgcatgaagaaagtggtctgccagagcacattctttcctgcagagggcat

SEQ ID NO: 6999 - protein, 1249 aa, Rattus norvegicus
  ref <308>: DATABASE ACCESSION NUMBER: SWISS-Prot / Q64560
  ref <309>: DATABASE ENTRY DATE: 2002-06-15
MATAATEEPFPFHGLLPKKETGASSFLCRYPEYDGRGVLIAVLDTGVDPGAPGMQVTTDGKPKIIDIIDTTGSGDVNTATEVEPKDGEITGLSGRVLKIPANWTNPSGKYHIGIKNGYDFYPKALKERIQKERKEKIWDPIHRVALAEACRKQEEFDIANNGSSQANKLIKEELQSQVELLNSFEKKYSDPGPVYDCLVWHDGETWRACVDSNENGDLGKSTVLRNYKEAQEYGSFGTAEMLNYSVNIYDDGNLLSIVTSGGAHGTHVASIAAGHFPEEPERNGVAPGAQILSIKIGDTRLSTMETGTGLIRAMIEVINHKCDLVNYSYGEATHWPNSGRICEVINEAVWKHNTIYVSSAGNNGPCLSTVGCPGGTTSSVIGVGAYVSPDMMVAEYSLREKLPANQYTWSSRGPSADGALGVSISAPGGAIASVPNWTLRGTQLMNGTSMSSPNACGGIALVLSGLKANNVDYTVHSVRRALENTAIKADNIEVFAQGHGIIQVDKAYDYLIQNTSFANRLGFTVTVGNNRGIYLRDPVQVAAPSDHGVGIEPVFPENTENSEKISFQLHLALTSNSSWVQCPSHLELMNQCRHINIRVDPRGLREGLHYTEVCGYDIASPNAGPLFRVPITAVIAAKVNESSHYDLAFTDVHFKPGQIRRHFVEVPEGATWAEVTVCSCSSEVSAKFVLHAVQLVKQRAYRSHEFYKFCSLPEKGTLIEAFPVLGGKAIEFCIARWWASLSDVNIDYTISFHGIVCTAPQLNIHASEGINRFDVQSSLKYEDLAPCITLKSWVQTLRPVNAKTRPLGSRDVLPNNRQLYEMVLTYSFHQPKSGEVTPSCPLLCELLYESEFDSQLWIIFDQNKRQMGSGDAYPHQYSLKLEKGDYTIRLQIRHEQISDLDRLKDLPFIVSHRLSNTLSLDIHENHSLALLGKKKSSSLTLPPKYNQPFFVTSLPDDKIPKGAGPGCYLAGSLTLSKTELGKKADVIPVHYYLIPPPTKTKNGSKDKEKDSEKEKDLKEEFTEALRDLKIQWMTKLDSTDIYNELKETYPAYLPLYVARLHQLDAEKERMKRLNEIVDAANAVISHIDQTALAVYIAMKTDPRPDAATIKNDMDKQKSTLVDALCRKGCALADHLLHAQPHDGAAAGDAEAKEEEGESTLESLSETYWETTKWTDLFDTKVLTFAYKHALVNKMYGRGLKFATKLVEEKPTKENWKNCIQLMKLLGWTHCASFTENWLPIMYPPDYCVF

SEQ ID NO: 7000 - DNA, 409 bp, Homo sapiens
  ref <308>: DATABASE ACCESSION NUMBER: EMBL / BF511874
  ref <309>: DATABASE ENTRY DATE: 2000-12-08
cggccgcaaatgttttttagaaaggtaagaaaataaattttactgtctccatttctttttaattaatagagcctgcattgattctaatgaagatggggacttgagtaaatctaccgtgttgagaaactacaaagaagcccaagaatatggctcttttggcacagctgagatgttgaattactccgttaatatatacgatgatggaaacctgctctccattgtgaccagtggaggtatcccatttcagattgaccaatgagatatagatttatgaggtgataaagtggtacgttgcgatagctcacagcaaccttctagagaattttaagctagagatcgtagctaaaggactaggtccagaatcataaaggtgatttgatttacctgcaagatgttgttttttaaggtc

SEQ ID NO: 7001 - protein, 1249 aa, Homo sapiens
  ref <308>: DATABASE ACCESSION NUMBER: SWISS-Prot / P29144
  ref <309>: DATABASE ENTRY DATE: 2002-06-15
MATAATEEPFPFHGLLPKKETGAASFLCRYPEYDGRGVLIAVLDTGVDPGAPGMQVTTDGKPKIVDIIDTTGSGDVNTATEVEPKDGEIVGLSGRVLKIPASWTNPSGKYHIGIKNGYDFYPKALKERIQKERKEKIWDPVHRVALAEACRKQEEFDVANNGSSQANKLIKEELQSQVELLNSFEKKYSDPGPVYDCLVWHDGEVWRACIDSNEDGDLSKSTVLRNYKEAQEYGSFGTAEMLNYSVNIYDDRNLLSIVTSGGAHGTHVASIAAGHFPEEPERNGVAPGAQILSIKIGDTRLSTMETGTGLIRAMIEVINHKCDLVNYSYGEATHWPNSGRICEVINEAVWKHNIIYVSSAGNNGPCLSTVGCPGGTTSSVIGVGAYVSPDMMVAEYSLREKLPANQYTWSSRGPSADGALGVSISAPGGAIASVPNWTLRGTQLMNGTSMSSPNACGGIALILSGLKANNIDYTVHSVRRALENTAVKADNIEVFAQGHGIIQVDKAYDYLVQNTSFANKLGFTVTVGNNRGIYLRDPVQVAAPSDHGVGIEPVFPENTENSEKISLQLHLALTSNSSWVQCPSHLELMNQCRHINIRVDPRGLREGLHYTEVCGYDIASPNAGPLFRVPITAVIAAKVNESSHYDLAFTDVHFKPGQIRRHFIEVPEGATWAEVTVCSCSSEVSAKFVLHAVQLVKQRAYRSHEFYKFCSLPEKGTLTEAFPVLGGKAIEFCIARWWASLSDVNIDYTISFHGIVCTAPQLNIHASEGINRFDVQSSLKYEDLAPCITLKNWVQTLRPVSAKTKPLGSRDVLPNNRQLYEMVLTYNFHQPKSGEVTPSCPLLCELLYESEFDSQLWIIFDQNKRQMGSGDAYPHQYSLKLEKGDYTIRLQIRHEQISDLERLKDLPFIVSHRLSNTLSLDIHENHSFALLGKKKSSNLTLPPKYNQPFFVTSLPDDKIPKGAGPGCYLAGSLTLSKTELGKKADVIPVHYYLIPPPTKTKNGSKDKEKDSEKEKDLKEEFTEALRDLKIQWMTKLDSSDIYNELKETYPNYLPLYVARLHQLDAEKERMKRLNEIVDAANAVISHIDQTALAVYIAMKTDPRPDAATIKNDMDKQKSTLVDALCRKGCALADHLLHTQAQDGAISTDAEGKEEEGESPLDSLAETFWETTKWTDLFDNKVLTFAYKHALVNKMYGRGLKFATKLVEEKPTKENWKNCIQLMKLLGWTHCASFTENWLPIMYPPDYCVF

SEQ ID NO: 7002 - DNA, 540 bp, Rattus norvegicus; identical to SEQ ID NO: 6998
  ref <308>: DATABASE ACCESSION NUMBER: EMBL / AI176351
  ref <309>: DATABASE ENTRY DATE: 2000-03-03

SEQ ID NO: 7003 - protein, 1249 aa, Rattus norvegicus; identical to SEQ ID NO: 6999
  ref <308>: DATABASE ACCESSION NUMBER: SWISS-Prot / Q64560
  ref <309>: DATABASE ENTRY DATE: 2002-06-15

SEQ ID NO: 7004 - DNA, 409 bp, Homo sapiens; identical to SEQ ID NO: 7000
  ref <308>: DATABASE ACCESSION NUMBER: EMBL / BF511874
  ref <309>: DATABASE ENTRY DATE: 2000-12-08

SEQ ID NO: 7005 - protein, 1249 aa, Homo sapiens; identical to SEQ ID NO: 7001
  ref <308>: DATABASE ACCESSION NUMBER: SWISS-Prot / P29144
  ref <309>: DATABASE ENTRY DATE: 2002-06-15

SEQ ID NO: 7006 - DNA, 430 bp, Rattus norvegicus
  ref <308>: DATABASE ACCESSION NUMBER: EMBL / AI176422
  ref <309>: DATABASE ENTRY DATE: 2000-03-03
ataaagttttattaatgacaaatatttcatgattttatgggacgttagatacaaagttttttacttcagtgtttgaaggacacttgttcagaagttatccaaacatatgggaggttagtttggcatacatttacagtattctagaaactggctgtcaagtgtgccagtaagtggaggcacttgggctttacatgccattgtaagcaggtcctcctccaccttctgggaccacccagttaatattttgacttgggtctttgatatcacatgttttacaatgcacacagttctgagcatttatctgtaaccgtaagtctgggcatcacagctggccctcaaatcaaactttttataaagctgcttggctaggtgtccatggcagccttctgcaaagattgtgactttggcatgcaactccaggcctcgtgcc

SEQ ID NO: 7007 - DNA, 418 bp, Homo sapiens
  ref <308>: DATABASE ACCESSION NUMBER: EMBL / BE172552
  ref <309>: DATABASE ENTRY DATE: 2001-08-31
acactcacacactctctctatatagatgttcaatagaaaacacacacactctctctataggtgttcaatagaaaacacacacacacactctacaggtgttcaatagaaaaaacacacacacacactcacactctctcttcctgtaaatagaaatctgtcgatatatgatgggcccgagcagcgattctgtcctgcaggagtttatgaatttgtacctgtggaacaaggtgatggatttcggttacagataaatgctcagaactgtgtacattgtaaaacatgtgatattaaagatccaagtcagaatattaactgggtggtacctgaaggtggaggaggacctgcttacaatggaatgtaaactgcagctagccagtttctttcaagtatggcaagctaacgttacaatgtgtagaaa

SEQ ID NO: 7008 - protein, 617 aa, Homo sapiens
  ref <308>: DATABASE ACCESSION NUMBER: Refseq / NP_004444
  ref <309>: DATABASE ENTRY DATE: 2000-11-01
MLVPLAKLSCLAYQCFHALKIKKNYLPLCAIRWSSTSTVPRITTHYTIYPRDKDKRWEGVNMERFAEEADVVIVGAGPAGLSAAVRLKQLAVAHEKDIRVCLVEKAAQIGAHTLSGACLDPGAFKELFPDWKEKGAPLNTPVTEDRFGILTEKYRIPVPILPGLPMNNHGNYIVRLGHLVSWMGEQAEALGVEVYPGYAAAEVLFHDDGSVKGIATNDVGIQKDGAPKATFERGLELHAKVTIFAEGCHGHLAKQLYKKFDLRANCEPQTYGIGLKELWVIDEKNWKPGRVDHTVGWPLDRHTYGGSFLYHLNEGEPLVALGLVVGLDYQNPYLSPFREFQRWKHHPSIRPTLEGGKRIAYGARALNEGGFQSIPKLTFPGGLLIGCSPGFMNVPKIKGTHTAMKSGILAAESIFNQLTSENLQSKTIGLHVTEYEDNLKNSWVWKELYSVRNIRPSCHGVLGVYGGMIYTGIFYWILRGMEPWTLKHKGSDFERLKPAKDCTPIEYPKPDGQISFDLLSSVALSGTNHEHDQPAHLTLRDDSIPVNRNLSIYDGPEQRFCPAGVYEFVPVEQGDGFRLQINAQNCVHCKTCDIKDPSQNINWVVPEGGGGPAYNGM

SEQ ID NO: 7009 - DNA, 430 bp, Rattus norvegicus; identical to SEQ ID NO: 7006
  ref <308>: DATABASE ACCESSION NUMBER: EMBL / AI176422
  ref <309>: DATABASE ENTRY DATE: 2000-03-03

SEQ ID NO: 7010 - DNA, 418 bp, Homo sapiens; identical to SEQ ID NO: 7007
  ref <308>: DATABASE ACCESSION NUMBER: EMBL / BE172552
  ref <309>: DATABASE ENTRY DATE: 2001-08-31

SEQ ID NO: 7011 - protein, 617 aa, Homo sapiens; identical to SEQ ID NO: 7008
  ref <308>: DATABASE ACCESSION NUMBER: Refseq / NP_004444
  ref <309>: DATABASE ENTRY DATE: 2000-11-01

SEQ ID NO: 7012 - DNA, 534 bp, Rattus norvegicus
  ref <308>: DATABASE ACCESSION NUMBER: EMBL / AI176461
  ref <309>: DATABASE ENTRY DATE: 2000-03-03
attttttttgtcttttgttttgttttctgtttttaaaaaaaaaaatttgagttgcaggtcaggtgagtcggttctgaagtaccagcagttctgttggtgtgacagaattgtctacaggcaggtaaaccttcgccaacaaaagctaccaccaaagcagccagctgccgccgctgcaagggcagctgggaggaggaggacaccgaggacatggccaagtctggatgggaagatgcagtgggcacctgatgctgctctactgtgggtgctggtgccaccgttagaagggcgaagtgagagggtacactacacaggacggctgtacaggcgggcgggcctggcaggaggctcctctggtggtcaggcagctctacctgtccttcagctctcgtgtcaccctcttagtgatccgtccacacatcaggccaatcaggaacaatatgcagatgctcccgctgatcacagacaggatgtaattctttgatggggatgtcatcacttgcatggcaagatcagagaagccgtccgcctcgtgcc

SEQ ID NO: 7013 - protein, 1171 aa, Rattus norvegicus
  ref <308>: DATABASE ACCESSION NUMBER: SWISS-Prot / Q62638
  ref <309>: DATABASE ENTRY DATE: 2002-06-15
MAVCGRVRRMFRLSAALQLLLLVAAGVQNSHGQGQGLGVNFGPFAGQAGGGNPVGQQPPQLPQLSQQQQQQQPPPQQQQPFPAGGLPARRGGAGPGGTGGGWKLAEEESCREDVTRVCPKHTWSNNLAVLECLQDVREPENEISSDCNHLLWNYKLNLTTDPKFESVAREVCKSTISEIKECAEEPVGKGYMVSCLVDHRGNITEYQCHQYITKMTAIIFSDYRLICGFMDDCKNDINLLKCGSIRLGEKDAHSQGEVVSCLEKGLVKEAEEKEPKIQVSELCKKAILRVAELSSDDFHLDRHLYFACRDDRERFCENTQAGEGRVYKCLFNHKFEESMSEKCREALTTRQKLIAQDYKVSYSLAKSCKSDLKKYRCNVENLPRSREARLSYLLMCLESAVHRGRQVSSECQGEMLDYRRMLMEDFSLSPEIILSCRGEIEHHCSGLHRKGRTLHCLMKVVRGEKGSLGMNCQQALQTLIQETDPGADYRIDRALNEACESVIQTACKHIRSGDPMILSCLMEHLYTEKMVEDCEHRLLELQYFISRDWKLDPVLYRKCQGDASRLCHTHGWNETSELMPPGAVFSCLYRHAYRTEEQGRRLSRECRAEVQRILHQRAMDVKLDPALQDKCLIDLGKWCSEKTETGQELECLQDHLDDLAVECRDIVGNLTELESEDIQIEALLMRACEPIIHNFCHDVADNQIDSGDLMECLIQNKHQKDMNEKCAIGVTHFQLVQMKDFRFSYKFKMACKEDVLKLCPNIKKKVDVVICLSTTVRNDTLQEAKEHRVSLKCRKQLRVEELEMTEDIRLEPDLYEACKSDIKNYCSTVQYGNAQIIECLKENKKQLSTRCHQRVFKLQETEMMDPELDYTLMRVCKQMIKRFCPEADSKTMLQCLKQNKNSELMDPKCKQMITKRQITQNTDYRLNPVLRKACKADIPKFCHGILTKAKDDSELEGQVISCLKLRYADQRLSSDCEDQIRIITQESALDYRLDPQLQLHCSDEIANLCAEEAAAQEQTGQVEECLKVNLLKIRTELCKKEVLNMLKESKADIFVDPVLHTACALDIKHHCAAITPGRGRQMSCLMEALEDKRVRLQPECKKRLNDRIEMWSYAAKVAPADGFSDLAMQVMTSPSKNYILSVISGSICILFLIGLMCGRITKRVTRELKDR

SEQ ID NO: 7014 - DNA, 3901 bp, Homo sapiens
  ref <308>: DATABASE ACCESSION NUMBER: EMBL / U64791
  ref <309>: DATABASE ENTRY DATE: 2000-03-04
aagatggcggcgtgtggacgtgtacggaggatgttccgcttgtcggcggcgctgcatctgctgctgctattcgcggccggggccgagaaactccccggccatggcgtccacagccagggccagggtcccggggccaactttgtgtccttcgtagggcaggccggaggcggcggcccggcgggtcagcagctgccccagctgcttcagtcatcgcagcttcagcagcaacagcagcagcagcaacagcaacagcagcttcagccgccgcagccgcctttcccggcgggtgggcctccggcccggcggggaggagcgggggctggtgggggctggaagctggcggaggaagagtcctgcagggaggacgtgacccgcgtgtgccctaagcacacctggagcaacaacctggcggtgctcgagtgcctgcaggatgtgagggagcctgaaaatgaaatttcttcagactgcaatcatttgttgtggaattataagctgaacctaactacagatcccaaatttgaatctgtggccagagaggtttgcaaatctactataacagagattaaagaatgtgctgatgaaccggttggaaaaggttacatggtttcctgcttagtggatcaccgaggcaacatcactgagtatcagtgtcaccagtacattaccaagatgacggccatcatttttagtgattaccgtttaatctgtggcttcatggatgactgcaaaaatgacatcaacattctgaaatgtggcagtattcggcttggagaaaaggatgcacattcacaaggtgaggtggtatcatgcttggagaaaggcctggtgaaagaagcagaagaaagagaacccaagattcaagtttctgaactctgcaagaaagccattctccgggtggctgagctgtcatcggatgactttcacttagaccggcatttatattttgcttgccgagatgatcgggagcgtttttgtgaaaatacacaagctggtgagggcagagtgtataagtgcctctttaaccataaatttgaagaatccatgagtgaaaagtgtcgagaagcacttacaacccgccaaaagctgattgcccaggattataaagtcagttattcattggccaaatcctgtaaaagtgacttgaagaaataccggtgcaatgtggaaaaccttccgcgatcgcgtgaagccaggctctcctacttgttaatgtgcctggagtcagctgtacacagagggcgacaagtcagcagtgagtgccagggggagatgctggattaccgacgcatgttgatggaagacttttctctgagccctgagatcatcctaagctgtcggggggagattgaacaccattgttccggattacatcgaaaagggcggaccctacactgtctgatgaaagtagttcgaggggagaaggggaaccttggaatgaactgccagcaggcgcttcaaacactgattcaggagactgaccctggtgcagattaccgcattgatcgagctttgaatgaagcttgtgaatctgtaatccagacagcctgcaaacatataagatctggagacccaatgatcttgtcgtgcctgatggaacatttatacacagagaagatggtagaagactgtgaacaccgtctcttagagctgcagtatttcatctcccgggattggaagctggaccctgtcctgtaccgcaagtgccagggagacgcttctcgtctttgccacacccacggttggaatgagaccagtgaatttatgcctcagggagctgtgttctcttgtttatacagacacgcctaccgcactgaggaacagggaaggaggctctcacgggagtgccgagctgaagtccaaaggatcctacaccagcgtgccatggatgtcaagctggatcctgccctccaggataagtgcctgattgatctgggaaaatggtgcagtgagaaaacagagactggacaggagctggagtgccttcaggaccatctggatgacttggtggtggagtgtagagatatagttggcaacctcactgagttagaatcagaggatattcaaatagaagccttgctgatgagagcctgtgagcccataattcagaacttctgccacgatgtggcagataaccagatagactctggggacctgatggagtgtctgatacagaacaaacaccagaaggacatgaacgagaagtgtgccatcggagttacccacttccagctggtgcagatgaaggattttcggttttcttacaagtttaaaatggcctgcaaggaggacgtgttgaagctttgcccaaacataaaaaagaaggtggacgtggtgatctgcctgagcacgaccgtgcgcaatgacactctgcaggaagccaaggagcacagggtgtccctgaagtgccgcaggcagctccgtgtggaggagctggagatgacggaggacatccgcttggagccagatctatacgaagcctgcaagagtgacatcaaaaacttctgttccgctgtgcaatatggcaacgctcagattatcgaatgtctgaaagaaaacaagaagcagctaagcacccgctgccaccaaaaagtatttaagctgcaggagacagagatgatggacccagagctagactacaccctcatgagggtctgcaagcagatgataaagaggttctgtccggaagcagattctaaaaccatgttgcagtgcttgaagcaaaataaaaacagtgaattgatggatcccaaatgcaaacagatgataaccaagcgccagatcacccagaacacagattaccgcttaaaccccatgttaagaaaagcctgtaaagctgacattcctaaattctgtcacggtatcctgactaaggccaaggatgattcagaattagaaggacaagtcatctcttgcctgaagctgagatatgctgaccagcgcctgtcttcagactgtgaagaccagatccgaatcattatccaggagtccgccctggactaccgcctggatcctcagctccagctgcactgctcagacgagatctccagtctatgtgctgaagaagcagcagcccaagagcagacaggtcaggtggaggagtgcctcaaggtcaacctgctcaagatcaaaacagaattgtgtaaaaaggaagtgctaaacatgctgaaggaaagcaaagcagacatctttgttgacccggtacttcatactgcttgtgccctggacattaaacaccactgcgcagccatcacccctggccgcgggcgtcaaatgtcctgtctcatggaagcactggaggataagcgggtgaggttacagcccgagtgcaaaaagcgcctcaatgaccggattgagatgtggagttacgcagcaaaggtggccccagcagatggcttctctgatcttgccatgcaagtaatgacgtctccatctaagaactacattctctctgtgatcagtgggagcatctgtatattgttcctgattggcctgatgtgtggacggatcaccaagcgagtgacacgagagctcaaggacaggtagagccaccttgaccaccaaaggaactacctatccagtgcccagtttgtacagccctcttgtatagcatccccactcacctcgctcttctcagaagtgacaccaaccccgtgttagagcattagcagatgtccactgcgttgtcccatccagcctccactcgtgtccatggtgtcctcctcctcctcaccgtgcagcagcagcagctggtcgctggggttactgcctttgtttggcaaacttgggtttacctgcctgtagacaagtctctctcataccaacagaacttccggtacttccagaaccaactcacctgacctgcaactcaaaggcttttttaagaaaaccaccaaaaaaaaaa

SEQ ID NO: 7015 - protein, 1179 aa, Homo sapiens
  ref <308>: DATABASE ACCESSION NUMBER: SWISS-Prot / Q92896
  ref <309>: DATABASE ENTRY DATE: 2002-06-15
MAACGRVRRMFRLSAALHLLLLFAAGAEKLPGHGVHSQGQGPGANFVSFVGQAGGGGPAGQQLPQLLQSSQLQQQQQQQQQQQQLQPPQPPFPAGGPPARRGGAGAGGGWKLAEEESCREDVTRVCPKHTWSNNLAVLECLQDVREPENEISSDCNHLLWNYKLNLTTDPKFESVAREVCKSTITEIKECADEPVGKGYMVSCLVDHRGNITEYQCHQYITKMTAIIFSDYRLICGFMDDCKNDINILKCGSIRLGEKDAHSQGEVVSCLEKGLVKEAEEREPKIQVSELCKKAILRVAELSSDDFHLDRHLYFACRDDRERFCENTQAGEGRVYKCLFNHKFEESMSEKCREALTTRQKLIAQDYKVSYSLAKSCKSDLKKYRCNVENLPRSREARLSYLLMCLESAVHRGRQVSSECQGEMLDYRRMLMEDFSLSPEIILSCRGEIEHHCSGLHRKGRTLHCLMKVVRGEKGNLGMNCQQALQTLIQETDPGADYRIDRALNEACESVIQTACKHIRSGDPMILSCLMEHLYTEKMVEDCEHRLLELQYFISRDWKLDPVLYRKCQGDASRLCHTHGWNETSEFMPQGAVFSCLYRHAYRTEEQGRRLSRECRAEVQRILHQRAMDVKLDPALQDKCLIDLGKWCSEKTETGQELECLQDHLDDLVVECRDIVGNLTELESEDIQIEALLMRACEPIIQNFCHDVADNQIDSGDLMECLIQNKHQKDMNEKCAIGVTHFQLVQMKDFRFSYKFKMACKEDVLKLCPNIKKKVDVVICLSTTVRNDTLQEAKEHRVSLKCRRQLRVEELEMTEDIRLEPDLYEACKSDIKNFCSAVQYGNAQIIECLKENKKQLSTRCHQKVFKLQETEMMDPELDYTLMRVCKQMIKRFCPEADSKTMLQCLKQNKNSELMDPKCKQMITKRQITQNTDYRLNPMLRKACKADIPKFCHGILTKAKDDSELEGQVISCLKLRYADQRLSSDCEDQIRIIIQESALDYRLDPQLQLHCSDEISSLCAEEAAAQEQTGQVEECLKVNLLKIKTELCKKEVLNMLKESKADIFVDPVLHTACALDIKHHCAAITPGRGRQMSCLMEALEDKRVRLQPECKKRLNDRIEMWSYAAKVAPADGFSDLAMQVMTSPSKNYILSVISGSICILFLIGLMCGRITKRVTRELKDR

SEQ ID NO: 7016 - DNA, 650 bp, Rattus norvegicus
  ref <308>: DATABASE ACCESSION NUMBER: EMBL / AI176488
  ref <309>: DATABASE ENTRY DATE: 2000-03-03
ttcaagcacatgatttgtcttgatttaatgcctttttaagtgccctcaaaaactgaggggaaaataaattcactcaaaattattttaaattctttttaatcccctcaatttagagtccaagggctgaaggacttataatcatgattcccctttagatataaatttataaattgcacttgcctctgttaagtgtttcttttgtggggaaaatattatattaatttttactgttgcatgcagaggtaaccctttacccacatagaggcatttcttccatagagcctttgagttcaaaccattttttccctagttttcttttattttcctttttaagattttcaaactgggttacacactggaaaaggctgggttaagggccaaaatttaataaatctgtacggataactaaaggctacagagatttttatatatatatatatataattttttttaacttttagaaatcagagtgcttataaaatggctggctcatggctctgtccccagcccctctgacgccgcctcctagccttcgttgttgagataaccaggaatagtgactccatgcgtaaacaacaagaatactaaccaagaaaactagcttatcatgcaaatattaaggcatctagaaagtcagttaaaatttattg

SEQ ID NO: 7017 - protein, 284 aa, Rattus norvegicus
  ref <308>: DATABASE ACCESSION NUMBER: SWISS-Prot / BAA25292
  ref <309>: DATABASE ENTRY DATE: 2002-06-01
LFKGIPLESTDGERLMKSPHCTNPALCVQPHHITVSVKELDLFLAYYVQEQDSGQSGSPSHNDPAKNPPGYLEDSFVKSGVFNVSELVRVSRTPITQGTGVNFPIGEIPSQPYYHDMNSGVNLQRSLSSPPSSKRPKTISIDENMEPSPTGDFYPSPNSPAAGSRTWHERDQDMSSPTTMKKPEKPLFSSTSPQDSSPRLSTFPQHHHPGIPGVAHSVISTRTPPPPSPLPFPTQAILPPAPSSYFSHPTIRYPPHLNPQDTLKNYVPSYDPSSPQTSQSWYLG

SEQ ID NO: 7018 - DNA, 2424 bp, Homo sapiens
  misc_feature (1)..(2424): n=a, c, g or t
  ref <308>: DATABASE ACCESSION NUMBER: EMBL / U85193
  ref <309>: DATABASE ENTRY DATE: 2000-12-03
cctggaactctagcacgccgagtgaacttgaatctttggctatttaaggaggactgggtttgttgtgaagttgcggtgatccagcgcagagccccgtcctgattgatcgcatcgcggggctcagatgactgtaaaatgaatagatgaaattcttgcttctcgaagattttcttgggcatctcccggaaagtgcgttttaaggcgaagtcatgatgtattctcccatctgtctcactcaggatgaatttcacccattcatggaagcacttcttccacatgtccgtgcaattgcctatacttggttcaacctgcaggctcgaaaacgcaagtactttaaaaagcatgagaagcgaatgtcaaaggatgaagaaagagcagtcaaagatgagcttctcagtgaaaagcctgaaatcaaacagaagtgggcatccaggctccttgccaaactgcgcaaagatattcgccaggagtatcgagaggactttgtgctcaccgtgactggcaagaagcacccgtgctgtgtcttatccaatcccgaccagaagggtaagattaggagaatcgactgcctgcgacaggcagacaaagtctggcgtctggatctagtcatggtgatcctgttcaaaggcatccccttggaaagtaccgatggagagcggctcatgaaatccccacattgcacaaacccagcactttgtgtccagccacatcatatcacagtatcagttaaggagcttgatttgtttttggcatactacgtgcaggagcaagattctggacaatcaggaagtccaagccacaatgatcctgccaagaatcctccaggttaccttgaggatagttttgtaaaatctggagtcttcaatgtatcagaacttgtaagagtatccagaacgcccataacccagggaactggagtcaacttcccaattggagaaatcccaagccaaccatactatcatgacatgaactcgggggtcaatcttcagaggtctctgtcttctccaccaagcagcaaaagacccaaaactatatccatagangaaaatatggaaccaagtcctacaggagacttttacccctctccaagttcaccagctgctggaagtcgaacatggcacgaaagagatcaagatatgtcttctccgactactatgaagaagcctgaaaagccattgttcagctctgcatctccacaggattcttccccaagactgagcactttcccccagcaccaccatcccggaatacctggagttgcacacagtgtcatctcaactcgaactccacctccaccttcaccgttgccatttccaacacaagctatccttcctccagccccatcgagctacttttctcatccaacaatcagatatcctccccacctgaatcctcaggatactctgaagaactatgtaccttcttatgacccatccagtccacaaaccagccagtcctggtacctgggctagcttggttcctttccaagtgtcaaataggacacccatcttaccggccaatgtccaaaattacggtttgaacataattggagaacctttccttcaagcagaaacaagcaactgagggaaaaagaaacacaacaatagtttaagaaattttttttttaaataaaaaaaaggaaaagaggaagactggacaaaacaacacaaaggcagaaaggaaagaaactgaagaaagaagataatagaccagcaattgcagcacttacaatcactaattcccttaaggttaaactgtaatgacataaaaagggtcgatgatatttcactgatggtagatcgcagcccctgcaacgtagcctttgttacatgaagtccgctgggaaatagatgttctgtctctatgacaatatattttaactgactttctagatgccttaatatttgcatgataagctagttttattggtttagtattcttgttgtttacgcatggaatcactattcctggttatctcaccaacgaaggctaggaggcggcgtcagagatgctgggtgacagagccatgagccagccattttataagcactctgatttctaaaagttaaaaaaaatatatgaaatctctgtagcctttagttatcagtacagatttattaaatttcggcccttaacccagccttttccagtgtgtaacccagtttgaaatcttaaaaaaagaaaaaatgaaaaaaaaaggaaaaaaagaaaaaaggaaaaaaacagtttgaacacaaaggctctatggaagaaatgcctctatgtaggtgaagtgttctctctgcatgcaacagtaaaaattaatataatattttccccacaaaagaaacacttaacagagggcaagtgcaatttattaaatttatattcttaaagggggaattcatggattattaaggtccttcaggcccttggggactctta

SEQ ID NO: 7019 - protein, 420 aa, Homo sapiens
  ref <308>: DATABASE ACCESSION NUMBER: SWISS-Prot / O00712
  ref <309>: DATABASE ENTRY DATE: 2001-10-16
MMYSPICLTQDEFHPFMEALLPHVRAIAYTWFNLQARKRKYFKKHEKRMSKDEERAVKDELLSEKPEIKQKWASRLLAKLRKDIRQEYREDFVLTVTGKKHPCCVLSNPDQKGKIRRIDCLRQADKVWRLDLVMVILFKGIPLESTDGERLMKSPHCTNPALCVQPHHITVSVKELDLFLAYYVQEQDSGQSGSPSHNDPAKNPPGYLEDSFVKSGVFNVSELVRVSRTPITQGTGVNFPIGEIPSQPYYHDMNSGVNLQRSLSSPPSSKRPKTISIDENMEPSPTGDFYPSPSSPAAGSRTWHERDQDMSSPTTMKKPEKPLFSSASPQDSSPRLSTFPQHHHPGIPGVAHSVISTRTPPPPSPLPFPTQAILPPAPSSYFSHPTIRYPPHLNPQDTLKNYVPSYDPSSPQTSQSWYLG

SEQ ID NO: 7020 - DNA, 575 bp, Rattus norvegicus
  ref <308>: DATABASE ACCESSION NUMBER: EMBL / AI176491
  ref <309>: DATABASE ENTRY DATE: 2000-03-03
tttttttgaagagcacaagtatttttatttctttctttttttttctttttttttcctttttttcggagctggggaccaaacccagggccttgcgcttgctaggcaagcgctctaccactgagctaaatccccaaccccttttttatttctttaacaatgcaaaatatacacgttgacttgactaggacatattcacatgtaaattttttctcatatccacaactctggatagatcagaggaatgacaaagatcatcacaggaagcagacaaattatgtcgccttgctccgagcactacgaacacaatgcctaaaggactgtagtatctccaaagtttattccagtccatttcttcttttatactccaaaacatcttcgttgtgttggtggatgagataaatccacatgaaaatcgaggtgcccaaggtcagcccaactttcacccagttaggtttggcattgactggctcccggacatagaactttgaccgtgttgaagagcagctcggcagcctggcgggggccagcagccgcgaaaacgagcgcagtactacgggcggcgccatcctcgtgcc

SEQ ID NO: 7021 - protein, 76 aa, Rattus norvegicus; identical to SEQ ID NO: 6839
  ref <308>: DATABASE ACCESSION NUMBER: Refseq / NP_079799
  ref <309>: DATABASE ENTRY DATE: 2002-09-19

SEQ ID NO: 7022 - DNA, 658 bp, Rattus norvegicus
  ref <308>: DATABASE ACCESSION NUMBER: EMBL / AI176504
  ref <309>: DATABASE ENTRY DATE: 2000-03-03
caatacacatatttattatgctgtaaaaagcaacactacctgatctcatttaaaataagtatttcccaatttcagaatacttacaatttatagttttaagatttcattttgggaaatgttagaagtaaatacattcatagctgtggactccccagcagggacctagggcagacatcggttatcaggtccctgacagacgtctggatcgacagtgagtccagctctgccgctaaagcagtgtaggcagtagtgggcgtagcacatcagcagacaggggcgtcagaaccgggacagcagggacagcggtatgcagagatcgttgaagccacacgatcatgtaatggttctgagagacagaaccatcacctagggttgtaaagccagaacagacgtctttggagtttactgatggcagcagtcagcggctcattcacacacttacagggtccttgctgttatcagccagcagcgaacagccagagcaagacctggcccaggacaaagagcgcactcaaccaagccacagagacagtatgaagcagcactgagctgaggagagatgaaaacatttgtctcagataatatacaagaccattatcggagggaatccttaaagtcactggcaatatttaagtcacacgctgaattccggaaagcc

SEQ ID NO: 7023 - protein, 674 aa, Rattus norvegicus
  ref <308>: DATABASE ACCESSION NUMBER: SWISS-Prot / P13264
  ref <309>: DATABASE ENTRY DATE: 2001-10-16
MMRLRGSAMLRELLLRPPAAVGGVLRRTQPLGTLCRRPRGGSRPAAGLVAAARLHPWWGGGGRAKGPGSGGLSSSPSEILQELGKGGTPPQQQQQQQQQPGASPPAAPGPKDSPGETDAFGNSEGKEMVAAGDNKVKQGLLPSLEDLLFYTIAEGQEKIPVHKFITALKSTGLRTSDPRLKECMDMLRLTLQTTSDGVMLDKDLFKKCVQSNIVLLTQAFRRKFVIPDFMSFTSHIDELYESAKKQSGGKVADYIPQLAKFSPDLWGVSVCTVDGQRHSIGDTKVPFCLQSCVKPLKYAIAVNDLGTEYVHRYVGKEPSGLRFNKLFLNEDDKPHNPMVNAGAIVVTSLIKQGVNNAEKFDYVMQFLNKMAGNEYVGFSNATFQSERESGDRNFAIGYYLKEKKCFPEGTDMVGILDFYFQLCSIEVTCESASVMAATLANGGFCPITGERVLSPEAVRNTLSLMHSCGMYDFSGQFAFHVGLPAKSGVAGGILLVVPNVMGMMCWSPPLDKMGNSVKGIHFCHDLVSLCNFHNYDNLRHFAKKLDPRREGGDQRVKSVINLLFAAYTGDVSALRRFALSAMDMEQRDYDSRTALHVAAAEGHVEVVKFLLEACKVNPFPKDRWNNTPMDEALHFGHHDVFKILQEYQVQYTPQGDSDDGKENQTVHKNLDGLL

SEQ ID NO: 7024 - DNA, 2010 bp, Homo sapiens
  misc_feature (1)..(2010): n=a, c, g or t
  ref <308>: DATABASE ACCESSION NUMBER: EMBL / AF097495
  ref <309>: DATABASE ENTRY DATE: 2002-01-25
cgcgcagcagcagcagcagcagcagcagcagcagcagcagcagcagcacccgcatccgctgcgggagtccgagccggaaccacacccaagtagctgccctttcctcttctgtcatctcaccgccccaccacagaccgcgttccccgaggaaaccggccgcccacgcccggagcatcctcccctgttgagcgggcgctgacggacccggcggcatgatgcggctgcgaagctcggggatgctgcgggacctgctcctgcggtcgcccgccggcgtgagcgcgactctgcggcgggcacagcccttggtcaccctgtgccggcgtccccgaggcgggggacggccggccgcgggcncggctgccgccgcgcgactccacccgtggtggggcgggggcggctggccggcggaccccctcgcgcggggcctgtccagctctccttcggagatcttgcaggagctgggcaaggggagcacgcatccgcagcccggggtgtcgccacccgctgccccggcggcgcccggccccaaggacggccccggggagacggacgcgtttggcaacagcgagggcaaagagctggtggcctcaggtgaaaataaaataaaacagggtctgttacctagcttggaagatttgctgttctatacaattgctgaaggacaagagaaaatacctgttcataaatttattacagtaagtttttatatttttctatcttaacttaaaaaaatcaataataataaatatatacagtattattgaaatatagtcttaaaggtcgtctgacatgtagattctgactgacaatatttctcttattatgttttcaaatttttgtcatgctcatttcaaggtaatcagtgaaagaaaaagaaagaaacaatgagaaacttgtccagaaagtgggtaatagtgacactaagatgccatattcatgttcaagtgttgggtagaagtttttatatacaggaataaaatcttatagttggtataagnatatacattatttgcactatatatttacaaactcttattttttttaaaaacaggcactcaaatctacaggattgcgaacgtctgatcccaggttgaaagagtgtatggatatgttaagattaactcttcaaacaacatcagatggtgtcatgctagacaaagatctttttaaaaagtaaaagtttctgccaaacctttaatggtgatttgctatgctatacggtgattctgcttttaaaacaaaattgcatctttgaaggccactgcttcctgtgtaatggaaaaaggggatttataaacatcatttgtttgaagaacttggtacatattagtcataatacaccgggctaagagtattctttctttaaatctgttctaagcaaatttagccaccgatgtttccagtttacagtacttggagattgcattcagtttgagtagagcacatcctttgtcctgtcattgcttatattgatccccaattcatctgcatgacttgcacgctttctcagcatggtctctagttcttttccacaaggtgatttaggtgacatcataaaatgagagggcttcagacagacctgtgttcctcacatttacatacctcgattgtctgctcctctcctctcttcagacatattgatacataggcttttggctattttcattttcttcaaaacagtaaagaactaaaggcaactttggcgattaaagccttgatttggttgaatgagaatttttactttgatgttcctgtatttgcatatatttattatttatcttcattaatgtgtttctattagtttgattacttaaagattaatggacatgtgtgtaatggatcccaaagaatcaaatagtattttaaactactactatttaagtagaaactagtataaaactgtaaatactactataagacattggctttttccagacatggatccggggggttctgcatctacaagaaagtttgttatgtatggttgtatttacttttgttttatcttct

SEQ ID NO: 7025 - protein, 669 aa, Homo sapiens
  ref <308>: DATABASE ACCESSION NUMBER: SWISS-Prot / O94925
  ref <309>: DATABASE ENTRY DATE: 2001-10-16
MMRLRGSGMLRDLLLRSPAGVSATLRRAQPLVTLCRRPRGGGRPAAGPAAAARLHPWWGGGGWPAEPLARGLSSSPSEILQELGKGSTHPQPGVSPPAAPAAPGPKDGPGETDAFGNSEGKELVASGENKIKQGLLPSLEDLLFYTIAEGQEKIPVHKFITALKSTGLRTSDPRLKECMDMLRLTLQTTSDGVMLDKDLFKKCVQSNIVLLTQAFRRKFVIPDFMSFTSHIDELYESAKKQSGGKVADYIPQLAKFSPDLWGVSVCTVDGQRHSTGDTKVPFCLQSCVKPLKYAIAVNDLGTEYVHRYVGKEPSGLRFNKLFLNEDDKPHNPMVNAGAIVVTSLIKQGVNNAEKFDYVMQFLNKMAGNEYVGFSNATFQSERESGDRNFAIGYYLKEKKCFPEGTDMVGILDFYFQLCSIEVTCESASVMAATLANGGFCPITGERVLSPEAVRNTLSLMHSCGMYDFSGQFAFHVGLPAKSGVAGGILLVVPNVMGMMCWSPPLDKMGNSVKGIHFCHDLVSLCNFHNYDNLRHFAKKLDPRREGGDQRVKSVINLLFAAYTGDVSALRRFALSAMDMEQRDYDSRTALHVAAAEGHVEVVKFLLEACKVNPFPKDRWNNTPMDEALHFGHHDVFKILQEYQVQYTPQGDSDNGKENQTVHKNLDGLL

SEQ ID NO: 7026 - DNA, 536 bp, Rattus norvegicus
  ref <308>: DATABASE ACCESSION NUMBER: EMBL / AI176589
  ref <309>: DATABASE ENTRY DATE: 2000-03-03
aggcagacaacttgttattttttatttttttaatgacgaaaacaaaaatacatctaaaagcgaagcttctggaaaaaccatttgttcttccctgtcttgtatcgctcctcaaacttgaccttggcctcccgcctggccttgcgtttcagtgctgggtctctgaacacatccttgttgacaacagttttgtccaaggggatatccacagagtaccttgtgggcatgaggtggttgtagttataaactttcacaaaggacttgatcttggatcgcttggcgatcttcttcttgcccatggcagctgtcacttttctgggatagcggtcaattccagccaccagggcatggctgtaagggcggtcggaggtgccatcatcaatgttctttacgatgacggctttgcgtccggagtagcgtccagccaggaccagcaccactttcccgggtttcataaacttgcccatttcgacagcgagcagcaggcacccagcaaaaaggaaagaaggccacttccgctaacctttcaccctcgtgcc

SEQ ID NO: 7027 - protein, 135 aa, Rattus norvegicus [sequence omitted]

SEQ ID NO: 7028 - DNA, 638 bp, Homo sapiens
  ref <308>: DATABASE ACCESSION NUMBER: EMBL / BG939205
  ref <309>: DATABASE ENTRY DATE: 2002-06-21
ggcacgagctggctctttaatgggaaatgggaggaagggctgtccgcacaggaatggggttaggctgtcagaagcgcagccccctgcgggctaagtcggctcgggcctcctgtatctggctctgcagctcgcgtgcggcgtcctcgcagtcatgaaaagtggccacacgatagcccacagtgcccagggcatagcagccggcggacaccagcaagtaggcgggcagtggccacaggacttcctggcaggacaagggcagctccaggcccaaggctcccgtggtcagggccacccaggtggagcccaggatcgctagtccccaaagccactgcgctaatttcgtcatggtcactgcgagagaaggaagcaatgctcccctctaccccacgtctccccttccccgcgcggcccgggtggttgctgccgaaatgggcaagttcatgaaacctgggaaggtggtgcttgtcctggctggacgctactccggacgcaaagctgtcatcgtgaagaacattgatgatggcacctcagatcgcccctacagccatgctctggtggctggaattgaccgctacccccgcaaagtgacagctgccatgggcaagaagaagatcgccaagagatcaaagataaaatct

SEQ ID NO: 7029 - protein, 92 aa, Homo sapiens
  ref <308>: DATABASE ACCESSION NUMBER: SWISS-Prot / Q9P2X0
  ref <309>: DATABASE ENTRY DATE: 2002-06-15
MTKLAQWLWGLAILGSTWVALTTGALGLELPLSCQEVLWPLPAYLLVSAGCYALGTVGYRVATFHDCEDAARELQSQIQEARADLARRGVRF

SEQ ID NO: 7030 - DNA, 536 bp, Rattus norvegicus; identical to SEQ ID NO: 7026
  ref <308>: DATABASE ACCESSION NUMBER: EMBL / AI176589
  ref <309>: DATABASE ENTRY DATE: 2000-03-03

SEQ ID NO: 7031 - protein, 135 aa, Rattus norvegicus [sequence omitted]

SEQ ID NO: 7032 - DNA, 638 bp, Homo sapiens; identical to SEQ ID NO: 7028
  ref <308>: DATABASE ACCESSION NUMBER: EMBL / BG939205
  ref <309>: DATABASE ENTRY DATE: 2002-06-21

SEQ ID NO: 7033 - protein, 92 aa, Homo sapiens; identical to SEQ ID NO: 7029
  ref <308>: DATABASE ACCESSION NUMBER: SWISS-Prot / Q9P2X0
  ref <309>: DATABASE ENTRY DATE: 2002-06-15

SEQ ID NO: 7034 - DNA, 536 bp, Rattus norvegicus; identical to SEQ ID NO: 7026
  ref <308>: DATABASE ACCESSION NUMBER: EMBL / AI176589
  ref <309>: DATABASE ENTRY DATE: 2000-03-03

SEQ ID NO: 7035 - protein, 135 aa, Rattus norvegicus [sequence omitted]

SEQ ID NO: 7036 - DNA, 638 bp, Homo sapiens; identical to SEQ ID NO: 7028
  ref <308>: DATABASE ACCESSION NUMBER: EMBL / BG939205
  ref <309>: DATABASE ENTRY DATE: 2002-06-21

SEQ ID NO: 7037 - protein, 92 aa, Homo sapiens; identical to SEQ ID NO: 7029
  ref <308>: DATABASE ACCESSION NUMBER: SWISS-Prot / Q9P2X0
  ref <309>: DATABASE ENTRY DATE: 2002-06-15

SEQ ID NO: 7038 - DNA, 536 bp, Rattus norvegicus; identical to SEQ ID NO: 7026
  ref <308>: DATABASE ACCESSION NUMBER: EMBL / AI176589
  ref <309>: DATABASE ENTRY DATE: 2000-03-03

SEQ ID NO: 7039 - protein, 135 aa, Rattus norvegicus [sequence omitted]

SEQ ID NO: 7040 - DNA, 638 bp, Homo sapiens; identical to SEQ ID NO: 7028
  ref <308>: DATABASE ACCESSION NUMBER: EMBL / BG939205
  ref <309>: DATABASE ENTRY DATE: 2002-06-21

SEQ ID NO: 7041 - protein, 92 aa, Homo sapiens; identical to SEQ ID NO: 7029
  ref <308>: DATABASE ACCESSION NUMBER: SWISS-Prot / Q9P2X0
  ref <309>: DATABASE ENTRY DATE: 2002-06-15

SEQ ID NO: 7042 - DNA, 603 bp, Rattus norvegicus
  ref <308>: DATABASE ACCESSION NUMBER: EMBL / AI176689
  ref <309>: DATABASE ENTRY DATE: 2000-03-03
actctttgagccatgaaacaagtgactttcagattttccaacgttgggggaggtggggtgaggagcattaactttgacagttcattcaaaagattcggtgatcacccacggtggagttgacggtcgggagcagccgccatgacagccgcaagccacagtgcataggaagagcccctttgcttgagattttttttttataatattcttaaagatgcatattaaataacttcctctggaccacagacatgattgaacttaaaaaataaaagccctataaacactgccaagtcagccttgtctctgtatctcccttcttgcataaaaatggaatatttccaaccaagcactgaaacataaatattaaaataagtgggatacgctacgaacctactttacaatctcgtcaactactgtagcaccttgttaccagggccaatgcattcattttgtaaagaacacgagagatcccagaggcttgaggactcctcgtatgcctcgccattaaatattttatcaccttttcgagtcctaagcctctatcatatttcatccatatagagagctcaacctacgctagagattccaaggcccccttcggagagg

SEQ ID NO: 7043 - protein, 334 aa, Rattus norvegicus
  ref <308>: DATABASE ACCESSION NUMBER: SWISS-Prot / AAK53428
  ref <309>: DATABASE ENTRY DATE: 2003-02-01
MSQSKGKKRNPGLKIPREAFEQPQTSSTPPRDLDSKACISIGNQNFEVKADDLEPIVELGRGAYGVVEKMRHVPSGQIMAVKRIRATVNSQEQKRLLMDLDVSMRTVDCPFTVTFYGALFREGDVWICMELMDTSLDKFYKQVIDKGQTIPEDILGKIAVSIVKALEHLHSKLSVIHRDVKPSNVLINTLGQVKMCDFGISGYLVDSVAKTIDAGCKPYMAPERINPELNQKGYSVKSDIWSLGITMIELAILRFPYDSWGTPFQQLKQVVEEPSPQLPADKFSADFVDFTSQCLKKNSKERPTYPELMQHPFFTVHEAKAADVASFVKLILGD

SEQ ID NO: 7044 - DNA, 1005 bp, Homo sapiens
  ref <308>: DATABASE ACCESSION NUMBER: EMBL / D87905
  ref <309>: DATABASE ENTRY DATE: 1999-01-21
atgtctcagtcgaaaggcaagaagcgaaaccctggccttaaaattccaaaagaagcatttgaacaacctcagaccagttccacaccacctcgagatttagactccaaggcttgcatttctattggaaatcagaactttgaggtgaaggcagatgacctggagcctataatggaactgggacgaggtgcgtacggggtggtggagaagatgcggcacgtgcccagcgggcagatcatggcagtgaagcggatccgagccacagtaaatagccaggaacagaaacggctactgatggatttggatatttccatgaggacggtggactgtccattcactgtcaccttttatggcgcactgtttcgggagggtgatgtgtggatctgcatggagctcatggatacatcactagataaattctacaaacaagttattgataaaggccagacaattccagaggacatcttagggaaaatagcagtttctattgtaaaagcattagaacatttacatagtaagctgtctgtcattcacagagacgtcaagccttctaatgtactcatcaatgctctcggtcaagtgaagatgtgcgattttggaatcagtggctacttggtggactctgttgctaaaacaattgatgcaggttgcaaaccatacatggcccctgaaaggataaacccagagctcaaccagaagggatacagtgtgaagtctgacatttggagtctgggcatcacgatgattgagttggccatccttcgatttccctatgattcatggggaactccatttcagcagctcaaacaggtggtagaggagccatcgccacaactcccagcagacaagttctctgcagagtttgttgactttacctcacagtgcttaaagaagaattccaaagaacggcctacatacccagagctaatgcaacatccatttttcaccctacatgaatccaaaggaacagatgtggcatcttttgtaaaactgattcttggagactaa

SEQ ID NO: 7045 - protein, 334 aa, Homo sapiens
  ref <308>: DATABASE ACCESSION NUMBER: SWISS-Prot / P52564
  ref <309>: DATABASE ENTRY DATE: 2002-06-15
MSQSKGKKRNPGLKIPKEAFEQPQTSSTPPRDLDSKACISIGNQNFEVKADDLEPIMELGRGAYGVVEKMRHVPSGQIMAVKRIRATVNSQEQKRLLMDLDISMRTVDCPFTVTFYGALFREGDVWICMELMDTSLDKFYKQVIDKGQTIPEDILGKIAVSIVKALEHLHSKLSVIHRDVKPSNVLINALGQVKMCDFGISGYLVDSVAKTIDAGCKPYMAPERINPELNQKGYSVKSDIWSLGITMIELAILRFPYDSWGTPFQQLKQVVEEPSPQLPADKFSAEFVDFTSQCLKKNSKERPTYPELMQHPFFTLHESKGTDVASFVKLILGD

SEQ ID NO: 7046 - DNA, 666 bp, Rattus norvegicus
  misc_feature (1)..(666): n=a, c, g or t
  ref <308>: DATABASE ACCESSION NUMBER: EMBL / AI176856
  ref <309>: DATABASE ENTRY DATE: 1999-01-22
atgacagtggtctttattgtttaggtgacactgtttcatgatagacagtgaagacagagcatgttaaatgttggtatatcacattagttaattctgtgtgcagaggatctgtgtgcactgtatcagctatatacagattaagaacatacatgacaaagtacaaaagcacaagaagaggttaaatagggaattatttctgggttataatcacctggtaacatacaccttctgtcacacaactgtgtcactgctaaaaacagtaattagcatacatggtgatgatctctatttaatctagcacagccctggtgtgaatacataagggcatgataatatttcacaggtacaggctaagttctggggcatgaactcttttgagtaattcataaaacacacctgaggcatattttttgtttttgaaaaaaaaaagcaacgttctgacatagtccaagctttactgtgcaagggagacatttaataaaaacatacttttgctgccctgacaggaggtggatactctgatgaagatggtgaccagcaaaagaaatccctctgtagcagaataaggcaggctttccaactaagccagtaatctattagcttccgaatatgacaatngntactctttcctgacttgaatcctccttcctttcactgggttctaaa

SEQ ID NO: 7047 - protein, 543 aa, Rattus norvegicus
  ref <308>: DATABASE ACCESSION NUMBER: SWISS-Prot / Q64678
  ref <309>: DATABASE ENTRY DATE: 2002-06-15
MATSLSADSPQQLSSLSTQQTILLLLVSVLAIVHLGQWLLRQWRRKPWSSPPGPFPWPLIGNAASVGRASHLYFARLARRYGDVFQIRLGSCPVVVLNGESAIHQALVQQGGVFADRPPFASFRVVSGGRSLAFGHYSERWKERRRAAYGTMRAFSTRHPRSRGLLEGHALGEARELVAVLVRRCAGGACLDPTQPIIVAVANVMSAVCFGCRYNHDDAEFLELLSHNEEFGRTVGAGSLVDVMPWLQLFPNPVRTIFREFEQINRNFSNFVLDKFLRHRESLVPGAAPRDMMDAFILSAEKKATGDPGDSPSGLDLEDVPATITDIFGASQDTLSTALLWLLILFTRYPDVQARVQAELDQVVGRDRLPCMSDQPNLPYVMAFLYESMRFTSFLPVTLPHATTANTFVLGYYIPKNTVVFVNQWSVNHDPAKWSNPEDFDPARFLDKDGFINKALASSVMIFSVGKRRCIGEELSKTLLFLFISILAHQCNFKANQNEPSNMSFSYGLSIKPKSFKIHVSLRESMKLLDSAVEKLQAEEACQ

SEQ ID NO: 7048 - DNA, 5102 bp, Homo sapiens
  ref <308>: DATABASE ACCESSION NUMBER: EMBL / U03688
  ref <309>: DATABASE ENTRY DATE: 2000-03-04
gcttctgcgactccagttgtgagagccgcaagggcatgggaattgacgccactcaccgacccccagtctcaatctcaacgctgtgaggaaacctcgactttgccaggtccccaagggcagcggggctcggcgagcgaggcacccttctccgtccccatcccaatccaagcgctcctggcactgacgacgccaagagactcgagtgggagttaaagcttccagtgagggcagcaggtgtccaggccgggcctgcgggttcctgttgacgtcttgccctaggcaaaggtcccagttccttctcggagccggctgtcccgcgccactggaaaccgcacctccccgcagcatgggcaccagcctcagcccgaacgacccttggccgctaaacccgctgtccatccagcagaccacgctcctgctactcctgtcggtgctggccactgtgcatgtgggccagcggctgctgaggcaacggaggcggcagctccggtccgcgcccccgggcccgtttgcgtggccactgatcggaaacgcggcggcggtgggccaggcggctcacctctcgttcgctcgcctggcgcggcgctacggcgacgttttccagatccgcctgggcagctgccccatagtggtgctgaatggcgagcgcgccatccaccaggccctggtgcagcagggctcggccttcgccgaccggccggccttcgcctccttccgtgtggtgtccggcggccgcagcatggctttcggccactactcggagcactggaaggtgcagcggcgcgcagcccacagcatgatgcgcaacttcttcacgcgccagccgcgcagccgccaagtcctcgagggccacgtgctgagcgaggcgcgcgagctggtggcgctgctggtgcgcggcagcgcggacggcgccttcctcgacccgaggccgctgaccgtcgtggccgtggccaacgtcatgagtgccgtgtgtttcggctgccgctacagccacgacgaccccgagttccgtgagctgctcagccacaacgaagagttcgggcgcacggtgggcgcgggcagcctggtggacgtgatgccctggctgcagtacttccccaacccggtgcgcaccgttttccgcgaattcgagcagctcaaccgcaacttcagcaacttcatcctggacaagttcttgaggcactgcgaaagccttcggcccggggccgccccccgcgacatgatggacgcctttatcctctctgcggaaaagaaggcggccggggactcgcacggtggtggcgcgcggctggatttggagaacgtaccggccactatcactgacatcttcggcgccagccaggacaccctgtccaccgcgctgcagtggctgctcctcctcttcaccaggtatcctgatgtgcagactcgagtgcaggcagaattggatcaggtcgtggggagggaccgtctgccttgtatgggtgaccagcccaacctgccctatgtcctggccttcctttatgaagccatgcgcttctccagctttgtgcctgtcactattcctcatgccaccactgccaacacctctgtcttgggctaccacattcccaaggacactgtggtttttgtcaaccagtggtctgtgaatcatgacccagtgaagtggcctaacccggagaactttgatccagctcgattcttggacaaggatggcctcatcaacaaggacctgaccagcagagtgatgattttttcagtgggcaaaaggcggtgcattggcgaagaactttctaagatgcagctttttctcttcatctccatcctggctcaccagtgcgatttcagggccaacccaaatgagcctgcgaaaatgaatttcagttatggtctaaccattaaacccaagtcatttaaagtcaatgtcactctcagagagtccatggagctccttgatagtgctgtccaaaatttacaagccaaggaaacttgccaataagaagcaagaggcaagctgaaattttagaaatattcacatcttcggagatgaggagtaaaattcagtttttttccagttcctcttttgtgctgcttctcaattagcgtttaaggtgagcataaatcaactgtccatcaggtgaggtgtgctccatacccagcggttcttcatgagtagtgggctatgcaggagcttctgggagatttttttgagtcaaagacttaaagggcccaatgaattattatatacatactgcatcttggttatttctgaaggtagcattctttggagttaaaatgcacatatagacacatacacccaaacacttacaccaaactactgaatgaagaagtattttggtaaccaggccatttttggtgggaatccaagattggtctcccatatgcagaaatagacaaaaagtatattaaacaaagtttcagagtatattgttgaagagacagagacaagtaatttcagtgtaaagtgtgtgattgaaggtgataagggaaaagataaagaccagaaattcccttttcaccttttcaggaaaataacttagactctagtatttatgggtggatttatccttttgccttctggtatacttccttacttttaaggataaatcataaagtcagttgctcaaaaagaaatcaatagttgaattagtgagtatagtggggttccatgagttatcatgaattttaaagtatgcattattaaattgtaaaactccaaggtgatgttgtacctcttttgcttgccaaagtacagaatttgaattatcagcaaagaaaaaaaaaaaagccagccaagctttaaattatgtgaccataatgtactgatttcagtaagtctcataggttaaaaaaaaaagtcaccaaatagtgtgaaatatattacttaactgtccgtaagcagtatattagtattatcttgttcaggaaaaggttgaataatatatgccttgtgtaatattgaaaattgaaaagtacaactaacgcaaccaagtgtgctaaaaatgagcttgattaaatcaaccacctatttttgacatggaaatgaagcagggtttcttttcttcactcaaattttggcgaatctcaaaattagatcctaagatgtgttcttatttttataacatctttattgaaattctatttataatacagaatcttgttttgaaaataacctaattaatatattaaaattccaaattcatggcatgcttaaattttaactaaattttaaagccattctgattattgagttccagttgaagttagtggaaatctgaacattctcctgtggaaggcagagaaatctaagctgtgtctgcccaatgaataatggaaaatgccatgaattacctggatgttctttttacgaggtgacaagagttggggacagaactcccattacaactgaccaagtttctcttctagatgattttttgaaagttaacattaatgcctgctttttggaaagtcagaatcagaagatagtcttggaagctgtttggaaaagacagtggagatgaggtcagttgtgttttttaagatggcaattactttggtagctgggaaagcataaagctcaaatgaaatgtatgcattcacatttagaaaagtgaattgaagtttcaagttttaaagttcattgcaattaaacttccaaagaaagttctacagtgtcctaagtgctaagtgcttattacattttattaagctttttggaatctttgtaccaaaattttaaaaaagggagtttttgatagttgtgtgtatgtgtgtgtggggtggggggatggtaagagaaaagagagaaacactgaaaagaaggaaagatggttaaacattttcccactcattctgaattaattaatttggagcacaaaattcaaagcatggacatttagaagaaagatgtttggcgtagcagagttaaatctcaaataggctattaaaaaagtctacaacatagcagatctgttttgtggtttggaatattaaaaaacttcatgtaattttattttaaaatttcatagctgtacttcttgaatataaaaaatcatgccagtatttttaaaggcattagagtcaactacacaaagcaggcttgcccagtacatttaaattttttggcacttgccattccaaaatattatgccccaccaaggctgagacagtgaatttgggctgctgtagcctatttttttagattgagaaatgtgtagctgcaaaaataatcatgaaccaatctggatgcctcattatgtcaaccaggtccagatgtgctataatctgtttttacgtatgtaggcccagtcgtcatcagatgcttgcggcaaaagaaagctgtgtttatatggaagaaagtaaggtgcttggagtttacctggcttatttaatatgcttataacctagttaaagaaaggaaaagaaaacaaaaaacgaatgaaaataactgaatttggaggctggagtaatcagattactgctttaatcagaaaccctcattgtgtttctaccggagagagaatgtatttgctgacaaccattaaagtcagaagttttactccaggttattgcaataaagtataatgtttattaaatgcttcatttgtatgtcaaagctttgactctataagcaaattgcttttttccaaaacaaaaagatgtctcaggtttgttttgtgaattttctaaaagctttcatgtcccagaacttagcctttacctgtgaagtgttactacagccttaatattttcctagtagatctatattagatcaaatagttgcatagcagtatatgttaatttgtgtgtttttagctgtgacacaactgtgtgattaaaaggtatactttagtagacatttataactcaaggataccttcttatttaatcttttcttatttttgtactttatcatgaatgcttttagtgtgtgcataatagctacagtgcatagttgtagacaaagtacattctggggaaacaacatttatatgtagcctttactgtttgatataccaaattaaaaaaaaattgtatctcattacttatactgggacaccattaccaaaataataaaaatcactttcataatcttgaaaaaa

SEQ ID NO: 7049 - protein, 543 aa, Homo sapiens
  ref <308>: DATABASE ACCESSION NUMBER: SWISS-Prot / Q16678
  ref <309>: DATABASE ENTRY DATE: 2002-06-15
MGTSLSPNDPWPLNPLSIQQTTLLLLLSVLATVHVGQRLLRQRRRQLRSAPPGPFAWPLIGNAAAVGQAAHLSFARLARRYGDVFQIRLGSCPIVVLNGERAIHQALVQQGSAFADRPAFASFRVVSGGRSMAFGHYSEHWKVQRRAAHSMMRNFFTRQPRSRQVLEGHVLSEARELVALLVRGSADGAFLDPRPLTVVAVANVMSAVCFGCRYSHDDPEFRELLSHNEEFGRTVGAGSLVDVMPWLQYFPNPVRTVFREFEQLNRNFSNFILDKFLRHCESLRPGAAPRDMMDAFILSAEKKAAGDSHGGGARLDLENVPATITDIFGASQDTLSTALQWLLLLFTRYPDVQTRVQAELDQVVGRDRLPCMGDQPNLPYVLAFLYEAMRFSSFVPVTIPHATTANTSVLGYHIPKDTVVFVNQWSVNHDPVKWPNPENFDPARFLDKDGLINKDLTSRVMIFSVGKRRCIGEELSKMQLFLFISILAHQCDFRANPNEPAKMNFSYGLTIKPKSFKVNVTLRESMELLDSAVQNLQAKETCQ

SEQ ID NO: 7050 - DNA, 332 bp, Rattus norvegicus
  ref <308>: DATABASE ACCESSION NUMBER: EMBL / AI177004
  ref <309>: DATABASE ENTRY DATE: 1999-01-22
atgtgtaggggggaattccttttggctaatcaaactttgtgaaaacctaggttaaattttctaatttttaattgaaccatttaaaaaaaacaaacaaaacccaaaaaattcccaaaccccaaagggaaaaaggggtctggtgagtttgagctgtcaagtctataacctgggtctgtaacactgtaacctaatagtgccctgcccatccctcctactttacactttatcccccaggtaaggggctcagcaccacagcaagcttccgtgcagcagctccactggatttcaatgcaactgagcagcagtcacgggcccctggccaaaaagttccc

SEQ ID NO: 7051 - protein, 520 aa, Rattus norvegicus
  ref <308>: DATABASE ACCESSION NUMBER: SWISS-Prot / P17425
  ref <309>: DATABASE ENTRY DATE: 1996-10-01
MPGSLPLNAEACWPKDVGIVALEIYFPSQYVDQAELEKYDGVDAGKYTIGLGQARMGFCTDREDINSLCLTVVQKLMERNSLSYDCIGRLEVGTETIIDKSKSVKSNLMQLFEESGNTDIEGIDTTNACYGGTAAVFNAVNWIESSSWDGRYALVVAGDIAIYASGNARPTGGVGAVALLIGPNAPVIFDRGLRGTHMQHAYDFYKPDMLSEYPVVDGKLSIQCYLSALDRCYSVYRKKIRAQWQKEGKDKDFTLNDFGFMIFHSPYCKLVQKSLARMFLNDFLNDQNRDKNSIYSGLEAFGDVKLEDTYFDRDVEKAFMKASAELFNQKTKASLLVSNQNGNMYTSSVYGSLASVLAQYSPQQLAGKRIGVFSYGSGLAATLYSLKVTQDATPGSALDKITASLCDLKSRLDSRTCVAPDVFAENMKLREDTHHLANYIPQCSIDSLFEGTWYLVRVDEKHRRTYARRPSTNDHSLDEGVGLVHSNTATEHIPSPAKKVPRLPATSGEPESAVISNGEH

SEQ ID NO: 7052 - DNA, 2077 bp, Homo sapiens
  ref <308>: DATABASE ACCESSION NUMBER: EMBL / BC000297
  ref <309>: DATABASE ENTRY DATE: 2001-07-13
ggcacgaggcactccctttcctctgctgccgctcggtcacgcttgtgcccgaaggaggaaacagtgacagacctggagactgcagttctctatccttcacacagctctttcaccatgcctggatcacttcctttgaatgcagaagcttgctggccaaaagatgtgggaattgttgcccttgagatctattttccttctcaatatgttgatcaagcagagttggaaaaatatgatggtgtagatgctggaaagtataccattggcttgggccaggccaagatgggcttctgcacagatagagaagatattaactctctttgcatgactgtggttcagaatcttatggagagaaataacctttcctatgattgcattgggcggctggaagttggaacagagacaatcatcgacaaatcaaagtctgtgaagactaatttgatgcagctgtttgaagagtctgggaatacagatatagaaggaatcgacacaactaatgcatgctatggaggcacagctgctgtcttcaatgctgttaactggattgagtccagctcttgggatggacggtatgccctggtagttgcaggagatattgctgtatatgccacaggaaatgctagacctacaggtggagttggagcagtagctctgctaattgggccaaatgctcctttaatttttgaacgagggcttcgtgggacacatatgcaacatgcctatgatttttacaagcctgatatgctatctgaatatcctatagtagatggaaaactctccatacagtgctacctcagtgcattagaccgctgctactctgtctactgcaaaaagatccatgcccagtggcagaaagagggaaatgataaagattttaccttgaatgattttggcttcatgatctttcactcaccatattgtaaactggttcagaaatctctagctcggatgttgctgaatgacttccttaatgaccagaatagagataaaaatagtatctatagtggcctggaagcctttggggatgttaaattagaagacacctactttgatagagatgtggagaaggcatttatgaaggctagctctgaactcttcagtcagaaaacaaaggcatctttacttgtatcaaatcaaaatggaaatatgtacacatcttcagtatatggttcccttgcatctgttctagcacagtactcacctcagcaattagcagggaagagaattggagtgttttcttatggttctggtttggctgccactctgtactctcttaaagtcacacaagatgctacaccggggtctgctcttgataaaataacagcaagtttatgtgatcttaaatcaaggcttgattcaagaactggtgtggcaccagatgtcttcgctgaaaacatgaagctcagagaggacacccatcatttggtcaactatattccccagggttcaatagattcactctttgaaggaacgtggtacttagttagggtggatgaaaagcacagaagaacttacgctcggcgtcccactccaaatgatgacactttggatgaaggagtaggacttgtgcattcaaacatagcaactgagcatattccaagccctgccaagaaagtaccaagactccctgccacagcagcagaacctgaagcagctgtcattagtaatggggaacattaagatactctgtgaggtgcaagacttcagggtggggtgggcatggggtgggggtatgggaacagttggaggaatgggatatctggggataattttaaaggattacatgttatgtaaatttttatgtgactgacatggagcctggatgactatcgtgtacttgggaaagtctctttgctctatttgctgacatgcttcctgttgtggtctggccaatgccaaatgtactcgaatgatgttaagggctctgtaaaacttcatacctctttggccatttgtatgcatgatgtttggtttttaaacatggtataatgaattgtgtacttctgtcagaagaaagcagaggtactaatctccaattaaaaaattttttaacatgtaaaaaaaaaaaaaaaaaaaaaaa

SEQ ID NO: 7053 - protein, 520 aa, Homo sapiens
  ref <308>: DATABASE ACCESSION NUMBER: SWISS-Prot / Q01581
  ref <309>: DATABASE ENTRY DATE: 2001-10-16
MPGSLPLNAEACWPKDVGIVALEIYFPSQYVDQAELEKYDGVDAGKYTIGLGQAKMGFCTDREDINSLCMTVVQNLMERNNLSYDCIGRLEVGTETIIDKSKSVKTNLMQLFEESGNTDIEGIDTTNACYGGTAAVFNAVNWIESSSWDGRYALVVAGDIAVYATGNARPTGGVGAVALLIGPNAPLIFERGLRGTHMQHAYDFYKPDMLSEYPIVDGKLSIQCYLSALDRCYSVYCKKIHAQWQKEGNDKDFTLNDFGFMIFHSPYCKLVQKSLARMLLNDFLNDQNRDKNSIYSGLEAFGDVKLEDTYFDRDVEKAFMKASSELFSQKTKASLLVSNQNGNMYTSSVYGSLASVLAQYSPQQLAGKRIGVFSYGSGLAATLYSLKVTQDATPGSALDKITASLCDLKSRLDSRTGVAPDVFAENMKLREDTHHLVNYIPQGSIDSLFEGTWYLVRVDEKHRRTYARRPTPNDDTLDEGVGLVHSNIATEHIPSPAKKVPRLPATAAEPEAAVISNGEH

SEQ ID NO: 7054 - DNA, 332 bp, Rattus norvegicus; identical to SEQ ID NO: 7050
  ref <308>: DATABASE ACCESSION NUMBER: EMBL / AI177004
  ref <309>: DATABASE ENTRY DATE: 1999-01-22

SEQ ID NO: 7055 - protein, 520 aa, Rattus norvegicus; identical to SEQ ID NO: 7051
  ref <308>: DATABASE ACCESSION NUMBER: SWISS-Prot / P17425
  ref <309>: DATABASE ENTRY DATE: 1996-10-01

SEQ ID NO: 7056 - DNA, 2077 bp, Homo sapiens; identical to SEQ ID NO: 7052
  ref <308>: DATABASE ACCESSION NUMBER: EMBL / BC000297
  ref <309>: DATABASE ENTRY DATE: 2001-07-13

SEQ ID NO: 7057 - protein, 520 aa, Homo sapiens; identical to SEQ ID NO: 7053
  ref <308>: DATABASE ACCESSION NUMBER: SWISS-Prot / Q01581
  ref <309>: DATABASE ENTRY DATE: 2001-10-16

SEQ ID NO: 7058 - DNA, 616 bp, Rattus norvegicus
  ref <308>: DATABASE ACCESSION NUMBER: EMBL / AI177161
  ref <309>: DATABASE ENTRY DATE: 1999-01-22
aagtcatgatattcctttattagtgctagctccttttaatttttatcagagctaaacaatttaatataaaaatgtcatttcttgttcatacagtatataaaaaagtatagtggtttggttagttttcaatagtttgcttttagccagatgtcatataagtctatgactgtaacaaatgagaacagtataaataagttctgtagtatttacacttacacagaaactagcccaaatggtgcccaagaaattaacttgagagttaaaatgaaactgattcaacattgagactttaatgctttgtaaagtttcatattatttctacactagctttggctataattctgcatagttacttataaagtgtttctgcatttcacatcacagtaggaagttttagccgtacaaaacaaacactagctcagaaaaggctccatcctcccgaacctagtttttctttgtatctggcttcttgctcttgggaacaaggaacacgttgccatctctggtctgctgcagagagtactcactgggagagtaaggtttcccatcctcatcacgtaacatgctgaagacttccagatacaaagtgctgagttttcttttcagaagatggagg

SEQ ID NO: 7059 - protein, 597 aa, Rattus norvegicus
  ref <308>: DATABASE ACCESSION NUMBER: SWISS-Prot / O54968
  ref <309>: DATABASE ENTRY DATE: 2000-05-30
MMDLELPPPGLQSQQDMDLIDILWRQDIDLGVSREVFDFSQRQKDYELEKQKKLEKERQEQLQKEQEKAFFAQLQLDEETGEFLPIQPAQHIQTDTSGSVSYSQVAHIPKQDALYFEDCMQLLAETFPFVDDHESLALDIPSHVESSVFTTPDQAQSLDSSLETAMTDLSSIQQDMEQVWQELFSIPELQCLNTENKQQAETTTVPSPEATLTEMDSNYHFYSSIPSLEKEVDSCSPHFLHGFEDSFSSILSTDDASQLNSLDSNPTLNTDFGDEFYSAFLAEPSGGGSMPSSAAISQSLSELLGGPIEGCDLSLCKAFNQKHTEGTVEFNDSDSGISLNTSPSRASPEHSVESSIYGDPPPGFSDSEMEELDSAPGSVKQNGPKAQPTHSSGDTVQPLSPAQGHSAAVHESQCENTTKKEVPVSPGHQKVPFTKDKHSSRLEAHLTRDELRAKALHIPFPVEKIINLPVDDFNEMMSKEQFNEAQLALIRDIRRRGKNKVAAQNCRKRKLENIVELEQDLGHLKDEREKLLREKGENDRNLHLLKRKLSTLYLEVFSMLRDEDGKPYSPSEYSLQQTRDGNVFLVPKSKKPDTKKN

SEQ ID NO: 7060 - DNA, 2304 bp, Homo sapiens
  ref <308>: DATABASE ACCESSION NUMBER: EMBL / S74017
  ref <309>: DATABASE ENTRY DATE: 2000-03-04
ttggagctgccgccgccgggactcccgtcccagcaggacatggatttgattgacatactttggaggcaagatatagatcttggagtaagtcgagaagtatttgacttcagtcagcgacggaaagagtatgagctggaaaaacagaaaaaacttgaaaaggaaagacaagaacaactccaaaaggagcaagagaaagcctttttcactcagttacaactagatgaagagacaggtgaatttctcccaattcagccagcccagcacacccagtcagaaaccagtggatctgccaactactcccaggttgcccacattcccaaatcagatgctttgtactttgatgactgcatgcagcttttggcgcagacattcccgtttgtagatgacaatgaggtttcttcggctacgtttcagtcacttgttcctgatattcccggtcacatcgagagcccagtcttcattgctactaatcaggctcagtcacctgaaacttctgttgctcaggtagcccctgttgatttagacggtatgcaacaggacattgagcaagtttgggaggagctattatccattcctgagttacagtgtcttaatattgaaaatgacaagctggttgagactaccatggttccaagtccagaagccaaactgacagaagttgacaattatcatttttactcatctataccctcaatggaaaaagaagtaggtaactgtagtccacattttcttaatgcttttgaggattccttcagcagcatcctctccacagaagaccccaaccagttgacagtgaactcattaaattcagatgccacagtcaacacagattttggtgatgaattttattctgctttcatagctgagcccagtatcagcaacagcatgccctcacctgctactttaagccattcactctctgaacttctaaatgggcccattgatgtttctgatctatcactttgcaaagctttcaaccaaaaccaccctgaaagcacagcagaattcaatgattctgactccggcatttcactaaacacaagtcccagtgtggcatcaccagaacactcagtggaatcttccagctatggagacacactacttggcctcagtgattctgaagtggaagagctagatagtgcccctggaagtgtcaaacagaatggtcctaaaacaccagtacattcttctggggatatggtacaacccttgtcaccatctcaggggcagagcactcacgtgcatgatgcccaatgtgagaacacaccagagaaagaattgcctgtaagtcctggtcatcggaaaaccccattcacaaaagacaaacattcaagccgcttggaggctcatctcacaagagatgaacttagggcaaaagctctccatatcccattccctgtagaaaaaatcattaacctccctgttgttgacttcaacgaaatgatgtccaaagagcagttcaatgaagctcaacttgcattaattcgggatatacgtaggaggggtaagaataaagtggctgctcagaattgcagaaaaagaaaactggaaaatatagtagaactagagcaagatttagatcatttgaaagatgaaaaagaaaaattgctcaaagaaaaaggagaaaatgacaaaagccttcacctactgaaaaaacaactcagcaccttatatctcgaagttttcagcatgctacgtgatgaagatggaaaaccttattctcctagtgaatactccctgcagcaaacaagagatggcaatgttttccttgttcccaaaagtaagaagccagatgttaagaaaaactagatttaggaggatttgaccttttctgagctagtttttttgtactattatactaaaagctcctactgtgatgtgaaatgctcatactttataagtaattctatgcaaaatcatagccaaaactagtatagaaaataatacgaaactttaaaaagcattggagtgtcagtatgttgaatcagtagtttcactttaactgtaaacaatttcttaggacaccatttgggctagtttctgtgtaagtgtaaatactacaaaaacttatttatactgttcttatgtcatttgttatattcatagatttatatgatgatatgacatctggctaaaaagaaattattgcaaaactaaccacgatgtacttttttataaatactgtatggacaaaaaatggcattttttataattaaattgtttagctctggcaaaaaaaaaaaattttttaagagctggtactaataaaggattattatgactgttaaaaaaaaaaaaaaaaaa

SEQ ID NO: 7061 - protein, 605 aa, Homo sapiens
  ref <308>: DATABASE ACCESSION NUMBER: SWISS-Prot / Q16236
  ref <309>: DATABASE ENTRY DATE: 2002-06-15
MMDLELPPPGLPSQQDMDLIDILWRQDIDLGVSREVFDFSQRRKEYELEKQKKLEKERQEQLQKEQEKAFFTQLQLDEETGEFLPIQPAQHTQSETSGSANYSQVAHIPKSDALYFDDCMQLLAQTFPFVDDNEVSSATFQSLVPDIPGHIESPVFIATNQAQSPETSVAQVAPVDLDGMQQDIEQVWEELLSIPELQCLNIENDKLVETTMVPSPEAKLTEVDNYHFYSSIPSMEKEVGNCSPHFLNAFEDSFSSILSTEDPNQLTVNSLNSDATVNTDFGDEFYSAFIAEPSISNSMPSPATLSHSLSELLNGPIDVSDLSLCKAFNQNHPESTAEFNDSDSGISLNTSPSVASPEHSVESSSYGDTLLGLSDSEVEELDSAPGSVKQNGPKTPVHSSGDMVQPLSPSQGQSTHVHDAQCENTPEKELPVSPGHRKTPFTKDKHSSRLEAHLTRDELRAKALHIPFPVEKIINLPVVDFNEMMSKEQFNEAQLALIRDIRRRGKNKVAAQNCRKRKLENIVELEQDLDHLKDEKEKLLKEKGENDKSLHLLKKQLSTLYLEVFSMLRDEDGKPYSPSEYSLQQTRDGNVFLVPKSKKPDVKKN

SEQ ID NO: 7062 - DNA, 616 bp, Rattus norvegicus; identical to SEQ ID NO: 7058
  ref <308>: DATABASE ACCESSION NUMBER: EMBL / AI177161
  ref <309>: DATABASE ENTRY DATE: 1999-01-22

SEQ ID NO: 7063 - protein, 597 aa, Rattus norvegicus; identical to SEQ ID NO: 7059
  ref <308>: DATABASE ACCESSION NUMBER: SWISS-Prot / O54968
  ref <309>: DATABASE ENTRY DATE: 2000-05-30

SEQ ID NO: 7064 - DNA, 2304 bp, Homo sapiens; identical to SEQ ID NO: 7060
  ref <308>: DATABASE ACCESSION NUMBER: EMBL / S74017
  ref <309>: DATABASE ENTRY DATE: 2000-03-04

SEQ ID NO: 7065 - protein, 605 aa, Homo sapiens; identical to SEQ ID NO: 7061
  ref <308>: DATABASE ACCESSION NUMBER: SWISS-Prot / Q16236
  ref <309>: DATABASE ENTRY DATE: 2002-06-15

SEQ ID NO: 7066 - DNA, 684 bp, Rattus norvegicus
  ref <308>: DATABASE ACCESSION NUMBER: EMBL / AI177404
  ref <309>: DATABASE ENTRY DATE: 1999-01-22
ttcaaaacaatttattgcatcatatttggtaccttatgtttgacaacaaaaaagaaattacatttgtaactgcaggaaaaagaagctggtctgttattgaaaagaaaaatcttgggccctttaaaaattacaaagtcttgggcttgcctgaaacaactgagcaagaaatatattcttagaaatgaagggcttcaagtattacaaacctgtgacactgtggaaaagttccagaggtatctaaactgcagcactttttctgcatatcgtgaacaaggcctgctgaggtttttagctattagtctcttgatcagaatggtagtcaggagttctgctctttaacttcaagccatggtagagtttccttttttcactctcaggtgaaaaagtcatgcttgctaattagttggtgccacatcacagtgcatttggttcttgcattacagttttaacaagtttggccaaaacaatgctaaagctttgcattgttattttagttcttcaagttttagttaaattgagattgttccaactggttccttcggttaaaaactgtggtacaagaacaccaaactgatcatgtacagtgaattttggaaacacaacacacgtactgaacaccttctaggtttcatttaatctgcttggtagctatgtgtccaagttatctacaacgtcaagcatctg

SEQ ID NO: 7067 - protein, 594 aa, Rattus norvegicus
  ref <308>: DATABASE ACCESSION NUMBER: SWISS-Prot / AAF73953
  ref <309>: DATABASE ENTRY DATE: 2001-12-01
MLERLKIYEEAWTKYPRGLVPRKLPLNFLSGEKFKECLDRFLRMNFSKGCPPVFNTLRSLYRDKEKVAIVEELVVGYETSLKSCRLFNPNDDGKEEPPTTLLWVQYYLAQHYDKIGQPSIALEYINTAIESTPTLIELFLVKAKIYKHAGNIKEAARWMDEAQALDTADRFINSKCAKYMLKANLIKEAEEMCSKFTREGTSAVENLNEMQCMWFQTECAQAYKAMNKFGEALKKCHEIERHFIEITDDQFDFHTYCMRKITLRSYVDLLKLEDVLRQHPFYFKAARIAIEIYLKLHDNPLTDENKEHEADTANMSDKELKKLRNKQRRAQKKAQIEEEKKNAEKEKPQRNPKKKKDDDDEEIGGPKEELIPEKLAKVETPLEEAIKFLTPLKNLVKNKIETHLFAFEIYFRKEKFLLMLQSVKRAFAIDSSHPWLHECMIRLFHSVCESKDLPETVRTVLKQEMNRLFGATNPKNFNETFLKRNSDSLPHRLSAAKMVYYLDSSSQKRAIELATTLDGIPHQQKPSDLHGSVGKPCCDGSLRDCKEAAEAYRASCHKLFPYALAFMPPGYEEDMKITVNGDSSAETEELANEI

SEQ ID NO: 7068 - DNA, 2859 bp, Homo sapiens
  ref <308>: DATABASE ACCESSION NUMBER: EMBL / AK001595
  ref <309>: DATABASE ENTRY DATE: 2002-08-06
gattatcagctgccaaaatggtatattacttagatccttctagtcagaagcgagctatagagttggcaacaacacttgatgaatctctcactaacagaaacctccagacatgtatggaggtattggaagccttgtatgatggtagcctaggagactgtaaagaagctgctgaaatttatagagcaaattgtcataagcttttcccttatgctttggctttcatgcctcctggatatgaagaggatatgaagatcacagttaatggagatagttctgcagaagctgaagaactggccaatgaaatttgaacatcactaaacaagcaaatggaatgactttggaccatatctagtatataatatttttgtcacgcacctgctgcattgctctaacttacacagaatgagaggagtaaatgttcttgccttcaaatagtgttttacgttttttatcctgctgaaaaagtatatataaaatatctaacattacaggatagaggttcagtttcttaaaaaattaaagctgctaaaattgagtggttaaaaaagataccttatcctattcctccccacccacccatgtttttaaactaatttatataaaatctggaggctgttacagctaacaaagcaggtgtgtggcagaaatattactttaaatttgtcttgtgagattttactatatctcagacagcataaatgctgttttagcactggattctttcactgagcacaaagagttgttggggctttagcatctgactgattttgttacggggttgattctgaccataggaagtatgcaatgtgaatcactatttacagagaaacctacaacagatgcttgatgttgtagaaactgggacatatagataccaagcaaaattataagaaacctataaggtgttcaatacgcttgtgtttccaaaattcactgtacatgatcagtttggtgttcttgtaccacagtttttaactgaaggaaccagttgtaacagtctcaattttaactaaaacttgaagaactaaaacaacaatgcaaacctttcagcattgtttggccaaacttgttaaaactgtaatgcaagaaccaaatgcactgtgatgtggcaccaactaattagcaagcatgaatttttcacccaagagtgaaaaaaggaaaatctaccatggcttgaagttaaagagcagaactcctgactaccattctatgactgatcaaaagactaatagttaaaaacctcagcaggccttgttcacgatatgcagaaaaaaaagtgctgcagtttagatacctctggaatttttccacagtgtcacaggtttgtaatacttgaagccctacatttctaagaatatatttcttgctcagttgtttcaggcaagcccaagactttgtaatttttaaagggcccaagatttttttttttttttttttttcaaataacagaccagcttctttttcttgcagttacagatgtaatttcctttttgttgtcaaacataaggtaccaaatatgatgcaataaattgttttgaaaaacagttgtgtgaatatttcaactaatctgtgttgggcttctgtgaaatacacaggtggaaacagaggtgcaagccagaggcaatgtaatatgctgtaaggctagtgcagatgggagctttttagaaggggctaagtgctggtgtcagggaaattccataatgaagtagaatgctgctcctgcattaagatttcattgagggcaaggctggtggcaggtactatgaatgtaattcataatttaaaaggaaaactaaaaactattttgatttgggaaaatgagccttaatttgttaaacctatacactgagaactagcctcaggcttaatattctcattgcatttgcaagatctgagcaaataagattaagtaaaacaaatcaattgtatatataattgacctttttgtggaacatgtagtttatagaaagtatactctaaagggaatttgccgaagaccttttactgattgaacagttgtgctacaatcaacttttcatagtacatgacctgcattccacatctcagtctaacagtttagtagtgatgtaaagagaagtacaaaccgaactccagtgctttgttatgttttattaactggccctgtctcaggaacatcttaacagatggcaaaaaaaacaaaaactttttttcaactcctatgagtggcaactgaagttcttattgttgggaaagaacactagtcctacctctgccactaatgaggtgtttggaggaggtaccagccatataatagggggtgtatgtgtgaattttgtttaaactctactgtatattgaaatgaaattcatttatttgtcttgacaatgttcaaatgatgtagattgtcttagaatgaatattcataagtactcagaactcttaagatgcagatgccacccgtgaggagctaaattcctaatgtgtattgtattccaacccaattttactggaactattgaataaatcttttattttctttcaggtttacttgatagtggatacattggtgtcagaggaccttgactgggttcattttatgtccagacatcacccctgaaacactgtactgtactatcttgctctgagtagtatcaactggatcgtctcatatttgcctcattcatcctattaatttcaaatgatactgtgggggaaaaacagggttagaaaaacaagtggaaaaaatggagtgatgttgtaatctaaacaagtgccttatgtttattgctaagaactggtgttaccaacccttttgagaagaaagggtctcttgacctgtattaacataggaaagtaaagttctttttgtttttcttt

SEQ ID NO: 7069 - protein, 866 aa, Homo sapiens
  ref <308>: DATABASE ACCESSION NUMBER: SWISS-Prot / CAC43228
  ref <309>: DATABASE ENTRY DATE: 2003-02-01
MPAVSLPPKENALFKRILRCYEHKQYRNGLKFCKQILSNPKFAEHGETLAMKGLTLNCLGKKEEAYELVRRGLRNDLKSHVCWHVYGLLQRSDKKYDEAIKCYRNALKWDKDNLQILRDLSLLQIQMRDLEGYRETRYQLLQLRPAQRASWIGYAIAYHLLEDYEMAAKILEEFRKTQQTSPDKVDYEYSELLLYQNQVLREAGLYREALEHLCTYEKQICDKLAVEETKGELLLQLCRLEDAADVYRGLQERNPENWAYYKGLEKALKPANMLERLKIYEEAWTKYPRGLVPRRLPLNFLSGEKFKECLDKFLRMNFSKGCPPVFNTLRSLYKDKEKVAIIEELVVGYETSLKSCRLFNPNDDGKEEPPTTLLWVQYYLAQHYDKIGQPSIALEYINTAIESTPTLIELFLVKAKIYKHAGNIKEAARWMDEAQALDTADRFINSKCAKYMLKANLIKEAEEMCSKFTREGTSAVENLNEMQCMWFQTECAQAYKAMNKFGEALKKCHEIERHFIEITDDQFDFHTYCMRKITLRSYVDLLKLEDVLRQHPFYFKAARIAIEIYLKLHDNPLTDENKEHEADTANMSDKELKKLRNKQRRAQKKAQIEEEKKNAEKEKQQRNQKKKKDDDDEEIGGPKEELIPEKLAKVETPLEEAIKFLTPLKNLVKNKIETHLFAFEIYFRKEKFLLMLQSVKRAFAIDSSHPWLHECMIRLFNTAVCESKDLSDTVRTVLKQEMNRLFGATNPKNFNETFLKRNSDSLPHRLSAAKMVYYLDPSSQKRAIELATTLDESLTNRNLQTCMEVLEALYDGSLGDCKEAAEIYRANCHKLFPYALAFMPPGYEEDMKITVNGDSSAEAEELANEI

SEQ ID NO: 7070 - DNA, 684 bp, Rattus norvegicus; identical to SEQ ID NO: 7066
  ref <308>: DATABASE ACCESSION NUMBER: EMBL / AI177404
  ref <309>: DATABASE ENTRY DATE: 1999-01-22

SEQ ID NO: 7071 - protein, 594 aa, Rattus norvegicus; identical to SEQ ID NO: 7067
  ref <308>: DATABASE ACCESSION NUMBER: SWISS-Prot / AAF73953
  ref <309>: DATABASE ENTRY DATE: 2001-12-01

SEQ ID NO: 7072 - DNA, 2859 bp, Homo sapiens; identical to SEQ ID NO: 7068
  ref <308>: DATABASE ACCESSION NUMBER: EMBL / AK001595
  ref <309>: DATABASE ENTRY DATE: 2002-08-06

SEQ ID NO: 7073 - protein, 866 aa, Homo sapiens; identical to SEQ ID NO: 7069
  ref <308>: DATABASE ACCESSION NUMBER: SWISS-Prot / CAC43228
  ref <309>: DATABASE ENTRY DATE: 2003-02-01

SEQ ID NO: 7074 - DNA, 434 bp, Rattus norvegicus
  ref <308>: DATABASE ACCESSION NUMBER: EMBL / AI177683
  ref <309>: DATABASE ENTRY DATE: 1999-01-22
tttttttttgaaaagttaaaaattccttaattttttattcctggtaccactaccacaatttacagggcaatatacctgatgtaatgaaaagaaaaagaaaaagacaaagctacaacagataaaagacctcaggaatgtacatctaattgacactacattgcattaatcgatagctgcacttttgcaaactgtggctatgacagtcctgaacaagaagggcttcctgtttaagctgcagtaacttttctgactatggatcatcgttccttctgtggcagatttttacagttcctctaatgcatttaggacgactgtctcaaagtaacctgcagctttcctgacaactcctcgctctctctcctgctaagaactgtagccgtttgttttattttaaaaccttctgctaccatatccaccacttccaccctcgtgcc

SEQ ID NO: 7075 - protein, 193 aa, Rattus norvegicus
  ref <308>: DATABASE ACCESSION NUMBER: SWISS-Prot / CAA76339
  ref <309>: DATABASE ENTRY DATE: 2003-02-01
KYHTINGHNCEVKKALSKQEMQSAGSQRGRGGGSGNFMGRGGNFGGGGGNFGRGGNFGGRGGYGGGGGGSRGSYGGGDGGYNGFGGDGGNYGGGPGYSSRGGYGGGGPGYGNQGGGYGGGGGGYDGYNEGGNFGGGNYGGGGNYNDFGNYSGQQQSNYGPMKGGSFGGRSSGSPYGGGYGSGGGSGGYGSRRF

SEQ ID NO: 7076 - DNA, 178 bp, Homo sapiens
  ref <308>: DATABASE ACCESSION NUMBER: EMBL / AW383404
  ref <309>: DATABASE ENTRY DATE: 2000-02-06
aatgagacggtggcttgtatttttgatgatcatgatacagttgataaaattgttgttcagaaataccacactattaatgggcataattgtgaagtgaaaaaggccctttctaaacaagagatgcagtctgctggatcacagagaggtcgtggaggtggatctggattcagataggagg

SEQ ID NO: 7077 - protein, 379 aa, Homo sapiens
  ref <308>: DATABASE ACCESSION NUMBER: SWISS-Prot / P51991
  ref <309>: DATABASE ENTRY DATE: 2002-06-15
MEVKPPPGCPQPDSGSRRRRWGEEGHDPKEPEQLRKLFIGGLSFETTDDSLREHFEKWGTLTDCLVMRDPQTKRSRGFGFVTYSCVTEVDAAIGARPFKVDGRVVEPKRAVSREDSVKPGAHLTVKKIFVGSIKEDTEEYNLRDYFEKYGKIETIEVMEDRQSGKKRGFASVTFDDHDTVDKIVVQKYHTINGHNCEVKKALAKQVMQPAGSQRGRGGGSGNCMGHRGNFGGGGGNFGRDGNFGGRGGYGGGGGGSRGSYGGGDGGYNGLGGDGGNYGSGPGYSSRGGYGGGGPGYGNQGGGYGGGVGGYDGYNEGGNFDGSNYGGGGNYNDFGNYSGQQQSNYGHMKGGSFGGRSSGSPYGGGYGSGGGSGGYGSRRF

SEQ ID NO: 7078 - DNA, 696 bp, Rattus norvegicus
  ref <308>: DATABASE ACCESSION NUMBER: EMBL / AI177751
  ref <309>: DATABASE ENTRY DATE: 1999-01-22
gcacttaaacaatactgcagtttatcaaaaaacacataagaaatttcaactcttattctttgagttacaaaaatcaaggttcggctaagttataaacatgtttttcatgtaattatttgcataattctaataatgctcagtggcttaagatcagaactggttcttaaaaaaacactaaaaacataaaaatccttagcccctgtatttacctgtagaatatattcatttacgcttacattccaggatttgctatatcaggtataactttaaaggtcacatccaaaggagaaagcaaaccacctataaactggcattatttatttattttttggcttgtgaaacttccttaatttgttgatgtagcaaacaaatttcaactctgctatgcaaatgacagaagaaatctgctcagcgattcactttagagttcagcttcatacaggcaacatgctacatgtgaaaaattactaactgaactacaggtattaaatactgaaaaaaattaacagtttattataatttattttatttaacaatctaggaagttcgcggccatcagcagttccagtgcaatttcaggtgcaattgggaattcaggaatttcagtggagctgttagtatagcggaccttgtaggtaaaatacatgcacactttcgatagcacatgtgaagggatctctctaaagttgacctcat

SEQ ID NO: 7079 - DNA, 536 bp, Rattus norvegicus
  ref <308>: DATABASE ACCESSION NUMBER: EMBL / AI177986
  ref <309>: DATABASE ENTRY DATE: 1999-01-22
atgagtttaactttctctttaaataagacaatcagggaaggggatcaagcttgaaaaacagtaacacttattttggcaagatagcaaccaaaatctaaagtacaagctattatatccaaattaaaaggcattaaagaataaaccataatattagggagggggaacacatcaaacacaagatacagtatgtctaaacatcttgaaattataatttaagggtaaaagttgaaaacttatgctgttttagattaagtgcacctttttcctgtttctcccaaatagaatcagagtttacgatttaatcacacctcaaagcttttctctcagtacaaagcaaccactaaatacacacaaaatacttatttgtcatttccctggcttatccaacgtgcaatgcacatgactcaatagactacaatttggggtgagtgtacacaaactgaaaaaccacaactccaagtttcaaaatttgctcttaaaccataggacacacaggtcatttttacttctcatgaggatgtcacactgtcattaaa

SEQ ID NO: 7080 - protein, 429 aa, Rattus norvegicus; identical to SEQ ID NO: 6589
  ref <308>: DATABASE ACCESSION NUMBER: SWISS-Prot / Q07205
  ref <309>: DATABASE ENTRY DATE: 2001-10-16

SEQ ID NO: 7081 - DNA, 3899 bp, Homo sapiens; identical to SEQ ID NO: 6590
  ref <308>: DATABASE ACCESSION NUMBER: Refseq / NM_001969
  ref <309>: DATABASE ENTRY DATE: 2002-11-05

SEQ ID NO: 7082 - protein, 431 aa, Homo sapiens; identical to SEQ ID NO: 6591
  ref <308>: DATABASE ACCESSION NUMBER: SWISS-Prot / P55010
  ref <309>: DATABASE ENTRY DATE: 2001-10-16

SEQ ID NO: 7083 - DNA, 578 bp, Rattus norvegicus
  ref <308>: DATABASE ACCESSION NUMBER: EMBL / AI178135
  ref <309>: DATABASE ENTRY DATE: 1999-01-22
agatgaagtcagatttattgttcatcatcatgtcatacaaaaatctacaaataatagatgtgtacaggaaaagagcccaaaggaatagtaaatggaggtgtaacggcgataatttaaacttgctttcccccatatattaggatgacagccatttcaaagcatagttgtgatgtcaaggcagcttttgctcgcccaccagagctggccgtttagattgaggccttcagtctcacagttctactgactcttgacaaagcttttgaggtcctcaagaaaggtgatatattcctggtgctccagggctgtgctgagctccaccaactcatctgcaaaagtgttatccacccctcggtccgcaaggaaatccattaggtggtcatacaaggcccagtccagggagtctgtgttgagtgtgtagtttgtatccctccactcagagtcaccagtggtctgaaagctcacttccttaatagagaaaatgtcactctcggcctcatcttcgtgtccgatctcgtcctcaggatagtggcagtccagtacaagggcctcgtgccgaattcttggcctcgagggccaaa

SEQ ID NO: 7084 - protein, 278 aa, Rattus norvegicus
  ref <308>: DATABASE ACCESSION NUMBER: SWISS-Prot / O35796
  ref <309>: DATABASE ENTRY DATE: 2002-06-15
MLPLLRCVPRALGAAATGLRASIPAPPLRHLLQPAPRPCLRPFGLLSVRAGSARRSGLLQPPGSCACAAALHTEGDKAFVEFLTDEIKEEKKIQKHKSLPKMSGDGELEVNGTEAKLLRKVAGEKITVTFNINNSIPPTFDGEEEPSQGQKAEEQEPELTSTPNFVVEVTKTDGKKTLVLDCHYPEDEIGHQDEAESDIFSIKEVSFQTTGDSEWRDTNYTLNTDSLDWALYDHLMDFLADRGVDNTFADELVELSTALEHQEYITFLEDLKSFVKSQ

SEQ ID NO: 7085 - DNA, 1163 bp, Homo sapiens
  ref <308>: DATABASE ACCESSION NUMBER: Refseq / XM_012676
  ref <309>: DATABASE ENTRY DATE: 2002-08-01
ccggcggcgcctcaggtcgcggggcgcctaggcctgggttgtcctttgcatctgcacgtgttcgcagtcgtttccgcgatgctgcctctgctgcgctgcgtgccccgtgtgctgggctcctccgtcgccggcctccgcgctgccgcgcccgcctcgcctttccggcagctcctgcagccggcaccccggctgtgcacccggcccttcgggctgctcagcgtgcgcgcaggttccgagcggcggccgggcctcctgcggcctcgcggaccctgcgcctgtggctgtggctgcggctcgctgcacaccgacggagacaaagcttttgttgatttcctgagtgatgaaattaaggaggaaagaaaaattcagaagcataaaaccctccctaagatgtctggaggttgggagctggaactgaatgggacagaagcgaaattagtgcggaaagttgccggggaaaaaatcacggtcactttcaacattaacaacagcatcccaccaacatttgatggtgaggaggaaccctcgcaagggcagaaggttgaagaacaggagcctgaactgacatcaactcccaatttcgtggttgaagttataaagaatgatgatggcaagaaggcccttgtgttggactgtcattatccagaggatgaggttggacaagaagacgaggctgagagtgacatcttctctatcagggaagttagctttcagtccactggcgagtctgaatggaaggatactaattatacactcaacacagattccttggactgggccttatatgaccacctaatggatttccttgccgaccgaggggtggacaacacttttgcagatgagctggtggagctcagcacagccctggagcaccaggagtacattacttttcttgaagacctcaagagttttgtcaagagccagtagagcagacagatgctgaaagccatagtttcatggcaggctttggccagtgaacaaatcctactctgaagctagacatgtgctttgaaatgattatcatcctaatatcatgggggaaaaaataccaaatttaaattatatgttttgtgttctcatttattatcatttttttctgtacaaatctattatttctagatttttgtataacatgatagacataaaattggtttatctcctcc

SEQ ID NO: 7086 - protein, 282 aa, Homo sapiens
  ref <308>: DATABASE ACCESSION NUMBER: Refseq / XP_012676
  ref <309>: DATABASE ENTRY DATE: 2002-08-01
MLPLLRCVPRVLGSSVAGLRAAAPASPFRQLLQPAPRLCTRPFGLLSVRAGSERRPGLLRPRGPCACGCGCGSLHTDGDKAFVDFLSDEIKEERKIQKHKTLPKMSGGWELELNGTEAKLVRKVAGEKITVTFNINNSIPPTFDGEEEPSQGQKVEEQEPELTSTPNFVVEVIKNDDGKKALVLDCHYPEDEVGQEDEAESDIFSIREVSFQSTGESEWKDTNYTLNTDSLDWALYDHLMDFLADRGVDNTFADELVELSTALEHQEYITFLEDLKSFVKSQ

SEQ ID NO: 7087 - DNA, 520 bp, Rattus norvegicus
  ref <308>: DATABASE ACCESSION NUMBER: EMBL / AI178204
  ref <309>: DATABASE ENTRY DATE: 1999-01-22
atttaaatgttctgctgttttagattcttatagtattataagaatgaaatgttttatgaaacaatcacttgtctgcacaggataaacacagggttaagcacacttaatcattctgctgagatctgaatgcccatctcgactgaccatacacatgtccaggaggcaaaattactcttcttacagtgcatagaccaatacaaccaaggtattgattcattttagaaatttgctagcatatgtattttcattttgagtacaaccttgtatcacaaaataaacgtatttccaaactgagatatctattttgcaaagctatactttaggcacattgaccattccaaaaaaaaaaaaaagaagtgatttttcacaagtatttcctaagaacccaccttgtgccaggagctataattaaacataggacttacagcctcaggcatggaggttgggtgtgtaagtatgcaggcacaacattgcctcgtgccgaattcttggcctcgagggccaaattccctatagtgag

SEQ ID NO: 7088 - DNA, 619 bp, Rattus norvegicus
  ref <308>: DATABASE ACCESSION NUMBER: EMBL / AI178208
  ref <309>: DATABASE ENTRY DATE: 1999-01-22
aggacagatcacagttttatttttaatgacataagcaagaacaatctcacattcatactaaaaatctcagctacactaacagaaacgcagtctgtggtggaagccccagcctccctgtccctgtccagcgtgagcacggacagatgtgctcacacaccgaggctattccaggacacctcttccggcaccctggatacaggcctgctgtggagctgaggtaattagctcagactgaattggagggaggcccttccttacctgaggcacaggtagaggcttcgtgttcagacccccacccatccccatcctcacaggcatttgggacttgaggtccagctcttcttcagttccatacaacccagcctaacccctgccataaaacattcaatcccactcacaaggaaaggggaccagttacagctacatcacactgtttataaaataagagttacacttacacgacatgtctagaaggagctctgccccctcaggagagctgctggggacagctatgagcccttcctttacacaagcataactatacagctaattcctactattccatagcatttatacttaaccaccttagtgaacccaagcttgaaggaatttaaaaggc

SEQ ID NO: 7089 - protein, 1199 aa, Rattus norvegicus
  ref <308>: DATABASE ACCESSION NUMBER: SWISS-Prot / P52591
  ref <309>: DATABASE ENTRY DATE: 2002-06-15
MSPAAAAADGGERRRPPLGVREGRGRTRGCGGPAGAAALGLALLGLALYLVPAAAALAWLAVGASAAWWGLSREPRGPRGLSSFVRESRRHPRPALTASPLPAKSPVNGSLCEPRSPLGGPDPAELLLMGSYLGKPGPPEPALPQDPRDRPGRRPPSRSPPSSSTAQRVHHVYPALPTPLLRPSRRPPHRDCGPLSSRFVITPRRRYPIQQAQYSLLGALPTVCWNGGHKKAVLSARNSRMVCSPVTVRIAPPDSKLFRSPMPEQILSTTLSSPSSNAPDPCAKETVLNALKEKKKRTVAEEDQLHLDGQENKRRRHDSSGSGHSAFEPLVANGVPAAFVPKPGSLKRSLASQSSDDHLNKRSRTSSVSSLTSTCTGGIPSSSRNAITSSYSSTRGVSQLWKRSGPTSSPFSSPASSRSQTPERPAKKTREEEPCHQSSSSAPLVTDKESPGEKVTDPATGKQQSLWTSPPTPGSSGQRKRKIQLLPSRRGDQLTLPPPPELGYSITAEDLDMERRASLQWFNKVLEDKTDDASTPATDTSPATSPPFTLTLPTVGPAASPASLPAPSSNPLLESLKKMQESPAPSSSEPPEAATVAAPSPPKTPSLLAPLVSPLTGPLASTSSDSKPTTTFLGLASASSATPLTDTKAPGVSQAQLCVSTPAATAPSPTPASTLFGMLSPPASSSSLATPGPACASPMFKPIFPATPKSESDNPLPTSSSAATTTPASTALPTTATATAHTFKPIFESVEPFAAMPLSPPFSLKQTTAPATTAATSAPLLTGLGTATSTVATGTTASASKPVFGFGVTTAASTASTIASTSQSILFGGAPPVTASSSAPALASIFQFGKPLAPAASVAGTSFSQSLASSAQTAASNSSGGFSGFGGTLTTSTSAPATTSQPTLTFSNTVTPTFNIPFSASAKPALPTYPGANSQPTFGATDGATKPALAPSFGSSFTFGNSVASAPSAAPAPAAFGGAAQPAFGGLKASASTFGTPASTQPAFGSTTSVFSFGSATTSGFGAAAATTQTTHSGSSSSLFGSSTPSPFTFGGSAAPAGGGGFGLSATPGTGSTSGTFSFGSGQSGTTGTTTSFGGSLSQNTLGAPSQSSPFAFSVGSTPESKPVFGGTSTPTFGQSAPAPGVGTTGSSLSFGAPSTPAQGFVGVGPFGSGAPSFSIGAGSKTPGARQRLQARRQHTRKK

SEQ ID NO: 7090 - DNA, 31737 bp, Homo sapiens
  ref <308>: DATABASE ACCESSION NUMBER: EMBL / AC006014
  ref <309>: DATABASE ENTRY DATE: 2002-04-22
gatcacttgaagcctatttttaatttttattttttaaagaaaaacaacagaagagaaggctgatcccaagctacagggtttttttgtttgtttgtttgtttgtttgttttggagacagtctcgctctgtctcccaggctggagtgcagtggcacaacctcggctccctgcaactttcacctcggcgttcaagcaaattctcctgcctcagcctcccaagtagctgggactacaggcatccgcctgtacgtctgactaacttttgtaaaaatagtagagacaaggtttcaccatgttggccaggctggtctcaaactcctgacctcaagtgatccacccgcctcagtctcccaaagtgctgggattataggcatgagctactgtgcccagaccccaagctagagttttaaagcaggaaatgagagaaagatattgagagaggaaaaccaggtggtaagaaaactctaaaggtggctgggcgtggtggctcacgcctgtgatcccagcaggagttcgagaccaggcaggagaatcactagcagagaatatgtctccccaacccctctcaaaaaaaaaaaaaaaaaagtccaggcgcggtggctcaggactgtaatcccagcactttgggaggctgaggtgggtggatcatgaggtcaggagatcaagaccatcctggctaatacggtgaaaccccatctctgctaaaaatacaaaaaattagctgggtgcggtggcaggcgcctgtagtcccagctactccggaggctgaggcaggagaatggtgtgaacccaggaggcggagcctgcagtgagcagagatcgcgccactgcactccagcctgggtgaaagcgcgagactccatcacaaaagaaaaaaaaaaaaagaaagttcctgcaacagttcaagctgtgaaagacaggcactctgccatgcaattctttgtgatttttcttttttatttttggagtcggggtcttgtgctgtcacccagactggggtgcagtggtgcggtcatagctcactgtgggctcagactcaagctcaagcaatcttcttatcttgcctttctaattgctgggattataagcatgagccactgcacctggcctgtgtgacgtaattctgatgtcaactccctgatgttacatcaaatgccacaggttaaggccaccagcccccgctaggctgccctcgcttcagatgcagctgcaagcttgggtgtccacagaccgcatgtacttctcaccaactggctgcaaatttggaggttcccaccacgtcctcaggtttgataattcaccataacaacccacagaactctgaaaagcatgatactttctctttctttatttgagacagagtcttgctctgtcacccaggctggagtgcagtggccaccatgcttggctaattttagtatttgtattagagacagggtttcgccatgttggccaggctggtcttgaactcctgacctcaggtgatccacccaccttggcctcccaaagtgctgggattacaggcatagccactgtgcctggctgacttctagagtttcaataacagagatgtggttcaagaagaaaagggagacatgttttgtagacagcaggagcttcatgaaaagaagccaatgaagggcaggatgtgtagctgtctacctacaggaaaccagccaggagcctccccacagggacttcagcacagatggccgggaaaatctgcattcacctgagctctggacctaagagaggacaaggccttgactgtttctacagactcacaagatgcaatctctgcggtccatgcccgtggtgtgatctgggaaacagggggccttctaaatgccaacaacaaggaaatcaaatgtgcaacagacagaaatatcggcattgacacgggccatggagaggcctaaacagatgactgcagtccactgccaaggtcatcaaaggggtgactctgaaataagaaatttcagacgccacggcccaaatagctgcacgaggtggggaagtcctccacatgcctctgcttccttcagtacctcttcatgaaataagccgaggtacttccctggggaatttcctttctctttctttctttcgagacggagtcttgctctgtcgcccaggctagagtgcagtggcgcgatctcggctcactgcaacctctccctcccgggttttggcaattcttctgtctcagacttctgagtagctgagattacaggtgtgtgccaccatgcccagctaatatttgtattttcactcgagacagggtttcaccatctaggccaggctggtcttgaactcctgacctcatgatccacccatcttggcctcccaaagtcctgggattacaggcacgagccaccacacccagacttcttgttttattttttgagatgaagtttcgctcttgttgcccaggctggagtgcaatggcgagatctcagctcactgccacctcctcctcctcccaggttcaagtgattatcctgcctcagcctcccgagtagctgggattacaggcacccaacaccaaaccccgctgactttttgtatttttagtagagatggaatgtcaccatgttggccaggatggtcttgaacccctgacctctaatgatctacccgaattggtctcccaaaatgctgggattacaggcgtgagccactgtgcccagcccctcccatacctcttttggccaaggcagtacaattcagagaatcttgccagggaagactggtaaatggacatcaacatgatgcctatggctcctggtggatttagatacctcctggtgcttactgatacctttaccagttacatgggggcttttccatgccagactgaaaatgctggagatcactgatcaaccttcaactatttactagcagaacactgaggggactctgcagtcaccaatatctcctattgcacttggataaacacctcccgggaaatagagatgaatagaaaggaaatacttaaacaagcagaatggctacattccttcaaccagaagggtccattagtctgttttcacactgctataaagaactactggaaactggggaatttatgaagaaaagaggtttaattgactcacagttttgcaggctgtacaggaagcatggctggggagccctcaagaaactgacaatcacggcagaaggcgaaggggaagcaggcacgtttctggccatggtggagcaggagagacagagagagtgaagcaggaggtgctgcatgcttctaaacaaccagatcccatgagcgctcactcactatcacgagaccagcaagggggacgtcagccgccatgagccaatcatctcccaccaggtccctccctcaacactgggaattgcaattggacatgagatttggttggggatacagagctgaaccatatcaagggtagttcaaccactgagattgattgattgactgagatggggtcctgctctgttacctaggctggagtgcagtggcacaatctcggctcactgcaacctccgcctcccaggttcaagcaattctcctgcctcagcctccctagtagctgggactacagcacacgccaccacacctggctaatttttgtattttcagtagagacggggtttcaccatgtttgcccggctggtcttgaactcctgacctcgtgatcaccctgcctcggctcttcttttgctggaattacaggcgtgagccaccgcacccggacaaccactgagatttagaaggcagtcgagtccactataccacacctcacctggtttcttcctctgttggggcccctcgtggccactgttctgttactttttggtcctatttatttaaatggatggtgagctgtttgtcctccaggatccaacacttccaccttcagcttgtattacaacaataccagcctttcaagctactccgggtgaccccagaactcatctgaactcagaagcccaagagtttcattcctctcactttaggggactaagtgcccctggtcagcatgaagtcgatacagaagcatgacctccatccctaatccctcaagaatgaggagtggaaggtgttggcaggagggtgggacgcggtttgtaaatctgtaactgcatcagaccaaatctagttcaactttttttttttttgatggagtttcactcttgtcacccaggctggagtgcaatggcacgatctcagctcactgcaacctccacgtcctaggttcaagcattctgctgcctcagcctctggggtagctgggattacaagggtgcgccaccacgcctggctaatatttatatttttagtagagacggggtttcaccattttggccaggctggtcttgaactcctcgacctcaggtgatccacctgccttggcctcccaaagtgctgggattacaggcgtgagtcaccgcacccgaatcagttcaacttttatgtaatgaagttgtcagttgttttccaattgccatcgacctgcaggttgaaggtcatgtaccctgtgcatgcccaggttaaccacgcgtgccaccgtggagtggaacctaagagctcagcctgaagagctcggaccgatttaagaaccagacacccccaggcaggagccaggatccaatcagattgagttttggtgtcaccccatggcaggatccagtcagatcacacctcccagcattactttattgcaagatccaatcaaatcacacctcattaccctatgcttataaaacctgacacagcccccagctgtgtaagggagatttgagtacttcctcctgtgttcttgctggctgacttacaaaaaagctttaaaaaaaaaagccaggcgtggtggctcacgcctgtaatcccagcactttgggaggctgaggtgggcagatcacttgaggtcaggggtgcaagaccagcctggccaacatggtgaaaccccatctctactaaaaatacaaaaattagctgggtgtggtgacacacacctataatcccagctacttgggaggctgaggtaggagaatcacttgaacccaggaggcggaggttgcagtgagccaagatcacaccactgcactccagcctgggcgacagagtgagaagactccgtctaaaaaaaaaagttaaaattagcaccaaacgctttacaagtaaaaaaagtttttagctgcatatgtttaagtaactttttagattataagaaatacgcatgcaaaatggaaaggcacaaagaagagagcaaaaagtgcatgagatctcacatccaaggataaccgctgagaacatggaagtgctgactcttcagtctttatactatacacatttaggcctgttttgtttttataaaactgtaatcatataatacagacagttttataatctgctttttaaacacaacaattatgtaacatttagctgtttcatttgcattcaaattcataagggttccagtaactcatttatcagaaaaccaagagaaatattctcataaaaatataagtacataaggtcaggcatggtggctcacgcctgtaatcccagcactttgagaggccgaggtgggcggatcacctgagggcaggaattcaagaccagcctggccagcctggacaacatggtggaaccccgtctccactgaaaatacaaaaattagccgggcgtggtggcgcgcgcctgtaatggtagctactcagaaggctgaagcaggagaatcgcttgaacttggcaggtggaggttgcagtgaactgagatcgcgccactgcactgcagccagggcgccaaagtgagactccatctcaaaaaaagataaaaataaaaaataaaaaaaatgtatatatatgtatatatatttttccagacagggtcttactctgtctcacagtctgaagtgtagtgacgcaatcatagctcactgcagtctcaagttcctgggctcaggtgatcctcccacttcagcctcccaagtagctggaactacaggtgcatgccaccatgcccagtcaatttttttttaatttttcatagagacagagtctcactatgtttcccagtcctaataaacattatgtgataaaaagaaaaaagtaaatcatcctgaagttaagtctttaatgagaaatgcaaataaagcatttctcaataaattatgggaagagaatcaactgaagaataaacatctttagtaaatcttttgctcatgtgcattaaccaatactcttgaaaaccaggattaatttactgtaccttcttaatattcctttgaaattccttatggcgcacaggtagcgtagaaaataactgcttcacgctgactgtggtccctctggggtgggggtagggggttttctggatgattttcccatcgtgatcaaacaccagtcgagtcccaaccttcgccgatacgtggcaggtagaaatggtgacatcactgtgagagaataccaggcatggtgtgttcagtgagagatccatgatgttgggcactgactactcttttcttcacttgcttttctctcaaaattttcttaaaaagctgatgatccctctgagataaccgagatctaaacggttgaggagtcatcacaaaatctaaggtctggcatctaaaagacagtgagacagagagcactaaacatgctttgttttgataaaagctttgacttcatttttcaggttgaattgcaaaaccataaatgatctcaagatttattgattctcaaatagagatttgttttgttattactcttcaaacaaaattttttaaaagaatttttttaaagaattttttaaaatttttaaaattttttttaaagaatccaaaagatattataattaaaatgtatatgtagggcagggtgcggtggctcgtgcctgtaattccagcactttgggaggccaaggagggcagatcacttgaggcctggagttccagaccagcctgggcaacatggcaaaaccccatctctactaaaaatacaaaaattagccaggagtggtggtgcacgctatagtcccagctcttcaggaggctgagtcacgaaagtcacttgaacctgggaggcagagactgcagtgagctgagactgtgccactgcactccagcctgggtgacagagtgcgactctgtctaaaaaaaaaaaaaatatatatatatacatatatatgtatatatatatgtatatatatatgtatatatatgtatatatgtatatatatgtatatatgtatatatgtatatatatatgtatatatgtatatatgtatatatgtatatatgtatatatatgtatatatgtatatgtatgtatatatatatgtatatatatgtatatatatgtatatatatgtctatatatgtgtgtgtgcatgtaattatttataaaaatttagtatctgtgctgtaattaaatagtgctttggtgaaatgtttccctaaaaattgataatgaaaaccaatggtaactatcatttattatctatatgttatgttcaaattgagaagttactgttttaataagggtaaccaattttttaaagaatactatttgcttcatttcattcatttattgctcacatttcagaagtactaggacttagattggcagtgagacaaaacagaattcagaagctagaagctgagatattgagatagaaaattgtaaataataatgattccaattaattttcagagaggtttttctaaggggtcaagtgaatggataaaaatattttctcacctcagtgcacaaagtgagctcagagctttcccctgaaagccaaaagtttcaacccgagttaggtcggcaaactctcgaatcttagatgtgtgatgtttcagagctgaaagagactgtaaagtaaggactaagatatctcaagtgctataacaacaaatatacatgatatctagtaactggctttaaaaaactgtttttgtgtttcccaagacagtgttactcaaaattctaagacatgtggcccaattattttgtaataggattagaaagttaacttacttaagccttcgaagttttcttcttctaccccacatccattgcctgaaacttcaatgagatccattccatagtccttaagctttagatctagaaagtttaaaatatttatatatttattaaaaatggacccacgctatcagtttttatattgatattatttataacgtgcaaatttaagtgtcgtaactatacctttagttaaacatactagtgtcattttgtatatttcatttttataaagttctttctggccatttactagcccagattaaatagtttagcattttctttctttcctcttttttttttccttacactagtcaagtgaagcagttggagtggagaaggaacaaaaaaatctgtaactggttgtgatcaattagttgtaaagaccgttgcactttgaccagccttttcctttgaaagaaataattttaacatacccagtaaggagaacgggggccgggcgcagtggttcatgcctgtaatcccagcactttgggagaccaaagcgagcggatcacctgaggtcagtagttcgagaccagcctgaccaacgtagagaaactctatctctactaaaaatacaaaattagccaggcgtggtggtgcatgcctgtaatcccagctacttgtgaggctgaggcaggagaatcgcttgaacctgggaggtggaggttgcagtgagttgagatcgtgccattgcaccgcagcctcggcaacaagagcaaaactctatctcaaaaaaaaaaaaaagaaaaaaaaacagaactggttctggaatcagacttcctagattctattttattagctttataatctcaaaaaaaggaaatttactgtcccttaatttcctcaactgtaaaatggaggtaataagttctatctcataaagttatttggcagattaataatttttttttaattttgtcattttcttttttttctttcctttttttttttttttttaattttttgagatggacttttgctcttgtcacccaggctggaatgcagtggcacaatcgatcttggctcactgcaacctccacctcccaggtttaagcaattctcctccctcagccttctgaggagctgagagtacagccatgcaccatcacatctggctaatttttgtatttttagtagagacagggttttaccacgttggttaggctggtcttgaactcctgacctcaaagcatcagcccccctcagcctcccaaagtgctgggattacagatgtgagccactactccaggatttattttattttattttattttatttttttgagacagagtcttgctctgtccccaggctggcgtgcagtggcacaatctcggttcactgcaacctccacctcccaaatttaaacaattctcattcctgagcctccccagtagctgggattacaggcttctgccaccaggtctggctaatttttgtatttttagtagagacagagtttcaccattttggacaggctggtctcgaattcctgacctcaggtatccacccgccttggcctcccaaagtgctgggattacaggcgtgagccaccacacccggcctgctttattttttaatagagacgaggtctccccatgttggccaggttggtcttgaactcttggcttcaagcaatccccccacctcagcctctcaaagggctaggattacaggcgtcagacaccacgcccagctattctgcaaattaaatgagatatttctgtgcaattcttagcataacacctgcctggcacaccataagaacacaagaaaagctgtcgttattattattactacctagctaagtactaggcacataataggtgctaactttaacttaaaaataatagtttattactacatcaacacttgatagtcttatttcaataacaaatgtttcttgactacaacaacattcactgatcatttcttgtggcttaaaactctcccaaacttaccaatattagtggcaccagcatccagactgtttcctactatcttcttcaccgcagtgcttagactcagtaccaccggcccagagcaaatctgatggactgacttccgatcaataggtttgatggccttagcaggttctgtactaaagaaatcagttacaagaaacaaagcaggtattcagctatatattttcatcctgattttaactgtgggaaatgactcaacactgcaaatagtttatgggtctaatctattcatttattatattaacaaatacatttattatatccagaaatggaaacattgttttacaatccttaaacaagtacccaaaatacttctggatagacacttcaaattcaacacatccttactatctagtatccacatggagaaaacatacattgtatctctcaaattaccaaaatctttggcaataatggtgtcttctttcttgaaaactgaaagcatggccggtgcggtggctcatgcctgtaatcccagcaatttgggacacagaggcaggtggatcacttgagatcaggagtttgagaccagcctggccaacgtcgtgaaaccctgtctctaccaaaaatacaaaaaattagccaggcatggtggtgggcgcctgtaatcccagctacttgggaggctgaggcagaagaatcacttaaacctgggaggcggaggttgcagtgagctgagattgcagcattgcaccctaggctgggcaatgagcaaaaaaaaaagtaaaagcaacataatttcccacataattagaaaaaccaacagtatgctgggaaatacacaatgtttaagtcaaaatcatctcagaaattggataccagttatataactattccttatacacagttgcctttgataccctactccaaattgaagctgccagctgctgtcttagcaaagaccctcaaagttcttgctgtacttgttttaagaggtttttttttttttttttttttttttgagacggattcttgctctgtcgccctgtcgcccaggctggagtgcagtggcacgatcttagctcactgcaagctctgcctcccgggttcacaccattctcctgcctcagcctcctgagtggctgggactacaggcgcccaccaccatgcccagctaattttttgtatttttagtagagacagggttccaccgttttagccaggatggtctcgatctcctgacttcgtgatccgcccgcctcagcctcccaaagtgctgggattacaggcgtgagccaccatgcccagcccactttaagagttttataacggtttcatttccccttattccctgctccaacccatcctccactctatcaccagagctatttttgaaatcacgaatctggtcaaataatttttctgcttgaaaaattactagtgccccacttcctactatatgaaacttaaaatctagtcatcactgggccccaaactaccttcttttcagaatctctctgatcctttcccttcatcaagtcccctacattattattattattattattattattattattattgacagagtctcaccctgtcacctgggctagagtgcaatggcatgatctcggctcactgcaacctccacctcccaagttcaagtgattctcctgtctcagcctcccaagttgctgggattataggcatccaccattacactcagctaatttttgtgtttttagtagagatggggtttcaccatgttggccaggctggtttctaactcctgacctcaggtgatctgcccgccttggccttccaaagcactaggattacaggtgtgagccaccgcaactggccgtcccctatattgcagcacagtgaacaactgtttcctgaacatcacaagctctcttagacactacagtgtataagcaggtctctgtctaaactgctctcctcttgcccctctgcccaaccaatgtctgctcatccaaagaatgtatcccgtgtgttcattaacttagcaagttcccagtaaacagtttaattgatcactcgttaagagaaggcgggaaacctccatgaaaagagaaatcagtgggtatttcctacagcatttaacacatcgtaggccttcaataaacccttgtgaaataaacaaacctctttactcttcattctatgttgctaagaatctcacctaagtctgtctaccatgtgaaactgcagatgacctcacagaaaatggaaagaagtatctctaaaaataagtttatttggcaacacactacaggctacaggttcacttctgattttttttctttttttttttttgagatggagtcttgctgtgtttacccaagacatgttttagactgtaaattggaggctgaaaaacatcataacatcacttttgccctactcaatgactatcctgttactaaggttgggccaaaattaaagggggggtcataggcccccacctctttttttattttcagacagggtctccctccgctgtccaggctggagtgcaggggcgcaatcatagctcactgcagccttgacctcccaggctcaagcaatcctcctgcttcagcctcccaagtagctgggacatgggcatgcatcatcacagctggctaattaaaaacatttttttgttgagacggagtctcgctctgttgtccaggctggagtggagtggtgcgctctcggctcactgcaacctctgcctcctgggttcaagcaattctcctgcctcagcctcctgagtacctgggattacaggtgcccaacaccacacctggctaattttttgtattttagtagagacaggatttcaccatgttgcccaggctggtctcaaactcctcagctcaggcaacccgcctgccttggcctcccaaagtgctaggattacaggcatgagtgaccatgcccagcctaaaaacttttttttaagggatgggatcttgctaggctgcccaggctggtcttgaagtcctggcctcaagcaatcctcccaccttggcctcccaaagttctaggattacaggcgtgagccaccatgcctggctgatcctcacctatttttttgttgttgtttgagacagggtctatctccatctcctcggctggagtgcagtggcttgatcatggctcactccagcctcaacctcctgggctcaagcaatgctaccacttcagcctcccgagtggctgcgactacaggtgtgcaccaccacaccctgctaatttgtgtattttttgtagagatgaggtcttgctatgttgcccaggctagtttcaaactcctggcctcagtcaatcctcccaccttggcctcccaaagtgctgggattataggtgtgagccaccacctctggccagctcccacctgttgatcaaaggagcatcaaagaatttgcagcctccagaaggaggtcatttcctgcctctgagtctcagtttccacatctatgaaataaagttaatgatccttcactccagggttgtcgtgaaggctaaattaagttgtatttggaaaaatatgtggggcacagtaggtgtgtttctcacacccagagtcagagtgtttagcagagggttagtagttgcctccagggcatgaagggctcttcctgaccctaagtgtgaggaacgctttgggttaaaagattgtacttttctgcgttcagctgaaaggtggagggctcagtgaggtggctcacacctgtaattccaatgctttgggaggccgaggtgggaggatcacttgagcccaggagtttgagagcagcttaaacaacacagtaagaccttgtttctacacacacacacacacacacacacacacacacattagccaggcgtggtggcatgcgcctgtagttccagctacttgggaggctgaggtgggtggattgcttgaggcaaggagtttgagacaagcctggtcaacacagtgacaccccatcatcccccaaaatcatttttctttgttttaaggcagagcctcactctattgcccaggctggagtgcagtggtgtgatctcacctccttgcaacctctgcctcccgggttcaagcgattcttgtgtctcagcctcctgagtagctaggattacaggtgtgcaccaccatgcctggctaatttttgtatttttagcggagatggggttttgccatgttggtcaggctggtcttcaactcctggcctcaagtgatccgtctgccttggcctcccaaagtgctgggattacaggtgtgagccactgtgcccagccacaataaatcatttttaaaaggttaaatttaacctcatttaagtaatacatgtaagtctcatcgaatatttgaagccagtttgtgaggtaaagtctattattatgtgcattttaattcttagcgtttaattaaagcctcataagtacaaataaaaacaggacttgctataacaggttgccacctattttctttaaagatgacgagcagcatcttatttgcgttaacacaagtcatccacataacaaatatagataagaaaagtggccaggtgtggtggctcatgcctctaatcctagtactttgggaggccgaggcagacagatcacttgaggtcaggagttcgagaccagcctgggcaatatggtgaaaccccatctctatcaaaaatacaaatattagcccggcatggtggtgggcgcctgtaatcccagctacttgggaggctgaggcaggagaattgcttgaacctggaaggcgaagtttgcagtgagccaagatcatgccactgcactccagcctgggtgacagagcgagactctgtctcgaaaaaagaaaaaagaaaagaaaagaaaagtaaggcacttagagggtaagtggcttcactcggtactaagtaggggagtgtggatttgagccaagctgtgggttcaaaccacatcaacacctgctatgcctgactgcgtctccacgctgctgggaaggttgactgaatctgccactacctccctggggtgcatgtgcttaccaaaccattgcattatgtaaaaggcggtactgtaggtttttagttttttaatttttatttttttgagatagagtctcactctgtcacccaggctggagtgtagtggcatgatcttggctgactgcaatctctgccttccgggttcaagcgattctcttgcctcagcctcctgagtagctgggactacaggcccacaccaccacgcctggctaatttttgtatttttagtagagacagggtttcaccatgttggacatcatggtctcggtctcttgggctcattatctgcctgcctcggcctcccgaagtgctgggattacaggtgtgagccacagtgcctggcctctagtgacctcattttaacttgatcacctctgtaaagactctggttccaataaggtcacctctaaggtctggagggtcatggcttcaatacatgaattaggggtggggggcacaccatgcagcccataatactagcgtatctggttatgttaaacttgctatagccacagtcttgctgacttggattatggtgccatgggaagggcccttaaagatcatcttatctggttgggctcaatggctcacgcgtgtaattccagcactttgagaggccaaggcaagaggatcgcttgtgaccaagagttcaagaccagtctgggcaacagagcaagatgctatatctactacaggcatgcacctgtagtctcagctacttgggaggctgagagaagaggattgcttgagcccaggaggcaacagagagctgattgtaccactgcaccccagccgaggcaacagagagctgattgtaccactgcaccccagccaaggcaacagagaccttgtctctaaaaaacaaaaacaggccgggtgcagtgtcttatgcctgtattcccagcactttgagaggcagaggcgggtggatcatttgaagtcaggtgttcaagaccagcctggcaaacatgacgaaaccctaaaatacaaaaattagccgggagtggtggtgggtgcctgtaatctcagctactcgggaggctgaggcaggagaatcgcttgaacctgggaggcagaggttgcagtgagccgagatggagccactgcactgcagcctgggtgacaagagcaaaactctgtctcaaaatattaggaaaaaaaaagagagagagcctcttttccatctccccgccacagagttgtcttcagtaatttcattcccttttttcctgaggattcactgggtttctgggtcccagaggggaagttctcttcaaggtacagaaaccacgactccgcagagaaccgcagagaaccgcagagatggcagcatgaccagaccacggacaggtgtgtagaagctgctgggctgaaacttgggctgaacttccgctgcaggttgacttattcccatcagcaccaaagccgctggagggggtcatccactagcaaatgaagtgggggcacggattggaggctgtttcagaaggtcccactgagccacggactcaaggcctggccacagccctcccaagcgaggcccagatcatatttcaccacgctcagaaaaccttgccagctcatttcagtccacagtgactttgctttctttaggatctctcttgcactgtccaactcagagaatttcaaatctgaatggattccaatgatggagctaaatcaggcctcacctcagttttttaattacaatcaatagggctgggtcccagcatctgtgtcttaatgttcctccatgtgatcctcatgctgaaaggctggtatttgaaaatccctttttttggggagtgaagggtttttttagagacaggcctcactctgatgcccagcctggaatgcagtggtggatcacagctcactgcagcctcgaactcctggccgcaagaaatcctcccaccttagccaaccaaagtgttgggattgcaggagtgaccactgtgtccagccaggaaagcccttctgtttcacttgaatgatatttctgctgcagacctacagccattgttgtattaaacggcatcattgcaggaaaagaaaaggtgagaggtgactgttttgcttttttctgaacatatcagaccaaacctgggctgtctggcactttttttttttttttttttttgagtcggagtctcactctgtcgcccaggctggagtgtagtgtcgtgatctcggctcactggaacctccaccttcccggttcaagtgattctcctgcctcagccccacaagtagctgggattacagaagtgcactcccacgcccagctcattgtttctgtatttttacagaaaaacagacaggtttcaccatgttggccaggctgatctcaacctcctcacctctggttatctgtcggcatcagcttccaaaagtgctgggattacaagtgtgagctgccgcacctggtttgcccattttttgacaatgtatcaacatcatctaagatgggcactgcctcagtgtagtgtgtctagacaaggtggccggaacagagaggaatatgcataccaggcttaaagacgggttaaatcagagcttttcattccacaaaagagcaattttaatgaggtcagaacatggatgttctaatatttgaaagcctgttaactaggagagagagtaaagtgatttgttgtaggaggacacacccagctctgacggtttaaagcgtcatgaatgcaaatttgaactccagaaaagcagagcttcctaacaatgggacttccacagcaatgggatttccttccgcattcagtttgtgcctttcccatgagcgagagactcctaggagagccgcagcccgttaggaagccatgtgggaactcatccacaggttctttttgttttttttttttgttgtttttttttgagatgtagttttgctcttgttgcccaggctggagtgcaatggtgtgaccttggctcactgcaacctccgcctcccaagtttaagccattctgctgtccccgcctcctgagtggctgggattacaggcacccaccaccatgcctgactaattttttgtatttttagaagagatggggtttcaccatgttggccaggctgctcttaaactcctgacctcaagcgatccacctgctatggcctcccaaagcgctgggattacaggcgtgagccactgtgcctggccggaacccacaggttctttggatggtctctgaatgtcatgaaactcttttatatttaattaaaaaaatttttttgacacaaggtcttgctgtgttgcccagactggagtgcggtgtcacgatcacagctcactgcagcccctaactcctaggctcaagcaatcctcctgccacctcagtctctcaagttgttggaacacaggtgccagccacgacacctggctaattttgttttgttttgttttgttttgttttagagatgggctcttgctatgttgcctatactggtcttgaactgctggcctcaggcagtcttcctcccttggccacccaaagagatgggattacaagcatgagccactgtgcacagctgagatttttcgacttagtctttttgtacacccagtatcttatagaatatccataatatagattcataaataaaccatttccttcaatggtataaataaataaaccactgctataaatggtggaattttctgagttaagagcaatacatatgatacaaaacttgatatatagagtttcttagccaaactggaggggctggctttaggtgatccgtggactccctgaaattggggacaccattggaaatatgtgtgaactcatgggcagtttcctatgatttccagtcctcaaaatatctcttggactcaaagatgccttagggcagaggacgcgtgtacccccagtacagaatctcggacagtgaatgtcagtagacactcggcagaaaacctctgccaaattgagtgctctgatgtgactttttcatcaagtcaatgttcctgggatctcttgtacatgataatctcactcttgtaaggtttcatcgtttctgcttaccctacttttctttcccatcctgatccctctcccaccagactggactctgaaacgggcatgtacagagaagaggagaccccaacatgcttcaagctttgagtggagaggacacagcctctgctgggacagggaacagagggatgcggagaccctgaagatgcttttggacagtggtctgaggttgggacagtggcaggagataccattcacccaggatctccaggacaagagatcagcctggcagttacatgtgttttttttcaaactggttgccaggttggcatgagcgatgacatcagagattccgaccttcctgattggagggaccggactctgtcggcacctgggagttcagttggacaacagtaacttctcagagctgttctccactcctgacttctcccagcctcgagaattgataacacactcttctggatcccagcagtgtccagaagaagaccaaggacagaacagagactaggtttggtgagatgggacagattttgggaaagatcatgatgagccatcaaccgcagccccaggaagagcggagcccccagcggagcacctcagggtaccccctccaggaggtggtggatgatgaagtgtcgggaccatcaggtgaggggactggaggaagaagaggtggcataggattgactaagatgaaggaagggggccaggcgtggtggctcacccctgtaaccccaacactttgggaggctgaggcgggcagatcacctgaggtcaggagttcaagaccagcctggccaacatggtgaaaccccatctctactaaaagtacaaaaattagccaggcggtagtggtgtgtgcctataatcccagctacttgggaggctaagacaggagaatcacttgagcctgggaggaagaggttgcagtgagccgagatcgtgctactgcactccagtctgggtgacagagtgagatgctatctcaaaaaaaaaaaaaaaaaaaaaaaaaaaaaaaaaagaagaaaaaaaagaagggtcagaggtcaggaaggagaacctggggagggtgtgtgggaagaatggagaaattcaggctgggtgcagtggctcacacttgtaatcccagcactttgggaagccaaggcaggcggatcacttgaggccaggagtttgagaccagcctggccaacatggtgaaaccctgtctctattaaaagtacaaaatggagctgggcattatggcaggcacctgtaatcccagctacctgagaggctgaggcaggagaataactggaatccgggagatgcatgttgcagtgagctgagattgcaccactacactccagcctgggtgacaaagcaagattctgtctcgaaacaaaaaaaaaaaaaaaaaagagggactcagagagccagggaccagggaaggatatgaggcagtgttctgaggacagagagagggaagaatggggaggggaaggagtggcacatggggttgagcagaggagaaagtcagaaaggtggcttggagaagccagcagtctgcgaggctggggaggatggagagtggtttggggtttggggtcggggtctaacgtgatcagttgcagaagcattacacggtggcctggtttctttactcagcccctggggtagatcccagccccccacgtaggtcccttggctggaaaaggaagagggaatgtttggatgaatctgatgatgagccagagaaggagctcgcccctgagcctgaggagacctgggtggcggagacgctgtgtggcctcaagatgaaggcgaagcgacggcgagtgtcgctcgtgctccctgagtactacgaggccttcaacaggctgcttggtaggaggacaccccagagagcacctccaatcctgttctttctaaagaggaaacttccaataaccacacttttccaatgggaaaaatatgccccagtgggtgagctctccatgcgggaggactctgaagtgatcactcatgagggacacttaaggagacaacagaggattaggtagacttgataaaggtcggtgcttgggataagaaagcttggttttgggccaggcgctgtggctcccgcctgagatcccagcacgttgggaggctgaggcaagaggattgcttgaactcaggactttgaggctgcagtgagctatgactgcaccactgcactccagcctgggtgacagagcaaaactctgcgtcaaaagaaaaaccaaggctgggcacagtagctcatccctgtagttccagctactcgggaggctgagacaggagaactgcttaaacccaggaggcagaggttgcagtgagccaagatcaggccaatgcattccagcctggcccacagagcaagactctgtctcaaaataaattaataaataaataaaaataaaaatcaaataaagaaaaacaaaatcaaaaatcaaaaaagtggtttcagctgtgccctctgaaacttaatgtttcttactgacttttctaaacctaagtgtctccatccatagtgagggatcccaaggccatggtcacaccctgatgtgtgactgtctcatgaggaaatgatgggaattcctttatgactctgcagtggtccctccgtgtctgctggagggggtcctggctgattcccagctctacatcctgtagattctcacacccagggcctccttcggcctcttctcaggggagtctcagagcaggagcctctctcccttgcccagtgaaagtcattctcccctctctcatccacctcacccgcggccacaatcctgagactttcccccgggaggcacacttctcctcgctgccctgctgctctcacggaaaccctgtcctgcttctcacactgacatctgctctctaatcacagaggatcctgtcattaaaagactcctggcctgggacaaagatctgagggtgtcggacaaggtaaggttgttctctatgtaactgtgttcctgttctaacgcacggccagggggagggcgcagcttccaaacccacagttctccgtccaccacctcccaccagatgctcctacagtttttttttgtttttgtttttgtttttttttgtgagacacagtcttgctctgctgcccaggctggagggcagtgtctcgatcttgactcactgcagctgatgcctcctgggttcaagcgattctcccacctcagcctccaagcagctgggattacaaacatgaaccaccacgcctggctaatttttgtgtttttagtagagacggggttttgccatgttggccagattggtcccgaacacctgacctcaggtgatccacccgccttggcctcccaaagtgctgagattacagacgtcagcactgtgtctgaccagctcccatggtcttgagtcttggcacccacacattttttttttctgagacagagtccagctctgctccccaggatggagtacagtggcatgatcatagctcactctaattcctgggctcaagcaatcctctttccttagcctcctgaggagctgggactaggcacatgctaccatgctcaactaatttttgaaatcttcttagaaacagggtctcgctgtgttgcccaggttgttctccaactgttgggctcacatgatcctcctgtctccacctctcaaaaagtactgggatcacaggcttgagctgccactcccggctattctttgtctttttatgatttgtcagcatctccgtcaggattctgctggtctcttgcagagtgaatgagtggcccctgcctctcctatgggtcctttgggatctgagccctgggccacagtctggctgcagccctgaagctcctgggccctctactctcagctccttgggacagttctctgcctggcacacaaaagaccctcctgacaccagccgacctagacacaccccctccaaagatcccatcggagcccaccatcctgggagcatcaccaaaaacccttcctccggcttctcggatttgcatccgaccttcgaatacccctccaccccgcaatttccacatgagcacagtcaccccaacactgaggtcccttctctgatgggcaacccctccccagacccccattccactatatccacaatcttcctctcccaagatgtgaactctccctctctgtgttcctttctctccatcagtatctcctggctatggtcatagcgtatttcagccgggccggcctcccctcctggcaataccaacgcattcatttcttcctggctctgtgagtggtttgctgcctcctatccgtcaatatccaatgccctgggacagcgggggaagtgggattccagcctttcatttattctttcacctatttgtcctctttactctgtgtacaaaaaagacaggattatagtctcaaaaaaaaaaaaaaaagaacaaaaaacaaaaggaaccatgaaccgctcctaaggggagaagaaaaggagcggaggagcggacatgacacttcccccagcaagcagacgtttccggttgttctctctccttcccacatcaaccgcaaaagccatcagcctcctccgggttcccgtgacagaggtcacagtccaggtcccccttgcatcactcgaatccactgtcaaatgctccctgctggggtttcctggagtctctccccaagccagggggcttcctagtgcagcctgaacatctttccaaagcacgacaacctcactgcccacctgaacaacttccttagctgatgtctttctctatcgaggccagggtccacagtgccaattccaccctctctacaatctctacaaccacactggctcgccatcttggtgtttcctggcttggcttcactgctccttccaaatgccctccacttgactttgcatttgtgttttctgtctgggtgtcccgcacacatgtggttctgaagggaaggacccattccttgaagtcggttcaccccacagcctctgtgatgccttccctcgtcttccaacttctgcatgcccgtagctctccagttacatcctattataatgtgacattgggattaggtcatctcccctgattactcccagtcccattagactagatgcctgtagaaggcagggtcctggcaaaatatcagtgtattcaattgctttttttttttttttgagacagacttgccctgtcccctaagctggagtgcagtggtgagatcatagctcaccgcagcctccatatcctgggctcaagcgatcctcccacctcagcctcttgattagctccgactacagggctgtaccaccacacctggacagttatttatttatttatttatttatcaagacaagagtgttgctgtgtctctcaggctggaatggaggggcccaatcttggctcactgcaacctccgcctcctgggttcacacaattcttatgcttcagcctcctgagtagctaggactaatgggtgtgccaccgcaccaggctgatttttgtatttttagtatagatggggtttctctgtgttgaccaggctggtctcaaactcctggtctcaagcaatccacctgcttcagccttccaaagcgctgggattacaggcatgagccaccacgtctggcgtattttttatatttttaatagagacgagggtcttgctatgttgcccaggcctgtctcaaactcctggcctcaagtgatcctcctgcttcggcctcccagtgtgctgggattccaggcataagccaccactcttggtcaccagttgggtttttgtctccatcctgaaggagtgggagacgcccttgatcaggtctctgtccagcagagccctcctgaggaaggcgtggctctctgcagggtgggtgccagtcctgagctagggacggtcccttaccttcctctctgagaagctgacctcagccggaggtctctcctggtggtgcccctgagcagcaacctgatttctgtcctcagctatctggccaatgacatggaggaggacgacgaggcccccaaacaaaacatcttctacttcctgtacgaggagacccgctctcatatacccttgctcagtgagctttggttccagttatgccgttacatgaacccgagggccaggaagaactgctctcagatagccttgttccggaagtatcggttccacttcttttgttccatgcgctgcagggcttgggtttccctggaggagttggaagaggtgggtggggcctggggacgtggaggatgtggggaggaatcgggtgggctggaggctggacgaggggagagaggggtatcctggggagtccccgtcttctcaaagcgcgtttgtttttccagatccaggcttatgacccagagcactgggtgtgggcgcgagatcgcgcccacctttcctagagctccagggaccgtggaggcctgaggtcatcggcctgagagaaggtacatctgcatcctccggggtaaaggcagaatattggggtctatttcggaaatccaaggaacccaattgcttgatctggcttcaagcctgggcaacgtggcgagatcccctctccacaaaaatacaaaaattagccaggcgatgtgggaggcatctctactcccaactactcaggaggctgaggcgggaggatcgctggagcctgggaggtcggggctgcagggagccctgatcctgccactgcactccagcccgggcgacagagtgagaccctgcctcaaaaataatcataaatactgagttcggggaggttcattatgattgatgcacttgagttaccgatttgggtcgagggttcagtgaagctttggtttacatcttgtgcagctaaccatgttgagcacagagcatgagacttcgtcatgaggagggaggattatggattaggcttctggactcgtggttcgtgatgctgtcacgttagaaacagatctagcacggttacaagtttagatctgaagtgacacaaaaggccccagctgtgatgaagtccaaagccacattctctgagggtgccctactccctgggaagacccacccaaagtcctggctatgaagcagatcactggggctgaccttgggtgtattaagttttggagtcagggtcaccaaagtgtgagtttcacagttgaacacgatggttcagaagcagggtatagaatgaaaggcaggagataaaattgcacttctcaattgctctgaactctagctagacttgacatgggacgtgaataaccttcctgtctagagagctgcctccttgaagtgtgacattgtctctctcacttccagaacaccggacccaggggagatgtggattttcagcaggaactttattccaatgctaatggcagacatcaggaaggaggagaggaaccattggtgcagatcatctagaagaacctggaccattcttgacagagctgaatacagtgatcacgttgtcctccaaggagcaggggtggggtggggtacttctaggagtccttggagaaaagtaagaaaccaggagtgtttccagttccaccctttcctgcggcaccacctccctttttatattgctgaatgccaacctccctggggcggaacctggaggtcctgtttcttatggacttggttgccacagtccaggagcatttgaaggcacagtgcaggggctcagattggcacagaattctttgtgaaatatgagtgccacagactgtaacagatagcttcatgcacactatgcattttattggtttgtttggaaaatgttggccattgaattattaataggtttatttcaaatagtttggaaattgttgtacttttgaaaacatgctgttcctgtagagttttttgatgagagttatagttgttatatatacctaaagataattttcttttcatttttaagtgagaattctttttatcctaaatcttttattatctttaaatttttttctgtattattatatgtgctcctgaagcgagcactctttttatctatgatacttccataataatctcttctatttatagctattggtagttccccaccagaaaaaaacataattctggtgatagaaatttttatttgctgtttaggtttgtgactgacttgtgagaattcagttgtgatttttaacatgtctcagatatatatactaacacgtctaatatatactatctattttattggtttattttgaaaaacatgggtatagaattatttaaatattattttatttactgaaatatttattaaatatatttatttatttaaatattattattactttaaatattattttaaatattttggaaatactggtatttttgaatagatgctgtttctataaagctgtgtgatgggtattataactgttgtatacacatacatataattttgttttcctttttaagagaggattcttttcatcctaaatcttttacctttcaatctttgtatctattattacacgtgctgctgaagggagcatggtttttatctatgatacttagttaacatatatattacatttatagctatgtggtagttcccctaaattcttgtaaaaataaatttttatttgatatttagtgtatgtttgaaatgtgagaattcagatggaattttttatcttgttttggcatgtttgtatgttactttaaagaggatgtgtgttctaaaggaggacatgagctgtgtgttttcaagagaacagtgcagtgcatctcttggggaaacataataaagatgaacttttctcaccttcacagtgagtgtgatcatattgtggtctggattgattatttgctgtcaagtgacatttttccttaatggggttgtggttatttgaacatatttgttagctttggaagataatcctgtgctgttttttatgtagaaaaaaacatacggctgggtgcagtgctcacacctacaatcccagcagttttggaggtcatggcgggaggatcacttgaagcctatttttaatttttattttttaaagaaaaacaacagaagagaaggctgatcccaagctacagggtttttttgtttgtttgtttgtttgtttgttttggagacagtctcgctctgtctcccaggctggagtgcagtggcacaacctcggctccctgcaactttcacctcggcgttcaagcaaattctcctgcctcagcctcccaagtagctgggactacaggcatccgcctgtacgtctgactaacttttgtaaaaatagtagagacaaggtttcaccatgttggccaggctggtctcaaactcctgacctcaagtgatccacccgcctcagtctcccaaagtgctgggattataggcatgagctactgtgcccagaccccaagctagagttttaaagcaggaaatgagagaaagatattgagagaggaaaaccaggtggtaagaaaactctaaaggtggctgggcgtggtggctcacgcctgtgatcccagcaggagttcgagaccaggcaggagaatcactagcagagaatatgtctccccaacccctctcaaaaaaaaaaaaaaaaaagtccaggcgcggtggctcaggactgtaatcccagcactttgggaggctgaggtgggtggatcatgaggtcaggagatcaagaccatcctggctaatacggtgaaaccccatctctgctaaaaatacaaaaaattagctgggtgcggtggcaggcgcctgtagtcccagctactccggaggctgaggcaggagaatggtgtgaacccaggaggcggagcctgcagtgagcagagatcgcgccactgcactccagcctgggtgaaagcgcgagactccatcacaaaagaaaaaaaaaaaaagaaagttcctgcaacagttcaagctgtgaaagacaggcactctgccatgcaattctttgtgatttttcttttttatttttggagtcggggtcttgtgctgtcacccagactggggtgcagtggtgcggtcatagctcactgtgggctcagactcaagctcaagcaatcttcttatcttgcctttctaattgctgggattataagcatgagccactgcacctggcctgtgtgacgtaattctgatgtcaactccctgatgttacatcaaatgccacaggttaaggccaccagcccccgctaggctgccctcgcttcagatgcagctgcaagcttgggtgtccacagaccgcatgtacttctcaccaactggctgcaaatttggaggttcccaccacgtcctcaggtttgataattcaccataacaacccacagaactctgaaaagcatgatactttctctttctttatttgagacagagtcttgctctgtcacccaggctggagtgcagtggccaccatgcttggctaattttagtatttgtattagagacagggtttcgccatgttggccaggctggtcttgaactcctgacctcaggtgatccacccaccttggcctcccaaagtgctgggattacaggcatagccactgtgcctggctgacttctagagtttcaataacagagatgtggttcaagaagaaaagggagacatgttttgtagacagcaggagcttcatgaaaagaagccaatgaagggcaggatgtgtagctgtctacctacaggaaaccagccaggagcctccccacagggacttcagcacagatggccgggaaaatctgcattcacctgagctctggacctaagagaggacaaggccttgactgtttctacagactcacaagatgcaatctctgcggtccatgcccgtggtgtgatctgggaaacagggggccttctaaatgccaacaacaaggaaatcaaatgtgcaacagacagaaatatcggcattgacacgggccatggagaggcctaaacagatgactgcagtccactgccaaggtcatcaaaggggtgactctgaaataagaaatttcagacgccacggcccaaatagctgcacgaggtggggaagtcctccacatgcctctgcttccttcagtacctcttcatgaaataagccgaggtacttccctggggaatttcctttctctttctttctttcgagacggagtcttgctctgtcgcccaggctagagtgcagtggcgcgatctcggctcactgcaacctctccctcccgggttttggcaattcttctgtctcagacttctgagtagctgagattacaggtgtgtgccaccatgcccagctaatatttgtattttcactcgagacagggtttcaccatctaggccaggctggtcttgaactcctgacctcatgatccacccatcttggcctcccaaagtcctgggattacaggcacgagccaccacacccagacttcttgttttattttttgagatgaagtttcgctcttgttgcccaggctggagtgcaatggcgagatctcagctcactgccacctcctcctcctcccaggttcaagtgattatcctgcctcagcctcccgagtagctgggattacaggcacccaacaccaaaccccgctgactttttgtatttttagtagagatggaatgtcaccatgttggccaggatggtcttgaacccctgacctctaatgatctacccgaattggtctcccaaaatgctgggattacaggcgtgagccactgtgcccagcccctcccatacctcttttggccaaggcagtacaattcagagaatcttgccagggaagactggtaaatggacatcaacatgatgcctatggctcctggtggatttagatacctcctggtgcttactgatacctttaccagttacatgggggcttttccatgccagactgaaaatgctggagatcactgatcaaccttcaactatttactagcagaacactgaggggactctgcagtcaccaatatctcctattgcacttggataaacacctcccgggaaatagagatgaatagaaaggaaatacttaaacaagcagaatggctacattccttcaaccagaagggtccattagtctgttttcacactgctataaagaactactggaaactggggaatttatgaagaaaagaggtttaattgactcacagttttgcaggctgtacaggaagcatggctggggagccctcaagaaactgacaatcacggcagaaggcgaaggggaagcaggcacgtttctggccatggtggagcaggagagacagagagagtgaagcaggaggtgctgcatgcttctaaacaaccagatcccatgagcgctcactatcacgagaccagcaagggggacgtcagccgccatgagccaatcatctcccaccaggtccctccctcaacactgggaattgcaattggacatgagatttggttggggatacagagctgaaccatatcaagggtagttcaaccactgagattgattgattgactgagatggggtcctgctctgttacctaggctggagtgcagtggcacaatctcggctcactgcaacctccgcctcccaggttcaagcaattctcctgcctcagcctccctagtagctgggactacagcacacgccaccacacctggctaatttttgtattttcagtagagacggggtttcaccatgtttgcccggctggtcttgaactcctgacctcgtgatcaccctgcctcggctcttcttttgctggaattacaggcgtgagccaccgcacccggacaaccactgagatttagaaggc

SEQ ID NO: 7091 - DNA, 377 bp, Rattus norvegicus
  ref <308>: DATABASE ACCESSION NUMBER: EMBL / AI179012
  ref <309>: DATABASE ENTRY DATE: 2000-03-03
gcgcaagttaggttttgtcaaagaaagggtgtaaaacgcagctcagtaacagtccgcctagaagcatttgcggtgcacgatggaggggccggactcatcgtactcctgcttgctgatccacatctgctggaaggtggacagtgaggccaggatagagccaccaatccacacagagtacttgcgctcaggaggagcaatgatcttgatcttcatggtgctaggagccagggcagtaatctccttctgcatcctgtcagcaatgcctgggtacatggtggtgccaccagacagcactgtgttggcatagaggtctttacggatgtcaacgtcacacttcatgatggaattgaatgtagtttcatggatgccacaggatt

SEQ ID NO: 7092 - protein, 375 aa, Rattus norvegicus
  ref <308>: DATABASE ACCESSION NUMBER: Refseq / NP_112406
  ref <309>: DATABASE ENTRY DATE: 2001-04-11
MDDDIAALVVDNGSGMCKAGFAGDDAPRAVFPSIVGRPRHQGVMVGMGQKDSYVGDEAQSKRGILTLKYPIEHGIVTNWDDMEKIWHHTFYNELRVAPEEHPVLLTEAPLNPKANREKMTQIMFETFNTPAMYVAIQAVLSLYASGRTTGIVMDSGDGVTHTVPIYEGYALPHAILRLDLAGRDLTDYLMKILTERGYSFTTTAEREIVRDIKEKLCYVALDFEQEMATAASSSSLEKSYELPDGQVITIGNERFRCPEALFQPSFLGMESCGIHETTFNSIMKCDVDIRKDLYANTVLSGGTTMYPGIADRMQKEITALAPSTMKIKIIAPPERKYSVWIGGSILASLSTFQQMWISKQEYDESGPSIVHRKCF

SEQ ID NO: 7093 - DNA, 767 bp, Homo sapiens
  ref <308>: DATABASE ACCESSION NUMBER: EMBL / BE732178
  ref <309>: DATABASE ENTRY DATE: 2000-09-19
agagctcgcctttgccgatccgccgccgtccacacccgccgcagctcaccatggatgatgatatcgccgcgctcgtcgtcgacaacggctccggcatgtgcaaggccggcttcgcgggcgacgatgccccccgggccgtcttcccctccatcgtggggcgccccaggcaccagggcgtgatggtgggcatgggtcagaaggattcctatgtgggcgacgaggcccagagcaagagaggcatcctcaccgccgcgcggtgaggttgtctagtccacgctcggagccatgccgtccaagggcccgctgcagtctgtgcaggtcttcggacgcaagaagacagcgacagctgtggcgcactgcaaacgcggcaatggtctcatcaaggtgaacgggcggcccctggagatgattgagccgcgcacgctacagtacaagctgctggagccagttctgcttctcggcaaggagcgatttgctggtgtagacatccgtgtccgtgtaaagggtggtggtcacgtggcccagatttatgctatccgtcagtccatctccaaagccctggtggcctattaccagaaatatgtggatgaggcttccaagaaggagatcaaagacatcctcatccagtatgaccggaccctgctggtagctgaccctcgtcgctgcgagtccaaaaagtttggaggcctggtgcccgcgctcgctaccagaaatctaccgataagcccatcgtgactcaaaactcacttgtataataacagtttgag

SEQ ID NO: 7094 - protein, 145 aa, Homo sapiens [sequence omitted]

SEQ ID NO: 7095 - DNA, 589 bp, Rattus norvegicus
  misc_feature (1)..(589): n=a, c, g or t
  ref <308>: DATABASE ACCESSION NUMBER: EMBL / AI179399
  ref <309>: DATABASE ENTRY DATE: 1999-01-22
ttactttttgtaaaggtggtcattgtcgttgttttaatctaaactgccatattgaaaaaaattaagtcaattaaacttgagaattgtaagtaaaataaatattctgaaggataaggtggtcaggcacttcagatcatatgtacaaagctgatgcaggaccagccattacttcaagagtctcaggatgaacttcaaacagtcacagttcttgtgttggtcattgatggtagtctcgatacttctggacttctgttacatgaaacaaactggcccaatttcaaagccaaattcctggtctgcattgccaatatccacaggaccgatatctatgatgggcaagcgggccacattctgtgttctgtattcaaagacagtcttgcctacatttccatttcgctttgaacaggtatcttgaagaacggtgtatctgaatctgatgtttccttctccttttatttctaagtcatttgaccctttaagaaccacagctttcttgaggtttttagtttgatcatccatataaccaacagtgttccctcgtgccgaattcttggnctcgagggccaaattccctatagtgagtcgtatt

SEQ ID NO: 7096 - protein, 469 aa, Rattus norvegicus
  ref <308>: DATABASE ACCESSION NUMBER: SWISS-Prot / CAA12180
  ref <309>: DATABASE ENTRY DATE: 2002-10-01
LGPVGPPGSNGPVGEPGPEGPAGNDGTPGRDGAVGERGDRGDPGPAGLPGSQGAPGTPGPVGAPGDAGQRGEPGSRGPVGPPGRAGKRGLPGPQGPRGDKGDNGDRGDRGQKGHRGFTGLQGLPGPPGPNGEQGSAGIPGPFGPRGPPGPVGPSGKEGNPGLLGPIGPPGVRGSVGEAGPEGPPGEPGPPGPPGPPGHLTAALGDIMGHYDENMPDPLPEFTEDQAAPDDTNKTDPGVHSTLKSLSSQIETMRSPDGSKKHPARTCDDLKLCHPTKQSGEYWIDPNQGSAEDAIKVYCNLETGETCISANPASVPRKTWWASKSPDNKPVWYGFDMNRGFQFTYGDYKSPNTAITQMTFLRLLSKEASQNLTYICKNTVGYMDDQTKNLKKAVVLKGSNDLEIKGEGNIRFRYTVLQDTCSKRNGNVGKTVFEYRTQNVARLPIIDIGPVDIGNADQEFGFEIGPVCFM

SEQ ID NO: 7097 - DNA, 341 bp, Homo sapiens
  misc_feature (1)..(341): n=a, c, g or t
  ref <308>: DATABASE ACCESSION NUMBER: EMBL / AA348035
  ref <309>: DATABASE ENTRY DATE: 2000-03-08
aattcggcgttgaaattgggccagtttgttttgtgtaaagtaagccaagacacatcgncaatgagcaccaccatcaatgaccaccgccattcacaagaactttgactgtttgaagttgatcctgagactcttgaagtaatggctgatcctgcatcagcattgtatatatgggtcttaagtgcctggcctccttatccttcagaatatttattttnacttacaatcctcangttttaattgnttttaaatatttttcantacaacagttttaggnttaagatgacccaatgacaatgacccaccttttgcaggaaagtaaaacggattggattaaataaatc

SEQ ID NO: 7098 - protein, 1496 aa, Homo sapiens
  ref <308>: DATABASE ACCESSION NUMBER: Refseq / NP_000384
  ref <309>: DATABASE ENTRY DATE: 2001-10-31
MMANWAEARPLLILIVLLGQFVSIKAQEEDEDEGYGEEIACTQNGQMYLNRDIWKPAPCQICVCDNGAILCDKIECQDVLDCADPVTPPGECCPVCSQTPGGGNTNFGRGRKGQKGEPGLVPVVTGIRGRPGPAGPPGSQGPRGERGPKGRPGPRGPQGIDGEPGVPGQPGAPGPPGHPSHPGPDGLSRPFSAQMAGLDEKSGLGSQVGLMPGSVGPVGPRGPQGLQGQQGGAGPTGPPGEPGDPGPMGPIGSRGPEGPPGKPGEDGEPGRNGNPGEVGFAGSPGARGFPGAPGLPGLKGHRGHKGLEGPKGEVGAPGSKGEAGPTGPMGAMGPLGPRGMPGERGRLGPQGAPGQRGAHGMPGKPGPMGPLGIPGSSGFPGNPGMKGEAGPTGARGPEGPQGQRGETGPPGPVGSPGLPGAIGTDGTPGPKGPTGSPGTSGPPGSAGPPGSPGPQGSTGPQGNSGLPGDPGFKGEAGPKGEPGPHGIQGPIGPPGEEGKRGPRGDPGTLGPPGPVGERGAPGNRGFPGSDGLPGPKGAQGERGPVGSSGPKGSQGDPGRPGEPGLPGARGLTGNPGVQGPEGKLGPLGAPGEDGRPGPPGSIGIKGQPGTMGLPGPKGSNGDPGKPGEAGNPGVPGQRGAPGKDGKVGPYGPPGPPGLRGERGEQGPPGPTGFQGHPGPPGPPGEGGKPGDQGVPGGPGAVGPLGPRGERGNPGERGEPGITGLPGEKGMAGGHGPDGPKGSPGPSGTPGDTGPPGLQGMPGERGIAGTPGPKGDRGGIGEKGAEGTAGNDGAGGLPGPLGPPGPAGLLGEKGEPGPRGLVGPPGSRGNPGSRGENGPTGAVGFAGPQGSDGQPGVKGEPGEPGQKGDAGSPGPQGLAGSPGPHGPNGVPGLKGGRGTQGPPGATGFPGSAGRVGPPGPAGAPGPAGPLGEPGKEGPPGPRGDPGSHGRVGVRGPAGPPGGPGDKGDPGEDGQPGPDGPPGPAGTTGQRGIVGMPGQRGERGMPGLPGPAGTPGKVGPTGATGDKGPPGPVGPPGSNGPVGEPGPEGPAGNDGTPGRDGAVGERGDRGDPGPAGLPGSQGAPGTPGPVGAPGDAGQRGDPGSRGPIGHLGRAGKRGLPGPQGPRGDKGDHGDRGDRGQKGHRGFTGLQGLPGPPGPNGEQGSAGIPGPFGPRGPPGPVGPSGKEGNPGPLGPLGPPGVRGSVGEAGPEGPPGEPGPPGPPGPPGHLTAALGDIMGHYDESMPDPLPEFTEDQAAPDDKNKTDPGVHATLKSLSSQIETMRSPDGSKKHPARTCDDLKLCHSAKQSGEYWIDPNQGSVEDAIKVYCNMETGETCISANPSSVPRKTWWASKSPDNKPVWYGLDMNRGSQFAYGDHQSPNTAITQMTFLRLLSKEASQNITYICKNSVGYMDDQAKNLKKAVVLKGANDLDIKAEGNIRFRYIVLQDTCSKRNGNVGKTVFEYRTQNVARLPIIDLAPVDVGGTDQEFGVEIGPVCFV

SEQ ID NO: 7099 - DNA, 438 bp, Rattus norvegicus
  ref <308>: DATABASE ACCESSION NUMBER: EMBL / AI179445
  ref <309>: DATABASE ENTRY DATE: 1999-01-22
tagattgttattggtccgtaactggtatgaacagtctctgtgactttggcaaataaccaggagccaagtccatataataaagttgggatacccatgttgatgaccttgagcgcggtgaagaagcggttttgcgcggccaggtcttgccagggcgccttggagcaatggtacttgatgaaggggaagcagccagtgcgcaggacgtggtagttggcgcccggcaccggccaattgaagtgcgaaaggccgaactggtcgttgtggaccgcactgtagggcacgcagaaggaggtccagtgcggcaggcgccgctgcagcaggtgccgcgtcagcacctccgaggcgcggggcttcgcctcgtgccgaattcttggcctcgagggccaaattccctatagtgagtcgtattaaattcgtaatcatgtcatagctgtttcc

SEQ ID NO: 7100 - DNA, 466 bp, Homo sapiens
  ref <308>: DATABASE ACCESSION NUMBER: EMBL / AI003932
  ref <309>: DATABASE ENTRY DATE: 2000-03-03
tttttttttacatggcaccttcatcttctttattgagaaaataaactgttatgggtccataactggtatgcacagtctctgtgactctggcaaataaccaggagccaagtccatataataaagttggaatacctcaggaagctgttatgtctggtgaaaacctttggtgcttttagtaaaacgaacttgccgggaattcatacaaagaaaacaaaagaaacttaaaagagtagttccagttattgcaacataaacgcagctgcaaagtgatgttcacgggaatgagtcctgccatgcagtaggacggatgtcaacttcagagccactttctagggggcgtttcctgacgccgctggcttactgcccaggccaggggtctactctggttaacatgggcaggacaggagggcgaccgctctccctaggcccgaggacgcgcccgcagcaggcgaacggcttcgggtgc

SEQ ID NO: 7101 - DNA, 438 bp, Rattus norvegicus; identical to SEQ ID NO: 7099
  ref <308>: DATABASE ACCESSION NUMBER: EMBL / AI179445
  ref <309>: DATABASE ENTRY DATE: 1999-01-22

SEQ ID NO: 7102 - DNA, 466 bp, Homo sapiens; identical to SEQ ID NO: 7100
  ref <308>: DATABASE ACCESSION NUMBER: EMBL / AI003932
  ref <309>: DATABASE ENTRY DATE: 2000-03-03

SEQ ID NO: 7103 - DNA, 520 bp, Rattus norvegicus
  ref <308>: DATABASE ACCESSION NUMBER: EMBL / AI179916
  ref <309>: DATABASE ENTRY DATE: 1999-01-22
ggtgttgtaaaatcaaagcactactttattaaatgagttattttacacaatatgaacatcaatataattacaattgtaaaaaaattttataacaagaatggactgatttttcagatttccacatcagagtcaactgtacatttacacagaattgtctttgcatgaagcccaaagggaacagcataaaaatgagtgtttctgtagcccctttattttttgctgatcaacagtttgtttaaaaaagcagctgcaggtttgttacctaatgtctgagacagtagaagagtccaaggtgtcatgaattcacctgtaaacaactttatgcctgaacatcagccaattctggaggaagtggagtcttagggtgcttgctctcaaagtgctgcttgaaggtcttggggtcaggcatttgtgtcctacagactgtgcaggtatatattaaggcagctttggcagcagccttttggtcatgtccttgtttcttcttttgtccagcctgctttttggcatttttctgctg

SEQ ID NO: 7104 - protein, 76 aa, Rattus norvegicus
  ref <308>: DATABASE ACCESSION NUMBER: SWISS-Prot / BAB23156
  ref <309>: DATABASE ENTRY DATE: 2003-02-01
MARGQQKIQSQQKNAKKQAGQKKKQGHDQKAAAKAALIYTCTVCRTQMPDPKTFKQHFESKHPKTPLPPELADVQA

SEQ ID NO: 7105 - DNA, 412 bp, Homo sapiens
  misc_feature (1)..(412): n=a, c, g or t
  ref <308>: DATABASE ACCESSION NUMBER: EMBL / R77959
  ref <309>: DATABASE ENTRY DATE: 2000-03-04
tatcctgtgattttcgtaaatcaaagtactattttattaaatgagttattttacacaatatgaacatcaatataattacaattgtaaaaaaattttttataacaaggatggactgattttcatatttccaaatcagagtcaactgtacatttacacagaattgtctttgcatgaagcccaagagggaacagcataaaaatgagtgtttctgtagcccctttatttttgctgatcaacagtttgttagaaaagcagctgcagggtatgttacctaaggtctgagacagtaggaagagtcaaagggtgtcatgaattcacctggtaaacaaccttatgcctgaacatcagctaattctgggggggnagtgggagtcttagggntgcttgctcttcaaagtgctggcttgaaggg

SEQ ID NO: 7106 - protein, 76 aa, Homo sapiens; identical to SEQ ID NO: 7104
  ref <308>: DATABASE ACCESSION NUMBER: Refseq / XP_018277
  ref <309>: DATABASE ENTRY DATE: 2002-08-01

SEQ ID NO: 7107 - DNA, 504 bp, Rattus norvegicus
  ref <308>: DATABASE ACCESSION NUMBER: EMBL / AI180108
  ref <309>: DATABASE ENTRY DATE: 1999-01-22
atgtaaggttctcttttatttaaaagatcattcacaaaataccatatccatagactcactttctgtcatagaactgaatgtgttaagtgtttggaattccattcttacagagtcagctgggcgcccagcagtgtggatggacgtgcctgttctgtcttttccgcattggagatggattagatcatctgaaagcatcagctttgattacaaccacgcaatgcatgtctgtcttaagttaggtattggtgttacacaaatggttcttatctcagaagcagagaaaatggcaggcgagggaaggagtgagagttctgtaaattgccgagaccttgcgacaaagacaatcatgagccaaggggtggctggcaggaagctgctggctaacgagcaagctgcgcacctcagcccttctttcccaaggctctagtggctggctgacccctacctgctccgactggaacagatggagaccctcgtgccgaattcttggcctcgagggccaaa

SEQ ID NO: 7108 - protein, 248 aa, Rattus norvegicus
MADFDTYDDRAYSSFGGGRGSRGSAGGHGSRSQKELPTEPPYTAYVGNLPFNTVQGDIDAIFKDLSIRSVRLVRDKDTDKFKGFCYVEFDEVDSLKEALTYDGALLGDRSLRVDIAEGRKQDKGGFGFRKGGPDDRGMGGSRESRGGWDSRDDFNSGYRDDFLGGRGGSRPGDRRAGPPMGSRFRDGPPLRGSNMDFREPTEEERAQRPRLQLKPRTVATPLNQVANPNSAIFGGARPREEVVQKEQE

SEQ ID NO: 7109 - DNA, 2477 bp, Homo sapiens; identical to SEQ ID NO: 5309
  ref <308>: DATABASE ACCESSION NUMBER: EMBL / D26068
  ref <309>: DATABASE ENTRY DATE: 2002-09-02

SEQ ID NO: 7110 - protein, 248 aa, Homo sapiens; identical to SEQ ID NO: 5310
  ref <308>: DATABASE ACCESSION NUMBER: SWISS-Prot / Q15056
  ref <309>: DATABASE ENTRY DATE: 2002-06-15

SEQ ID NO: 7111 - DNA, 417 bp, Rattus norvegicus
  ref <308>: DATABASE ACCESSION NUMBER: EMBL / AI180288
  ref <309>: DATABASE ENTRY DATE: 1999-01-22
gaaagctgtgatattggttagttacaagggcgtactatgaaatagaatagcgcagcacatgaaagagtcatctaccattagtgtgtctgtatacacgtatgcacatacattacatagttgggttatctaaatgtggttcagtctactatcgctaccagagaaatccacaaagcaactaacctgaagaaaaaaatcagtaccactgtcagctaaaataatcacccaatctaggtatgaatcagcatagaagaaaagcaatatgtcaacagtacatcttcttttttaaaaaaaagacaatcatcactgccctatatcagatctgaagtggatcactttcagagaattttgattgcctacttagataatttcttccatgctttagtctaaagtgcagaaacatgatgtctgcctcgtgcc

SEQ ID NO: 7112 - protein, 181 aa, Rattus norvegicus
  ref <308>: DATABASE ACCESSION NUMBER: SWISS-Prot / P02761
  ref <309>: DATABASE ENTRY DATE: 2001-10-16
MKLLLLLLCLGLTLVCGHAEEASSTRGNLDVAKLNGDWFSIVVASNKREKIEENGSMRVFMQHIDVLENSLGFKFRIKENGECRELYLVAYKTPEDGEYFVEYDGGNTFTILKTDYDRYVMFHLINFKNGETFQLMVLYGRTKDLSSDIKEKFAKLCEAHGITRDNIIDLTKTDRCLQARG

SEQ ID NO: 7113 - DNA, 2198 bp, Homo sapiens
  ref <308>: DATABASE ACCESSION NUMBER: EMBL / D90452
  ref <309>: DATABASE ENTRY DATE: 1999-01-21
caactgcggacatgctgggtggatccggatcgcatggaagacgcagcctggccgcgctctcccaaatcgcctaccagaggaatgacgatgatgaagaggaggcagcccgggaacggcgccgccgagcccgacaggaacggctgcggcagaagcaggaggaagaatccttgggacaggtgaccgaccaggtggaggtgaatgcccagaacagtgtgcctgacgaggaggccaagacaaccaccacaaacactcaagtggaaggggatgatgaggccgcattcctggagcgcctggctcggcgtgaggaaagacgccaaaaacgccttcaggaggctctggagcggcagaaggagttcgacccaacaataacagatgcaagtctgtcgctcccaagcagaagaatgcaaaatgacacagcagaaaatgaaactaccgagaaggaagaaaaaagtgaaagtcgccaagaaagatacgagatagaggaaacagaaacagtcaccaagtcctaccagaagaatgattggagggatgctgaagaaaacaagaaagaagacaaggaaaaggaggaggaggaagaggagaagccaaagcgagggagcattggagaaaatcagggagaagagaagggaactaaagtgcaagctaaaagagaaaagctccaagaagacaagcctaccttcaaaaaagaagagatcaaagatgaaaagattaaaaaggacaaagaacccaaagaagaagttaagagcttcatggatcgaaagaagggatttacagaagttaagtcgcagaatggagaattcatgacccacaaacttaaacatactgagaatactttcagccgccctggagggagggccagcgtggacaccaaggaggctgagggcgccccccaggtggaagccggcaaaaggctggaggagcttcgtcgtcgtcgcggggagaccgagagcgaagagttcgagaagctcaaacagaagcagcaggaggcggctttggagctggaggaactcaagaaaaagagggaggagagaaggaaggtcctggaggaggaagagcagaggaggaagcaggaggaagccgatcgaaaactcagagaggaggaagagaagaggaggctaaaggaagagattgaaaggcgaagagcagaagctgctgagaaacgccagaagatgccagaagatggcttgtcagatgacaagaaaccattcaagtgtttcactcctaaaggttcatctctcaagatagaagagcgagcagaatttttgaataagtctgtgcagaaaagcagtggtgtcaaatcgacccatcaagcagcaatagtctccaagattgacagcagactggagcagtataccagtgcaattgagggaacaaaaagcgcaaaacctacaaagccggcagcctcggatcttcctgttcctgctgaaggtgtacgcaacatcaagagtatgtgggagaaagggaatgtgttttcatcccccactgcagcaggcacaccaaataaggaaactgctggcttgaaggtaggggtttctagccgtatcaatgaatggctaactaaaaccccagatggaaacaagtcacctgctcccaaaccttctgacttgagaccaggagacgtatccagcaagcggaacctctgggaaaagcaatctgtggataaggtcacttcccccactaaggtttgagacagttccagaaagaacccaagctcaagacgcaggacgagctcagttgtagagggctaattcgctcttttgtatttatgttgatttactaaattgggttcattatcttttatttttcaatatcccagtaaacccatgtatattatcactatatttaataatcacagctagagatgttcatggtaaaagtactgcctttgcacaggagcctgtttctaaagaaacccatgctgtgaaatagagacttttctactgatcatcataactctgtatctgagcagtgataccaaccacatctgaagtcaacagaagatccaagtttaaaattgcctgcggaatgtgtgcagtatctagaaaaatgaaccgtagttttgtttttttaaatacagaagtcatgttgtttctgcactttataataaagcatggaagaaattatcttagtaggcaattgtaacactttttgaaagtaacccatttcagatttgaaatactgcaataatggttgtcttt

SEQ ID NO: 7114 - protein, 793 aa, Homo sapiens
  ref <308>: DATABASE ACCESSION NUMBER: SWISS-Prot / Q05682
  ref <309>: DATABASE ENTRY DATE: 2002-06-15
MDDFERRRELRRQKREEMRLEAERIAYQRNDDDEEEAARERRRRARQERLRQKQEEESLGQVTDQVEVNAQNSVPDEEAKTTTTNTQVEGDDEAAFLERLARREERRQKRLQEALERQKEFDPTITDASLSLPSRRMQNDTAENETTEKEEKSESRQERYEIEETETVTKSYQKNDWRDAEENKKEDKEKEEEEEEKPKRGSIGENQVEVMVEEKTTESQEETVVMSLKNGQISSEEPKQEEEREQGSDEISHHEKMEEEDKERAEAERARLEAEERERIKAEQDKKIADERARIEAEEKAAAQERERREAEERERMREEEKRAAEERQRIKEEEKRAAEERQRIKEEEKRAAEERQRIKEEEKRAAEERQRARAEEEEKAKVEEQKRNKQLEEKKRAMQETKIKGEKVEQKIEGKWVNEKKAQEDKLQTAVLKKQGEEKGTKVQAKREKLQEDKPTFKKEEIKDEKIKKDKEPKEEVKSFMDRKKGFTEVKSQNGEFMTHKLKHTENTFSRPGGRASVDTKEAEGAPQVEAGKRLEELRRRRGETESEEFEKLKQKQQEAALELEELKKKREERRKVLEEEEQRRKQEEADRKLREEEEKRRLKEEIERRRAEAAEKRQKMPEDGLSDDKKPFKCFTPKGSSLKIEERAEFLNKSVQKSSGVKSTHQAAIVSKIDSRLEQYTSAIEGTKSAKPTKPAASDLPVPAEGVRNIKSMWEKGNVFSSPTAAGTPNKETAGLKVGVSSRINEWLTKTPDGNKSPAPKPSDLRPGDVSSKRNLWEKQSVDKVTSPTKV

SEQ ID NO: 7115 - DNA, 417 bp, Rattus norvegicus; identical to SEQ ID NO: 7111
  ref <308>: DATABASE ACCESSION NUMBER: EMBL / AI180288
  ref <309>: DATABASE ENTRY DATE: 1999-01-22

SEQ ID NO: 7116 - protein, 181 aa, Rattus norvegicus; identical to SEQ ID NO: 7112
  ref <308>: DATABASE ACCESSION NUMBER: SWISS-Prot / P02761
  ref <309>: DATABASE ENTRY DATE: 2001-10-16

SEQ ID NO: 7117 - DNA, 2198 bp, Homo sapiens; identical to SEQ ID NO: 7113
  ref <308>: DATABASE ACCESSION NUMBER: EMBL / D90452
  ref <309>: DATABASE ENTRY DATE: 1999-01-21

SEQ ID NO: 7118 - protein, 793 aa, Homo sapiens; identical to SEQ ID NO: 7114
  ref <308>: DATABASE ACCESSION NUMBER: SWISS-Prot / Q05682
  ref <309>: DATABASE ENTRY DATE: 2002-06-15

SEQ ID NO: 7119 - DNA, 520 bp, Rattus norvegicus
  ref <308>: DATABASE ACCESSION NUMBER: EMBL / AI180396
  ref <309>: DATABASE ENTRY DATE: 2000-03-03
ggttggagaatttaggtttttattagtacatggtaccattgacacaaattagaagatttaatagctattgattatctacacatatctttattaatcattattatcaagtaattttttaagttggattaataatcctaaggagaaaattcaatttaaattggatcactgtaaacaaagttactaggtgacttcataccgttccaaagacccagctgacaacctacagcctggcactggccaccagagtgctgtgcaaagtacgtagaaacctcttcgtaccgctactgtaattttatatgaaaatatgtgtatttttcaataaagcacttataaattagtctctgtttagttatattgaaaaggagcattattttcctgcataaatgacaatcaatcatttattggttcatttcatctccactaacacatcgtcattcaccatttaaatacctgacttcgtcagaaaccgtttgaacactttttcttcttcctgccataaaaatacagtaatttgcctttt

SEQ ID NO: 7120 - protein, 1135 aa, Rattus norvegicus
  ref <308>: DATABASE ACCESSION NUMBER: SWISS-Prot / O55081
  ref <309>: DATABASE ENTRY DATE: 2002-06-15
MASGGNQSSPPPPAAAASSEEEEEDGDTADRAQPAGSPSHQIQQRFEELCSRLNMDEAARAEAWSSYRSMSESYTLEGNDLHWLACALYVACRKSVPTVSKGTAEGNYVSLTRILRCSEQSLIEFFNKMKKWEDMANLPPHFRERTERLERNFTVSAVIFKKYEPIFQDIFKYPQEEQPRQQRGRKQRRQPCTTSEIFHFCWVLFIYAKGNFPMISDDLVNSYHLLLCALDLVYGNALQCSNRKELVNPNFKGVSEDGHPRDSHPSSDPPCVIEKLCSLHDGLVLEAKGIKQHFWKPYIRKLFEKKLLRGKEENLTGFLEPGNFAESFKAVNKAYEEYVLATGSLDERIFLGEDAEEEVGTFSRCVSAASGTESAERTQMRDILQQHLDKSKTLRVCNPLTGVRYVQENSPCVTPVSTATHSLNRLHTMLAGLRNAPSEKLEQILRSCSRDPTRAIADRLREMYEIYSQHFQPDENVSNCAKEMANKHFRFAEMLYYKVLESVIEQEQKRLGDMDLSGVLEQDAFHKSLLACCLEVVAFSYKPPGNFPFIAEIFDVPHYHFYKVIEVFIRAEDGLCREVVKHLNQIEEQILDHLAWKTKSPLWDRIRDNENRVPTCEEVTPPHNLERTDEIYIAGSPLTPRRVGEVRTDAGGLGRSVTSPTTLYDRYSSPTVSTTRRRLFESDSPSEGSTAGRIPPQPLVNAVPVQNVSGETVSVTPVPGQTLVTMATATVTANNGQTVTIPVQGIANENGGITFFPVQVNVGGQAQAVTGSIQPLSAQALAGSLSSQQVTGTTLQVPGPVAIQQISPGGQQQNQGQPLTSSSIRPRKTSSLSLFFRKVYYLAGVRLRDLCTKLDISDELRKKIWTCFEFSIVQCPELMMDRHLDQLLMCAIYVMAKVTKEDKSFQNIMRCYRTQPQARSQVYRSVLIKGKRRNSGSCENRSHQNSPTELNTDRASRDSSPVMRSNSTLPVPQPSSAPPTPTRLTGANSDIEEEERGDLIQFYNNIYRKQIQTFAMKYSQANSQMDTPPLSPYPFVRTGSPRRVQLSQSHPIYISPHKNEAMLSPREKIFYYFSNSPSKRLREINSMIRTGETPTKKRGILLDDGSESPAKRICPENHSALLRRLQDVANDRGSH

SEQ ID NO: 7121 - DNA, 1763 bp, Homo sapiens
  ref <308>: DATABASE ACCESSION NUMBER: EMBL / AK023320
  ref <309>: DATABASE ENTRY DATE: 2002-08-06
atcaagcaggggcagggctggcgctgcggcgggagatgctgtcgggccgcggcggcgcttggcagccaggagctctgcattgaaggcactggggtaaagtgaatgccgaagacagaagatttggatgatacaccactgactttctttgtttggaatacacgttatgaaccctttctggagcatgtctacaagctctgtacgcaaacgatctgaaggtgaagagaagacattaacaggggacgtgaaaaccagtcctccacgaactgcaccaaagaaacagctgccttctattcccaaaaatgctttgcccataactaagcctacatctcctgccccagcagcacagtcaacaaatggcacgcatgcgtcctatggacccttctacctggaatactctcttcttgcagaatttaccttggttgtgaagcagaagctaccaggcgtctatgtgcagccatcttatcgctctgcattaatgtggtttggagtaatattcatacggcatggactttaccaagatggcgtatttaagtttacagtttacatccctgataactatccagatggtgactgtccacgcttggtgttcgatattcctgtctttcacccgctagttgatcccacctcaggtgagctggatgtgaagagagcatttgcaaaatggaggcggaaccataatcatatttggcaggtattaatgtatgcaaggagagttttctacaagattgatacagcaagccccctgaacccagaggctgcagtactgtatgaaaaagatattcagctttttaaaagtaaagttgttgacagtgttaaggtgtgcactgctcgtttgtttgaccaacctaaaatagaagacccctatgcaattagcttttctccatggaatccttctgtacatgatgaagccagagaaaagatgctgactcagaaaaagcctgaagaacagcacaataaaagtgttcatgttgctggcctgtcatgggtaaagcctggctcagtacagcctttcagtaaagaagagaaaacagtggcgacttaagagatggtgaatctggtgcaccatgcactttcctgctagactctggcctagttcaagctgaccaatggcagaggactgcctgaagagtaaaactgtgtgaacaatgactgactgccagtgttttccatgtatgcataggttctaacagcagggtttggaaacctgtctctaagtaatgcattacttctgtcagaagtgtcttagggtggttatctagttcagtactccaaattattggggaccttgaggcttaagtaagtatttttctgaatataatgctaaaggtaagttgcattcatttaaactaatagagcagacagaattcagcactacttaatagtttataaatcagtggtttcagttgtatatatgttaggaaatggagaggtatagagagagcaggttccatagctcagcacttttaagtggaagatcatttgaatctcagtcttcagcctgcactgatttgtagcctgcactgtcttactgatttacaaactgaaatcactgagaaatgtctttagttcagtgagaagaaaccagaacacttgttcctagtgttgtgttgttttttttaagcaaattacttactgtatttttatggcaggagggagaaaaagtgttacaacggcttctaatgaagtccggtatttaaatgataaatgactaatgtgtttagtagagacaaaataaaccaataaatgattgttctttgccattt

SEQ ID NO: 7122 - protein, 1139 aa, Homo sapiens
  ref <308>: DATABASE ACCESSION NUMBER: SWISS-Prot / CAA53661
  ref <309>: DATABASE ENTRY DATE: 2001-10-16
MPSGGDQSPPPPPPPPAAAASDEEEEDDGEAEDAAPSAESPTPQIQQRFDELCSRLNMDEAARAEAWDSYRSMSESYTLEGNDLHWLACALYVACRKSVPTVSKGTVEGNYVSLTRILKCSEQSLIEFFNKMKKWEDMANLPPHFRERTERLERNFTVSAVIFKKYEPIFQDIFKYPQEEQPRQQRGRKQRRQPCTVSEIFHFCWVLFIYAKGNFPMISDDLVNSYHLLLCALDLVYGNALQCSNRKELVNPNFKGLSEDFHAKDSKPSSDPPCIIEKLCSLHDGLVLEAKGIKEHFWKPYIRKLYEKKLLKGKEENLTGFLEPGNFGESFKAINKAYEEYVLSVGNLDERIFLGEDAEEEIGTLSRCLNAGSGTETAERVQMKNILQQHFDKSKALRISTPLTGVRYIKENSPCVTPVSTATHSLSRLHTMLTGLRNAPSEKLEQILRTCSRDPTQAIANRLKEMFEIYSQHFQPDEDFSNCAKEIASKHFRFAEMLYYKVLESVIEQEQKRLGDMDLSGILEQDAFHRSLLACCLEVVTFSYKPPGNFPFITEIFDVPLYHFYKVIEVFIRAEDGLCREVVKHLNQIEEQILDHLAWKPESPLWEKIRDNENRVPTCEEVMPPQNLERADEICIAGSPLTPRRVTEVRADTGGLGRSITSPTTLYDRYSSPPASTTRRRLFVENDSPSDGGTPGRMPPQPLVNAVPVQNVSGETVSVTPVPGQTLVTMATATVTANNGQTVTIPVQGIANENGGITFFPVQVNVGGQAQAVTGSIQPLSAQALAGSLSSQQVTGTTLQVPGQVAIQQISPGGQQQKQGQSVTSSSNRPRKTSSLSLFFRKVYHLAAVRLRDLCAKLDISDELRKKIWTCFEFSIIQCPELMMDRHLDQLLMCAIYVMAKVTKEDKSFQNIMRCYRTQPQARSQVYRSVLIKGKRKRRNSGSSDSRSHQNSPTELNKDRTSRDSSPVMRSSSTLPVPQPSSAPPTPTRLTGANSDMEEEERGDLIQFYNNIYIKQIKTFAMKYSQANMDAPPLSPYPFVRTGSPRRIQLSQNHPVYISPHKNETMLSPREKIFYYFSNSPSKRLREINSMIRTGETPTKKRGILLEDGSESPAKRICPENHSALLRRLQDVANDRGSH

SEQ ID NO: 7123 - DNA, 698 bp, Rattus norvegicus
  ref <308>: DATABASE ACCESSION NUMBER: EMBL / AI180424
  ref <309>: DATABASE ENTRY DATE: 2000-03-03
ccattcataaaacttttattccacttacatgaactttaatacatgtgttcttaacaattatgcttggattgttcatgaaaatttcataagacattaaaacaaagctagccgtcatctcaagttatttccctgttaactatttttacagcacatgcatgttaggcaagtatcaaaaagagaaaaaaaatcacaaaagcaaaaacaaaacaaaacaaaaaacttaaaaaaaaaagttaaatacatgggattttgtttaccgctgtgcttgatccgcatggagccgggaacaccaagcaactcgtttgtactgcatctttacttttacatttgttcttagattgcctaaaacatttaaatacaaataaaatgtgtagcaaaaataatgaaagcaaacagcaggtaactttacaaataatggaatgtgaaccgtttctgcccttatcagagtaaattgggtcacaactttgtctacagacaacttctggagctgtggtcaagggtgtgcacgcagacacacggtcttagcgtgcatccacagggtgttcgtgtcccagcctcacaagtgctccaagccttacagtacccacacagactacactcatgactggacccattatcctgtttattccccgccagctcacaccaatatgtaagcagttttctttgcttagacatggaagcagtttgaacactggccc

SEQ ID NO: 7124 - protein, 245 aa, Rattus norvegicus
  ref <308>: DATABASE ACCESSION NUMBER: SWISS-Prot / P35215
  ref <309>: DATABASE ENTRY DATE: 1998-07-15
MDKNELVQKAKLAEQAERYDDMAACMKSVTEQGAELSNEERNLLSVAYKNVVGARRSSWRVVSSIEQKTEGAEKKQQMAREYREKIETELRDICNDVLSLLEKFLIPNASQPESKVFYLKMKGDYYRYLAEVAAGDDKKGIVDQSQQAYQEAFEISKKEMQPTHPIRLGLALNFSVFYYEILNSPEKACSLAKTAFDEAIAELDTLSEESYKDSTLIMQLLRDNLTLWTSDTQGDEAEAGEGGEN

SEQ ID NO: 7125 - DNA, 446 bp, Homo sapiens
  misc_feature (1)..(446): n=a, c, g or t
  ref <308>: DATABASE ACCESSION NUMBER: EMBL / AW674116
  ref <309>: DATABASE ENTRY DATE: 2000-04-12
acttgatacattaagtgaagagtcatacaaagacagcacgctaataatgcaattactgagagacaacttgacattgtggacatcggatacccaaggagacgaagctgaagcaggagaaggaggggaaaattaaccggccttccaacttttgtctgcctcattctaaaatttacacagtagaccatttgtcatccatgctgtcccaaaatagtntttttgtttacgatttatgacagtttatgttacttctatttgaatttctatatttccaatgtgggtttatatgtttaatattaagaggaagtaaaggaagttaaaatttagggagtaattttgtttaaatcaggaggtggccacttgcnggacagnccacccaacaagcaccaacggacacgacacgacgagaacgacngngcgccggagaagnccggagacngcgccgcnnc

SEQ ID NO: 7126 - protein, 255 aa, Homo sapiens; identical to SEQ ID NO: 1950
  ref <308>: DATABASE ACCESSION NUMBER: Refseq / NP_006752
  ref <309>: DATABASE ENTRY DATE: 2002-11-05

SEQ ID NO: 7127 - DNA, 646 bp, Rattus norvegicus
  ref <308>: DATABASE ACCESSION NUMBER: EMBL / AI180442
  ref <309>: DATABASE ENTRY DATE: 2000-03-03
gttgaacaataatttattgagacccctccctcgcagcctctacaattcgaggttactttctccgcttgtagatcttgtttgctagttccaggaagatggatgggggcaggggcgcggagcactgctctatgagactcttgaggcggttgtaactgtcttcctcgtacttgaagaacacactccgcagatccagctcctcgtacagtgctttcacccgcgccactttttctgggtccttctgcccataattctcctctaagatctggcgctgctgaggagtggctcgtagcagacactgaaccaccagccagctgcatttgttgtcctggatgtcagtgccgacctttccggtcacactggggtctccaaagagatcaaggtagtcgtcctggatctggaagaactcgcccatctccagcaggatcttcagggcattagcgtgttccttctccccatcaattccagccatgtacatggcagccgcgataggcaggtagaaagagtagaaagctgtcttgtacttgacgatagatttgtacctcttttcagtgtatctaccaagatccacttggccctggggtgctgtgatgaggtcgagagtctgcccgatctcagtctgataggaactctgtagaaagagctccag

SEQ ID NO: 7128 - protein, 353 aa, Rattus norvegicus
  ref <308>: DATABASE ACCESSION NUMBER: SWISS-Prot / P05369
  ref <309>: DATABASE ENTRY DATE: 1999-07-15
MNGDQKLDVHNQEKQNFIQHFSQIVKVLTEDELGHPEKGDAITRIKEVLEYNTVGGKYNRGLTVVQTFQELVEPRKQDAESLQRALTVGWCVELLQAFFLVLDDIMDSSYTRRGQICWYQKPGIGLDAINDALLLEAAIYRLLKFYCREQPYYLNLLELFLQSSYQTEIGQTLDLITAPQGQVDLGRYTEKRYKSIVKYKTAFYSFYLPIAAAMYMAGIDGEKEHANALKILLEMGEFFQIQDDYLDLFGDPSVTGKVGTDIQDNKCSWLVVQCLLRATPQQRQILEENYGQKDPEKVARVKALYEELDLRSVFFKYEEDSYNRLKSLIEQCSAPLPPSIFLELANKIYKRRK

SEQ ID NO: 7129 - DNA, 1148 bp, Homo sapiens
  ref <308>: DATABASE ACCESSION NUMBER: EMBL / J05262
  ref <309>: DATABASE ENTRY DATE: 2000-03-04
cacagaatgaacggagaccagaattcagatgtttatgcccaagaaaagcaggatttcgttcagcacttctcccagatcgttagggtgctgactgaggatgagatggggcacccagagataggagatgctattgcccggctcaaggaggtcctggagtacaatgccattggaggcaagtataaccggggtttgacggtggtagtagcattccgggagctggtggagccaaggaaacaggatgctgatagtctccagcgggcctggactgtgggctggtgtgtggaactgctgcaagctttcttcctggtggcagatgacatcatggattcatcccttacccgccggggacagacctgctggtatcagaagccgggcgtgggtttggatgccatcaatgatgctaacctcctggaagcatgtatctaccgcctgctgaagctctattgccgggagcagccctattacctgaacctgatcgagctcttcctgcagagttcctatcagactgagattgggcagaccctggacctcctcacagccccccagggcaatgtggatcttgtcagattcactgaaaagaggtacaaatctattgtcaagtacaagacagctttctactccttctaccttcctatagctgcagccatgtacatggcaggaattgatggcgagaaggagcacgccaatgccaagaagatcctgctggagatgggggagttctttcagattcaggatgattaccttgacctctttggggaccccagtgtgaccggcaaaattggcactgacatccaggacaacaaatgcagctggctggtggttcagtgtctgcaacgggccactccagaacagtaccagatcctgaaggaaaattacgggcagaaggaggctgagaaagtggcccgggtgaaggcgctatatgaggagctggatctgccagcagtgttcttgcaatatgaggaagacagttacagccacattatggctctcattgaacagtacgcagcacccctgcccccagccgtctttctggggcttgcgcgcaaaatctacaagcggagaaagtgacctagagattgcaagggcggggagaggaggctctcaataaataatcgtgtaaccttaaaaaaaaaaaaaacctcgacgat

SEQ ID NO: 7130 - protein, 353 aa, Homo sapiens
  ref <308>: DATABASE ACCESSION NUMBER: SWISS-Prot / P14324
  ref <309>: DATABASE ENTRY DATE: 2002-06-15
MNGDQNSDVYAQEKQDFVQHFSQIVRVLTEDEMGHPEIGDAIARLKEVLEYNAIGGKYNRGLTVVVAFRELVEPRKQDADSLQRAWTVGWCVELLQAFFLVADDIMDSSLTRRGQICWYQKPGVGLDAINDANLLEACIYRLLKLYCREQPYYLNLIELFLQSSYQTEIGQTLDLLTAPQGNVDLVRFTEKRYKSIVKYKTAFYSFYLPIAAAMYMAGIDGEKEHANAKKILLEMGEFFQIQDDYLDLFGDPSVTGKIGTDIQDNKCSWLVVQCLQRATPEQYQILKENYGQKEAEKVARVKALYEELDLPAVFLQYEEDSYSHIMALIEQYAAPLPPAVFLGLARKIYKRRK

SEQ ID NO: 7131 - DNA, 646 bp, Rattus norvegicus; identical to SEQ ID NO: 7127
  ref <308>: DATABASE ACCESSION NUMBER: EMBL / AI180442
  ref <309>: DATABASE ENTRY DATE: 2000-03-03

SEQ ID NO: 7132 - protein, 353 aa, Rattus norvegicus; identical to SEQ ID NO: 7128
  ref <308>: DATABASE ACCESSION NUMBER: SWISS-Prot / P05369
  ref <309>: DATABASE ENTRY DATE: 1999-07-15

SEQ ID NO: 7133 - DNA, 1148 bp, Homo sapiens; identical to SEQ ID NO: 7129
  ref <308>: DATABASE ACCESSION NUMBER: EMBL / J05262
  ref <309>: DATABASE ENTRY DATE: 2000-03-04

SEQ ID NO: 7134 - protein, 353 aa, Homo sapiens; identical to SEQ ID NO: 7130
  ref <308>: DATABASE ACCESSION NUMBER: SWISS-Prot / P14324
  ref <309>: DATABASE ENTRY DATE: 2002-06-15

SEQ ID NO: 7135 - DNA, 499 bp, Rattus norvegicus
  ref <308>: DATABASE ACCESSION NUMBER: EMBL / AI227715
  ref <309>: DATABASE ENTRY DATE: 2000-03-03
aaaaggcaaattactgtatttttatggcaggaagaagaaaaagtgttcaaacggtttctgacgaagtcaggtatttaaatggtgaatgacgatgtgttagtggagatgaaatgaaccaataaatgattgattgtcatttatgcaggaaaataatgctccttttcaatataactaaacagagactaatttataagtgctttattgaaaaatacacatattttcatataaaattacagtagcggtacgaagaggtttctacgtactttgcacagcactctggtggccagtgccaggctgtaggttgtcagctgggtctttggagcggtatgaagtcacctagtaactttgtttacagtgatccaatttaaattgaattttctccttaggattattaatccaacttaaaaaattacttgataataatgattaataaagatatgtgtagataatcaatagctattaaatcttctaatttgtgtcaatggtaccatgtactaat

SEQ ID NO: 7136 - protein, 1135 aa, Rattus norvegicus; identical to SEQ ID NO: 7120
  ref <308>: DATABASE ACCESSION NUMBER: SWISS-Prot / O55081
  ref <309>: DATABASE ENTRY DATE: 2002-06-15

SEQ ID NO: 7137 - DNA, 1763 bp, Homo sapiens; identical to SEQ ID NO: 7121
  ref <308>: DATABASE ACCESSION NUMBER: EMBL / AK023320
  ref <309>: DATABASE ENTRY DATE: 2002-08-06

SEQ ID NO: 7138 - protein, 1139 aa, Homo sapiens; identical to SEQ ID NO: 7122
  ref <308>: DATABASE ACCESSION NUMBER: SWISS-Prot / CAA53661
  ref <309>: DATABASE ENTRY DATE: 2001-10-16

SEQ ID NO: 7139 - DNA, 605 bp, Rattus norvegicus
  ref <308>: DATABASE ACCESSION NUMBER: EMBL / AI227936
  ref <309>: DATABASE ENTRY DATE: 1999-01-22
ggccgctagagtttttttttttttttttttttttttttttgctgtcaaatacacaaagaacatatttatttgatacagaatcacaagtgggttggggtgggctcatcattggcagtcccagccggcgtgtgtgccagcagttcaggaatcagggttacctggagtgagttagagcaaacacaagagctaccctgaagcccctggtcacagggaaggccgagacgggataagagggaggccgtgacattctctctgttctcaactgccatctcatcttctgcttgctgaccttgaggtggcctgtgagctctctctgctgcggctgtgcagcccagaagccaggacttcctctaggaaactttttgtgttgtgtattgttgttcctcccagaacgatcctcactccaggagtggtacggttgaggttatagactgtcagtgcctcttcataggtggctcctccaataacgaacacgatgatgtcctgaggcctgtctctgaatgtgctggggcctaaatacggatagaggttttccttaagcttccctttgatgagatggtccaaggtctcatgccgaaaaggctggtgctgggtgtacacatttt

SEQ ID NO: 7140 - protein, 570 aa, Rattus norvegicus
  ref <308>: DATABASE ACCESSION NUMBER: SWISS-Prot / AAB53041
  ref <309>: DATABASE ENTRY DATE: 2002-06-15
MNVVFAVKQYISKMIEDSGPGMKVLLMDKETTGIVSMVYTQSEILQKEVYLFERIDSQNREIMKHLKAICFLRPTKENVDSLIQELRRPKYSIYFIYFSNVISKSDVKSLAEADEQEVVAEVQEFYGDYIAVNPHLFSLNILGCCQGRNWDPAQLSRTTQGLTALLLSLKKCPMIRYQLSSEAAKRLGECVKQVISKEYELFEFRRTEVPPLLLILDRCDDAITPLLNQWTYQAMVHELLGINNNRIDLSRVPGISKDLREVVLSAENDEFYANNMYLNFAEIGSNIKNLMEDFQKKRPKEQQKLESIADMKAFVENYPQFKKMSGTVSKHVTVVGELSRLVSERNLLEVSEVEQELACQNDHSSALQNVKRLLQNPKVTEFDAVRLVMLYALHYERHSSNSLPGLIVDLRSKGVAEKYRKLVSAVVEYGGKRVRGSDLFSPKDAVAITKQFLKGLKGVENVYTQHQPFLHETLDHLIKGKLKENLYPYLGPSTLRDRPQDIIVFVIGGATYEEALTVYNLNRTTPGVRIVLGGTTIHNTKSFLEEVLASGLHSRSRESSQATSRSASRR

SEQ ID NO: 7141 - DNA, 1987 bp, Homo sapiens
  ref <308>: DATABASE ACCESSION NUMBER: EMBL / U35246
  ref <309>: DATABASE ENTRY DATE: 1999-07-01
ttcggcacgagaagggctgtagggtacttgtcaattcgccgccatgaacgtggtttttgctgtgaagcagtacatttccaaaatgatagaggacagcgggcctggtatgaaagtacttctcatggataaagagacgactggcatagtgagtatggtatacacacaatcggagattctacagaaggaagtgtacctctttgaacgcattgattctcaaaatcgagagatcatgaaacacctgaaggcaatttgtttccttcgacctacaaaggagaatgtggattctctgatccaggagctccgaagacccaagtatagcatatattttatttatttcagtaatgtgatcagcaagagtgacgtgaagtccttggctgaagctgacgagcaggaagttgtggctgaagttcaggaattttatggagattatattgctgtgaatccacatttgttttccctcaatatcttgggctgctgtcagggtcgaaattgggatccagcccagctatccagaaccactcaagggctgaccgctctccttttgtctctgaagaagtgtcccatgattcgttatcagctttcatcagaggctgcaaagagactgggagagtgtgttaagcaagtgataagtaaagagtatgaactctttgagttccggcggacagaggttcctccactgcttctcattctggatcgctgcgatgatgccatcaccccactgctcaaccagtggacatatcaggccatggtccatgaactactggacataaacaacaaccggattgatctttccagagtgccaggaatcagcaaagacttaagagaggtggtcctgtccgctgaaaatgatgaattctatgctaataacatgtacctgaactttgccgagattggtagcaatataaagaatctcatggaagatttccagaagaagagaccgaaagagcagcaaaagctagagtccatagcggacatgaaggcctttgttgaaaattatccacaattcaagaagatgtctgggactgtctcaaagcatgtgacagtcgttggggaactgtctcggttggtcagtgaacgaaacctgctggaggtttcagaggttgagcaagaactggcctgtcagaatgaccattctagtgctcttcagaatgtgaagagactcctgcagaatccgaaagttacagaatttgatgcagttcgcctggtgatgctttatgctctacattatgagcgccacagcagcaacagcctgccagggctcatagtggacctcaggagtaaaggtgtcgctgagaaatatcggaagcttgtgtctgcagttgttgaatatggtggtaaacgggttagaggaagtgacctcttcagccccaaagatgctgtggctattaccaaacagttcctcaaaggcctgaagggagtggaaaatgtgtacacccagcaccagccttttctgcatgagaccctggaccatctcatcaaagggaagcttaaggaaaacctctatccgtatttaggccccagcacactcagagacaggcctcaggacatcatcgtgttcgttattggaggagccacctatgaagaggcactgacagtctataacctcaaccgtaccactcctggagtgaggatcgttctgggaggaacaacaatacacaacacaaaaagtttcctagaggaagtcctggcttctgggctgcacagccgcagcagagagagctcacaggccacctcaaggtcagcaagcagaagatgagatggcagttgagaacagagagaatgtcacggcctccctcttatcccgtctcggccttccctgtgaccaggggcttcagggtagctcttgtgtttgctctaactcactccaggtaaccctgattcctgaactgctggcacacacgccggctgggactgccaatgatgagcccaccccaacccacttgtgattctgtatcaaataaatatgttctttgtgtatttgacagca

SEQ ID NO: 7142 - protein, 570 aa, Homo sapiens
  ref <308>: DATABASE ACCESSION NUMBER: Refseq / NP_009189
  ref <309>: DATABASE ENTRY DATE: 2002-11-04
MNVVFAVKQYISKMIEDSGPGMKVLLMDKETTGIVSMVYTQSEILQKEVYLFERIDSQNREIMKHLKAICFLRPTKENVDYIIQELRRPKYTIYFIYFSNVISKSDVKSLAEADEQEVVAEVQEFYGDYIAVNPHLFSLNILGCCQGRNWDPAQLSRTTQGLTALLLSLKKCPMIRYQLSSEAAKRLAECVKQVITKEYELFEFRRTEVPPLLLILDRCDDAITPLLNQWTYQAMVHELLGINNNRIDLSRVPGISKDLREVVLSAENDEFYANNMYLNFAEIGSNIKNLMEDFQKKKPKEQQKLESIADMKAFVENYPQFKKMSGTVSKHVTVVGELSRLVSERNLLEVSEVEQELACQNDHSSALQNIKRLLQNPKVTEFDAARLVMLYALHYERHSSNSLPGLMMDLRNKGVSEKYRKLVSAVVEYGGKRVRGSDLFSPKDAVAITKQFLKGLKGVENVYTQHQPFLHETLDHLIKGRLKENLYPYLGPSTLRDRPQDIIVFVIGGATYEEALTVYNLNRTTPGVRIVLGGTTVHNTKSFLEEVLASGLHSRSKESSQVTSRSASRR

SEQ ID NO: 7143 - DNA, 496 bp, Rattus norvegicus
  misc_feature (1)..(496): n=a, c, g or t
  ref <308>: DATABASE ACCESSION NUMBER: EMBL / AI228407
  ref <309>: DATABASE ENTRY DATE: 1998-11-02
attatcaaaatagtcatttaatggctttacttgatacataaatacatgtttggaaagaacacatgagtgatgactggtcagtcaatttggaaaacgacttttcattttatacacacggtagctggcaactcatcgctacaagtacgctattcggcgtcctttgtttttaaccctctgtttataccttttccctagcacggccgccaagtatttcttgacagccatttgttttcggtagcggctatagctgtctgtgaagatgccgtccgagtggcgtttggtaaggggtgcccgggcgtncaccggggcggcggcaaggttctcgcccatgcccttggccaccatggactgcaggtacttcctggcggacagctggtccaagactttgcggtaggcttcgttaaggatttcgtgggcgacatctctcctgtcggctgggtagtaaagggcgtaggcgttacgcagcgcggaggcggggctccctgcgcccggaggg

SEQ ID NO: 7144 - protein, 175 aa, Rattus norvegicus
  ref <308>: DATABASE ACCESSION NUMBER: SWISS-Prot / P13589
  ref <309>: DATABASE ENTRY DATE: 2001-10-16
MTMCSGARLALLVYGIIMHNSVSCSPAAGLSFPGIRPEEEAYDQDGNPLQDFYDWDPPGAGSPASALRDAYALYYPADRRDVAHEILNEAYRKVLDQLSARKYLQSMVARGMGENLAAAAVDDRAPLTKRHSDGIFTDSYSRYRKQMAVKKYLAAVLGKRYKQRVKNKGRRIAYL

SEQ ID NO: 7145 - DNA, 372 bp, Homo sapiens
  ref <308>: DATABASE ACCESSION NUMBER: EMBL / AI039838
  ref <309>: DATABASE ENTRY DATE: 2000-03-03
tttttttgactgcccgggaggggttattaagtatgaattttacaaactttacttatattagcggtaacggtggagctggagagtattgcgccttctccaagctgcccggcgagagccaccaatagtgtggtggaacttgtggccctttccaaggccacggctctttcggcctgcagatgtcagcccacgcatctccctgtgcttgtggactggtttggtgatccactgggtgtcaggatttcttctgatagctttatggaatggatcaatgaggataacctcaaaaaatttgtatgtggaatcttcaccaacccagtaagaattcaggactctcatagccccacagtggcgttcagctcgctcctctgcaac

SEQ ID NO: 7146 - protein, 194 aa, Homo sapiens; identical to SEQ ID NO: 5813
  ref <308>: DATABASE ACCESSION NUMBER: SWISS-Prot / Q99653
  ref <309>: DATABASE ENTRY DATE: 2002-06-15

SEQ ID NO: 7147 - DNA, 572 bp, Rattus norvegicus
  ref <308>: DATABASE ACCESSION NUMBER: EMBL / AI228599
  ref <309>: DATABASE ENTRY DATE: 1998-11-02
tttatttttggaactgctagggaccaaattcgagaccttatacatgctgggcaagcattttgccaagtcatacaattaaaatttggatctgacagtaacaaagaacagatctatgctcttcttcccttttctagcattaaatgctttgctttacatcacatataccagaaacacaatagatttctgttaaagttagtattccttatctctgtcaaagaaaataagatttcgccagacaatcttgttctctgtggccatccaagtgttatttcaggaaggaaggcaaaggagggacattatactcagcacatttgcagtggtggtagcttaagcgctttgtcctttaacatgttactgtatctcggagagccaagttctttgtcatccacagacttcatactcatgtcagcacaagagaccagtagttagttctttgctgcccttgcagcaatctccttgtggaactctttgagaatttccaactggctgggcctgatggagatgtgtgaccggattttggcgatagcttctatagcctcctatgggcttcagttgtgtacctgaatcaaata

SEQ ID NO: 7148 - protein, 1526 aa, Rattus norvegicus
  ref <308>: DATABASE ACCESSION NUMBER: SWISS-Prot / P41516
  ref <309>: DATABASE ENTRY DATE: 2001-10-16
MELSPLQPVNENMLLNKKKNEDGKKRLSVERIYQKKTQLEHILLRPDTYIGSVELVTQQMWVYDEDVGINYREVTFVPGLYKIFDEILVNAADNKQRDPKMSCIRVTMMRNNLISIWNNGKGIPVVEHKVEKMYVPALIFGQLLTSSNYDDDEKKVTGGRNGYGAKLCNIFSTKFTVETASREYKKMFKQTWMDNMGRAGDMELKPFSGEDYTCITFQPDLSKFKMQSLDKDIVALMVRRAYDIAGSTKDVKVFLNGNRLPVKGFRSYVDMYLKDKVDETGNALKVVHEQVNPRWEVCLTMSEKGFQQISFVNSIATSKGGRHVDYVADQIVSKLVDVVKKKNKGGVAVKADQVKNHMWIFGNAVIENPTFDSQTKENMTLQAKSFGSTCQLSEKFIKAAIGCGIVESILNWVKFKAQIQLNKKCSAVKHNRIKGIPKLDDANDAGSRNSAECTLILTEGDSAKTLAVSGLGVVGRDKYGVFPLRGKILNVREASHKQIMENAEINNIIKIVGLQYKKNYEDEDSLKTLRYGKIMIMTDQDQDGSHIKGLLINFIHHNWPSLLRHRFLEEFITPIVKVSKNKQEIAFYSLPEFEEWKSTNPNHKKWKVKYYKGLGTSTSKEAKEYFANMKRHRIQFKYSGPEDDAAISLAFSKKQVDDRKEWLTNFMEDRRQRKLLGLPEDYLYGQTTMYLTYNDFINKELILFSNSDNERSIPSMVDGLKPGQRKVLFTCFKRNDKREVKVAQLAGSVAEMSSYHHGEMSLMMTIINLAQNFVGSNNLNLLQPIGQFGTRLHGGKDSASPRYIFTMLSPLARLLFPSKDDHTLRFLYDDNQRVEPEWYIPIIPMVLINGAEGIGTGWSCKIPNFDVREVVNNIRRLLDGEEPLPMLPSYKNYKGTIEELASNQYVINGEVAILNSTTIEITELPIRTWTQTYKEQVLEPMLNGTEKTPPLITDYREYHTDTTVKFVIKMTEEKLAEAERVGLHKVFKLQTSLTCNSMVLFDHVGCLKKYDTVLDILRDFFELRLKYYGLRKEWLLGMLGAESSKLNNQARFILEKIDGKIVIENKPKKELIKVLIQRGYDSDPVKAWKEAQQKVPEEEENEENEESESESTSPAAESGPTFNYLLDMPLWYLTKEKKDELCKQRDEKEQELNTLKKKTPSDLWKEDLAAFVEELEVVEAKEKQDEQVGLPGKGVKAKGKKAQISEVLPSPVGKRVIPQVTMEMRAEAEKKIRRKIKSENVEGTPAEDGAEPGLRQRLEKRQKREPGTRAKKQTTLPFKPIKKAQKQNPWSDSESDMSSNESNFDVPPREKEPRIAATKAKFTADLDSDDDFSGLDEKDEDEDFFPLDDTPPKTKMPPKNTKKALKPQKSSTSVDLESDGKDSVPASPGASAADVPAETEPSKPSSKQTVGVKRTITKGQSLTSTAGTKKRAVPKETKSDSALNAHVSKKPAPAKAKNSRKRMPSSSDSSDSEFEKAISKGATSKKLKGEERDFHVDLDDTVAPRAKSGRARKPIKYLEESDDDLF

SEQ ID NO: 7149 - DNA, 1213 bp, Homo sapiens
  ref <308>: DATABASE ACCESSION NUMBER: EMBL / AK024080
  ref <309>: DATABASE ENTRY DATE: 2002-08-06
tggagaagaacctttgccaatgcttccaagttacaagaacttcaagggtactattgaagaactggctccaaatcaatatgtgattagtggtgaagtagctattcttaattctacaaccattgaaatctcagagcttcccgtcagaacatggacccagacatacaaagaacaagttctagaacccatgttgaatggcaccgagaagacacctcctctcataacagactatagggaataccatacagataccactgtgaaatttgttgtgaagatgactgaagaaaaactggcagaggcagagagagttggactacacaaagtcttcaaactccaaactagtctcacatgcaactctatggtgctttttgaccacgtaggctgtttaaagaaatatgacacggtgttggatattctaagagacttttttgaactcagacttaaatattatggattaagaaaagaatggctcctaggaatgcttggtgctgaatctgctaaactgaataatcaggctcgctttatcttagagaaaatagatggcaaaataatcattgaaaataagcctaagaaagaattaattaaagttctgattcagaggggatatgattcggatcctgtgaaggcctggaaagaagcccagcaaaaggttccagatgaagaagaaaatgaagagagtgacaacgaaaaggaaactgaaaagagtgactccgtaacagattctggaccaaccttcaactatcttcttgatatgcccctttggtatttaaccaaggaaaagaaagatgaactctgcaggctaagaaatgaaaaagaacaagagctggacacattaaaaagaaagagtccatcagatttgtggaaagaagacttggctacatttattgaagaattggaggctgttgaagccaaggaaaaacaagatgaacaagtcggacttcctgggaaaggggggaaggccaaggggaaaaaaacacaaatggctgaagttttgccttctccgcgtggtcaaagagtcattccacgaataaccatagaaatgaaagcagaggcagaaaagaaaaataaaaagaaaattaagaatgaaaatactgaaggaagccctcaagaagatggtgtggaactagaaggcctaaaacaaagattagaaaagaaacagaaaagagaaccaggtacaaagacaaagaaacaaactacattggcatttaagccaatc

SEQ ID NO: 7150 - protein, 1531 aa, Homo sapiens
  ref <308>: DATABASE ACCESSION NUMBER: SWISS-Prot / P11388
  ref <309>: DATABASE ENTRY DATE: 2002-06-15
MEVSPLQPVNENMQVNKIKKNEDAKKRLSVERIYQKKTQLEHILLRPDTYIGSVELVTQQMWVYDEDVGINYREVTFVPGLYKIFDEILVNAADNKQRDPKMSCIRVTIDPENNLISIWNNGKGIPVVEHKVEKMYVPALIFGQLLTSSNYDDDEKKVTGGRNGYGAKLCNIFSTKFTVETASREYKKMFKQTWMDNMGRAGEMELKPFNGEDYTCITFQPDLSKFKMQSLDKDIVALMVRRAYDIAGSTKDVKVFLNGNKLPVKGFRSYVDMYLKDKLDETGNSLKVIHEQVNHRWEVCLTMSEKGFQQISFVNSIATSKGGRHVDYVADQIVTKLVDVVKKKNKGGVAVKAHQVKNHMWIFVNALIENPTFDSQTKENMTLQPKSFGSTCQLSEKFIKAAIGCGIVESILNWVKFKAQVQLNKKCSAVKHNRIKGIPKLDDANDAGGRNSTECTLILTEGDSAKTLAVSGLGVVGRDKYGVFPLRGKILNVREASHKQIMENAEINNIIKIVGLQYKKNYEDEDSLKTLRYGKIMIMTDQDQDGSHIKGLLINFIHHNWPSLLRHRFLEEFITPIVKVSKNKQEMAFYSLPEFEEWKSSTPNHKKWKVKYYKGLGTSTSKEAKEYFADMKRHRIQFKYSGPEDDAAISLAFSKKQIDDRKEWLTNFMEDRRQRKLLGLPEDYLYGQTTTYLTYNDFINKELILFSNSDNERSIPSMVDGLKPGQRKVLFTCFKRNDKREVKVAQLAGSVAEMSSYHHGEMSLMMTIINLAQNFVGSNNLNLLQPIGQFGTRLHGGKDSASPRYIFTMLSSLARLLFPPKDDHTLKFLYDDNQRVEPEWYIPIIPMVLINGAEGIGTGWSCKIPNFDVREIVNNIRRLMDGEEPLPMLPSYKNFKGTIEELAPNQYVISGEVAILNSTTIEISELPVRTWTQTYKEQVLEPMLNGTEKTPPLITDYREYHTDTTVKFVVKMTEEKLAEAERVGLHKVFKLQTSLTCNSMVLFDHVGCLKKYDTVLDILRDFFELRLKYYGLRKEWLLGMLGAESAKLNNQARFILEKIDGKIIIENKPKKELIKVLIQRGYDSDPVKAWKEAQQKVPDEEENEESDNEKETEKSDSVTDSGPTFNYLLDMPLWYLTKEKKDELCRLRNEKEQELDTLKRKSPSDLWKEDLATFIEELEAVEAKEKQDEQVGLPGKGGKAKGKKTQMAEVLPSPRGQRVIPRITIEMKAEAEKKNKKKIKNENTEGSPQEDGVELEGLKQRLEKKQKREPGTKTKKQTTLAFKPIKKGKKRNPWSDSESDRSSDESNFDVPPRETEPRRAATKTKFTMDLDSDEDFSDFDEKTDDEDFVPSDASPPKTKTSPKLSNKELKPQKSVVSDLEADDVKGSVPLSSSPPATHFPDETEITNPVPKKNVTVKKTAAKSQSSTSTTGAKKRAAPKGTKRDPALNSGVSQKPDPAKTKNRRKRKPSTSDDSDSNFEKIVSKAVTSKKSKGESDDFHMDFDSAVAPRAKSVRAKKPIKYLEESDEDDLF

SEQ ID NO: 7151 - DNA, 545 bp, Rattus norvegicus
  ref <308>: DATABASE ACCESSION NUMBER: EMBL / AI228675
  ref <309>: DATABASE ENTRY DATE: 1998-11-02
gaagtttccaacaaggtttccttcaatgcaattcagcagaaaatgatcacagaaagaatgctaagacccactggacacattaaggtcaaggacttccaagttaatccacttttcttcccccacgagtttatttttggtaaaaggcagaaaaattagtttctacaaggaaaatctgcttctaaatgataatttgaaaatctcgatatatatattatatattaaaaaagacacaaaaataacggagaagtgggaataacagattaggtactgtaattttataaaggcttgcctagaccaagcagcagcacacacctcatttatgcacactaagaaggtatacaaacagcagagcactgcaatactgggtctggacacattactgtacacaactactactggtattaataacctttgggacactgtcttatgcccaacgagacatcattaagtctttaagtcttatttgtccactctggggagggcatttctagacactaatttcccatctaaatttcaaatgtaggaaacagactccacaaggtgct

SEQ ID NO: 7152 - protein, 467 aa, Rattus norvegicus; identical to SEQ ID NO: 302
  ref <308>: DATABASE ACCESSION NUMBER: SWISS-Prot / O70436
  ref <309>: DATABASE ENTRY DATE: 2002-06-15

SEQ ID NO: 7153 - DNA, 2041 bp, Homo sapiens; identical to SEQ ID NO: 303
  ref <308>: DATABASE ACCESSION NUMBER: EMBL / U68018
  ref <309>: DATABASE ENTRY DATE: 2000-03-04

SEQ ID NO: 7154 - protein, 467 aa, Homo sapiens; identical to SEQ ID NO: 304
  ref <308>: DATABASE ACCESSION NUMBER: SWISS-Prot / Q15796
  ref <309>: DATABASE ENTRY DATE: 2002-06-15

SEQ ID NO: 7155 - DNA, 495 bp, Rattus norvegicus
  ref <308>: DATABASE ACCESSION NUMBER: EMBL / AI228738
  ref <309>: DATABASE ENTRY DATE: 1998-11-02
cccaaaacaaagtaacttgaggtttatggcatacagtttaggtcaacacacatacagaagggggaagaggacatggaggtgtccgaagcaaagctgagtgacggaacacattcagttagtaggtgtctatacaaagagtggtgggacatcaggaaaagctcccatggattcatgtgcacccatctggaggtaccagattcctccatggcagatccatgtgcagagctaagggaggaggccacttctgtcattccagttttagaagctccacatcaaaaacaagagtagcatgtggtgggatgatgcctgggtgcccggtggctccataggcatagtctggggagattatcagtttggctctctggcccacactcatctgggctaccccttcttcccagcctcggatcacctcctgcttgcctagtgtaaacttaaaaggcttgtttctgtcccgagaggagtcaaatttttcccatctttaagcatccacgtgta

SEQ ID NO: 7156 - protein, 107 aa, Rattus norvegicus; identical to SEQ ID NO: 6997
  ref <308>: DATABASE ACCESSION NUMBER: SWISS-Prot / Q62658
  ref <309>: DATABASE ENTRY DATE: 2002-06-15

SEQ ID NO: 7157 - DNA, 1578 bp, Homo sapiens
  ref <308>: DATABASE ACCESSION NUMBER: Refseq / NM_000801
  ref <309>: DATABASE ENTRY DATE: 2002-11-05
gcgacgcgccgaggtactaggcagagccgtggaaccgccgccaggtcgctgttggtccacgccgcccgtcgcgccgcccgcccgctcagcgtccgccgccgccatgggagtgcaggtggaaaccatctccccaggagacgggcgcaccttccccaagcgcggccagacctgcgtggtgcactacaccgggatgcttgaagatggaaagaaatttgattcctcccgggacagaaacaagccctttaagtttatgctaggcaagcaggaggtgatccgaggctgggaagaaggggttgcccagatgagtgtgggtcagagagccaaactgactatatctccagattatgcctatggtgccactgggcacccaggcatcatcccaccacatgccactctcgtcttcgatgtggagcttctaaaactggaatgacaggaatggcctcctcccttagctccctgttcttggatctgccatggagggatctggtgcctccagacatgtgcacatgagtccatatggagcttttcctgatgttccactccactttgtatagacatctgccctgactgaatgtgttctgtcactcagctttgcttccgacacctctgtttcctcttcccctttctcctcgtatgtgtgtttacctaaactatatgccataaacctcaagttattcattttattttgttttcattttggggtgaagattcagtttcagtcttttggatataggtttccaattaagtacatggtcaagtattaacagcacaagtggtaggttaacattagaataggaattggtgttggggggggggtttgcaagaatattttattttaattttttggatgaaatttttatctattatatattaaacattcttgctgctgcgctgcaaagccatagcagatttgaggcgctgttgaggactgaattactctccaagttgagagatgtctttgggttaaattaaaagccctacctaaaactgaggtggggatggggagagcctttgcctccaccattcccacccaccctccccttaaaccctctgcctttgaaagtagatcatgttcactgcaatgctggacactacaggtatctgtccctgggccagcagggacctctgaagccttctttgtggccttttttttttttcatcctgtggtttttctaatggactttcaggaattttgtaatctcataactttccaagctccaccacttcctaaatcttaagaactttaattgacagtttcaattgaaggtgctgtttgtagacttaacacccagtgaaagcccagccatcatgacaaatccttgaatgttctcttaagaaaatgatgctggtcatcgcagcttcagcatctcctgttttttgatgcttggctccctctgctgatctcagtttcctggcttttcctccctcagccccttctcacccctttgctgtcctgtgtagtgatttggtgagaaatcgttgctgcacccttcccccagcaccatttatgagtctcaagttttattattgcaataaaagtgctttatgccggcttttctcaaaaaaaaaaaaaaaaaa

SEQ ID NO: 7158 - protein, 107 aa, Homo sapiens; identical to SEQ ID NO: 218
  ref <308>: DATABASE ACCESSION NUMBER: SWISS-Prot / P20071
  ref <309>: DATABASE ENTRY DATE: 2002-06-15

SEQ ID NO: 7159 - DNA, 444 bp, Rattus norvegicus
  ref <308>: DATABASE ACCESSION NUMBER: EMBL / AI229497
  ref <309>: DATABASE ENTRY DATE: 1999-01-22
gatggccaggcctgtcattttatttcagcagtggatgaaacaagagttctttgtctggtgtcttagacggcagcagtctccttggcagcctttctctcttccagcatcctctgcttctgctttgccaggcacttcctggcagaatagtaggctcccaggtcctggtagcggtcctggtaggctttagacacttgggtgaattgctccaattccttggcacagttctgcagtgcactctctccttccctctgctgacaagccttaagtctctcctggatgatgttgatgatttcttggtccactttgaagtcccttctccactgcatctcagcctcatagatacagatgacatcaccctctttgcattccgtgatgtctggcactcgacggtactgtcggtggtagtagtaggttcggttcttggcgtgctgttgttcaatgaac

SEQ ID NO: 7160 - DNA, 736 bp, Homo sapiens
  ref <308>: DATABASE ACCESSION NUMBER: Refseq / NM_004548
  ref <309>: DATABASE ENTRY DATE: 2002-11-05
agccgcctcggtcctctgtagcgggcgacctaggccccgggacccggacggaggtagaggccagggcagcgcgtccgggagcggagtccgcgcccgccgccgccatgccggacagctgggacaaggatgtgtaccctgagcccccgcgccgcacgccggtgcagcccaatcccatcgtctacatgatgaaagcgttcgacctcatcgtggaccgacccgtgaccctcgtgagagaatttatagagcggcagcacgcaaagaacaggtattactactaccaccggcagtaccgccgcgtgccagacatcactgagtgcaaggaggaggacatcatgtgcatgtatgaagccgaaatgcagtggaagagggactacaaagtcgaccaagaaattatcaacattatgcaggatcggctcaaagcctgtcagcagagggaaggacagaactaccagcagaactgtatcaaggaagtggagcagttcacccaggtggccaaggcctaccaggaccgctatcaggacctgggggcctacagttctgccaggaagtgcctggccaaacagaggcagaggatgctgcaagagagaaaagctgcaaaagaggccgccgctgccacctcctgaggcagctgtgggtgcccctgctgtgtggctctgtatgactgttgctgaaatataaagccctgcaacctgaaaaaaaaaaaaaaaaaaaaaaaaaaaaaaaaaaaaaaaaaaaa

SEQ ID NO: 7161 - protein, 171 aa, Homo sapiens
  ref <308>: DATABASE ACCESSION NUMBER: SWISS-Prot / O96000
  ref <309>: DATABASE ENTRY DATE: 2002-06-15
PDSWDKDVYPEPPRRTPVQPNPIVYMMKAFDLIVDRPVTLVREFIERQHAKNRYYYYHRQYRRVPDITECKEEDIMCMYEAEMQWKRDYKVDQEIINIMQDRLKACQQREGQNYQQNCIKEVEQFTQVAKAYQDRYQDLGAYSSARKCLAKQRQRMLQERKAAKEAAAATS

SEQ ID NO: 7162 - DNA, 444 bp, Rattus norvegicus; identical to SEQ ID NO: 7159
  ref <308>: DATABASE ACCESSION NUMBER: EMBL / AI229497
  ref <309>: DATABASE ENTRY DATE: 1999-01-22

SEQ ID NO: 7163 - DNA, 736 bp, Homo sapiens; identical to SEQ ID NO: 7160
  ref <308>: DATABASE ACCESSION NUMBER: Refseq / NM_004548
  ref <309>: DATABASE ENTRY DATE: 2002-11-05

SEQ ID NO: 7164 - protein, 171 aa, Homo sapiens; identical to SEQ ID NO: 7161
  ref <308>: DATABASE ACCESSION NUMBER: SWISS-Prot / O96000
  ref <309>: DATABASE ENTRY DATE: 2002-06-15

SEQ ID NO: 7165 - DNA, 568 bp, Rattus norvegicus
  ref <308>: DATABASE ACCESSION NUMBER: EMBL / AI229637
  ref <309>: DATABASE ENTRY DATE: 2000-03-03
cctagatcatggcttgtttattaaaatattggtgaaaaaataggagtctctagggctgctgacaggaggggacatcatagcactcaaggtgtctggactctcctcctggccactctccttttcctgatcccactctgtaacaggctggggctcctgctcaccagagacagccttgctcttttctttggcagggcagactgggaggaccttcttttgacctcctttgtgctgagagccttctgatgctttttgctttcaggctctacgggggacacaggagtggatccattcacctgtgacagcttctcttttttcttctgcacttttggggtcttggcagggggggtgctgggactcagggtggggttattgggagccggactcttggccacagttactccattcacctgggatggggtgttagccttcactctcttccttcttttcttgcctgtgctggggggctggtctttaccagtggcagcaggcatggcaccctctgtcactgcatcctgctgtgatgcagccttcttttctgatgtggtaccctcagaattaagtttctttc

SEQ ID NO: 7166 - protein, 1277 aa, Rattus norvegicus
  ref <308>: DATABASE ACCESSION NUMBER: Refseq / NP_113856
  ref <309>: DATABASE ENTRY DATE: 2002-11-05
MKYALKRLITGLGVGREAARPCYSLALAQLLQSFEDIQLCDILGQIQEKYNLQAMNKAMMRPTLFANLFAVLALFQSGRLVKDKEALMKCVRLLKILSHHYNHLQGQPVKALVDILSEVPESMFQEILPKVLKGDMKVILSSPKYLELFLLARQRVPAELESLVGSVDLFSEDNIPSLVNILKVAANSVKKEQKLPDVALNLLRLALQENKFERFWKEVLEEGLLKKPSYTSSYMCFRLLGASLPLLSDEQLQLVMRGDLIRHFGEHMVVSKSQNPLRFIPEISAYVGTFLEGCQDDPKRQFTVMVAFTAITNQGLPVMPTFWRVTRFLNTEALQNYVTWLRDMFLQPDLDSLVDFSTANQKRVQDASLNVPERTVFRLRKWIIHRLVSLVDHLHLEKDEAVVEQIARFCLFHAFFKTKKATPQIPETKQHFSFPLEDGNRGVIVSAFFSLLQTLSVKFRQTPDLAENGKPWTYRLVQLADMLLKHNRNVANVTPLTAQQRQAWDQMMSTLKELEAQSSETRAIAFQHLLLLVGLHLFKSPAESCDVLGDIQTCIKKSMEQNLRRSRSRAKASQEPVWVEVMVEILLSLLAQPSNLMRQVVRSVFGHVCSHLTPRGLQLILAVLNPETNEDEEDNVVVTDTDEKQLKHGEDADSDSEDSKNSESDVDSEDGEESEEEDRDKDVDPGFRQQLMEVLQAGNALGGEEEEEEELGDEAMMALDQNLASLFAEQKMRIQARHEEKNKLQKEKQLRRDFQIRALDLIEVLVTKQPEHPLILELLEPLLNIIQRSMRSRGSTKQEQDLLHKTARIFMHHLCRARHYCHEVEPGAEALHAQVERFVQQAGNQADASVALYYFNASLYLLRVLKGNTTKRYQDGQKLEGADIKSEPKDSEVQTTSCLDLDFVTRVYSASLESLLTKRNSPLTIPMFLDLFSRYPVICKNLLPIVVQHVAGSSRPRHQAQACLLLQKALSARELRVCFEDPEWEQLISQVLGKTTQTLQTLGEAQSKGEHQRELSILELLNTVFRIVNHEKLSVDLTAFLGMLQGKQQKLQQNLQQGNHSSGSSRLYDLYWQAMNLLGVQRPKSEKKNVKDIPSDSQSPISTKRKKKGFLPETKKRKKLKSEGTTSEKKAASQQDRVTEGAMPAATGKDQPPSTGKKRRKRVKANTPSQVNGVTVAKSPAPNNPTLSPSTPPAKTPKVQKKKEKLSQVNGSTPVSPVEPESKKHQKALSTKEVKRRSSQSALPKKRARLSLVSRSPSLLQSGIRKRRVARRRVQTP

SEQ ID NO: 7167 - DNA, 489 bp, Rattus norvegicus
  ref <308>: DATABASE ACCESSION NUMBER: EMBL / AI229924
  ref <309>: DATABASE ENTRY DATE: 1999-01-22
ggccagcggcctgcgccaggctgcttctgcagccagtacctcggtgaagcccattttcagtcgggacctgaaagaggccaagcggagggtgcgcgagctctaccgcgcttggtaccgggaggtgccaaacactgtgcacttaatgcagctggatatcacggtgaaacaaggacgggataaagtccgagaaatgttcatgaagaatgcccatgtcaccgaccccagagtggttgacctcctggtcattaagggaaagatggagctccaggaaaccattaaagtgtggaagcagcggacacacattatgcggttcttccatgaaacagaaacaccaaggccaaaagatttcttgtccaagttctatattggccatgacccatgaggtcacctgatgggaaggtgcatgttaatatttaattatcttagagtacaaataaacccattatttgatggtcgtgataaagttgcactggtgaaccccctcgtgcc

SEQ ID NO: 7168 - protein, 131 aa, Rattus norvegicus
  ref <308>: DATABASE ACCESSION NUMBER: Refseq / NP_080263
  ref <309>: DATABASE ENTRY DATE: 2002-01-07
MAAAATGLRQAAAAAASTSVKPIFSRDLNEAKRRVRELYRAWYREVPNTVHLMQLDITVKQGRDKVREMFMKNAHVTDPRVVDLLVIKGKMELQETIKVWKQRTHVMRFFHETETPRPKDFLSKFYMGHDP

SEQ ID NO: 7169 - DNA, 573 bp, Rattus norvegicus
  ref <308>: DATABASE ACCESSION NUMBER: EMBL / AI230211
  ref <309>: DATABASE ENTRY DATE: 1999-01-22
ttcatcaccaatgctaagtaaggttgaatggagtggtggagtggggaatttactgataccctaacatggtttgtacaccgtgagtcattgcatcagagagctcttggtctccagaagaacgtggtatcctggttgttgccttactagctgatgaatcagatttactaagttgatcgaagttttgccgctgtgcttccccgtgaatcccctttagcagatatggctgtgagctgttttcttgggttggtatctttgagcataggtgagttgggttccttatctcttgtcaagactaaaatgggggaatgaaaatgcagacagtttaatgattatttttaggagctggcatgatatgggctttggagatgaaatagaaacaacacaagattcaggtctctgaagtcaataaaaatggaattttggaggtgcaggttttaaaatatatttcttttcatgagaagcacagtatgctgcgttggtgcactgttcaagtgacatggagatccttggttgaagcagccattattctaactctctaacgacttgttctgaaataaaaccgtggtttgtatg

SEQ ID NO: 7170 - protein, 611 aa, Rattus norvegicus
  ref <308>: DATABASE ACCESSION NUMBER: SWISS-Prot / AAA80459
  ref <309>: DATABASE ENTRY DATE: 2003-02-01
MAAGVAAWLPFARAAAIGWMPVANCPMPLAPADKNKRQDELIVLNVSGRRFQTWRTTLERYPDTLLGSTEKEFFFNEDTKEYFFDRDPEVFRCVLNFYRTGKLHYPRYECISAYDDELAFYGIHPEIIGDCCYEEYKDRKRENAERLMDDNESENNQESMPSLSFRQTMWRAFENPHTSTLALVFYYVTGFFIAVSVITNVVETVPCGTVPGSKELPCGERYSVAFFCLDTACVMIFTVEYLLRLFAAPSRYRFIRSVMSIIDVVAIMPYYIGLVMTNNEDVSGAFVTLRVFRVFRIFKFSRHSQGLRILGYTLKSCASELGFLLFSLTMAIIIFATVMFYAEKGSSASKFTSIPASFWYTIVTMTTLGYGDMVPKTIAGKIFGSICSLSGVLVIALPVPVIVSNFSRIYHQNQRADKRRAQKKARLARIRVAKTGSSNAYLHSKRNGLLNEALELTGTPEEEHMGKTTSLIESQHHHLLHCLEKTTNHEFIDEQMFEQNCMESSMQNYPSTRSPSLSSHSGLTTTCCSRRSKKTTHLPNSNLPATRLRTMQELSTIHIQGSEQPSLTTSRSSLNLKADDGLRPNCKTQDQEQPRGRVVTCKQEEIITLCI

SEQ ID NO: 7171 - DNA, 4723 bp, Homo sapiens
  ref <308>: DATABASE ACCESSION NUMBER: EMBL / AB040902
  ref <309>: DATABASE ENTRY DATE: 2002-05-12
gcaggacaagctcagcctgcagctgccgtgggctttgtgtggactggacgcagagcttgggagacgggggagggctattactccaattcactgtcaatggaattacagctatagcggcagtgtatataggattgctttttctcgtcttcctgggttctgaagtaacggaagctaccttgtataaagacctcaacactgctgaccatgatcagcgcagcctggagcatcttcctcatcgggactaaaattgggctgttccttcaagtagcacctctatcagttatggctaaatcctgtccatctgtgtgtcgctgcgatgcgggtttcatttactgtaatgatcgctttctgacatccattccaacaggaataccagaggatgctacaactctctaccttcagaacaaccaaataaataatgctgggattccttcagatttgaaaaacttgctgaaagtagaaagaatatacctataccacaacagtttagatgaatttcctaccaacctcccaaagtatgtaaaagagttacatttgcaagaaaataacataaggactatcacttatgattcactttcaaaaattccctatctggaagaattacatttagatgacaactctgtctctgcagttagcatagaagagggagcattccgagacagcaactatctccgactgcttttcctgtcccgtaatcaccttagcacaattccctggggtttgcccaggactatagaagaactacgcttggatgataatcgcatatccactatttcatcaccatctcttcaaggtctcactagtctaaaacgcctggttctagatggaaacctgttgaacaatcatggtttaggtgacaaagttttcttcaacctagttaatttgacagagctgtccctggtgcggaattccctgactgctgcaccagtaaaccttccaggcacaaacctgaggaagctttatcttcaagataaccacatcaatcgggtgcccccaaatgctttttcttatctaaggcagctctatcgactggatatgtccaataataacctaagtaatttacctcagggtatctttgatgatttggacaatataacacaactgattcttcgcaacaatccctggtattgcgggtgcaagatgaaatgggtacgtgactggttacaatcactacctgtgaaggtcaacgtgcgtgggctcatgtgccaagccccagaaaaggttcgtgggatggctattaaggatctcaatgcagaactgtttgattgtaaggacagtgggattgtaagcaccattcagataaccactgcaatacccaacacagtgtatcctgcccaaggacagtggccagctccagtgaccaaacagccagatattaagaaccccaagctcactaaggatcaccaaaccacagggagtccctcaagaaaaacaattacaattactgtgaagtctgtcacttctgataccattcatatctcttggaaacttgctctacctatgactgctttgagactcagctggcttaaactgggccatagcccggcatttggatctataacagaaacaattgtaacaggggaacgcagtgagtacttggtcacagccctggagcctgattcaccctataaagtatgcatggttcccatggaaaccagcaacctctacctatttgatgaaactcctgtttgtattgagactgaaactgcaccccttcgaatgtacaaccctacaaccaccctcaatcgagagcaagagaaagaaccttacaaaaaccccaatttacctttggctgccatcattggtggggctgtggccctggttaccattgcccttcttgctttagtgtgttggtatgttcataggaatggatcgctcttctcaaggaactgtgcatatagcaaagggaggagaagaaaggatgactatgcagaagctggcactaagaaggacaactctatcctggaaatcagggaaacttcttttcagatgttaccaataagcaatgaacccatctcgaaggaggagtttgtaatacacaccatatttcctcctaatggaatgaatctgtacaaaaacaatcacagtgaaagcagtagtaaccgaagctacagagacagtggtattccagactcagatcactcacactcatgatgctgaaggactcacagcagacttgtgttttgggttttttaaacctaagggaggtgatggtaggaaccctgttctactgcaaaacactggaaaaagagactgaaaaaaagcaatgtactgtacatttgccatataatttatatttaagaactttttattaaaagtttcaaatttcaggttactgctgcgattgatgtagtggagatgcctgaacacaattctatattttagtattttttagtaatttgtactgtattttccttgcaaatattggagttataaaccatttactttgtgttctactgagtaagatgacttgttgactgtgaaagtgaattttcttgctgtgtcgaacaatcaggactgcattcatatgagatccttgtagtataagcacaggccatttttcactttggtattaataaaatgtaaaaaaaaaaaactggctgaatggctgaatgagataaaatttaattttaaaaaatggttatgaaataatgttccaattattaaatttgtattatcccagtggtattcaataaatcaaaatgtgtgaagtaatgggcaatatcaaacttcctgcatatctccatttttgctctaggcaaattaattatccttaaaaaagttaagcatatcttctgaactgaatacatcagctggcataaaaggagcatgaagtctgttaaagccattgtcagcaaagctttgaaaataaaggacttcacaaaaacggtaatgtaaatgtgcttccaagttggggggaaaatgtgtacttaggaaaacatggaaacttagacttgtatagtgtaatgaacacaaataccaaaactgcattttggttttgcctataccatcctgatttttgaaaagtgaattataaacacaaaattgttagtgtttatgatgtttttatcataaaggatgtcagagaaactttatgcatattaaaaatgtaatgtaattataagcgattcccctcaacaatccagagaaagtagttctttaaataagagataatttaaagaaaaataaatactagacatcaaatttagatctggtttatgtcaaaggttttaacactgtacataaatgttcaatttacttttacaaagatcaagaatactgcccattactgtcacaattttccagatattatataatgaactcgtaatgtaacatttccttctagcttcctactgaattgtgagctgttacttgttgaaaaaccatatcacttttctgttgccatgattttttttttttcaacaaaaaaccaaagtgcattgtacgccctttggccagtcttgtatgtgccttgatccaacgctacatgtattcagcttttaaaactccacaaatttttcatactccttaaatatgaaaaattatggtcttattgctgaataaaacttttaaaaagtacagaataattgtgcttgctttttcaggattgtgttactatcactaagtagcaaattgcccagcacattagtcctaaacgtcccatgtatttttctaggcataaaaataaaagttggctaaaaattttaaaaaatcaacatcttgaggttgtgtatcattttacttcaaagagttcagtgtttcatgtataaatgtatttcctcttacttatacactgtatagatggaaaatttaagaaatggtttcaaagcctttctctcttaggcgcactgctgccactgtcctgatactttttaaggtggtctttgaaaaactgtttttttaaaatagccttttagtagagtgagttggcatttgtgatactgtgaaatacacactttctctttgtccctgtttctggcatacaactcctaaaatccttgcaatcttcaaagtgatatattttcatatgctaatgagttcactgatagctggcaggccctaggtagcttcaagataaagtctgatcattgaaaagaccaagacatgattatagggttgggacttacaaccccaaaccctaacctccagagagggcgaagtggatgaagattaagttgatcaccagtgaccagtggtttaatcaagcatgcctatgtaatcaagcctccataaaaaaacaaaaggtcaagatttggagagcttccagattgctgaacatgtggtggttcctgcaggatggcatgcctggagagggcatggaagctctgtgcccacctagacctcaccttatgtttcctgccatctggatcctttgtaacatcctttataatacgtcagtaaatctgtttccttgcattttgtgagctgttgtagcaaattaatagaacacaaaaaggggatcctgggaaaccaaacttgaagctgactagtcttgcaactggtgtctgaagaggaggcagttttgtgggaataagccctcaacctgtgggatatgacacaatttccaggtagacagtgtcgggattaaactgaattggaggacacccagctggtatctgctgaagaactgattgcttgcgtggtgtatggggcaaaacttgttaagacaagtcttctatgttgattattgttgaatgagagaattaaacacacatacacactt

SEQ ID NO: 7172 - protein, 649 aa, Homo sapiens
  ref <308>: DATABASE ACCESSION NUMBER: SWISS-Prot / Q9NZU0
  ref <309>: DATABASE ENTRY DATE: 2002-06-15
MISAAWSIFLIGTKIGLFLQVAPLSVMAKSCPSVCRCDAGFIYCNDRFLTSIPTGIPEDATTLYLQNNQINNAGIPSDLKNLLKVERIYLYHNSLDEFPTNLPKYVKELHLQENNIRTITYDSLSKIPYLEELHLDDNSVSAVSIEEGAFRDSNYLRLLFLSRNHLSTIPWGLPRTIEELRLDDNRISTISSPSLQGLTSLKRLVLDGNLLNNHGLGDKVFFNLVNLTELSLVRNSLTAAPVNLPGTNLRKLYLQDNHINRVPPNAFSYLRQLYRLDMSNNNLSNLPQGIFDDLDNITQLILRNNPWYCGCKMKWVRDWLQSLPVKVNVRGLMCQAPEKVRGMAIKDLNAELFDCKDSGIVSTIQITTAIPNTVYPAQGQWPAPVTKQPDIKNPKLTKDHQTTGSPSRKTITITVKSVTSDTIHISWKLALPMTALRLSWLKLGHSPAFGSITETIVTGERSEYLVTALEPDSPYKVCMVPMETSNLYLFDETPVCIETETAPLRMYNPTTTLNREQEKEPYKNPNLPLAAIIGGAVALVTIALLALVCWYVHRNGSLFSRNCAYSKGRRRKDDYAEAGTKKDNSILEIRETSFQMLPISNEPISKEEFVIHTIFPPNGMNLYKNNHSESSSNRSYRDSGIPDSDHSHS

SEQ ID NO: 7173 - DNA, 520 bp, Rattus norvegicus
  ref <308>: DATABASE ACCESSION NUMBER: EMBL / AI230354
  ref <309>: DATABASE ENTRY DATE: 2000-03-03
attccacctaataacgcataagggatggtgtcttctctgtaagggtacttgatggactcatcagtacagaacactcctcgttggaagggggtatgccttgaagtaagaattataaaaaggcaatccagccagcaacacgcaaatcacatcgaggaccacgtacggcagccgcgtcttgtcgaacatggtcacgggctggacgatgtcactaccaggtgcgggcggcggttggaagagaccgcggcggtccagatacccaattcccaggagccccgccctcgggatggcggcagccccaagcgaccgtacgcctcctagactgaaagcagcagcgacctgggcagtttggactcggccgcgccgccaccaagagcaaccgtgccccagaccttcccttcacggtcccctcacagggcccggactcccggccagttgccgccgctctgtcgcctcaggcgcctgctctcagtgctggctagccgcggccaaacgccctccgctgccctgtgcccctcgttcc

SEQ ID NO: 7174 - protein, 283 aa, Rattus norvegicus
  ref <308>: DATABASE ACCESSION NUMBER: SWISS-Prot / BAA12335
  ref <309>: DATABASE ENTRY DATE: 2001-12-01
MFDKTRLPYVALDVICVLLAGLPFAILTSRHTPFQRGIFCNDDSIKYPYKEDTIPYALLGGIVIPFCIIVMSIGESLSVYFNVLHSNSFVGNPYIATIYKAVGAFLFGVSASQSLTDIAKYTIGSLRPHFLAICNPDWSKINCSDGYIEDYICQGNEEKVKEGRLSFYSGHSSFSMYCMLFVALYLQARMKGDWARLLRPMLQFGLIAFSIYVGLSRVSDYKHHWSDVTVGLIQGAAMAILVALYVSDFFKDTHSYKERKEEDPHTTLHETASSRNYSTNHEP

SEQ ID NO: 7175 - DNA, 3352 bp, Homo sapiens; identical to SEQ ID NO: 4789
  ref <308>: DATABASE ACCESSION NUMBER: EMBL / D29641
  ref <309>: DATABASE ENTRY DATE: 2001-10-10

SEQ ID NO: 7176 - protein, 1046 aa, Homo sapiens; identical to SEQ ID NO: 4790
  ref <308>: DATABASE ACCESSION NUMBER: SWISS-Prot / P42285
  ref <309>: DATABASE ENTRY DATE: 2002-06-15

SEQ ID NO: 7177 - DNA, 292 bp, Rattus norvegicus
  ref <308>: DATABASE ACCESSION NUMBER: EMBL / AI230572
  ref <309>: DATABASE ENTRY DATE: 2000-03-03
gcccgttgaccagatccactagaactgtctgcattatctatgcagcatggggtttttattatttttacctaaagatgtctctttttggtaatgacaaacgtgttttttaagaaaaaaaaaaaaaggcctggtttttctcaatacacctttaacggtttttaaattgtttcatatctggtcaagttgagatttttaagaacttcatttttaatttgtaataaagtttacaacttgattttttcaaaaaagtcaacaaactgcaagcacctgttaataaaggtcttaaataata

SEQ ID NO: 7178 - protein, 322 aa, Rattus norvegicus
  ref <308>: DATABASE ACCESSION NUMBER: SWISS-Prot / P27817
  ref <309>: DATABASE ENTRY DATE: 2002-06-15
MSSEAETQQPPAAPAAALSAADTKPGSTGSGAGSGGPGGLTSAAPAGGDKKVIATKVLGTVKWFNVRNGYGFINRNDTKEDVFVHQTAIKKNNPRKYLRSVGDGETVEFDVVEGEKGAEAANVTGPGGVPVQGSKYAADRNHYRRYPRRRGPPRNYQQNYQNSESGEKNEGSESAPEGQAQQRRPYRRRRFPPYYMRRPYARRPQYSNPPVQGEVMEGADNQGAGEQGRPVRQNMYRGYRPRFRRGPPRQRQPREDGNEEDKENQGDETQGQQPPQRRYRRNFNYRRRRPENPKPQDGKETKAADPPAENSSAPEAEQGGAE

SEQ ID NO: 7179 - DNA, 331 bp, Homo sapiens
  ref <308>: DATABASE ACCESSION NUMBER: EMBL / AI915610
  ref <309>: DATABASE ENTRY DATE: 1999-12-23
ttttttgaagttttactcaatccaaataaaacttaatttattgaagacatcacgccgcaacccttacgactgcccaggaggctgcttgcaagaccctgtcccgggctgagacctgcgaggaacctccctcccccaccctgctccctcgttcttttccccactctcactattctggtaattttgctggtaattgcgtggaggacccctacgacgtggatagcgtctataatggttaccggtctgctgcatatttactgccttgaactggaacaccaccaggacctgtaacatttgctgcctccgacccttttctccttcacaactcaaactc

SEQ ID NO: 7180 - DNA, 292 bp, Rattus norvegicus; identical to SEQ ID NO: 7177
  ref <308>: DATABASE ACCESSION NUMBER: EMBL / AI230572
  ref <309>: DATABASE ENTRY DATE: 2000-03-03

SEQ ID NO: 7181 - protein, 322 aa, Rattus norvegicus; identical to SEQ ID NO: 7178
  ref <308>: DATABASE ACCESSION NUMBER: SWISS-Prot / P27817
  ref <309>: DATABASE ENTRY DATE: 2002-06-15

SEQ ID NO: 7182 - DNA, 331 bp, Homo sapiens; identical to SEQ ID NO: 7179
  ref <308>: DATABASE ACCESSION NUMBER: EMBL / AI915610
  ref <309>: DATABASE ENTRY DATE: 1999-12-23

SEQ ID NO: 7183 - DNA, 643 bp, Rattus norvegicus
  ref <308>: DATABASE ACCESSION NUMBER: EMBL / AI230748
  ref <309>: DATABASE ENTRY DATE: 2000-03-03
ttttttttgaatttaaatgcactttatttttagacaacccacatgacatgttttttttttctttttaaaaaaaaaaaaaaaaacaatgcctccactccaaataaatcacggtcaaaataaaagctcaagatgatatcagtcccatttgtcctaagtcctggtgttgtatggatggtaagcagcagccaattatggtgacaggcgatagatccaatttgttaacatttttccatctctaagccatccttaaagaaaatcatgaatggagtcacaccatcttcacggtagtccaggagagcaaccatgccatctggattcatgttttcaccaataaaaaactggtagttattgaaattagcaaggatgtgcttaatttgctctgcagctccagtcataaaaggctttaccctttctggtttctgttcttcaagtttgcccttgagtgatttcatgtagtctttgatatactttttgtaggcctcttttgtgaagctggtttcttgtaagtgatggttcatgacaatgtcaacaccggtgactactgtgctttcggtaccttcgccctccggaccttcagcggaagcatttccaccaatgagtgaatcatcgatggcaccctctgttctactgaccatcttgccct

SEQ ID NO: 7184 - protein, 172 aa, Rattus norvegicus
  ref <308>: DATABASE ACCESSION NUMBER: SWISS-Prot / P14701
  ref <309>: DATABASE ENTRY DATE: 2002-06-15
MIIYRDLISHDELFSDIYKIREIADGLCLEVEGKMVSRTEGAIDDSLIGGNASAEGPEGEGTESTVVTGVDIVMNHHLQETSFTKEAYKKYIKDYMKSLKGKLEEQKPERVKPFMTGAAEQIKHILANFNNYQFFIGENMNPDGMVALLDYREDGVTPFMIFFKDGLEMEKC

SEQ ID NO: 7185 - DNA, 830 bp, Homo sapiens
  ref <308>: DATABASE ACCESSION NUMBER: Refseq / NM_003295
  ref <309>: DATABASE ENTRY DATE: 2002-11-05
cccccccgagcgccgctccggctgcaccgcgctcgctccgagtttcaggctcgtgctaagctagcgccgtcgtcgtctcccttcagtcgccatcatgattatctaccgggacctcatcagccacgatgagatgttctccgacatctacaagatccgggagatcgcggacgggttgtgcctggaggtggaggggaagatggtcagtaggacagaaggtaacattgatgactcgctcattggtggaaatgcctccgctgaaggccccgagggcgaaggtaccgaaagcacagtaatcactggtgtcgatattgtcatgaaccatcacctgcaggaaacaagtttcacaaaagaagcctacaagaagtacatcaaagattacatgaaatcaatcaaagggaaacttgaagaacagagaccagaaagagtaaaaccttttatgacaggggctgcagaacaaatcaagcacatccttgctaatttcaaaaactaccagttctttattggtgaaaacatgaatccagatggcatggttgctctattggactaccgtgaggatggtgtgaccccatatatgattttctttaaggatggtttagaaatggaaaaatgttaacaaatgtggcaattattttggatctatcacctgtcatcataactggcttctgcttgtcatccacacaacaccaggacttaagacaaatgggactgatgtcatcttgagctcttcatttattttgactgtgatttatttggagtggaggcattgtttttaagaaaaacatgtcatgtaggttgtctaaaaataaaatgcatttaaactcatttgagag

SEQ ID NO: 7186 - protein, 172 aa, Homo sapiens
  ref <308>: DATABASE ACCESSION NUMBER: SWISS-Prot / P13693
  ref <309>: DATABASE ENTRY DATE: 2002-06-15
MIIYRDLISHDEMFSDIYKIREIADGLCLEVEGKMVSRTEGNIDDSLIGGNASAEGPEGEGTESTVITGVDIVMNHHLQETSFTKEAYKKYIKDYMKSIKGKLEEQRPERVKPFMTGAAEQIKHILANFKNYQFFIGENMNPDGMVALLDYREDGVTPYMIFFKDGLEMEKC

SEQ ID NO: 7187 - DNA, 527 bp, Rattus norvegicus
  ref <308>: DATABASE ACCESSION NUMBER: EMBL / AI231007
  ref <309>: DATABASE ENTRY DATE: 2000-03-03
aatttctgtatttttttctgtattgtatcctcatgggacattaggggttttatatggtaagacacccaaggttttggtaaaacattatcaaatatatatccagacgattcttccctagaagaaaaaacaatctttatgcctgattttaaaaagttgaaaagaggtggatttttcctttatggtgctgaaaggaaggatggagaatgaggagaaaataaaactgtgaggatcaagactggcatcttgtctgtacttattttcaggacaactggggagaacctgctgatttccagagctgatcccagcctgggacttcgggaaatcactgagcacacagcccatgtctgccatattggttctactactcagtccctccaagactgtttcataactgagaggtcattagcaagtgcatgggtgggcagaggtgggacaaggctgaatggccaactgaggaatctctgcactttctgattcaacaaggttaggccatcacagcgagggtcttcagacataagacaggagaa

SEQ ID NO: 7188 - protein, 635 aa, Rattus norvegicus
  ref <308>: DATABASE ACCESSION NUMBER: SWISS-Prot / BAA22932
  ref <309>: DATABASE ENTRY DATE: 2002-06-01
MVLYTTPFPNSCLSALHAVSWALIFPCYWLVDRLVASFIPTTYEKRQRADDPCYLQLFCTVLFTPVYLALLVAALPFAFLGFIFWSPLQSARRPYSYSRLEDKSPAGGAALLSEWKGTGAGKSFCFATANVCLLPDSLARLNNVFNTQARAKEIGQRIRNGAARPQIKIYIDSPTNTSISAASFSSLVSPQGSDGARAVPGSIKRTASVEYKGDGGRHPSDEAANGPASGEQADGSLEDSCIVRIGGEEGGRAQEADDPAPGSQARNGAGGTPKGQTPNHNQRDGDSGSLGSPSASRESLVKARAGQDSGGSGEPGSNSKLLYKTSVVKKAAARRRRHPDEAFDHEVSAFFPANLDFLCLQEVFDKRAAAKLKEQLHGYFEYILYDVGVYGCHGCCNFKCLNSGLFFASRYPVMDVAYHCYPNGCSFDALASKGALFLKVQVGSTPQDQRIVGYIACTHLHAPPEDSAIRCEQLDLLQDWLADFRKSTSSTSTANPEELVVFDVICGDLNFDNCSSDDKLEQQHSLFTRYKDPCRLGPGEEKPWAIGTLLDINGLYDEDVCTPDNLQKVLESEEGRREYLAFPTSKSPGAGQKGRKDLLKGNGRRIDYMLHAEEGCALTGRLRWKNSVLSPSCPA

SEQ ID NO: 7189 - DNA, 1450 bp, Homo sapiens
  ref <308>: DATABASE ACCESSION NUMBER: EMBL / AK026246
  ref <309>: DATABASE ENTRY DATE: 2000-09-29
cttgagggactgtttttgacaatccccgctgacctccgctcctcgtggcgccctggccctacacccagcctggcccagggccggctttgcctggtgaggctggagggagcaccaggacctgctgtctgctgtcagcccctcctggtgctggtgccctgatgctgtgccttgtcacccattgagctgcaagagggaccaagagggggccacgcagccagccagatgcctggccctgtgctggggcagacaacgctgcagagcccagggagcctggcgctaggacgtgcgtccttgtgacactggcctgtctgaactcacctggcctgggaagcaccgtctgcccgggcccaagccctgcccctccagagtccagagccaggaaggggctgctgagggcgagcatcctgctgggctctctgcccggcccacccctccaaggggctggcctgtgagccttgactgggattcatgatgtggaggcccccaacttccagaagcagctggtactctgctcacacaagcgactgggccggccggccctggacccctagaccccgagccgcctgccgactgcctgcacagggagagcagttgaggcccgggcagggcccccacaccagaccccaacatagcttccccacccaggcaccccctcccggggcagcaggcgtgggagtcagggctgcatgctcctcccctcccacctcacaggcggccttaggcaagtcattttctgtcatcacaaggtcgcctctgcctagtcaggtcctggcgtccagagtaaggatgtgcggcccccaggcccccgcacacctccctcagcaccaagaccgggacccccccacccacgtgtctcattgtggctgcctatggactcccgggccttgtgtgcaggccaggcccttccactgattttttaaagtgaaccattgctggatctcagattctgtggcatctaaggcctagcaggggtgggcacacgggtcacccgaggcccataccaagactctgttcctgccctaggcccagtctcaaaggaagccacaaggcgcgggggccactgaggaaggaaatgttcattttcatttgtccaaaaccaccttaagttttaagtatattaatcttgatgctttttaactattgctttttaacttgctgagatttagaaatactgttataaaaacttttttaatttctgtatttttttctgtattgtatcttcatgggacattaggggttttctatggtaagcacacctatggttttggtaaaaacattatcaaatatatatccagacggttcttccctagaagaaaaacaagtctttacacctgataaaatattttgcgaagagaggtgttctttttccttactggtgctgaaaggaaggatggataacgaggagaaaataaaactgtgaggctcaaaaaaaaaaaaaaaaaaaaaaaaa

SEQ ID NO: 7190 - protein, 655 aa, Homo sapiens
  ref <308>: DATABASE ACCESSION NUMBER: Refseq / NP_061137
  ref <309>: DATABASE ENTRY DATE: 2002-05-15
MVLYTTPFPNSCLSALHCVSWALIFPCYWLVDRLAASFIPTTYEKRQRADDPCCLQLLCTALFTPIYLALLVASLPFAFLGFLFWSPLQSARRPYIYSRLEDKGLAGGAALLSEWKGTGPGKSFCFATANVCLLPDSLARVNNLFNTQARAKEIGQRIRNGAARPQIKIYIDSPTNTSISAASFSSLVSPQGGDGVARAVPGSIKRTASVEYKGDGGRHPGDEAANGPASGDPVDSSSPEDACIVRIGGEEGGRPPEADDPVPGGQARNGAGGGPRGQTPNHNQQDGDSGSLGSPSASRESLVKGRAGPDTSASGEPGANSKLLYKASVVKKAAARRRRHPDEAFDHEVSAFFPANLDFLCLQEVFDKRAATKLKEQLHGYFEYILYDVGVYGCQGCCSFKCLNSGLLFASRYPIMDVAYHCYPNKCNDDALASKGALFLKVQVGSTPQDQRIVGYIACTHLHAPQEDSAIRCGQLDLLQDWLADFRKSTSSSSAANPEELVAFDVVCGDFNFDNCSSDDKLEQQHSLFTHYRDPCRLGPGEEKPWAIGTLLDTNGLYDEDVCTPDNLQKVLESEEGRREYLAFPTSKSSGQKGRKELLKGNGRRIDYMLHAEEGLCPDWKAEVEEFSFITQLSGLTDHLPVAMRLMVSSGEEEA

SEQ ID NO: 7191 - DNA, 582 bp, Rattus norvegicus
  ref <308>: DATABASE ACCESSION NUMBER: EMBL / AI231213
  ref <309>: DATABASE ENTRY DATE: 2000-03-03
ggattgttacaaatcctcctttaatagttgatttcagagatgagcatatggaaaccctcccccaccctgcaaggcacagcctcacccacccttagcccaggggacaggggacagctgccaagaaataccagtccagatcctccttctcttgtccagacaactcagggtcttatgccagacctgagggacccatgcccctaagctgtcaggtccctcaccaaggaaaagctcactgggggctacctgggccagtcccccaggcagcctctccgttcagttccctgctgaactgagcttggggggagtattccaagtgtgtacaagaactgcctaccctgtctcccacagaaacattgaaaacccataaagaaagtgtcacagtggggaaaccactaacctttcctgtggcctttccctgggcagccatgggtgctagcccaccctccctggtttttaatattatattgttataatatgacttcagggtggggacccagctatcctgtgtacagtaatactgggagccatttcaagctgttaaaaatattccaggcagtaggaggaagagctacaggacagtaa

SEQ ID NO: 7192 - protein, 266 aa, Rattus norvegicus
  ref <308>: DATABASE ACCESSION NUMBER: SWISS-Prot / O70352
  ref <309>: DATABASE ENTRY DATE: 2002-06-15
MGAGCVKVTKYFLFLFNLLFFILGAVILGFGVWILADKSSFISVLQTSSSSLQVGAYVFIGVGAITMLMGFLGCIGAVNEVRCLLGLYFVFLLLILIAQVTVEVLFYFNANKLKQEMGNTVMDIIQNYSVNASSSREEAWDYVQAQVKCCGWVSPSNWTRNPVLKNSTKTTYPCSCEKTKEEDNQLIVKKGFCESDNSTASENSPEDWPVHPEGCMEKAQAWLQENFGILLGVCAGVAVIELLGLFLSICLCRYIHSEDYSKVPKY

SEQ ID NO: 7193 - DNA, 1623 bp, Homo sapiens
  ref <308>: DATABASE ACCESSION NUMBER: Refseq / NM_002231
  ref <309>: DATABASE ENTRY DATE: 2001-03-09
gctgtgcagtccgacgccgactgaggcacgagcgggtgacgctgggcctgcagcgcggagcagaaagcagaacccgcagagtcctccctgctgctgtgtggacgacacgtgggcacaggcagaagtgggccctgtgaccagctgcactggtttcgtggaaggaagctccaggactggcgggatgggctcagcctgtatcaaagtcaccaaatactttctcttcctcttcaacttgatcttctttatcctgggcgcagtgatcctgggcttcggggtgtggatcctggccgacaagagcagtttcatctctgtcctgcaaacctcctccagctcgcttaggatgggggcctatgtcttcatcggcgtgggggcagtcactatgctcatgggcttcctgggctgcatcggcgccgtcaacgaggtccgctgcctgctggggctgtactttgctttcctgctcctgatcctcattgcccaggtgacggccggggccctcttctacttcaacatgggcaagctgaagcaggagatgggcggcatcgtgactgagctcattcgagactacaacagcagtcgcgaggacagcctgcaggatgcctgggactacgtgcaggctcaggtgaagtgctgcggctgggtcagcttctacaactggacagacaacgctgagctcatgaatcgccctgaggtcacctacccctgttcctgcgaagtcaagggggaagaggacaacagcctttctgtgaggaagggcttctgcgaggcccccggcaacaggacccagagtggcaaccaccctgaggactggcctgtgtaccaggagggctgcatggagaaggtgcaggcgtggctgcaggagaacctgggcatcatcctcggcgtgggcgtgggtgtggccatcatcgagctcctggggatggtcctgtccatctgcttgtgccggcacgtccattccgaagactacagcaaggtccccaagtactgaggcagctgctatccccatctccctgcctggcccccaacctcagggctcccaggggtctccctggctccctcctccaggcctgcctcccacttcactgcgaagaccctcttgcccaccctgactgaaagtagggggctttctggggcctagcgatctctcctggcctatccgctgccagccttgagccctggctgttctgtggttcctctgctcaccgcccatcagggttctcttatcaactcagagaaaaatgctccccacagcgtccctggcgcaggtgggctggacttctacctgccctcaagggtgtgtatattgtataggggcaactgtatgaaaaattggggaggagggggccgggcgcggtgctcacgcctgtaatcccagcactttgggaggccgaggcgggtggatcacgaggtcaggagatcgagaccatcctggctaacatggtgaaaccccgtctctactaaaaatacaaaaaaaatttagccgggcgcggtggcgggcacctgtagtcccagctacttgggaggctgaggcaggagaatggtgtgaacccgggagcggaggttgcagtgagctgagatcgtgctactgcactccagcctgggggacagaaagagactccgtctcaa

SEQ ID NO: 7194 - protein, 267 aa, Homo sapiens
  ref <308>: DATABASE ACCESSION NUMBER: SWISS-Prot / P27701
  ref <309>: DATABASE ENTRY DATE: 2001-10-16
MGSACIKVTKYFLFLFNLIFFILGAVILGFGVWILADKSSFISVLQTSSSSLRMGAYVFIGVGAVTMLMGFLGCIGAVNEVRCLLGLYFAFLLLILIAQVTAGALFYFNMGKLKQEMGGIVTELIRDYNSSREDSLQDAWDYVQAQVKCCGWVSFYNWTDNAELMNRPEVTYPCSCEVKGEEDNSLSVRKGFCEAPGNRTQSGNHPEDWPVYQEGCMEKVQAWLQENLGIILGVGVGVAIIELLGMVLSICLCRHVHSEDYSKVPKY

SEQ ID NO: 7195 - DNA, 582 bp, Rattus norvegicus; identical to SEQ ID NO: 7191
  ref <308>: DATABASE ACCESSION NUMBER: EMBL / AI231213
  ref <309>: DATABASE ENTRY DATE: 2000-03-03

SEQ ID NO: 7196 - protein, 266 aa, Rattus norvegicus; identical to SEQ ID NO: 7192
  ref <308>: DATABASE ACCESSION NUMBER: SWISS-Prot / O70352
  ref <309>: DATABASE ENTRY DATE: 2002-06-15

SEQ ID NO: 7197 - DNA, 1623 bp, Homo sapiens; identical to SEQ ID NO: 7193
  ref <308>: DATABASE ACCESSION NUMBER: Refseq / NM_002231
  ref <309>: DATABASE ENTRY DATE: 2001-03-09

SEQ ID NO: 7198 - protein, 267 aa, Homo sapiens; identical to SEQ ID NO: 7194
  ref <308>: DATABASE ACCESSION NUMBER: SWISS-Prot / P27701
  ref <309>: DATABASE ENTRY DATE: 2001-10-16

SEQ ID NO: 7199 - DNA, 659 bp, Rattus norvegicus
  ref <308>: DATABASE ACCESSION NUMBER: EMBL / AI231292
  ref <309>: DATABASE ENTRY DATE: 2000-03-03
tgttttttttttttttttttttttttttcattttttaaattttttaattgagcaagagcaaggtatgacaggtactgcaaggagaagagaaccaggggacagctgttctgacgtgcagaacctgcctgcagcagcttctttactgtctcctggtgggaacaccccggagatgccctccagagctggagcacccttctcagggataaaacactacagggtaggggaacaagtaagggaccattggcatggtcctatgagactcagctcttaggcatttttgcagctggattttgtcagggtgtgtgtgcctttccagggcacgctgtagatctggaaggagcagagtgccttcctcatcagatggggctggtcgtggaaaggacagttagtcaaatttgtctgggacttggtacatgtagttcggcccatctccacatccaaataatagtttattccagccacaagctgcttacgagctctcaccacctgtatggcgcggctgtggtacgcatcgttgctgcccttgttgtactcgcttacggcgaagtccaacgctcgctgcacgccctcctcgctggcatctgcctcctgcggagctcccaacaatcgcgggggtggcctgtaagttccggcccaggccacggccaggacggccagca

SEQ ID NO: 7200 - protein, 127 aa, Rattus norvegicus
  ref <308>: DATABASE ACCESSION NUMBER: SWISS-Prot / P14841
  ref <309>: DATABASE ENTRY DATE: 2002-06-15
VLAVAWAGTSRPPPRLLGAPQEADASEEGVQRALDFAVSEYNKGSNDAYHSRAIQVVRARKQLVAGINYYLDVEMGRTTCTKSQTNLTNCPFHDQPHLMRKALCSFQIYSVPWKGTHTLTKSSCKNA

SEQ ID NO: 7201 - DNA, 818 bp, Homo sapiens
  ref <308>: DATABASE ACCESSION NUMBER: Refseq / NM_000099
  ref <309>: DATABASE ENTRY DATE: 2002-11-05
cgcagcgggtcctctctatctagctccagcctctcgcctgcgccccactccccgcgtcccgcgtcctagccgaccatggccgggcccctgcgcgccccgctgctcctgctggccatcctggccgtggccctggccgtgagccccgcggccggctccagtcccggcaagccgccgcgcctggtgggaggccccatggacgccagcgtggaggaggagggtgtgcggcgtgcactggactttgccgtcggcgagtacaacaaagccagcaacgacatgtaccacagccgcgcgctgcaggtggtgcgcgcccgcaagcagatcgtagctggggtgaactacttcttggacgtggagctgggccgaaccacgtgtaccaagacccagcccaacttggacaactgccccttccatgaccagccacatctgaaaaggaaagcattctgctctttccagatctacgctgtgccttggcagggcacaatgaccttgtcgaaatccacctgtcaggacgcctaggggtctgtaccgggctggcctgtgcctatcacctcttatgcacacctcccaccccctgtattcccacccctggactggtggcccctgccttggggaaggtctccccatgtgcctgcaccaggagacagacagagaaggcagcaggcggcctttgttgctcagcaaggggctctgccctccctccttccttcttgcttctcatagccccggtgtgcggtgcatacacccccacctcctgcaataaaatagtagcatcggcaaaaaaaaaaaaaaaaaaaaaaaaaaaaaaaaaaaaaaaaaaa

SEQ ID NO: 7202 - protein, 146 aa, Homo sapiens
  ref <308>: DATABASE ACCESSION NUMBER: SWISS-Prot / P01034
  ref <309>: DATABASE ENTRY DATE: 2002-06-15
MAGPLRAPLLLLAILAVALAVSPAAGSSPGKPPRLVGGPMDASVEEEGVRRALDFAVGEYNKASNDMYHSRALQVVRARKQIVAGVNYFLDVELGRTTCTKTQPNLDNCPFHDQPHLKRKAFCSFQIYAVPWQGTMTLSKSTCQDA

SEQ ID NO: 7203 - DNA, 659 bp, Rattus norvegicus; identical to SEQ ID NO: 7199
  ref <308>: DATABASE ACCESSION NUMBER: EMBL / AI231292
  ref <309>: DATABASE ENTRY DATE: 2000-03-03

SEQ ID NO: 7204 - protein, 127 aa, Rattus norvegicus; identical to SEQ ID NO: 7200
  ref <308>: DATABASE ACCESSION NUMBER: SWISS-Prot / P14841
  ref <309>: DATABASE ENTRY DATE: 2002-06-15

SEQ ID NO: 7205 - DNA, 818 bp, Homo sapiens; identical to SEQ ID NO: 7201
  ref <308>: DATABASE ACCESSION NUMBER: Refseq / NM_000099
  ref <309>: DATABASE ENTRY DATE: 2002-11-05

SEQ ID NO: 7206 - protein, 146 aa, Homo sapiens; identical to SEQ ID NO: 7202
  ref <308>: DATABASE ACCESSION NUMBER: SWISS-Prot / P01034
  ref <309>: DATABASE ENTRY DATE: 2002-06-15

SEQ ID NO: 7207 - DNA, 521 bp, Rattus norvegicus
  ref <308>: DATABASE ACCESSION NUMBER: EMBL / AI231354
  ref <309>: DATABASE ENTRY DATE: 2000-03-03
attaaataaatttaattatattccttctgaaatacaaaagacagaataaatcataccataaaagtgggtaaaatatgataatatgatagtggccaattcatacacatgatctatttttttgtggacagacaccaaattactaaagaggattaagagattattctagaagcagaactacctggaagattatttggcattaaaatactgattcccaaagtgctacatgggcaagttcaagcaagcatttgtggtcacatgcatacgagtccccacagttacacatgatctgtcaccaaggacaccacacgactggaaaaagaaactcggctattctaattgctcacctgaaatgatcttgaacaaaatttctaacagtgtggtttcaactgctggtaacgttttagaacagtgaaagttgagtctgccacttgcacactgaaaaactggccatcgcttttactgtcactcatgatgtagtgtcatacaggattccggagagctggtacctttttcagatccct

SEQ ID NO: 7208 - protein, 423 aa, Rattus norvegicus; identical to SEQ ID NO: 3110
  ref <308>: DATABASE ACCESSION NUMBER: SWISS-Prot / P49186
  ref <309>: DATABASE ENTRY DATE: 2002-06-15

SEQ ID NO: 7209 - DNA, 1782 bp, Homo sapiens; identical to SEQ ID NO: 3111
  ref <308>: DATABASE ACCESSION NUMBER: EMBL / L31951
  ref <309>: DATABASE ENTRY DATE: 2000-03-04

SEQ ID NO: 7210 - protein, 424 aa, Homo sapiens [sequence omitted]

SEQ ID NO: 7211 - DNA, 521 bp, Rattus norvegicus; identical to SEQ ID NO: 7207
  ref <308>: DATABASE ACCESSION NUMBER: EMBL / AI231354
  ref <309>: DATABASE ENTRY DATE: 2000-03-03

SEQ ID NO: 7212 - protein, 423 aa, Rattus norvegicus; identical to SEQ ID NO: 3110
  ref <308>: DATABASE ACCESSION NUMBER: SWISS-Prot / P49186
  ref <309>: DATABASE ENTRY DATE: 2002-06-15

SEQ ID NO: 7213 - DNA, 1782 bp, Homo sapiens; identical to SEQ ID NO: 3111
  ref <308>: DATABASE ACCESSION NUMBER: EMBL / L31951
  ref <309>: DATABASE ENTRY DATE: 2000-03-04

SEQ ID NO: 7214 - protein, 424 aa, Homo sapiens [sequence omitted]

SEQ ID NO: 7215 - DNA, 521 bp, Rattus norvegicus; identical to SEQ ID NO: 7207
  ref <308>: DATABASE ACCESSION NUMBER: EMBL / AI231354
  ref <309>: DATABASE ENTRY DATE: 2000-03-03

SEQ ID NO: 7216 - protein, 423 aa, Rattus norvegicus; identical to SEQ ID NO: 3110
  ref <308>: DATABASE ACCESSION NUMBER: SWISS-Prot / P49186
  ref <309>: DATABASE ENTRY DATE: 2002-06-15

SEQ ID NO: 7217 - DNA, 1782 bp, Homo sapiens; identical to SEQ ID NO: 3111
  ref <308>: DATABASE ACCESSION NUMBER: EMBL / L31951
  ref <309>: DATABASE ENTRY DATE: 2000-03-04

SEQ ID NO: 7218 - protein, 424 aa, Homo sapiens [sequence omitted]

SEQ ID NO: 7219 - DNA, 521 bp, Rattus norvegicus; identical to SEQ ID NO: 7207
  ref <308>: DATABASE ACCESSION NUMBER: EMBL / AI231354
  ref <309>: DATABASE ENTRY DATE: 2000-03-03

SEQ ID NO: 7220 - protein, 423 aa, Rattus norvegicus; identical to SEQ ID NO: 3110
  ref <308>: DATABASE ACCESSION NUMBER: SWISS-Prot / P49186
  ref <309>: DATABASE ENTRY DATE: 2002-06-15

SEQ ID NO: 7221 - DNA, 1782 bp, Homo sapiens; identical to SEQ ID NO: 3111
  ref <308>: DATABASE ACCESSION NUMBER: EMBL / L31951
  ref <309>: DATABASE ENTRY DATE: 2000-03-04

SEQ ID NO: 7222 - protein, 424 aa, Homo sapiens [sequence omitted]

SEQ ID NO: 7223 - DNA, 521 bp, Rattus norvegicus; identical to SEQ ID NO: 7207
  ref <308>: DATABASE ACCESSION NUMBER: EMBL / AI231354
  ref <309>: DATABASE ENTRY DATE: 2000-03-03

SEQ ID NO: 7224 - protein, 423 aa, Rattus norvegicus; identical to SEQ ID NO: 3110
  ref <308>: DATABASE ACCESSION NUMBER: SWISS-Prot / P49186
  ref <309>: DATABASE ENTRY DATE: 2002-06-15

SEQ ID NO: 7225 - DNA, 1782 bp, Homo sapiens; identical to SEQ ID NO: 3111
  ref <308>: DATABASE ACCESSION NUMBER: EMBL / L31951
  ref <309>: DATABASE ENTRY DATE: 2000-03-04

SEQ ID NO: 7226 - protein, 424 aa, Homo sapiens [sequence omitted]

SEQ ID NO: 7227 - DNA, 521 bp, Rattus norvegicus; identical to SEQ ID NO: 7207
  ref <308>: DATABASE ACCESSION NUMBER: EMBL / AI231354
  ref <309>: DATABASE ENTRY DATE: 2000-03-03

SEQ ID NO: 7228 - protein, 423 aa, Rattus norvegicus; identical to SEQ ID NO: 3110
  ref <308>: DATABASE ACCESSION NUMBER: SWISS-Prot / P49186
  ref <309>: DATABASE ENTRY DATE: 2002-06-15

SEQ ID NO: 7229 - DNA, 1782 bp, Homo sapiens; identical to SEQ ID NO: 3111
  ref <308>: DATABASE ACCESSION NUMBER: EMBL / L31951
  ref <309>: DATABASE ENTRY DATE: 2000-03-04

SEQ ID NO: 7230 - protein, 424 aa, Homo sapiens [sequence omitted]

SEQ ID NO: 7231 - DNA, 521 bp, Rattus norvegicus; identical to SEQ ID NO: 7207
  ref <308>: DATABASE ACCESSION NUMBER: EMBL / AI231354
  ref <309>: DATABASE ENTRY DATE: 2000-03-03

SEQ ID NO: 7232 - protein, 423 aa, Rattus norvegicus; identical to SEQ ID NO: 3110
  ref <308>: DATABASE ACCESSION NUMBER: SWISS-Prot / P49186
  ref <309>: DATABASE ENTRY DATE: 2002-06-15

SEQ ID NO: 7233 - DNA, 1782 bp, Homo sapiens; identical to SEQ ID NO: 3111
  ref <308>: DATABASE ACCESSION NUMBER: EMBL / L31951
  ref <309>: DATABASE ENTRY DATE: 2000-03-04

SEQ ID NO: 7234 - protein, 424 aa, Homo sapiens [sequence omitted]

SEQ ID NO: 7235 - DNA, 521 bp, Rattus norvegicus; identical to SEQ ID NO: 7207
  ref <308>: DATABASE ACCESSION NUMBER: EMBL / AI231354
  ref <309>: DATABASE ENTRY DATE: 2000-03-03

SEQ ID NO: 7236 - protein, 423 aa, Rattus norvegicus; identical to SEQ ID NO: 3110
  ref <308>: DATABASE ACCESSION NUMBER: SWISS-Prot / P49186
  ref <309>: DATABASE ENTRY DATE: 2002-06-15

SEQ ID NO: 7237 - DNA, 1782 bp, Homo sapiens; identical to SEQ ID NO: 3111
  ref <308>: DATABASE ACCESSION NUMBER: EMBL / L31951
  ref <309>: DATABASE ENTRY DATE: 2000-03-04

SEQ ID NO: 7238 - protein, 424 aa, Homo sapiens [sequence omitted]

SEQ ID NO: 7239 - DNA, 568 bp, Rattus norvegicus
  ref <308>: DATABASE ACCESSION NUMBER: EMBL / AI231375
  ref <309>: DATABASE ENTRY DATE: 2000-03-03
cctggccccgacccagacccgcgcgggctcacactcgctgcggtatttcgaaaccgccgtgtcccggcccggcctcggggagccccggtacatggaagtgggctacgtggacgacacgcagttcgtgcgctacgacagcgacgcggagaatccgagatacgagccgcgggcgcggtggatagagcgggaggggccggagtattgggaggagcagacacagaacgccaagggaaacgagcagaattaccgagtgagcctgaggaacctgctccgctactacaaccagagcgagggcggctctcacaccatccagttgatgtatggctgtgacgtggggtcggacgggaggctcctccgcgggtatgagcagtccgcctacgatggccgcgattacatcgccctgaacgaagacctgaaaacgtggatggcggcggacacggcggcacagatgacccggaacaagtgggagcgggctcgttatgcagagagaagcagggcctacgtggagggcacgtgcgtggagtggcttaccagatacctggagcaagggaaggaggcgctgctgcgc

SEQ ID NO: 7240 - protein, 319 aa, Rattus norvegicus; identical to SEQ ID NO: 3253
  ref <308>: DATABASE ACCESSION NUMBER: SWISS-Prot / P15978
  ref <309>: DATABASE ENTRY DATE: 1999-07-15

SEQ ID NO: 7241 - DNA, 528 bp, Rattus norvegicus
  ref <308>: DATABASE ACCESSION NUMBER: EMBL / AI231445
  ref <309>: DATABASE ENTRY DATE: 2000-03-03
aatactagcaactttcattctttggaacttgtgctgaaaaaaagaagagtcagcaaatactactgaaagtgcaatattcgattatcactgcgagatgagctttgatccaaaccttctccacaacaatggacacaacgggtaccccaatggtacttctgcagcactccgtgaaactggggttattgaaaaactgctgacctcttatggatttattcagtgttcagaacggcaagctaggcttttcttccactgttcacagtataatggcaacctccaggacttaaaagtaggagatgatgtggaatttgaagtatcatctgaccggaggactgggaaacctattgctattaaattggtgaagataaaaccagaaatacatcctgaagaacgaatgaatggacaagttgtgtgcgctggtcctcacaacttagagagtgaatctgcagctgccccgggtcagagtccaacatggagtgtatgctacgaacgtaatggggaagtattttatctgacttacaccctcgtgcc

SEQ ID NO: 7242 - protein, 798 aa, Rattus norvegicus; identical to SEQ ID NO: 6433
  ref <308>: DATABASE ACCESSION NUMBER: SWISS-Prot / P18395
  ref <309>: DATABASE ENTRY DATE: 2001-10-16

SEQ ID NO: 7243 - DNA, 2537 bp, Homo sapiens; identical to SEQ ID NO: 6434
  ref <308>: DATABASE ACCESSION NUMBER: EMBL / AY049788
  ref <309>: DATABASE ENTRY DATE: 2001-10-27

SEQ ID NO: 7244 - protein, 798 aa, Homo sapiens; identical to SEQ ID NO: 6435
  ref <308>: DATABASE ACCESSION NUMBER: SWISS-Prot / O75534
  ref <309>: DATABASE ENTRY DATE: 2001-10-16

SEQ ID NO: 7245 - DNA, 528 bp, Rattus norvegicus; identical to SEQ ID NO: 7241
  ref <308>: DATABASE ACCESSION NUMBER: EMBL / AI231445
  ref <309>: DATABASE ENTRY DATE: 2000-03-03

SEQ ID NO: 7246 - protein, 798 aa, Rattus norvegicus; identical to SEQ ID NO: 6433
  ref <308>: DATABASE ACCESSION NUMBER: SWISS-Prot / P18395
  ref <309>: DATABASE ENTRY DATE: 2001-10-16

SEQ ID NO: 7247 - DNA, 2537 bp, Homo sapiens; identical to SEQ ID NO: 6434
  ref <308>: DATABASE ACCESSION NUMBER: EMBL / AY049788
  ref <309>: DATABASE ENTRY DATE: 2001-10-27

SEQ ID NO: 7248 - protein, 798 aa, Homo sapiens; identical to SEQ ID NO: 6435
  ref <308>: DATABASE ACCESSION NUMBER: SWISS-Prot / O75534
  ref <309>: DATABASE ENTRY DATE: 2001-10-16

SEQ ID NO: 7249 - DNA, 586 bp, Rattus norvegicus
  ref <308>: DATABASE ACCESSION NUMBER: EMBL / AI232012
  ref <309>: DATABASE ENTRY DATE: 2000-03-03
aatggacaggaaacgtacagagtaactgccaagccacataaattaactttttcgttaacgtctgtgatccaggaaagaacactaggtcggcatgggtgttttcgttgtctgttgtctgggtgcatgaccgaggtaaccgagtatgggccgtggatccatctttacacgttccagaagaaaaagcggctgccgtgcttggcaggcttcagatccccttcgatcacggggctgggctctggccttggtcttgagtgataaggattctctggcaaagggcgatctgttttcactttggtgaccttagacaactccccaaggtcaggcctcacccagcccagtttgtccaacacacattcgtcaaactttgcctgctgtttgcggcagtgacgaaacagctgcatgctggaataatcaaggcaagtccagtactctgtgaaaggctccgcacagtgactcttgatctgccggaagaagttcagtgcgcagccgttgaccagcttgccctccttcaggcagcgcctagggtccttctcttcccagcggcacagcatgaactccttattggtcttatcgcactgagccccat

SEQ ID NO: 7250 - protein, 172 aa, Rattus norvegicus
  ref <308>: DATABASE ACCESSION NUMBER: SWISS-Prot / BAB22322
  ref <309>: DATABASE ENTRY DATE: 2002-06-01
MPGIVELPTLEELKVEEVKVSSAVLKAAAHHYGAQCDKTNKEFMLCRWEEKDPRRCLKEGKLVNGCALNFFRQIKSHCAEPFTEYWTCLDYSNMQLFRHCRQQQAKFDQCVLDKLGWVRPDLGQLSKVTKVKTDRPLPENPYHSRARPEPNPVIEGDLKPAKHGTRFFFWTV

SEQ ID NO: 7251 - DNA, 772 bp, Homo sapiens
  ref <308>: DATABASE ACCESSION NUMBER: EMBL / BC001016
  ref <309>: DATABASE ENTRY DATE: 2001-07-13
ggcacgagggcgacgcggctgagggcttctcgtcggggtcggggctgcagccgtcatgccggggatagtggagctgcccactctagaggagctgaaagtagatgaggtgaaaattagttctgctgtgcttaaagctgcggcccatcactatggagctcaatgtgataagcccaacaaggaatttatgctctgccgctgggaagagaaagatccgaggcggtgtttagaggaaggcaaactggtcaacaagtgtgctttggacttctttaggcagataaaacgtcactgtgcagagccttttacagaatattggacttgcattgattatactggccagcagttatttcgtcactgtcgcaaacagcaggcaaagtttgacgagtgtgtgctggacaaactgggctgggtgcggcctgacctgggagaactgtcaaaggtcaccaaagtgaaaacagatcgacctttaccggagaatccctatcactcaagaccaagaccggatcccagccctgagatcgagggagatctgcagcctgccacacatggcagccgcttttatttctggaccaagtaaagatgggtccgtggcccacactcggtcatgtgctcagacaacgactgatgaaaacgcccatgcggtttgcatcgactgatagtgtgttctttccgggatcacaaacattaacaaaaaagttaacttatgtgacttggcagttattctataccatttcctgtccattaaaatttttaaaggaaaaaaaaaaaaaaaaaa

SEQ ID NO: 7252 - protein, 171 aa, Homo sapiens
  ref <308>: DATABASE ACCESSION NUMBER: SWISS-Prot / P51970
  ref <309>: DATABASE ENTRY DATE: 2002-06-15
PGIVELPTLEELKVDEVKISSAVLKAAAHHYGAQCDKPNKEFMLCRWEEKDPRRCLEEGKLVNKCALDFFRQIKRHCAEPFTEYWTCIDYTGQQLFRHCRKQQAKFDECVLDKLGWVRPDLGELSKVTKVKTDRPLPENPYHSRPRPDPSPEIEGDLQPATHGSRFYFWTK

SEQ ID NO: 7253 - DNA, 597 bp, Rattus norvegicus
  ref <308>: DATABASE ACCESSION NUMBER: EMBL / AI232078
  ref <309>: DATABASE ENTRY DATE: 2000-03-03
ggccgccaaactttttttttttttttttttttttttttttctacaaaaatggcgattttattttcttataacatacaatggtaaatattttgagggggggatttcaggtttttaaatttttctgggttgactttacacaacacagtgctaataaatgctaagaaactcctccatttccacccaagtaagggatccaattgacaggcaatccgataatacattgaaaataaaggtgttttcccacccactctaaatgtagataaaagtttaacagtcactgcctgctccacaggacagacaatttgtttttcaaagtctccggaccaagggacagcacaaccctgtgtcatacttataatacagtttaacaatacgttatcaaagatgtttgcacttgagattatcgctgaagaaaaaatggtggctggggatctgcacagcacagagaagactcatataaaacatcgtcaccactatttaaaagccaaatttaagcaatagtaaaaaaaaaaaatcaaaacatgataataatacaacctctgtttaaaatgacagccgcatcctgcctcttttccattgaattttacatatgaacag

SEQ ID NO: 7254 - protein, 1712 aa, Rattus norvegicus
  ref <308>: DATABASE ACCESSION NUMBER: SWISS-Prot / Q00918
  ref <309>: DATABASE ENTRY DATE: 2002-06-15
MAGAWLRWGLLLWAGLLAWSAHGRVRRITYVVRPGPGLPAGTLPLAGPPRTFNVALDARYSRSSTATSSRSLAGPPAERTRRTSQPGGAALPGLRSPLPPEPARPGAPSRQLHSKAGAQTAVTRFAKHGRQVVRSKVQQDTQSSGGSRLQVQQKQQLQGINVCGGQCCHGWSKAPGSQRCTKPSCVPPCQNGGMCLRPQFCVCKPGTKGKACEITAAQDTMSPVFGGQNPGSSWVPPEPAAKRTSTKKADTLPRVSPVAQMTLTLKPKPSMGLSQQIHSQVAPLSSQNVMIRHGQTQEYVLKPKYFPAPKVVSGEQSTEGSFSLRYGQEQGTAPFQVSNHTGRIKVVFTPSICKVTCTKGNCHNSCQKGNTTTLISENGHAADTLTATNFRVVICHLPCMNGGQCSSRDKCQCPPNFTGKLCQIPVLGASMPKLYQHAQQPGKALGSHVIHSTHTLPLTMTNQQGVKVKFPPNIVNIHVKHPPEASVQIHQVSRIDGPVGQRVKEVQPGQSQVSYQGLPVQKTQTVHSTYSHQQVIPHVYPVAAKTQLGRCFQETIGSQCGKALPGLSKQEDCCGTVGTSWGFNKCQKCPKKQSYHGYTQMMECLQGYKRVNNTFCQDINECQLQGVCPNGECLNTMGSYRCSCKMGFGPDPTFSSCVPDPPMISEEKGPCYRLVSPGRQCMHPLSVHLTKQICCCSVGKAWGPQCEKCPLPGTAAFKEICPGGMGYTVSGIHRRRPIHQHIGKEAVFVKPKNTQPVAKSTHPPPLPAKEEPVEALTSSREHGPGVAEPEVVTAPPEKEIPSLDQEKTRLEPGQPQLSPGVSTIHLHPQFPVVVEKTSPPVPVEVAPEGSTSSASQVIAPTQVTEINECTVNPDICGAGHCINLPVRYTCICYEGYKFSEQQRKCIDIDECAQAQHLCSQGRCENTEGSFLCICPAGFIASEEGSNCIDVDECLRPDVCRDGRCINTAGAFRCEYCDSGYRMSRRGHCEDIDECLTPSTCPEEQCVNSPGSYQCVPCTEGFRGWNGQCLDVDECLQPKVCTNGSCTNLEGSYMCSCHKGYSPTPDHRHCQDIDECQQGNLCMNGQCKNTDGSFRCTCGQGYQLSAAKDQCEDIDECEHRHLCSHGQCRNTEGSFQCLCNQGYRASVLGDHCEDINECLEDSSVCQGGDCINTAGSYDCTCPDGLQLNDNKGCQDINECAQPGLCAPHGECLNTQGSFHCVCEQGFSISADGRTCEDIDECVNNTVCDSHGFCDNTAGSFRCLCYQGFQAPQDGQGCVDVNECELLSGVCGEAFCENVEGSFLCVCADENQEYSPMTGQCRSRATEDSGVDRQPKEEKKECYYNLNDASLCDNVLAPNVTKQECCCTSGAGWGDNCEIFPCPVQGTAEFSEMCPRGKGFVPAGESSYETGGENYKDADECLLFGEEICKNGYCLNTQPGYECYCKEGTYYDPVKLQCFDMDECQDPNSCIDGQCVNTEGSYNCFCTHPMVLDASEKRCVQPTESNEQIEETDVYQDLCWEHLSEEYVCSRPLVGKQTTYTECCCLYGEAWGMQCALCPMKDSDDYAQLCNIPVTGRRRPYGRDALVDFSEQYGPETDPYFIQDRFLNSFEELQAEECGILNGCENGRCVRVQEGYTCDCFDGYHLDMAKMTCVDVNECSELNNRMSLCKNAKCINTEGSYKCVCLPGYVPSDKPNYCTPLNTALNLDKDSDLE

SEQ ID NO: 7255 - DNA, 2135 bp, Homo sapiens
  ref <308>: DATABASE ACCESSION NUMBER: EMBL / AF039843
  ref <309>: DATABASE ENTRY DATE: 2000-03-03
ggcacgagggtaaggccgttttcttttcccattcgctcatctgccaggaaaagggacttgccgttggcgcttcggcctcttgttcattgagaaaaaagaggaaatactccgcgtgcgcttgtagaaggggagtcgtctccagctccgaaccccggagtgttcatcagcggggaatctggctccgaattctctttttttctcccgccgattgctcggaagttggtctaaagcagaggttggaaagaaaggaaaaaagtttgcatcgagactggatttatttgcacatcgcagaaagaagagaatccaagggagaggggttggtgcaaagccgcgatcacggagttcagatgtgttctaagcctgctggagtgaccacacttccaagacctgatggaggccagagctcagagtggcaacgggtcgcagcccttgctgcagacgccccgtgacggtggcagacagcgtggggagcccgaccccagagacgccctcacccagcaggtacatgtcttgtctctggatcagatcagagccatccgaaacaccaatgagtacacagaggggcctactgtcgtcccaagacctgggctcaagcctgctcctcgcccctccactcagcacaaacacgagagactccacggtctgcctgagcaccgccagcctcctaggctccagcactcgcaggtccattcttctgcacgagcccctctgtccagatccataagcacggtcagctcagggtcgcggagcagtacgaggacaagtaccagcagcagctcctctgaacagagactgctaggatcatccttctcctccgggcctgttgctgatggcataatccgggtgcaacccaaatctgagctcaagccaggtgagcttaagccactgagcaaggaagatttgggcctgcacgcctacaggtgtgaggactgtggcaagtgcaaatgtaaggagtgcacctacccaaggcctctgccatcagactggatctgcgacaagcagtgcctttgctcggcccagaacgtgattgactatgggacttgtgtatgctgtgtgaaaggtctcttctatcactgttctaatgatgatgaggacaactgtgctgacaacccatgttcttgcagccagtctcactgttgtacacgatggtcagccatgggtgtcatgtccctctttttgccttgtttatggtgttaccttccagccaagggttgccttaaattgtgccaggggtgttatgaccgggttaacaggcctggttgccgctgtaaaaactcaaacacagtttgctgcaaagttcccactgtcccccctaggaactttgaaaaaccaacatagcatcattaatcaggaatattacagtaatgaggattttttctttctttttttaatacacatatgcaaccaactaaacagttataatcttggcactgttaatcgaaagttgggatagtctttgctgtttgcggtgaaatgctttttgtccatgtgccgttttaactgatatgcttgttagaactcagctaatggagctcaaagtatgagatacagaacttggtgacccatgtattgcataagctaaagcaacacagacactcctaggcaaagtttttgtttgtgaatagtacttgcaaaacttgtaaattagcagatgacttttttccattgttttctccagagagaatgtgctatatttttgtatatacaataatatttgcaactgtgaaaaacaagttgtgccatactacatggcacagacacaaaatattatactaatatgttgtacattcggaagaatgtgaatcaatcagtatgtttttagattgtattttgccttacagaaagcctttattgtaagactctgatttccctttggacttcatgtatattgtacagttacagtaaaattcaacctttattttctaattttttcaacatattgtttagtgtaaagaatatttatttgaagttttattattttataaaaaagaatatttattttaagaggcatcttacaaattttgccccttttatgaggatgtgatagttgctgcaaatgaggggttacagatgcatatgtccaatataaaatagaaaatatattaacgtttgaaattaaaaaaaaaaaaaaaaaa

SEQ ID NO: 7256 - protein, 315 aa, Homo sapiens
  ref <308>: DATABASE ACCESSION NUMBER: SWISS-Prot / O43597
  ref <309>: DATABASE ENTRY DATE: 2002-06-15
MEARAQSGNGSQPLLQTPRDGGRQRGEPDPRDALTQQVHVLSLDQIRAIRNTNEYTEGPTVVPRPGLKPAPRPSTQHKHERLHGLPEHRQPPRLQHSQVHSSARAPLSRSISTVSSGSRSSTRTSTSSSSSEQRLLGSSFSSGPVADGIIRVQPKSELKPGELKPLSKEDLGLHAYRCEDCGKCKCKECTYPRPLPSDWICDKQCLCSAQNVIDYGTCVCCVKGLFYHCSNDDEDNCADNPCSCSQSHCCTRWSAMGVMSLFLPCLWCYLPAKGCLKLCQGCYDRVNRPGCRCKNSNTVCCKVPTVPPRNFEKPT

SEQ ID NO: 7257 - DNA, 594 bp, Rattus norvegicus
  ref <308>: DATABASE ACCESSION NUMBER: EMBL / AI232096
  ref <309>: DATABASE ENTRY DATE: 2000-03-03
acctgtatgtaaaaaaattttattcacagatcagtgttaacatcttttaaaacaaaattcatcaaagagtttgagttaaagcttctggaaagtgaacaccttctaaaggagtctggacaggttctcattaagtcatctgaggaaagtagatggtattgtgacctcttttatgctttctgaaatctcggtacttaaatactgaagtatttaaagcttgacgaactggagcagattcgcttaagaatatattacattactaataatgtgcaattcaacatggccgttgaagggaacagtgtagtaaaaggaacagaaatgagaggtctttcatataggggcagggaacgttttctcctaggaatacatgacacagtcctgacatcccaaactcgtcccctgacccacgttattacacgtgagacaatgtctctcaactccttttgttcacacgcacaaacaaaacctgcacctgtcccacctagccacagatttttaataagtttctcatgcaggtccttgtccatttgatgactagcacagtttagcgcttcagacctaggatgttagtattatcccttttcaataacccagaaa

SEQ ID NO: 7258 - protein, 729 aa, Rattus norvegicus
  ref <308>: DATABASE ACCESSION NUMBER: SWISS-Prot / Q63424
  ref <309>: DATABASE ENTRY DATE: 1997-11-01
MNPFQKNESKETLFSPVSTEEMLPRPPSPPKKSPPKIFGSSYPVSIAFIVVNEFCERFSYYGMKAVLTLYFLYFLHWNEDTSTSVYHAFSSLCYFTPILGAAIADSWLGKFKTIIYLSLVYVLGHVFKSLGAIPILGGKMLHTILSLVGLSLIALGTGGIKPCVAAFGGDQFEEEHAEARTRYFSVFYLAINAGSLISTFITPMLRGDVKCFGQDCYALAFGVPGLLMVLALVVFAMGSKMYRKPPPEGNIVAQVIKCIWFALCNRFRNRSGDLPKRQHWLDWAAEKYPKHLIADVKALTRVLFLYIPLPMFWALLDQQGSRWTLQANKMNGDLGFFVLQPDQMQVLNPFLVLIFIPLFDLVIYRLISKCRINFSSLRKMAVGMILACLAFAVAALVETKINGMIHPQPASQEIFLQVLNLADGDVKVTVLGSRNNSLLVESVSSFQNTTHYSKLHLEAKSQDLHFHLKYNSLSVHNDHSVEEKNCYQLLIHQDGESISSMLVKDTGIKPANGMAAIRFINTLHKDLNISLDTDAPLSVGKDYGVSAYRTVLRGKYPAVHCETEDKVFSLDLGQLDFGTTYLFVITNITSQGLQAWKAEDIPVNKLSIAWQLPQYVLVTAAEVMFSVTGLEFSYSQAPSSMKSVLQAAWLLTVAVGNIIVLVVAQFSGLAQWAEFVLFSCLLLVVCLIFSVMAYYYVPLKSEDTREATDKQIPAVQGNMINLETKNTRL

SEQ ID NO: 7259 - DNA, 2685 bp, Homo sapiens
  ref <308>: DATABASE ACCESSION NUMBER: Refseq / NM_021082
  ref <309>: DATABASE ENTRY DATE: 2002-05-15
cgaggagagagagagagtaaggagccagccatgaatcctttccagaaaaatgagtccaaggaaactcttttttcacctgtctccattgaagaggtaccacctcgaccacctagccctccaaagaagccatctccgacaatctgtggctccaactatccactgagcattgccttcattgtggtgaatgaattctgcgagcgcttttcctattatggaatgaaagctgtgctgatcctgtatttcctgtatttcctgcactggaatgaagatacctccacatctatataccatgccttcagcagcctctgttattttactcccatcctgggagcagccattgctgactcgtggttgggaaaattcaagacaatcatctatctctccttggtgtatgtgcttggccatgtgatcaagtccttgggtgccttaccaatactgggaggacaagtggtacacacagtcctatcattgatcggcctgagtctaatagctttggggacaggaggcatcaaaccctgtgtggcagcttttggtggagaccagtttgaagaaaaacatgcagaggaacggactagatacttctcagtcttctacctgtccatcaatgcagggagcttgatttctacatttatcacacccatgctgagaggagatgtgcaatgttttggagaagactgctatgcattggcttttggagttccaggactgctcatggtaattgcacttgttgtgtttgcaatgggaagcaaaatatacaataaaccaccccctgaaggaaacatagtggctcaagttttcaaatgtatctggtttgctatttccaatcgtttcaagaaccgttctggagacattccaaagcgacacgactggctagactgggcggctgagaaatatccaaagcagctcattatggatgtaaaggcactgaccagggtactattcctttatatcccattgcccatgttctgggctcttttggatcagcagggttcacgatggactttgcaagccatcaggatgaataggaatttggggttttttgtgcttcagccggaccagatgcaggttctaaatccccttctggttcttatcttcatcccgttgtttgactttgtcatttatcgtctggtctccaagtgtggaattaacttctcatcacttaggaaaatggctgttggtatgatcctagcatgcctggcatttgcagttgcggcacgtgtagagataaaaataaatgaaatggccccagcccagccaggtccccaggaggttttcctacaagtcttgaatctggcagatgatgaggtgaaggtgacagtggtgggaaatgaaaacaattctctgttgatagagtccatcaaatcctttcagaaaacaccacactattccaaactgcacctgaaaacaaaaagccaggattttcacttccacctgaaatatcacaatttgtctctctacactgagcattctgtgcaggagaagaactggtacagtcttgtcattcgtgaagatgggaacagtatctccagcatgatggtaaaggatacagaaagcagaacaaccaatgggatgacaaccgtgaggtttgttaacactttgcataaagatgtcaacatctccctgagtacagatacctctctcaatgttggtgaagactatggtgtgtctgcttatagaactgtgcaaagaggagaataccctgcagtgcactgtagaacagaagataagaacttttctctgaatttgggtcttctagactttggtgcagcatatctgtttgttattactaataacaccaatcagggtcttcaggcctggaagattgaagacattccagccaacaaaatgtccattcggtggcagctaccacaatatgccctggttacagctggggaggtcatgttctctgtcacaggtcttgagttttcttattctcaggctccctctagcatgaaatctgtgctccaggcagcttggctattgacaattgcagttgggaatatcatcgtgcttgttgtggcacagttcagtggcctggtacagtgggccgaattcattttgttttcctgcctcctgctggtgatctgcctgatcttctccatcatgggctactactatgttcctgtaaagacagaggatatgcggggtccagcagataagcacattcctcacatccaggggaacatgatcaaactagagaccaagaagacaaaactctgatgactccctagattctgtcctaaccccaattccctggccctgtcttgaagcattttttttcttctactggattagacaagagagatagcagcatatcagagctgatctcctccacctttctccaatgacagaagttccaggactggttttccagtacatctttaaacaaggccccagagactctatgtctgcccgtccatcagtgaactcattaaaacttgtgcagtgttgctggagctggcctggtgtctccaaatgaccatgaaaatacacacgtataatggagatcattctctgtgggtatgcaaagttatgggaattcctttataggtaactgccatttaggactgatggccctaatttttgaggtgctgatttagaggcaaaattgcagaataacaaagaaatggtatttcaagtttttttttttataagcaatgtaattatgctattcacaggggcccg

SEQ ID NO: 7260 - protein, 729 aa, Homo sapiens
  ref <308>: DATABASE ACCESSION NUMBER: SWISS-Prot / Q16348
  ref <309>: DATABASE ENTRY DATE: 2002-06-15
MNPFQKNESKETLFSPVSIEEVPPRPPSPPKKPSPTICGSNYPLSIAFIVVNEFCERFSYYGMKAVLILYFLYFLHWNEDTSTSIYHAFSSLCYFTPILGAAIADSWLGKFKTIIYLSLVYVLGHVIKSLGALPILGGQVVHTVLSLIGLSLIALGTGGIKPCVAAFGGDQFEEKHAEERTRYFSVFYLSINAGSLISTFITPMLRGDVQCFGEDCYALAFGVPGLLMVIALVVFAMGSKIYNKPPPEGNIVAQVFKCIWFAISNRFKNRSGDIPKRHDWLDWAAEKYPKQLIMDVKALTRVLFLYIPLPMFWALLDQQGSRWTLQAIRMNRNLGFFVLQPDQMQVLNPLLVLIFIPLFDFVIYRLVSKCGINFSSLRKMAVGMILACLAFAVAARVEIKINEMAPAQPGPQEVFLQVLNLADDEVKVTVVGNENNSLLIESIKSFQKTPHYSKLHLKTKSQDFHFHLKYHNLSLYTEHSVQEKNWYSLVIREDGNSISSMMVKDTESRTTNGMTTVRFVNTLHKDVNISLSTDTSLNVGEDYGVSAYRTVQRGEYPAVHCRTEDKNFSLNLGLLDFGAAYLFVITNNTNQGLQAWKIEDIPANKMSIRWQLPQYALVTAGEVMFSVTGLEFSYSQAPSSMKSVLQAAWLLTIAVGNIIVLVVAQFSGLVQWAEFILFSCLLLVICLIFSIMGYYYVPVKTEDMRGPADKHIPHIQGNMIKLETKKTKL

SEQ ID NO: 7261 - DNA, 590 bp, Rattus norvegicus
  ref <308>: DATABASE ACCESSION NUMBER: EMBL / AI232321
  ref <309>: DATABASE ENTRY DATE: 2000-03-03
agatttggcttttgttttattttgttttgttatgtttgaggtaaggtctctatagtcctggctggcctccaactcggagatcttcctatctctgcattccaagttctaggattagaggagtgtgcccccatgcatagctgatttggcttcattttgatacttatttcaatattatctacatgattaacaggtaatcaaattttcctccagacccaaccaagagtaatgttccattcagttgtttcagtctggacaaaaaatttgttaccaaattcaattcaattacacacagtagaaatttgcctctcccaagagtgataaaaatatttcttttttaaaacaaaacagagccttgaagaatgaaactaccacacagacctcctatgcaagacacaaccaagtcgggggagcatttatcaaagcagataaatgccatcctgataacagactagaccggagttgtaagtgccatttgtcattaacccgtcttccattaacccgaagcctttggtttatttcttgtagcaaaccactcgtcacttttgtctgctgccattgcatcatccaacaatttgcttccttttggatcc

SEQ ID NO: 7262 - DNA, 609 bp, Rattus norvegicus
  ref <308>: DATABASE ACCESSION NUMBER: EMBL / AI232374
  ref <309>: DATABASE ENTRY DATE: 2000-03-03
cctttccagttttattttaaagttttaaaattacaaccacagtaattttttcccggcactagttacacttgtttaaaaagtggggtagggtacccgagtttcctactttattaaaataagaggacaactgtacagagtttttctcccagctcccgaggtgagactaagtactagtcttagatatggatatatacatatacacacatgcacacaatcccgcttctctaaagctacctagcaaattcgaatccacgggagtatatcccacagtccactccctgcctctccccctcctcggctacttagaaaagactcaaaagcttggaggggttttaagtggcagctggtagaactgaagtggcaccaagcaatgccacatcttacacaggaagaggggaaaggaaacgaacaacgtcctcctaggacacaatccatcaaccgtgtggaaaaacccaagtttccataggcacactgaggcacttggctgactctgcacccctccccctaagtccactcccatttaaccagagactgctgagaagacccttccttcccaatggctaaatcccggttgtgagaagctatggcttctctaaccagctgtcactt

SEQ ID NO: 7263 - protein, 193 aa, Rattus norvegicus; identical to SEQ ID NO: 5137
  ref <308>: DATABASE ACCESSION NUMBER: SWISS-Prot / P43278
  ref <309>: DATABASE ENTRY DATE: 2001-10-16

SEQ ID NO: 7264 - DNA, 2258 bp, Homo sapiens; identical to SEQ ID NO: 5138
  ref <308>: DATABASE ACCESSION NUMBER: Refseq / NM_005318
  ref <309>: DATABASE ENTRY DATE: 2002-04-29

SEQ ID NO: 7265 - protein, 193 aa, Homo sapiens; identical to SEQ ID NO: 5139
  ref <308>: DATABASE ACCESSION NUMBER: SWISS-Prot / P07305
  ref <309>: DATABASE ENTRY DATE: 2002-06-15

SEQ ID NO: 7266 - DNA, 609 bp, Rattus norvegicus; identical to SEQ ID NO: 7262
  ref <308>: DATABASE ACCESSION NUMBER: EMBL / AI232374
  ref <309>: DATABASE ENTRY DATE: 2000-03-03

SEQ ID NO: 7267 - protein, 193 aa, Rattus norvegicus; identical to SEQ ID NO: 5137
  ref <308>: DATABASE ACCESSION NUMBER: SWISS-Prot / P43278
  ref <309>: DATABASE ENTRY DATE: 2001-10-16

SEQ ID NO: 7268 - DNA, 2258 bp, Homo sapiens; identical to SEQ ID NO: 5138
  ref <308>: DATABASE ACCESSION NUMBER: Refseq / NM_005318
  ref <309>: DATABASE ENTRY DATE: 2002-04-29

SEQ ID NO: 7269 - protein, 193 aa, Homo sapiens; identical to SEQ ID NO: 5139
  ref <308>: DATABASE ACCESSION NUMBER: SWISS-Prot / P07305
  ref <309>: DATABASE ENTRY DATE: 2002-06-15

SEQ ID NO: 7270 - DNA, 629 bp, Rattus norvegicus
  misc_feature (1)..(629): n=a, c, g or t
  ref <308>: DATABASE ACCESSION NUMBER: EMBL / AI233261
  ref <309>: DATABASE ENTRY DATE: 2000-03-03
catggatcaaagaatcaattttatttacattactagtagactgctatagttactctgagatagattattttgtcaacgacaggaaaaaaatctcttccagtatgtcttaacaactgtaatgtaattgcttagttatagaagtatagagtaagaagcagctactgaattttagaaataaaaaatatgtatatacatcaccctgatgcctaagccaaaatatatcttaaaacaaattttcttgatttctattactcataaaaataaaggaaatatattgcaagtatttttctttatagacgatttcagttagaaaccaagagtttaatgaagagaatacaatgcttcctgtgagtgcgctgctgcagacgccagggaggtactcaaactcaacacattgccaaaccaccacattcacgcctcagtgacgctttttgtaggcgagagctagatttttttttacacatctcaattttatcatgaattttaatcttatgttccagataaatacaaggcccctgagttgtgagcttgagctgtagttaagaaccctttcttttggcttgcaaaatgtatccttttgacttgatgattcctctgcttttcacgatgaccgagtacctnaacagcca

SEQ ID NO: 7271 - protein, 274 aa, Rattus norvegicus
  ref <308>: DATABASE ACCESSION NUMBER: SWISS-Prot / P48508
  ref <309>: DATABASE ENTRY DATE: 2002-06-15
MGTDSRAAGALLARASTLHLQTGNLLNWGRLRKKCPSTHSEELRDCIQKTLNEWSSQISPDLVREFPDVLECTMSHAVEKINPDEREEMKVSAKLFIVGSNSSSSTRNAVDMACSVLGVAQLDSVIMASPPIEDGVNLSLEHLQPYWEELENLVQSKKIVAIGTSDLDKTQLEQLYQWAQVKPNSNQVNLASCCVMPPDLTAFAKQFDIQLLTHNDPKELLSEASFQEALQESIPDIEAQEWVPLWLLRYSVIVKSRGIIKSKGYILQAKRKGS

SEQ ID NO: 7272 - DNA, 1610 bp, Homo sapiens
  ref <308>: DATABASE ACCESSION NUMBER: EMBL / L35546
  ref <309>: DATABASE ENTRY DATE: 1999-07-02
ggcacgaggctgcggccgcagtagccggagccggagccgcagccaccggtgccttcctttcccgccgccgcccagccgccgtccggcctccctcgggcccgagcgcagaccaggctccagccgcgcggcgccggcagcctcgcgctccctctcgggtctctctcgggcctcgggcaccgcgtcctgtgggcggccgcctgcctgcccgcccgcccgcagccccttgcctgccggcccctgggcggcccgtgccatgggcaccgacagccgcgcggccaaggcgctcctggcgcgggcccgcaccctgcacctgcagacggggaacctgctgaactggggccgcctgcggaagaagtgcccgtccacgcacagcgaggagcttcatgattgtatccaaaaaaccttgaatgaatggagttcccaaatcaacccagatttggtcagggagtttccagatgtcttggaatgcactgtatctcatgcagtagaaaagataaatcctgatgaaagagaagaaatgaaagtttctgcaaaactgttcattgtagaatcaaactcttcatcatcaactagaagtgcagttgacatggcctgttcagtccttggagttgcacagctggattctgtgatcattgcttcacctcctattgaagatggagttaatctttccttggagcatttacagccttactgggaggaattagaaaacttagttcagagcaaaaagattgttgccataggtacctctgatctagacaaaacacagttggaacagctgtatcagtgggcacaggtaaaaccaaatagtaaccaagttaatcttgcctcctgctgtgtgatgccaccagatttgactgcatttgctaaacaatttgacatacagctgttgactcacaatgatccaaaagaactgctttctgaagcaagtttccaagaagctcttcaggaaagcattcctgacattcaagcgcacgagtgggtgccgctgtggctactgcggtattcggtcattgtgaaaagtagaggaattatcaaatcaaaaggctacattttacaagctaaaagaaggggttcttaactgacttaggagcataacttacctgtaatttccttcaatatgagagaaaattgagatgtgtaaaatctagttactgcctgtaaatggtgtcattgaggcagatattctttcgtcatatttgacagtatgttgtctgtcaagttttaaatacttatcttgcctccatatcaatccattctcatgaacctctgtattgctttccttaaactattgttttctaattgaaattgtctataaagaaaatacttgcaatatatttttcctttatttttatgactaatataaatcaagaaaatttgttgttagatatattttggcctaggtatcagggtaatgtatatacatattttttatttccaaaaaaaattcattaattgcttcttaactcttattataaccaagcaatttaattacaattgttaaaactgaaatactggaagaagatatttttcctgtcattgatgagatatatcagagtaactggagtagctgggatttactagtagtgtaaataaaattcactcttcaatac

SEQ ID NO: 7273 - protein, 274 aa, Homo sapiens
  ref <308>: DATABASE ACCESSION NUMBER: SWISS-Prot / P48507
  ref <309>: DATABASE ENTRY DATE: 2002-06-15
MGTDSRAAKALLARARTLHLQTGNLLNWGRLRKKCPSTHSEELHDCIQKTLNEWSSQINPDLVREFPDVLECTVSHAVEKINPDEREEMKVSAKLFIVESNSSSSTRSAVDMACSVLGVAQLDSVIIASPPIEDGVNLSLEHLQPYWEELENLVQSKKIVAIGTSDLDKTQLEQLYQWAQVKPNSNQVNLASCCVMPPDLTAFAKQFDIQLLTHNDPKELLSEASFQEALQESIPDIQAHEWVPLWLLRYSVIVKSRGIIKSKGYILQAKRRGS

SEQ ID NO: 7274 - DNA, 629 bp, Rattus norvegicus; identical to SEQ ID NO: 7270
  misc_feature (1)..(629): n=a, c, g or t
  ref <308>: DATABASE ACCESSION NUMBER: EMBL / AI233261
  ref <309>: DATABASE ENTRY DATE: 2000-03-03

SEQ ID NO: 7275 - protein, 274 aa, Rattus norvegicus; identical to SEQ ID NO: 7271
  ref <308>: DATABASE ACCESSION NUMBER: SWISS-Prot / P48508
  ref <309>: DATABASE ENTRY DATE: 2002-06-15

SEQ ID NO: 7276 - DNA, 1610 bp, Homo sapiens; identical to SEQ ID NO: 7272
  ref <308>: DATABASE ACCESSION NUMBER: EMBL / L35546
  ref <309>: DATABASE ENTRY DATE: 1999-07-02

SEQ ID NO: 7277 - protein, 274 aa, Homo sapiens; identical to SEQ ID NO: 7273
  ref <308>: DATABASE ACCESSION NUMBER: SWISS-Prot / P48507
  ref <309>: DATABASE ENTRY DATE: 2002-06-15

SEQ ID NO: 7278 - DNA, 501 bp, Rattus norvegicus
  ref <308>: DATABASE ACCESSION NUMBER: EMBL / AI234950
  ref <309>: DATABASE ENTRY DATE: 2000-03-03
agacaagctggaacttttatttacactaaaagcaaagaagggatacagaggaagggtttggaagccataatggggaagccaagctcttaaactcagttgcagtggggtgtgggccctgctgccggacgcaagagaataaccagaaaaagcgaaaaggaacagtcaaggtgtacagttcaccagctgcatttacttcaagtccctgaagagtccagcccagctgagggagagtcacgtcatgattccatgtgtttcactcctgtgtcctcccactgtcatccaggtgcagcaccagtgtccttcaacctgcctgaggttgacactgacggcagcctcagtcagagggaaactttgctgttgggtgatccatataaaatgagccatttatatgaactgcaaaagtaccaagggacaatgtgctccaagccatttgccaagatatgggctagaagacaaagagcaaggcttgggggaagagctagacagatcaagttccagctt

SEQ ID NO: 7279 - protein, 423 aa, Rattus norvegicus
  ref <308>: DATABASE ACCESSION NUMBER: SWISS-Prot / P20611
  ref <309>: DATABASE ENTRY DATE: 1995-11-01
MAGRQSGWSQAALLQFLLGMCLMVMPPIQARSLRFVTLLYRHGDRSPVKAYPKDPYQEEKWPQGFGQLTKEGMLQHWELGQALRQRYHGFLNASYHRQEVYVRSTDFDRTLMSAEANLAGLFPPTEVQHFNPNISWQPIPVHTVPITEDRLLKFPLGPCPRYEQLQNETRQTPEYQNMSIQNAQFLDMVANETGLMNLTLETIWNVYDTLFCEQTHGLLLPPWASPQTVQALSQLKDFSFLFLFGIHDQVQKARLQGGVLLAQILKNLTLMATTSQFPKLLVYSAHDTTLVALQMALNVYNGKQAPYASCHIFELYQEDNGNFSVEMYFRNDSKKAPWPLTLPGCPHRCPLQDFLRLTEPVIPKDWQKECQLASDTADTEVIVALAVCGSILFLLIVLLLTVLFRMQAQPPGYHHVADREDHA

SEQ ID NO: 7280 - DNA, 2111 bp, Homo sapiens
  ref <308>: DATABASE ACCESSION NUMBER: EMBL / BC003160
  ref <309>: DATABASE ENTRY DATE: 2001-07-13
gtgatggcgggcaagcggtccggctggagccgggcggctctcctccagctccttctcggcgtgaacctggtggtgatgccgcccacccaggcccggagtctgcgcttcgttaccttgctgtaccgccatggagaccgttcaccagtgaagacatatcccaaggacccctatcaggaagaagaatggccccaggggtttggtcagttaaccaaggaggggatgctacagcactgggaactgggccaggccctgcggcagcgctatcacggcttcctaaacacctcttatcaccggcaagaggtttatgtgcgaagcacagactttgaccggactctcatgagtgctgaggccaacctggctggactcttccctcccaacgggatgcagcgcttcaacccgaacatctcgtggcagcctattcctgtgcacactgtgcccatcactgaggacaggctgctgaagttcccgttgggcccatgtccccgttatgagcagctacagaacgagacccggcagacaccagagtatcagaatgagagttctcggaatgcacaatttctggacatggtggccaacgagacagggcttacagacctgacactggagaccgtctggaatgtctatgacacactcttctgtgagcaaacgcacgggctgcgcctgccgccctgggcctcaccccaaaccatgcagcgtctcagccggctaaaggacttcagcttccgcttcctcttcggaatctaccagcaggcggagaaggcccggcttcaggggggagtcctgctggctcagataaggaagaacctgaccctaatggcgaccacctcccagctccccaagctgctggtttactctgcgcacgacactaccctggttgccctgcaaatggcactggatgtctacaatggtgaacaagccccctacgcctcctgccacatatttgaactgtaccaggaagattctgggaatttctcagtggagatgtactttcggaacgagagtgacaaggccccctggccgctcagcctgcctggctgccctcaccgctgcccactgcaggacttccttcgcctcacagagcccgtcgtgcccaaggattggcagcaggagtgccagctggcaagcggtcctgcagacacagaggtgattgtggccttggctgtatgtggctccatcctcttcctcctcatagtgctgctcctcaccgtcctcttccggatgcaggcccagcctcctggctaccgccacgtcgcagatggggaggaccacgcctgacaaccactcagcccccttccctccacctcctaggggaggtgggctgggccctcgctcctgactgttgctgctccccagcccatggacaggagatcctgggttgggcctccctctgatgaccccagccagatgagcgagtggggctcagcgtggcccatggtgcctgtcactcagcattcccatgcctgatgtttaccaagtgctgtgttggacactggctttctccaaacaggatttgcctcctccacgctccctacacacctgagatgtaaactggcagtcagtgttcactcaggacctaggattagaaaatggcagagttggtgctggatccaccttgcacttctatcaagccctgttctttttcctccagcctgaagtcttcggcaaatagctcagagggacacggtcttgcctctcagtgcttattttagtgggaaaaacagctaataccaggggtacaaacattggctcccaaggaactggatcacccaacagccagccagccacatttccctgtgtctggctagagccaccattagactcagacagaatgcttcaggaatcgttgtcaccccttcaactggagcaggacagaaggttgtctgtacttgggagggagtggggagtggtgggaagggagttgcttgtcacacgaatcaggaaactgctctccctcagctgggctggggtctccagggacctgagctacatgcaggttgtgagctggaaaagaaagttctagactgtggcccagaatagggctggggcagctcccagagaatgaatagtgctgtttcctattggactgataaaaaaaaaaaaaaaaaaaaaaa

SEQ ID NO: 7281 - protein, 423 aa, Homo sapiens
  ref <308>: DATABASE ACCESSION NUMBER: SWISS-Prot / P11117
  ref <309>: DATABASE ENTRY DATE: 2001-10-16
MAGKRSGWSRAALLQLLLGVNLVVMPPTRARSLRFVTLLYRHGDRSPVKTYPKDPYQEEEWPQGFGQLTKEGMLQHWELGQALRQRYHGFLNTSYHRQEVYVRSTDFDRTLMSAEANLAGLFPPNGMQRFNPNISWQPIPVHTVPITEDRLLKFPLGPCPRYEQLQNETRQTPEYQNESSRNAQFLDMVANETGLTDLTLETVWNVYDTLFCEQTHGLRLPPWASPQTMQRLSRLKDFSFRFLFGIYQQAEKARLQGGVLLAQIRKNLTLMATTSQLPKLLVYSAHDTTLVALQMALDVYNGEQAPYASCHIFELYQEDSGNFSVEMYFRNESDKAPWPLSLPGCPHRCPLQDFLRLTEPVVPKDWQQECQLASGPADTEVIVALAVCGSILFLLIVLLLTVLFRMQAQPPGYRHVADGEDHA

SEQ ID NO: 7282 - DNA, 554 bp, Rattus norvegicus
  ref <308>: DATABASE ACCESSION NUMBER: EMBL / AI235358
  ref <309>: DATABASE ENTRY DATE: 2000-03-03
agaaatgtacttttactgtaaacggggcaaaatccagactgttcaattgttattatcccaaactgagcaagttttaaagttgtttttattttaaaaagccatcagtaataatctggaattttttacttttaaagctgcttagcctcaattttaacagattctgaaatttcttaattgatgtaattagtgaacttaattactctattactgttttctttaaagcatttaataaatacctgttgactgcctaggaagagtacaagaaaaacatttacatacaatgttttattggctctatggcagctaggaggactatacttttaagtttttttcttcattgagaaaaatgttgaattaacattaataattaggaaacctgactctgatgtgtttgctggtctgggctgagacttggatacatgcatctgttataactcgtcaagaaaaggcgtatgtcccaagtttccacttgctgtcattgacttcttgccagaaacaaactttttcgcagcctttacaaaatcggcatcagccacagcgtcaatttgctgaag

SEQ ID NO: 7283 - DNA, 1588 bp, Homo sapiens
  ref <308>: DATABASE ACCESSION NUMBER: EMBL / J04973
  ref <309>: DATABASE ENTRY DATE: 2000-03-04
atcttgctttcctttaatccggcagtgaccgtgtgtcagaacaatcttgaatcatgaagctactaaccagagccggctctttctcgagattttattccctcaaagttgcccccaaagttaaagccacagctgcgcctgcaggagcaccgccacaacctcaggaccttgagtttaccaagttaccaaatggcttggtgattgcttctttggaaaactattctcctgtatcaagaattggtttgttcattaaagcaggcagtagatatgaggacttcagcaatttaggaaccacccatttgctgcgtcttacatccagtctgacgacaaaaggagcttcatctttcaagataacccgtggaattgaagcagttggtggcaaattaagtgtgaccgcaacaagggaaaacatggcttatactgtggaatgcctgcggggtgatgttgatattctaatggagttcctgctcaatgtcaccacagcaccagaatttcgtcgttgggaagtagctgaccttcagcctcagctaaagattgacaaagctgtggcctttcagaatccgcagactcatgtcattgaaaatttgcatgcagcagcttaccagaatgccttggctaatcccttgtattgtcctgactataggattggaaaagtgacatcagaggagttacattacttcgttcagaaccatttcacaagtgcaagaatggctttgattggacttggtgtgagtcatcctgttctaaagcaagttgctgaacagtttctcaacatgaggggtgggcttggtttatctggtgcaaaggccaactaccgtggaggtgaaatccgagaacagaatggagacagtcttgtccatgctgcttttgtagcagaaagtgctgtcgcgggaagtgcagaggcaaatgcatttagtgttcttcagcatgtcctcggtgctgggccacatgtcaagaggggcagcaacaccaccagccatctgcaccaggctgttgccaaggcaactcagcagccatttgatgtttctgcatttaatgccagttactcagattctggactctttgggatttatactatctcccaggccacagctgctggagatgttatcaaggctgcctataatcaagtaaaaagaatagctcaaggaaacctttccaacacagatgtccaagctgccaagaacaagctgaaagctggatacctaatgtcagtggagtcttctgagtgtttcctggaagaagtcgggtcccaggctctagttgctggttcttacatgccaccatccacagtccttcagcagattgattcagtggctaatgctgatatcataaatgcggcaaagaagtttgtttctggccagaagtcaatggcagcaagtggaaatttgggacatacaccttttgttgatgagttgtaatactgatgcacacattacaggagagagctgaacgttctctcacccagagcagcaaacacatgaaagtcagaagtctctaatatatcatttgtcttttttccagtgaggtaaaataaggcataaatgcaggtaattattcccagctgacctaaagtcaataaaacattctgttt

SEQ ID NO: 7284 - protein, 453 aa, Homo sapiens
  ref <308>: DATABASE ACCESSION NUMBER: SWISS-Prot / P22695
  ref <309>: DATABASE ENTRY DATE: 2002-06-15
MKLLTRAGSFSRFYSLKVAPKVKATAAPAGAPPQPQDLEFTKLPNGLVIASLENYSPVSRIGLFIKAGSRYEDFSNLGTTHLLRLTSSLTTKGASSFKITRGIEAVGGKLSVTATRENMAYTVECLRGDVDILMEFLLNVTTAPEFRRWEVADLQPQLKIDKAVAFQNPQTHVIENLHAAAYRNALANPLYCPDYRIGKVTSEELHYFVQNHFTSARMALIGLGVSHPVLKQVAEQFLNMRGGLGLSGAKANYRGGEIREQNGDSLVHAAFVAESAVAGSAEANAFSVLQHVLGAGPHVKRGSNTTSHLHQAVAKATQQPFDVSAFNASYSDSGLFGIYTISQATAAGDVIKAAYNQVKTIAQGNLSNTDVQAAKNKLKAGYLMSVESSECFLEEVGSQALVAGSYMPPSTVLQQIDSVANADIINAAKKFVSGQKSMAASGNLGHTPFVDEL

SEQ ID NO: 7285 - DNA, 471 bp, Rattus norvegicus
  ref <308>: DATABASE ACCESSION NUMBER: EMBL / AI235707
  ref <309>: DATABASE ENTRY DATE: 2000-03-03
aaaattgaacaggactgctttattgggtgaattttaagacgcaactgttacatgaactgcaaatgaagattttaaatatcctacacaaaagtcaaataactcatgctatgtgtcaatcctcccataaatacttttagcctgtgttcaattatagtcaattctgaattggcccatctctggattagactttctaaagtctacacagagtaaaagaaatagacactaatggaaagtctgtaatctatcctgtagttggaccctagaaagatgtccatcgacaaaatccacaggccaggtaataggctttcttcatagtggttttggctgggtcgtctggaagctgtgtggagatgcttgtagctcgggtggaaagggtgtgcatgcatccaggacagtcaaagcagttggcacatctattctttgttaatttggcttcagctgatggcatgttttctaagcagctgggacaat

SEQ ID NO: 7286 - protein, 591 aa, Rattus norvegicus; identical to SEQ ID NO: 6028
  ref <308>: DATABASE ACCESSION NUMBER: SWISS-Prot / P35565
  ref <309>: DATABASE ENTRY DATE: 1995-11-01

SEQ ID NO: 7287 - DNA, 4117 bp, Homo sapiens; identical to SEQ ID NO: 6029
  ref <308>: DATABASE ACCESSION NUMBER: EMBL / L10284
  ref <309>: DATABASE ENTRY DATE: 1999-07-02

SEQ ID NO: 7288 - protein, 592 aa, Homo sapiens; identical to SEQ ID NO: 6030
  ref <308>: DATABASE ACCESSION NUMBER: SWISS-Prot / P27824
  ref <309>: DATABASE ENTRY DATE: 2001-10-16

SEQ ID NO: 7289 - DNA, 471 bp, Rattus norvegicus; identical to SEQ ID NO: 7285
  ref <308>: DATABASE ACCESSION NUMBER: EMBL / AI235707
  ref <309>: DATABASE ENTRY DATE: 2000-03-03

SEQ ID NO: 7290 - protein, 591 aa, Rattus norvegicus; identical to SEQ ID NO: 6028
  ref <308>: DATABASE ACCESSION NUMBER: SWISS-Prot / P35565
  ref <309>: DATABASE ENTRY DATE: 1995-11-01

SEQ ID NO: 7291 - DNA, 4117 bp, Homo sapiens; identical to SEQ ID NO: 6029
  ref <308>: DATABASE ACCESSION NUMBER: EMBL / L10284
  ref <309>: DATABASE ENTRY DATE: 1999-07-02

SEQ ID NO: 7292 - protein, 592 aa, Homo sapiens; identical to SEQ ID NO: 6030
  ref <308>: DATABASE ACCESSION NUMBER: SWISS-Prot / P27824
  ref <309>: DATABASE ENTRY DATE: 2001-10-16

SEQ ID NO: 7293 - DNA, 471 bp, Rattus norvegicus; identical to SEQ ID NO: 7285
  ref <308>: DATABASE ACCESSION NUMBER: EMBL / AI235707
  ref <309>: DATABASE ENTRY DATE: 2000-03-03

SEQ ID NO: 7294 - protein, 591 aa, Rattus norvegicus; identical to SEQ ID NO: 6028
  ref <308>: DATABASE ACCESSION NUMBER: SWISS-Prot / P35565
  ref <309>: DATABASE ENTRY DATE: 1995-11-01

SEQ ID NO: 7295 - DNA, 4117 bp, Homo sapiens; identical to SEQ ID NO: 6029
  ref <308>: DATABASE ACCESSION NUMBER: EMBL / L10284
  ref <309>: DATABASE ENTRY DATE: 1999-07-02

SEQ ID NO: 7296 - protein, 592 aa, Homo sapiens; identical to SEQ ID NO: 6030
  ref <308>: DATABASE ACCESSION NUMBER: SWISS-Prot / P27824
  ref <309>: DATABASE ENTRY DATE: 2001-10-16

SEQ ID NO: 7297 - DNA, 471 bp, Rattus norvegicus; identical to SEQ ID NO: 7285
  ref <308>: DATABASE ACCESSION NUMBER: EMBL / AI235707
  ref <309>: DATABASE ENTRY DATE: 2000-03-03

SEQ ID NO: 7298 - protein, 591 aa, Rattus norvegicus; identical to SEQ ID NO: 6028
  ref <308>: DATABASE ACCESSION NUMBER: SWISS-Prot / P35565
  ref <309>: DATABASE ENTRY DATE: 1995-11-01

SEQ ID NO: 7299 - DNA, 4117 bp, Homo sapiens; identical to SEQ ID NO: 6029
  ref <308>: DATABASE ACCESSION NUMBER: EMBL / L10284
  ref <309>: DATABASE ENTRY DATE: 1999-07-02

SEQ ID NO: 7300 - protein, 592 aa, Homo sapiens; identical to SEQ ID NO: 6030
  ref <308>: DATABASE ACCESSION NUMBER: SWISS-Prot / P27824
  ref <309>: DATABASE ENTRY DATE: 2001-10-16

SEQ ID NO: 7301 - DNA, 533 bp, Rattus norvegicus
  ref <308>: DATABASE ACCESSION NUMBER: EMBL / AI235747
  ref <309>: DATABASE ENTRY DATE: 2000-03-03
gtatttattttattttgtatgagtaccctgtagctgttttcagacacaccagaagaggacatcggatcccattacagatggttgtgagccaccatgtggttgctgggaattgaacttaggacctctggaggagcagccagtgctctttaccactgagccatctcaccagtcccccttccccagatcacacttcaaatactagttacatagagtattttttcgtgtttattatttcaaaaatacctaggatcaacaattgcttctcattttttgcaaaacataaagaaattggacagtgcagctccgctaaaacttgaaaatcttccttgcttcttcgatttgttttgcatgcacgggaagctttctctgactgccaggctgcaggaacttcttcacattggggaggctgctgattctgctcttgaaggccttcagcagagggaaagaggtcagaaggctggcatcaaactcttcaacatagaagagaagttccagcaggtggatgtttacccgggtcagcctgttacctacaa

SEQ ID NO: 7302 - protein, 220 aa, Rattus norvegicus; identical to SEQ ID NO: 2694
  ref <308>: DATABASE ACCESSION NUMBER: SWISS-Prot / P04904
  ref <309>: DATABASE ENTRY DATE: 2001-10-16

SEQ ID NO: 7303 - DNA, 918 bp, Homo sapiens; identical to SEQ ID NO: 2695
  ref <308>: DATABASE ACCESSION NUMBER: Refseq / NM_000847
  ref <309>: DATABASE ENTRY DATE: 2002-11-05

SEQ ID NO: 7304 - protein, 222 aa, Homo sapiens; identical to SEQ ID NO: 2696
  ref <308>: DATABASE ACCESSION NUMBER: SWISS-Prot / Q16772
  ref <309>: DATABASE ENTRY DATE: 2002-06-15

SEQ ID NO: 7305 - DNA, 413 bp, Rattus norvegicus
  ref <308>: DATABASE ACCESSION NUMBER: EMBL / AI237258
  ref <309>: DATABASE ENTRY DATE: 2000-03-03
ggtgtcctagatcatggcttgtttattaaaatattggtgaaaaaataggagtctctagggctgctgacaggaggggacatcatagcactcaaggtgtctggactctcctcctcctcctctccacccagtgcattcccagcttgcaacacttccatcagctgttgtcggaagcctgggtccacatccttatcacggtcctcctcttcactttcttccccatcctcactatccacgtcactctctgagttcttactgtcctcactgtctgagtctgcgtcctctccatgtttcagctgcttctcgtcagtgtcagtgaccaccacgttgtcctcctcatcctcatttgtctcagggttgagcacagccaggattagctgtagcccacgtggagtcaggtgggaacagacatgacc

SEQ ID NO: 7306 - protein, 1277 aa, Rattus norvegicus; identical to SEQ ID NO: 7166
  ref <308>: DATABASE ACCESSION NUMBER: Refseq / NP_113856
  ref <309>: DATABASE ENTRY DATE: 2002-11-05

SEQ ID NO: 7307 - DNA, 689 bp, Rattus norvegicus
  ref <308>: DATABASE ACCESSION NUMBER: EMBL / AI237654
  ref <309>: DATABASE ENTRY DATE: 2000-03-03
tttttttgtaaagatataaaaagggaacactgattttaaaaaacaaaaacactcctcgctttcaaaatattggccatgatttctctttttctagtatgtgacattggctctgttgccccatggcacagaagttcatggtctgttcttttaattcccttcaaaacaaaacaccttggaaagaccatgcctgaaggtcacttagaccccgactcaaaaaaaataacaacttcttcatttccaacatctgggaaagtgggccaggtctgaatgttttgagcgttccgacattcacccagcaaacactcctatatcacggtgcgggcactggtctgcaccccttgaggctggagacttgcctactgattgccacccatctgtggagtcagaggcgggggtgtacccactccccactggagagactgagtctctgaaacattggagttcaagcagagaggcagaaagcgttgagtagtacagatgagtcgtccctgaaggctcactgcacgttgttgttgttgttgttaaggacgcagggatccacctcagtgtaagtgggcggaggcatgaactggaactcgggggcgtacataaagatagggctgtcttgagaatcatccacatcatctagcaggggggtggtggggctctccaatctgtgatcttcaggaatcacgtccatataacaaggt

SEQ ID NO: 7308 - DNA, 581 bp, Homo sapiens; identical to SEQ ID NO: 6636
  ref <308>: DATABASE ACCESSION NUMBER: EMBL / AW601963
  ref <309>: DATABASE ENTRY DATE: 2000-03-24

SEQ ID NO: 7309 - protein, 391 aa, Homo sapiens
MVMFKKIKSFEVVFNDPEKVYGSGEKVAGRVIVEVCEVTRVKAVRILACGVAKVLWMQGSQQCKQTSEYLRYEDTLLLEDQPTGENEMVIMRPGNKYEYKFGFELPQGPLGTSFKGKYGCVDYWVKAFLDRPSQPTQETKKNFEVVDLVDVNTPDLMAPVSAKKEKKVSCMFIPDGRVSVSARIDRKGFCEGDEISIHADFENTCSRIVVPKAAIVARHTYLANGQTKVLTQKLSSVRGNHIISGTCASWRGKSLRVQKIRPSILGCNILRVEYSLLIYVSVPGSKKVILDLPLVIGSRSGLSSRTSSMASRTSSEMSWVDLNIPDTPEAPPCYMDVIPEDHRLESPTTPLLDDMDGSQDSPIFMYAPEFKFMPPPTYTEVDPCILNNNVQ

SEQ ID NO: 7310 - DNA, 558 bp, Rattus norvegicus
  misc_feature (1)..(558): n=a, c, g or t
  ref <308>: DATABASE ACCESSION NUMBER: EMBL / AI638939
  ref <309>: DATABASE ENTRY DATE: 2000-03-04
ttntnnnnnnnaatcttttctggtttgtttagtgcagtggggtcctcaataatcatgattccgtgagggtggcacatgtggtcctttctactggggacatcactaattattatcttgctactggcagagtaagaaaaatcagggaagtggctgtatttctgatcgtcgtctgactcctttctactgtctttggggtcttccactttgatagccattacgttatccgactgtagctgttcaatgtctcttaagtccttgggctctctgatgttgccctttgctgacttcccgaattctgcttccgcctggaacgcagtttcaatggttttctccattttcatgtctcgctcttccttccccttttccatctcctcgattcgtcctccgtcggagtctttggacttggttagctctgtgccttccatttttacgccctctgacgccaggcacatctctgccagttgaaagagtgcagaatttccacagcgtttcacaggctcagtgccacccaactgcgaagtgcttgaagagatctcttgcaactgaaacaaagctgat

SEQ ID NO: 7311 - DNA, 523 bp, Rattus norvegicus
  ref <308>: DATABASE ACCESSION NUMBER: EMBL / AI638955
  ref <309>: DATABASE ENTRY DATE: 2000-03-04
ttaaccacagttttaaaaaaaagcaaaaataagaacaaaaaaccccaaaacaaaaaacaaaacaaaaaaaccccaaaacaaccccccctccaaacaaaaacaaaaattcaaaaacaaaaacaaaaccaaaaaaagcacaatctttggaacaaaagaattaaaggcagaaatttaaaggaaaaatacatattcaaagaacacagtgaggtataaaaagtattctctcttttttgtttgttttcctcttcatcttgctatagagtcctctactagtaaatattgcaatagccaggcctcatgaactgggggctgtcccatttgcaggggtctcacgtcacttcagtagggggcaaatcggctgtagccacctcggtacaaactcgccacagcgccaactccatagctggcggcaggggcgagggcatggtaggggtcagctgtgtacaccctgccgtaaccgtcgctgtaagcggctgcagcggctgcagcagctgtggctgcggttgcagtaacaggctgtgca

SEQ ID NO: 7312 - protein, 377 aa, Rattus norvegicus
  ref <308>: DATABASE ACCESSION NUMBER: SWISS-Prot / AAK64287
  ref <309>: DATABASE ENTRY DATE: 2003-02-01
MEKKKMVTQGNQEPTTTPDAMVQPFTTIPFPPPPQNGIPTEYGVPHTQDYAGQTSEHNLTLYGSTQPHGEQSSNSPSNQNGSLTQTEGGAQTDGQQSQTQSSENSESKSTPKRLHVSNIPFRFRDPDLRQMFGQFGKILDVEIIFNERGSKGFGFVTFENSADADRAREKLHGTVVEGRKIEVNNATARVMTNKKMVTPYANGWKLSPVVGAVYGPELYAASSFQADVSLGNEAAVPLSGRGGINTYIPLIIPGFPYPTAATTAAAFRGAHLRGRGRTVYGAVRAVPPTAIPAYPGVVYQDGFYGADLYGGYAAYRYAQPATATAATAAAAAAAAYSDGYGRVYTADPYHALAPAASYGVGAVASLYRGGYSRFAPY

SEQ ID NO: 7313 - DNA, 1876 bp, Homo sapiens
  ref <308>: DATABASE ACCESSION NUMBER: EMBL / AL009266
  ref <309>: DATABASE ENTRY DATE: 1999-01-25
ctctaaagaagaaacattagaaagaaaaaggaaggaaaacggtataaagagagatcaattacccacccttaaatagctagattggggggggaggggggtggaaaagaaagctgtggaggtgtgccccagcacggctgctttgaaaggtttatcatctatccgtttggtttatggagaaaaagaaaatggtaactcagggtaaccaggagccgacaacaactcctgacgcaatggttcagccttttactaccatcccatttccaccacctccgcagaatggaattcccacagagtatggggtgccacacactcaagactatgccggccagaccggtgagcataacctgacactctacggaagtacgcaagcccacggggagcagagcagcaactcacccagcacacaaaatggatctcttacgcagacagaaggtggagcacagacagacggccagcagtcacagacacaaagtagtgaaaattcagagagtaaatctaccccgaaacggctgcatgtctctaatattcctttccgcttccgggaccctgacctccggcagatgtttgggcagtttggcaaaatcctagatgtagaaataatctttaatgaacgtggctctaagggattcgggttcgtaactttcgagaatagtgctgatgcagacagggccagggagaaattacacggcaccgtggtagagggccgtaaaatcgaggtgaataatgctacagcacgtgtaatgaccaataagaagatggtcacaccatatgcaaatggttggaaattaagcccagtagttggagctgtatatggtccggagttatatgcagcatccagctttcaagcagatgtgtccctaggcaatgatgcagcagtgcccctatcaggaagagggggtatcaacacttacattcctttaatcattcctggcttcccttaccctactgcagccaccacggcagccgctttcagaggagcccatttgaggggcagagggcggacagtatatggtgcagtccgagcggtacctccaacagccatccccgcctatccaggggtggatatgcagcctacagatatgcacagcctgctactgcaaccgcagccaccgctgctgcagccgctgcagccgcttacagtgacggttatggcagggtgtacacagccgacccctaccatgcccttgcccctgccgctagctatggagttggcgctgtggcgagtttataccgaggtggctacagccgatttgccccctactgaagtgacgtgagacccctgcaaatgggacagccccccagttcatgaggcctggctattgcaatatttactagtagaggaactctatagcaagatgaagaggaaaaacaaacaaacaaacaaaaaaaaacacaaaaaaagaaagaatacttttttatacctcactatgttctttgaatatgtatttttcctttaaatttctgcctttaattcttttgttccaaagattgtgcatttttttctttttttttttaaactgtggtaaaaaaaaaaaaaaataatgcatttccatgtctgtatgtccgtgcttagcttattctatcaatcacggaagaggcagtcaaggaggaaggagagacattaggagccgataaatgcatctgatcagaaatcagcagacagaattaccaaagtgtatctggtgctgaatgactgggggacaagcagaagtggaagagatctttctgcaacaggatattcttctagtcttctgagtttctggtctttgacaggcaattctggttggctgtggctggaatccacatgctgatagataggaatttgtgcttacaaagcaggagaattaaaaagacgctttcctctcctcctttagag

SEQ ID NO: 7314 - protein, 391 aa, Homo sapiens
  ref <308>: DATABASE ACCESSION NUMBER: SWISS-Prot / O43251
  ref <309>: DATABASE ENTRY DATE: 2002-06-15
MEKKKMVTQGNQEPTTTPDAMVQPFTTIPFPPPPQNGIPTEYGVPHTQDYAGQTGEHNLTLYGSTQAHGEQSSNSPSTQNGSLTQTEGGAQTDGQQSQTQSSENSESKSTPKRLHVSNIPFRFRDPDLRQMFGQFGKILDVEIIFNERGSKGFGFVTFENSADADRAREKLHGTVVEGRKIEVNNATARVMTNKKMVTPYANGWKLSPVVGAVYGPELYAASSFQADVSLGNDAAVPLSGRGGINTYIPLIIPGFPYPTAATTAAAFRGAHLRGRGRTVYGAVRAVPPTAIPAYPGVVYQDGFYGADLYIESANCFRSNRVDMQPTDMHSLLLQPQPPLLQPLQPLTVTVMAGCTQPTPTMPLPLPLAMELALWRVYTEVATADLPPTEVT

SEQ ID NO: 7315 - DNA, 523 bp, Rattus norvegicus; identical to SEQ ID NO: 7311
  ref <308>: DATABASE ACCESSION NUMBER: EMBL / AI638955
  ref <309>: DATABASE ENTRY DATE: 2000-03-04

SEQ ID NO: 7316 - protein, 377 aa, Rattus norvegicus; identical to SEQ ID NO: 7312
  ref <308>: DATABASE ACCESSION NUMBER: SWISS-Prot / AAK64287
  ref <309>: DATABASE ENTRY DATE: 2003-02-01

SEQ ID NO: 7317 - DNA, 1876 bp, Homo sapiens; identical to SEQ ID NO: 7313
  ref <308>: DATABASE ACCESSION NUMBER: EMBL / AL009266
  ref <309>: DATABASE ENTRY DATE: 1999-01-25

SEQ ID NO: 7318 - protein, 391 aa, Homo sapiens; identical to SEQ ID NO: 7314
  ref <308>: DATABASE ACCESSION NUMBER: SWISS-Prot / O43251
  ref <309>: DATABASE ENTRY DATE: 2002-06-15

SEQ ID NO: 7319 - DNA, 393 bp, Rattus norvegicus
  ref <308>: DATABASE ACCESSION NUMBER: EMBL / AI638958
  ref <309>: DATABASE ENTRY DATE: 2000-03-04
ttggggaggagtctaatgcagttatggctatcctggaactatgtagaccaagatgaccttaaactcagaaaaagccacctgcttataccttcagaatactcccactacacctgctttagtctttacgtttcctcaggaactccaacatctgactgcagggtctcaaggcaacttcttatccaatcactgcagcccactcactcactcactcactcaggctgttgtacttggttaaagagtatatgagtgacacaggcctgttctctgaccctgctgttcctcttaggaaaaacctggctggaggcagtatctgggacctgctggatcaaccctcctagaagaatgcccatcgaagctagcccccaggtcgaatttcctaattctgacagcatg

SEQ ID NO: 7320 - DNA, 584 bp, Rattus norvegicus
  ref <308>: DATABASE ACCESSION NUMBER: EMBL / AI638960
  ref <309>: DATABASE ENTRY DATE: 2000-03-04
ttgactcagaagcagacgtttatttacttaaaacatttcacaattatattgacaattatttatttaaaataatattctaaatacttacaaaaataaatcaagtattgcttctagttttcaagtgtgacagcatttgccatagaaaatagaagggaccttttgaataaactaaacgctacactgaaacttcctcaagtttaataactacacactatttcctctgatgacttgtgctttataaatgtccaaactatttctgtgcaacaaacaggatcacagtaagactgaatgtataacaagccatatacattcatttttacacaaaatgtcagtactctggcccaaaccaccatcatccccaaaatgccagatacaccattatacagaagtacatgtggttgtgaagtttttaacatccagtcatcaaagaccagatatttattattaaagtatactcagctaaaggttgctaggcaagacattttttacttacattaaatcattagtcaaatcattaaaaaaatagaataaacttcaaatatgtctcaatacattaagttaatcccaagataaacatcagtgtc

SEQ ID NO: 7321 - DNA, 2214 bp, Homo sapiens
  ref <308>: DATABASE ACCESSION NUMBER: EMBL / AK027250
  ref <309>: DATABASE ENTRY DATE: 2000-09-29
aaatttaattaattataaactcagtctcttggttgcaccagccacatttcagatgctcaatagccacatgtggctagtgggtaccatattggacagggcagctatagaatatttccatcattgcagaaagttctattggatagtaccataatctttttatagtaacttggaaatactatttgatattagatgttagaccacaaaaagaagaaaaatgttaggactatttcagatataaaaaggaactgaattgtgacataattagcatcttacattccatacagttgaataccttatgctgtgacaaccatagttaatcatttcagtgctgttcaacatacatacctatcagcagtgtgtttagaccaggggtctgcaaactttctgtgaatggacaaagagtaaatactttagtaaatgtcttaggctttgtggcctacatgatctttgttgcaagtactcaactctgccattatagagttaaagcagccatacacaatatataaacaaaatgggcatagttgtatttcagtaaaactttatttacaaagacaggcggtaggccagatttggcttgcatgctgtagagctgtggtctaaattttattcatagactttctttgcaaatacagtgtgagtattgttccatttacagtattattattttttagatacctggtttttagattcttgcctggtaactttttactgaaaatacaagaatttcgtactgcatttgcatctccgagattagggagcacctgtcaggatatgttgttctatcagggttacttctgttgactacctcttagattttgatacagttatattgttgagtttcattttcatatattcttgtagtgtctgcttgcctgtgacttctggtaaaataaaataagcctttgaaaatattttagcatggtatttaacattttctaaatattatggcattttgacatattttagtcagcgaagacatctgcccctttggtgtttctacttgcttatgattgagattttacaagcccttcaaactccgttttaaaggaatttattgtaaaacattaactttaataaattagtgttttcacagatcagatcattatacttggaacttctaaatcatgcaatttctgaataaggacataaggctagattcatttttcttaatagagaaaaaggaaatttctgatttatcacttttctagttgataagtaggattcaaaacgtttgatatgtaagtatttatataagactaatgtaatttaaagttctgtattattgtgattaatcatacagaaattcaggaactgatcagaagtgagattcttttccacatctggttaatgtagtgagttgacaccctgtgggtggtaaagcattataaacatttcatcttgaaccatgatttatacacatctgtgttataagggaggcttgagtacatataccaatgaagagatattcagcatttgtctatttgataaggaattaaatgtcctagtgattataaagtaaaaccacagaccaatttgcaaatgatcttcaatgttaagcacttgctctaagattaaaattccttttctttttaaggttaagggtgtgtacgtatggcagtgatgtctatgttgagattaacttatgtattgaggaaaatttgaagtttattttttcgatgaataaggctgtcaaatgatttagtatagattaatgacatcttttttagaaatattaaagtgagtattcctcattatgtcatcatttctgataattagagtgctaatttgaatgttagataatgtttccacatctatacctatttctttctagggcacttctgaccctggggcttggggatggcctttaggccacagtagtgtctgtgttaagttcactaaatgtgtatttaatgagaaacattcctatgtaaaaatgtgtgtatgtgaacgtatgcatacatttttattgtgcacctgtacattgtgaagaagtagtttggaaatttgtaaagcacaaaccataaaagagtgtggagttattaaatgatgtagcacaaatgtaatgtttagcttataaaaggtcctttctattttctatggcaaagactttgacacttgaaaaataaaaccaatatttgatttatttttgtaagtatttaggatattattttaaataaatgattgtccattatcaataaaaaaaaaaaaaaaaaa

SEQ ID NO: 7322 - DNA, 584 bp, Rattus norvegicus; identical to SEQ ID NO: 7320
  ref <308>: DATABASE ACCESSION NUMBER: EMBL / AI638960
  ref <309>: DATABASE ENTRY DATE: 2000-03-04

SEQ ID NO: 7323 - DNA, 2214 bp, Homo sapiens; identical to SEQ ID NO: 7321
  ref <308>: DATABASE ACCESSION NUMBER: EMBL / AK027250
  ref <309>: DATABASE ENTRY DATE: 2000-09-29

SEQ ID NO: 7324 - DNA, 450 bp, Rattus norvegicus
  ref <308>: DATABASE ACCESSION NUMBER: EMBL / AI638965
  ref <309>: DATABASE ENTRY DATE: 2000-03-04
ttgctgttgtgttttgttttaaaccctcacattttccgcattaatttatgctgaatttattcccacgccatgagctttggtttgttcaatttctgctgggatatctttttcttttgggcaacctcctgttctggctttggaacaatctgttccttctaagtgagctgtcacacggcactcacccggtttcacaatgcgccagtagtcacctccactcgctgaatttacatccgtggtggatgccgctcacagagatggtaccattgacaatggggatcccttgctcatatcgccaccaaacgcttgatgccacggtgcacctgctccatgaaggttagcaaggcttatttgttgatgtcccactctcggtgcagctagatctagggggggaacttgtcgcatcccatgtatatagagagctccaggcatgtgttatgcaggtagctgaag

SEQ ID NO: 7325 - DNA, 407 bp, Rattus norvegicus
  ref <308>: DATABASE ACCESSION NUMBER: EMBL / AI638974
  ref <309>: DATABASE ENTRY DATE: 2000-03-04
ttgatggctcactgactaacctgagtcgcagctgtagagagagccgtagagaacaccgcctgttctgtcgaggagcataaagtgcttaccaaacatgggctgatgctattctgctcctctcagactgccttgagaaggggaaacacacgatgaagtaaaaggcggtgaggtgccaacttcaggtgtgtggtttggcgattatacatggagcacccactctgtcttaccaggtcttagcccatcgagccgggtctgggtacagagaaaacccttttctagaccattactcttaagtcaccccggcttccctggatagctaactatataaagcaaggtaatgcaaaagtgtcttgtctgtatattaatacttgaaatgaagcctgtttaaaaagtgacttttgagccca

SEQ ID NO: 7326 - protein, 1333 aa, Rattus norvegicus
  ref <308>: DATABASE ACCESSION NUMBER: Refseq / NP_034358
  ref <309>: DATABASE ENTRY DATE: 2002-01-07
MVSCWDTAVLPYALLGCLLLTGYGSGSKLKVPELSLKGTQHVMQAGQTLFLKCRGEAAHSWSLPTTVSQEDKRLSITPPSACGRDNRQFCSTLTLDTAQANHTGLYTCRYLPTSTSKKKKAESSIYIFVSDAGSPFIEMHTDIPKLVHMTEGRQLIIPCRVTSPNVTVTLKKFPFDTLTPDGQRITWDSRRGFIIANATYKEIGLLNCEATVNGHLYQTNYLTHRQTNTILDVQIRPPSPVRLLHGQTLVLNCTATTELNTRVQMSWNYPGKATKRASIRQRIDRSHSHNNVFHSVLKINNVESRDKGLYTCRVKSGSSFQSFNTSVHVYEKGFISVKHRKQPVQETTAGRRSYRLSMKVKAFPSPEIVWLKDGSPATLKSARYLVHGYSLIIKDVTTEDAGDYTILLGIKQSRLFKNLTATLIVNVKPQIYEKSVSSLPSPPLYPLGSRQVLTCTVYGIPRPTITWLWHPCHHNHSKERYDFCTENEESFILDPSSNLGNRIESISQRMTVIEGTNKTVSTLVVADSQTPGIYSCRAFNKIGTVERNIKFYVTDVPNGFHVSLEKMPAEGEDLKLSCVVNKFLYRDITWILLRTVNNRTMHHSISKQKMATTQDYSITLNLVIKNVSLEDSGTYACRARNIYTGEDILRKTEVLVRDSEAPHLLQNLSDYEVSISGSTTLDCQARGVPAPQITWFKNNHKIQQEPGIILGPGNSTLFIERVTEEDEGVYRCRATNQKGAVESAAYLTVQGTSDKSNLELITLTCTCVAATLFWLLLTLFIRKLKRSSSEVKTDYLSIIMDPDEVPLDEQCERLPYDASKWEFARERLKLGKSLGRGAFGKVVQASAFGIKKSPTCRTVAVKMLKEGATASEYKALMTELKILTHIGHHLNVVNLLGACTKQGGPLMVIVEYCKYGNLSNYLKSKRDLFCLNKDAALHMELKKESLEPGLEQGQKPRLDSVSSSSVTSSSFPEDRSVSDVEGDEDYSEISKQPLTMEDLISYSFQVARGMEFLSSRKCIHRDLAARNILLSENNVVKICDFGLARDIYKNPDYVRRGDTRLPLKWMAPESIFDKVYSTKSDVWSYGVLLWEIFSLGGSPYPGVQMDEDFCSRLKEGMRMRTPEYATPEIYQIMLDCWHKDPKERPRFAELVEKLGDLLQANVQQDGKDYIPLNAILTRNSSFTYSTPTFSEDLFKDGFADPHFHSGSSDDVRYVNAFKFMSLERIKTFEELSPNSTSMFEDYQLDTSTLLGSPLLKRFTWTETKPKASMKIDLRIASKSKEAGLSDLPRPSFCFSSCGHIRPVQDDESELGKESCCSPPPDYNSVVLYSSPPA

SEQ ID NO: 7327 - DNA, 7680 bp, Homo sapiens
  ref <308>: DATABASE ACCESSION NUMBER: Refseq / NM_002019
  ref <309>: DATABASE ENTRY DATE: 2000-10-31
gcggacactcctctcggctcctccccggcagcggcggcggctcggagcgggctccggggctcgggtgcagcggccagcgggcctggcggcgaggattacccggggaagtggttgtctcctggctggagccgcgagacgggcgctcagggcgcggggccggcggcggcgaacgagaggacggactctggcggccgggtcgttggccgggggagcgcgggcaccgggcgagcaggccgcgtcgcgctcaccatggtcagctactgggacaccggggtcctgctgtgcgcgctgctcagctgtctgcttctcacaggatctagttcaggttcaaaattaaaagatcctgaactgagtttaaaaggcacccagcacatcatgcaagcaggccagacactgcatctccaatgcaggggggaagcagcccataaatggtctttgcctgaaatggtgagtaaggaaagcgaaaggctgagcataactaaatctgcctgtggaagaaatggcaaacaattctgcagtactttaaccttgaacacagctcaagcaaaccacactggcttctacagctgcaaatatctagctgtacctacttcaaagaagaaggaaacagaatctgcaatctatatatttattagtgatacaggtagacctttcgtagagatgtacagtgaaatccccgaaattatacacatgactgaaggaagggagctcgtcattccctgccgggttacgtcacctaacatcactgttactttaaaaaagtttccacttgacactttgatccctgatggaaaacgcataatctgggacagtagaaagggcttcatcatatcaaatgcaacgtacaaagaaatagggcttctgacctgtgaagcaacagtcaatgggcatttgtataagacaaactatctcacacatcgacaaaccaatacaatcatagatgtccaaataagcacaccacgcccagtcaaattacttagaggccatactcttgtcctcaattgtactgctaccactcccttgaacacgagagttcaaatgacctggagttaccctgatgaaaaaaataagagagcttccgtaaggcgacgaattgaccaaagcaattcccatgccaacatattctacagtgttcttactattgacaaaatgcagaacaaagacaaaggactttatacttgtcgtgtaaggagtggaccatcattcaaatctgttaacacctcagtgcatatatatgataaagcattcatcactgtgaaacatcgaaaacagcaggtgcttgaaaccgtagctggcaagcggtcttaccggctctctatgaaagtgaaggcatttccctcgccggaagttgtatggttaaaagatgggttacctgcgactgagaaatctgctcgctatttgactcgtggctactcgttaattatcaaggacgtaactgaagaggatgcagggaattatacaatcttgctgagcataaaacagtcaaatgtgtttaaaaacctcactgccactctaattgtcaatgtgaaaccccagatttacgaaaaggccgtgtcatcgtttccagacccggctctctacccactgggcagcagacaaatcctgacttgtaccgcatatggtatccctcaacctacaatcaagtggttctggcacccctgtaaccataatcattccgaagcaaggtgtgacttttgttccaataatgaagagtcctttatcctggatgctgacagcaacatgggaaacagaattgagagcatcactcagcgcatggcaataatagaaggaaagaataagatggctagcaccttggttgtggctgactctagaatttctggaatctacatttgcatagcttccaataaagttgggactgtgggaagaaacataagcttttatatcacagatgtgccaaatgggtttcatgttaacttggaaaaaatgccgacggaaggagaggacctgaaactgtcttgcacagttaacaagttcttatacagagacgttacttggattttactgcggacagttaataacagaacaatgcactacagtattagcaagcaaaaaatggccatcactaaggagcactccatcactcttaatcttaccatcatgaatgtttccctgcaagattcaggcacctatgcctgcagagccaggaatgtatacacaggggaagaaatcctccagaagaaagaaattacaatcagagatcaggaagcaccatacctcctgcgaaacctcagtgatcacacagtggccatcagcagttccaccactttagactgtcatgctaatggtgtccccgagcctcagatcacttggtttaaaaacaaccacaaaatacaacaagagcctggaattattttaggaccaggaagcagcacgctgtttattgaaagagtcacagaagaggatgaaggtgtctatcactgcaaagccaccaaccagaagggctctgtggaaagttcagcatacctcactgttcaaggaacctcggacaagtctaatctggagctgatcactctaacatgcacctgtgtggctgcgactctcttctggctcctattaaccctccttatccgaaaaatgaaaaggtcttcttctgaaataaagactgactacctatcaattataatggacccagatgaagttcctttggatgagcagtgtgagcggctcccttatgatgccagcaagtgggagtttgcccgggagagacttaaactgggcaaatcacttggaagaggggcttttggaaaagtggttcaagcatcagcatttggcattaagaaatcacctacgtgccggactgtggctgtgaaaatgctgaaagagggggccacggccagcgagtacaaagctctgatgactgagctaaaaatcttgacccacattggccaccatctgaacgtggttaacctgctgggagcctgcaccaagcaaggagggcctctgatggtgattgttgaatactgcaaatatggaaatctctccaactacctcaagagcaaacgtgacttattttttctcaacaaggatgcagcactacacatggagcctaagaaagaaaaaatggagccaggcctggaacaaggcaagaaaccaagactagatagcgtcaccagcagcgaaagctttgcgagctccggctttcaggaagataaaagtctgagtgatgttgaggaagaggaggattctgacggtttctacaaggagcccatcactatggaagatctgatttcttacagttttcaagtggccagaggcatggagttcctgtcttccagaaagtgcattcatcgggacctggcagcgagaaacattcttttatctgagaacaacgtggtgaagatttgtgattttggccttgcccgggatatttataagaaccccgattatgtgagaaaaggagatactcgacttcctctgaaatggatggctcccgaatctatctttgacaaaatctacagcaccaagagcgacgtgtggtcttacggagtattgctgtgggaaatcttctccttaggtgggtctccatacccaggagtacaaatggatgaggacttttgcagtcgcctgagggaaggcatgaggatgagagctcctgagtactctactcctgaaatctatcagatcatgctggactgctggcacagagacccaaaagaaaggccaagatttgcagaacttgtggaaaaactaggtgatttgcttcaagcaaatgtacaacaggatggtaaagactacatcccaatcaatgccatactgacaggaaatagtgggtttacatactcaactcctgccttctctgaggacttcttcaaggaaagtatttcagctccgaagtttaattcaggaagctctgatgatgtcagatatgtaaatgctttcaagttcatgagcctggaaagaatcaaaacctttgaagaacttttaccgaatgccacctccatgtttgatgactaccagggcgacagcagcactctgttggcctctcccatgctgaagcgcttcacctggactgacagcaaacccaaggcctcgctcaagattgacttgagagtaaccagtaaaagtaaggagtcggggctgtctgatgtcagcaggcccagtttctgccattccagctgtgggcacgtcagcgaaggcaagcgcaggttcacctacgaccacgctgagctggaaaggaaaatcgcgtgctgctccccgcccccagactacaactcggtggtcctgtactccaccccacccatctagagtttgacacgaagccttatttctagaagcacatgtgtatttatacccccaggaaactagcttttgccagtattatgcatatataagtttacacctttatctttccatgggagccagctgctttttgtgatttttttaatagtgctttttttttttgactaacaagaatgtaactccagatagagaaatagtgacaagtgaagaacactactgctaaatcctcatgttactcagtgttagagaaatccttcctaaacccaatgacttccctgctccaacccccgccacctcagggcacgcaggaccagtttgattgaggagctgcactgatcacccaatgcatcacgtaccccactgggccagccctgcagcccaaaacccagggcaacaagcccgttagccccaggggatcactggctggcctgagcaacatctcgggagtcctctagcaggcctaagacatgtgaggaggaaaaggaaaaaaagcaaaaagcaagggagaaaagagaaaccgggagaaggcatgagaaagaatttgagacgcaccatgtgggcacggagggggacggggctcagcaatgccatttcagtggcttcccagctctgacccttctacatttgagggcccagccaggagcagatggacagcgatgaggggacattttctggattctgggaggcaagaaaaggacaaatatcttttttggaactaaagcaaattttagacctttacctatggaagtggttctatgtccattctcattcgtggcatgttttgatttgtagcactgagggtggcactcaactctgagcccatacttttggctcctctagtaagatgcactgaaaacttagccagagttaggttgtctccaggccatgatggccttacactgaaaatgtcacattctattttgggtattaatatatagtccagacacttaactcaatttcttggtattattctgttttgcacagttagttgtgaaagaaagctgagaagaatgaaaatgcagtcctgaggagagttttctccatatcaaaacgagggctgatggaggaaaaaggtcaataaggtcaagggaagaccccgtctctataccaaccaaaccaattcaccaacacagttgggacccaaaacacaggaagtcagtcacgtttccttttcatttaatggggattccactatctcacactaatctgaaaggatgtggaagagcattagctggcgcatattaagcactttaagctccttgagtaaaaaggtggtatgtaatttatgcaaggtatttctccagttgggactcaggatattagttaatgagccatcactagaagaaaagcccattttcaactgctttgaaacttgcctggggtctgagcatgatgggaatagggagacagggtaggaaagggcgcctactcttcagggtctaaagatcaagtgggccttggatcgctaagctggctctgtttgatgctatttatgcaagttagggtctatgtatttaggatgcgcctactcttcagggtctaaagatcaagtgggccttggatcgctaagctggctctgtttgatgctatttatgcaagttagggtctatgtatttaggatgtctgcaccttctgcagccagtcagaagctggagaggcaacagtggattgctgcttcttggggagaagagtatgcttccttttatccatgtaatttaactgtagaacctgagctctaagtaaccgaagaatgtatgcctctgttcttatgtgccacatccttgtttaaaggctctctgtatgaagagatgggaccgtcatcagcacattccctagtgagcctactggctcctggcagcggcttttgtggaagactcactagccagaagagaggagtgggacagtcctctccaccaagatctaaatccaaacaaaagcaggctagagccagaagagaggacaaatctttgttgttcctcttctttacacatacgcaaaccacctgtgacagctggcaattttataaatcaggtaactggaaggaggttaaactcagaaaaaagaagacctcagtcaattctctacttttttttttttttttccaaatcagataatagcccagcaaatagtgataacaaataaaaccttagctgttcatgtcttgatttcaataattaattcttaatcattaagagaccataataaatactccttttcaagagaaaagcaaaaccattagaattgttactcagctccttcaaactcaggtttgtagcatacatgagtccatccatcagtcaaagaatggttccatctggagtcttaatgtagaaagaaaaatggagacttgtaataatgagctagttacaaagtgcttgttcattaaaatagcactgaaaattgaaacatgaattaactgataatattccaatcatttgccatttatgacaaaaatggttggcactaacaaagaacgagcacttcctttcagagtttctgagataatgtacgtggaacagtctgggtggaatggggctgaaaccatgtgcaagtctgtgtcttgtcagtccaagaagtgacaccgagatgttaattttagggacccgtgccttgtttcctagcccacaagaatgcaaacatcaaacagatactcgctagcctcatttaaattgattaaaggaggagtgcatctttggccgacagtggtgtaactgtgtgtgtgtgtgtgtgtgtgtgtgtgtgtgtgtgtgtgtgggtgtgggtgtatgtgtgttttgtgcataactatttaaggaaactggaattttaaagttacttttatacaaaccaagaatatatgctacagatataagacagacatggtttggtcctatatttctagtcatgatgaatgtattttgtataccatcttcatataatatacttaaaaatatttcttaattgggatttgtaatcgtaccaacttaattgataaacttggcaactgcttttatgttctgtctccttccataaatttttcaaaatactaattcaacaaagaaaaagctcttttttttcctaaaataaactcaaatttatccttgtttagagcagagaaaaattaagaaaaactttgaaatggtctcaaaaaattgctaaatattttcaatggaaaactaaatgttagtttagctgattgtatggggttttcgaacctttcactttttgtttgttttacctatttcacaactgtgtaaattgccaataattcctgtccatgaaaatgcaaattatccagtgtagatatatttgaccatcaccctatggatattggctagttttgcctttattaagcaaattcatttcagcctgaatgtctgcctatatattctctgctctttgtattctcctttgaacccgttaaaacatcctgtggcactc

SEQ ID NO: 7328 - protein, 572 aa, Homo sapiens
  ref <308>: DATABASE ACCESSION NUMBER: SWISS-Prot / Q15942
  ref <309>: DATABASE ENTRY DATE: 2002-06-15
MAAPRPSPAISVSVSAPAFYAPQKKFGPVVAPKPKVNPFRPGDSEPPPAPGAQRAQMGRVGEIPPPPPEDFPLPPPPLAGDGDDAEGALGGAFPPPPPPIEESFPPAPLEEEIFPSPPPPPEEEGGPEAPIPPPPQPREKVSSIDLEIDSLSSLLDDMTKNDPFKARVSSGYVPPPVATPFSSKSSTKPAAGGTAPLPPWKSPSSSQPLPQVPAPAQSQTQFHVQPQPQPKPQVQLHVQSQTQPVSLANTQPRGPPASSPAPAPKFSPVTPKFTPVASKFSPGAPGGSGSQPNQKLGHPEALSAGTGSPQPPSFTYAQQREKPRVQEKQHPVPPPAQNQNQVRSPGAPGPLTLKEVEELEQLTQQLMQDMEHPQRQNVAVNELCGRCHQPLARAQPAVRALGQLFHIACFTCHQCAQQLQGQQFYSLEGAPYCEGCYTDTLEKCNTCGEPITDRMLRATGKAYHPHCFTCVVCARPLEGTSFIVDQANRPHCVPDYHKQYAPRCSVCSEPIMPEPGRDETVRVVALDKNFHMKCYKCEDCGKPLSIEADDNGCFPLDGHVLCRKCHTARAQT

SEQ ID NO: 7329 - DNA, 426 bp, Rattus norvegicus
  ref <308>: DATABASE ACCESSION NUMBER: EMBL / AI638989
  ref <309>: DATABASE ENTRY DATE: 2000-03-04
ttctctcaagacttggtagttcaggggaagatccatccccagtggctcttcgcttctttctaatactggggccatcgttttgctcagtaccagaggtacaactgctgtcagtggctgcatcagctaagctggagactgcatgacctgaagatgatgcagttgatgaaagtgggtttccttctccagtgctctcctgggtgtggtgctctgatagtggggtagtcctctcctggctatgcaggtctctggctgaatgcatgaaaggcattatgtgatcagatggtaactgtgcgctatgtcgccgctgggtaggaccggtgccaaccctttcacctgttctgacagagggagacagaggtgccacttccggttcaagatacatggctgccttctgagatgcagtactaggtgaaggactctgctggg

SEQ ID NO: 7330 - protein, 1888 aa, Rattus norvegicus
  ref <308>: DATABASE ACCESSION NUMBER: SWISS-Prot / AAD04329
  ref <309>: DATABASE ENTRY DATE: 2003-02-01
MVRERKCILCHIVYGSKKEMDEHMRSMLHHRELENLKGRDISHECRVCRVTEVGLSAYAKHISGQLHKDNVDAQEREDDGKEEEEEEYFDKELVQLIQERKEQSRQDEPPSNSQEVNSDDRQPQWRREDRIPYQDRESYSQPPRHHRGPPQRDWKWEKDGFNSTRKNSFPHSLRNSGGPRGSSVWHKGATRGSSTWFLNHSNSGGGWHSNNGMVDWNYNGTGRNSSWHSEGTGGFPSWHMNNSNGNWKSSVRSTNSWNYNGPGDKFQQGRNRNPNYQMEDMTKMWNKKSNKPSKYSQERCKWQRQDRDKAAKYRSPPEGYASDTFPSEGLLEFNFEQRESQTTKQTDTAASKINGKNGTKARDKFRRWTPYPSQKTLDLQSALKEVIGSKSDTLEKPLFNFSLITAGLRKPVDKTSNPPVIKTQKAGPPGSPSHKAISDGTAFCEVPRACPITEQSEPHQKSNKIPLLKSPLLPLPTPKSGPHKQNLKNRSKNKETKSFPSGDHSHLLNTSTLEGSHGSSYTSKSRGLCPRVLKENKTVSGTQKEPDEKLNSTSQKAQDTVLQCPKTLQNPLPTTPKRTENDAKESSVEESAKDSLSIESQPHSAGNSAMTSDAENHGIKSEGVASLTTEVVSCSTHTVDKEQGSQIPGTPENLSASPCNSTVLQKEAEVQVSAATSPHSGLLLNLKTSLEDAQDNNLVKSDGPFETESFEDTSLDAELQKPDLNNQPPGTLLPELSKLGFPASLQRDLSRHISLKSKTGTHLPEPNLNSARRIRNVCGHRKNETEKESGLKPTLRQILNASRRNVNWEQVIQQVTKKKQELGKGLPRFGIEMVPLVQNEQEVLDLDEEPDLSSLEGFQWEGVSIPSSSGLARKRSLSESSVVMDRAPVYSFFTGEGTGKENEAQQSPSPNTALSAAQSQKTAMYLEQEVAPLTPSVGTGERVGNIPTQRRHSAQLPSGHIMPVMHSARDLHSQERSTPLSERHAQESTGEGNSLTSNASSGHAVSSLADAATDSSCTSGAEQTDGHSIRKKRRATGDGSSPELPSLERKNKRRKIKGKKERSQVDQLLTISLREEELSKSLQCMDNKLLQARAALQTAYVEVQRLLVLKQQITVEMSALRTHRIQILQGLQETYEPPEHPDQAPCSLISREQRNSRSQTSFETALLPAPFFPGFLDPPPSHASLPSSGNPLQITTCTLQAHGTAPDSSVQIKQEPMSPEQEGNMNALPQGCASNVSKELLQTNRVVDDGSSVYPAIPAVIAPESTENCQEVSKDLNFSVEQGNSRSKGNSPSCQSPDLPGINRGEETAKGSSGSEACSSSFLRLSFTPETPAEKETQSPADQPEQQAESTLASAETRGSKKKKKLRKKKTLRATHVPENSDTEQDVFTAKPARKVKTAKAAKGAKVTTSQTGQEQGTARDEPDSDSSLEVLEVTNPQLEVVAIDTSESGDEKPDSPSKKDAWIAAEQNPIETSRSGCDEVSSTSELGTRYKDGVPVSVAETQTVISIKASKHSSEISSEPGDDEEPTEGSFEGHQAAVNAIQIFGNFLYTCSADTTVRVYNLVSRKCVGVFEGHTSKVNCLLVTHTSGKSSVLYTGSSDHTIRCYNIKTRECMEQLQLEDRVLCLHNRWRTLYAGLANGTVVTFDIKNNKRQEIFECHGPRAVSCLATAQEGARKLLVVGSYDCTISVRDARNGLLLRTLEGHSKTVLCMKVVNDLVFSGSSDQSVHAHNIHTGELVRIYKGHNHAVTVVNILGKVMVTACLDKFVRVYELQSHDRLQVYGGHKDMIMCMTIHKSVIYTGCYDGSIQAVRLNLMQNYRCWWYGCTLIFGVVDHLKQHLLTDHTNPNFQTLKCRWRNCDAFFTARKGSKQDVAGHIERHAEDDSKIDS

SEQ ID NO: 7331 - DNA, 514 bp, Rattus norvegicus
  ref <308>: DATABASE ACCESSION NUMBER: EMBL / AI638997
  ref <309>: DATABASE ENTRY DATE: 2000-03-04
ttaaaattattcaaagacaggtttttattgcaaatatttgctcaaaaactactatatacaacagaattttaacaggccttgaaaacatttaacattcaattaaacagtttcaaagaattcaaagtacattttaagaattaaaaatgcagcatttaaaataaaactttattagtacttaaaagcaaattattgttatattcacttctatatctaaaaaaatcaacttagtagctgacttacggataaattaggctaattcccaccccccctcttgtttttgaacatatgctttagggtcccattagaagtctctacttttacaattgaggacgtcccttaacatagttgagtacatgcgaaggcatgtttttagttcaattccttttgcctacattctaccatactttggtttggtttccagaccatttttatgggtctactgctaaaaatcattgaaacaatattaaaagcatagtagctatttaagagtttcaataacagatttctactttat

SEQ ID NO: 7332 - DNA, 4902 bp, Homo sapiens
gacctcgacagggaacgcaagcaaaaccacacatttaaaacagacttggtaaaatcagctcgttatttaaagaaacggacgattcctttttctctcctggtttagtcttcgacccacaggccccttgcttctttcgaacggcggctgtatcccatgaccttttcactttccaagccaacggactgggggtcgttacacacgcggagggcccggaacgcacggctcctcgcctgcaaattccgagcagtccggattttggggctgcctcccggccacaccagccagcagctcgcacccacatggaggcagggccctggccctcgccccggaccggcgcgtggcggggcgcgtgggtcttcgagggcccgcgacgcggcgcacatgccggtgcccgcctcccgcgtcggcgagaagacagggagctcggacacggggaggctgacccggagcctacccatgaggcagcgcgccggctgcacgagagcccccccctttccacggctcggctgccagctccgcaatgggagccgccgccgtcgccgcagtgtagtttttcgtgctcctccttttcctcctcctctttctcctcctcctcagggctccagtcaggccgatccgctccgctcacggaaggaaaacagaaataacttgctggcttgtctggagtcacatggtaattcaaaaatggcagaactgtttatggaatgtgaagaagaggagctggaaccatggcagaagaaagtaaaagaagttgaggatgacgatgatgatgagccaatctttgttggcgagatatcaagttcaaaaccagcaatttcaaatattttgaacagagttaaccccagctcatattcaaggggactaaagaatggtgcactcagtcgaggtattactgctgcattcaagcctacaagtcaacactacacgaatccaacatcaaatccagtgcctgcctcaccaataaattttcatcctgagtctagatcttcagatagttctgttattgttcagcctttttctaaacctggttatataacaaactcatcacgagttgtgtctaataagtcatcagagttactgtttgacttgacccaggatacaggattatcacattaccaagggggaccaacactttctatggcaggtatgagtgaaagttcatttttatcaaaacgtccttctacttctgaagtaaataatgttaatccaaagaagcctaaacccagcgaaagtgtttctggagcaaattcctcagctgtattaccttcagttaaatctccttcagtgacttcttcccaggctatgctagcaaaaggtacaaatacctcatcaaatcagtctaaaaatggaacaccttttccaagagcttgtccaaagtgcaacattcatttcaatcttttggatcctttgaaaaatcacatgaagtattgttgtccagacatgataaataactttttgggactggctaaaacagaattttcaagtacagtaaataaaaacacaactattgattcagagaaaggaaaattgatcatgttagttaatgacttttattatggaaaacatgaaggagatgtccaggaggaacagaagactcacacaacctttaaatgcttcagttgcttgaaaattctaaaaaataacattaggtttatgaaccacatgaaacaccatttggaacttgagaagcagagcagtgagagctgggaaaaccataccacctgccagcactgctaccgtcagtttcccacaccatttcagttgcagtgtcacatcgaaagtacacatacgccccatgaattttctactatttgtaaaatctgtgaattgtcatttgaaacagaacatgttcttttacaacatatgaaggacaatcataaacctggtgaaatgccatatgtctgccaggtttgtaattatagatcatcatcattttctgatgtagaaactcattttagaacatcccatgaaaacactaagaacttgctatgcccgttttgcctcaaagttattaaaattgcaacaccatatatgcatcattatatgaagcatcagaaaaaaggaatacatcgttgtacaaaatgcaggctgcagtttttgacatgcaaggagaaaatggatcataagactcaacaccatcgaacatttataaaacctaaacaactagaaggattgcctcctggaacaaaagttactattcgagcttcagttggacctctgcaatcaggagcttcacctacaccttccattagtgcaagtgcttctacccttcagctctcacctccaaggactaaaaatataactgctaaaaatcctgcaaaatctaatacaagtaaacctaatacagtcaaatccaacgcaagtaaacctaatacaagtaagcctaatggaagtaaatctaaatacaaaccaaaaatctctaatatgcaaaagaaacaaagcacattggctagtagcaataaaaaaagtaaagtcaatacagcattgaggaatttaaggtatcgtcggggcattcacaaatgcattgagtgttgttccgaaataaaagattttgcaaaccactttcctacgtacgtccactgtagtttttgcagatacaacactagctgtagcaaagcctatgtaaatcatatgatgagctttcatagtaaccgtccaagcaaaaggttttgtatttttaagaagcattcagaaaatctccggggcattactctagtgtgccttaattgtgatttcctaagtgatgtttctggcttagataatatggctacacacttaagtcaacataaaactcatacttgccaagttgtaatgcagaaagtttctgtttgtatcccaacttctgagcacctttctgaattaaaaaaagaagctcccgcaaaggaacaagaacctgtgtctaaggaaattgcaagacctaacatggctgaaagagaaacagaaacatcaaattctgaaagtaaacaagataaagctgcttcttcaaaagaaaaaaatggatgtaatgcaaattcatttgaaggctcatcaacaacaaaaagtgaagaaagcataacagtttcagataaggaaaatgaaacctgtcttgcagaccaggaaactggctcaaaaaacatcgtcagttgtgattcaaatattggtgcagataaagtggaaaagaaaaaacaaatacaacacgtttgtcaggaaatggagttgaagatgtgccaaagttcagaaaacataatcttatctgatcagattaaagatcacaactccagtgaagccagattttcttcaaagaatattaaggatttgcgattagcatcagataatgtaagcattgatcagtttttgagaaaaagacatgaacctgaatctgttagttctgatgttagcgagcaaggcagtattcatttggaacctctgactccatccgaggtacttgagtatgaagccacagagattcttcagaaaggtagtggtgatccttcagccaagactgatgaagtagtgtctgatcaaacagatgacattcctggaggaaataaccctagcacaacagaggcaacagtagacctggaagacgaaaaagaaagaagttgaaattagtcattttaagtttcagtgtaccaacgataagggcatttggaacagtgctatcaggtgagctcagtggtgctgttgtaggttcagaaatggaaatatgtaagggaggtcacacatacactttacctgtatgttcaacctatgttatcaaacaaatcaattcaccaataatagcatgattagtagggattcccaaaaagtttttaaaaacacgaacaggattttaatgataattaaatttgcagtggaaaggtctcatttaatggttttcaaggaaatgggatttggttgctgacatgaattgatgatattagtaatatttataaagcctttcaaacttccatcaatcctaagctaaaaatctttattacctgtatatccttttcagttaactgagaggaagggatttggaaaccatgtacttttggggagtaattgattaaaaacaatggctgattggcattgttaatgaaggctttatttgtgaggatgatgctggtaaatggagcatgcttagagtactaaattgatctaatgagaatttggatgaacataaacttaattttggatttaatataacattccagtcagacgcatgtaaacagaatatttgaatctttgtacctccatacaagtgttagcctgccaggctgtaagcttaccttaattaaactttcagtgaaagtggaattattaagatataaatttatatttgtgctttttgtcagtgtgtaagctgtgtagaaattctttgatgtattagttgtattaatgtaaagtagaaacccattgttgaaactcctgtagctattatgcttttaatattgttttaatgatcttccttagaaataggcccataaaaatggtctggaagccaaaccaaagtatggtataatgtagatattgtaaagcagtaaactgaaaacatgtcctggcatgtattcagccatgtttaagtgacttttctgtaattgtaaaataaaaacttcaaatgggacctaaaacagtgatgtaaaagaactggttttggaaatttagcctaatttatctataagatggctgctaaattgatttttcagttctttttatcatctagaatataatagatatagaaatgaataatatgaagaacagtagtttgctttgaaatactaataaacttttatttaaaatgcttcatttttacttcttaaaatgtgctttggattcttaaattttgtttcactgaatgttcaatgttttaaatggcgattaaaatactctgctgtatatagtagtttttgagtaaatatttgcaataaaaatctgcccccg

SEQ ID NO: 7333 - protein, 1143 aa, Homo sapiens
MTFSLSKPTDWGSLHTRRARNARLLACKFRAVRILGLPPGHTSQQLAPTWRQGPGPRPGPARGGARGSSRARDAAHMPVPASRVGEKTGSSDTGRLTRSLPMRQRAGCTRAPPFPRLGCQLRNGSRRRRRSVVFRAPPFPPPLSPPPQGSSQADPLRSRKENRNNLLACLESHGNSKMAELFMECEEEELEPWQKKVKEVEDDDDDEPIFVGEISSSKPAISNILNRVNPSSYSRGLKNGALSRGITAAFKPTSQHYTNPTSNPVPASPINFHPESRSSDSSVIVQPFSKPGYITNSSRVVSNKSSELLFDLTQDTGLSHYQGGPTLSMAGMSESSFLSKRPSTSEVNNVNPKKPKPSESVSGANSSAVLPSVKSPSVTSSQAMLAKGTNTSSNQSKNGTPFPRACPKCNIHFNLLDPLKNHMKYCCPDMINNFLGLAKTEFSSTVNKNTTIDSEKGKLIMLVNDFYYGKHEGDVQEEQKTHTTFKCFSCLKILKNNIRFMNHMKHHLELEKQSSESWENHTTCQHCYRQFPTPFQLQCHIESTHTPHEFSTICKICELSFETEHVLLQHMKDNHKPGEMPYVCQVCNYRSSSFSDVETHFRTSHENTKNLLCPFCLKVIKIATPYMHHYMKHQKKGIHRCTKCRLQFLTCKEKMDHKTQHHRTFIKPKQLEGLPPGTKVTIRASVGPLQSGASPTPSISASASTLQLSPPRTKNITAKNPAKSNTSKPNTVKSNASKPNTSKPNGSKSKYKPKISNMQKKQSTLASSNKKSKVNTALRNLRYRRGIHKCIECCSEIKDFANHFPTYVHCSFCRYNTSCSKAYVNHMMSFHSNRPSKRFCIFKKHSENLRGITLVCLNCDFLSDVSGLDNMATHLSQHKTHTCQVVMQKVSVCIPTSEHLSELKKEAPAKEQEPVSKEIARPNMAERETETSNSESKQDKAASSKEKNGCNANSFEGSSTTKSEESITVSDKENETCLADQETGSKNIVSCDSNIGADKVEKKKQIQHVCQEMELKMCQSSENIILSDQIKDHNSSEARFSSKNIKDLRLASDNVSIDQFLRKRHEPESVSSDVSEQGSIHLEPLTPSEVLEYEATEILQKGSGDPSAKTDEVVSDQTDDIPGGNNPSTTEATVDLEDEKERS

SEQ ID NO: 7334 - DNA, 333 bp, Rattus norvegicus
  ref <308>: DATABASE ACCESSION NUMBER: EMBL / AI639001
  ref <309>: DATABASE ENTRY DATE: 2000-03-04
ttcaaggatcataatgtattgagttgagaattcacaaaaaggtaacatcatacaatcagccatttcttgggctgagtaaaaatgattgtcacccactgtgcgtcacaaaaaattcttttaatgaataaataatttgatgaaatcaaaaatatttacaatataaacaaatggaaaagctttggatctgtgactgaccaggttacatttcggatggaggcctccccagcttttctcttagaacccatataaatccgctagaaacaacaactcatacaatgtgtctctgttcattacatctttatctgttagtctttgaaagctatataatcttat

SEQ ID NO: 7335 - DNA, 333 bp, Rattus norvegicus; identical to SEQ ID NO: 7334
  ref <308>: DATABASE ACCESSION NUMBER: EMBL / AI639001
  ref <309>: DATABASE ENTRY DATE: 2000-03-04

SEQ ID NO: 7336 - DNA, 419 bp, Rattus norvegicus
  ref <308>: DATABASE ACCESSION NUMBER: EMBL / AI639002
  ref <309>: DATABASE ENTRY DATE: 2000-03-04
ttggaaaaggggagtttaaaaacttttttttaaaaccccaaaggggaagaactttgcagagggggggcccctgattcccaaaaaggcccgggccataagggtggaaaaaaaaaaacttgaaaaaaggacccctgcaaaaaaaaagggttaagggtttttgttgaagggaaccttttggttttttaatttaaagccccccccaattttgcctttggttggggaaccgccttttttgttaaatttggccaaaatttccattttggccggaaaagtaaaaaaatggttttttgaacgttaaaatttttcccaaaaaaaaaatttggaagcccccattgggaaacaaggttccaaaagttcttgggccttgcccctaagtttataaacacaaaaaggggaaatgttaaaaggttcgccccttt

SEQ ID NO: 7337 - DNA, 537 bp, Rattus norvegicus
  ref <308>: DATABASE ACCESSION NUMBER: EMBL / AI639019
  ref <309>: DATABASE ENTRY DATE: 2000-03-04
ttcaaagtctcttctcttagtgctttattataaattagcagcagatgatacagatcataatgtaccgagcacacacgaacccggcagccctgatgacgcagctcagcacttgctgatctgcccggcttcctgggagcattgcccactccggagggaacctctatgtaggacagcacactttcgttcatccctgagtgttgtcatagacacacagaactgcaatggccctccctctccctgcaggggtcagtgggagtctctcaatcattctgtgtgctttggccccacggtgactgtcctctgtggctgtgatgacagttggtcgcttgccactctgagggtgtcagctgtctcttcttcatttaagtcttcttgccatgggtggggatggccaacttgtgtgacctttggccacaggccacctctgtaagttcctctgccattttgctggttcatttatttttgttttactggaaattcaaagtttgaatcctttgtcagttatagactctttgtgaaggtaactgccaccggcgg

SEQ ID NO: 7338 - DNA, 240 bp, Rattus norvegicus
  ref <308>: DATABASE ACCESSION NUMBER: EMBL / AI639023
  ref <309>: DATABASE ENTRY DATE: 2000-03-04
ttaaatgaaaaggaatcatttattgggctggggagtgggaaggcaagtggggaggggcatgacacaaagtctttgttggggggagggttgacatgcggcagcttctgcgtgggtggttcatgcaccctgggtgggcgtgggggaggcttgggggaggagcctgccgactccttactccctgcctgcgggtgggccaggaagacccgccattagcaccagagttgcagacctcccctcccc

SEQ ID NO: 7339 - protein, 769 aa, Rattus norvegicus
  ref <308>: DATABASE ACCESSION NUMBER: SWISS-Prot / AAC60679
  ref <309>: DATABASE ENTRY DATE: 2002-06-15
MLSSVCVWSFRGCQGTGKQQPQPVPTPQPPESSPPPLPPPQQQQCSQPGTGPSPGVPAFLRPGGRRAEPCPGLPAVAMGRHGGGGGDSGKIVINVGGVRHETYRSTLRTLPGTRLAGLTEPEAAARFDYDPGTDEFFFDRHPGVFAYVLNYYRTGKLHCPADVCGPLFEEELGFWGIDETDVEACCWMTYRQHRDAEEALDSFEAPDSSANANANAGGAHDAGLDDEAGAGGGGLDGAGGELKRLCFQDAGGGAGGLPGGAGGAGGTWWRRWQPRVWALFEDPYSSRAARYVAFASLFFILISITTFCLETHEGFIHISNKTVTQASPIPGAPPENITNVEVETEPFLTYVEGVCVVWFTFEFLMRVTFCPDKVEFLKSSLNIIDCVAILPFYLEVGLSGLSSKAAKDVLGFLRVVRFVRILRIFKLTRHFVGLRVLGHTLRASTNEFLLLIIFLALGVLIFATMIYYAERIGADPDDILGSNHTYFKNIPIGFWWAVVTMTTLGYGDMYPKTWSGMLVGGLCALAGVLTIAMPVPVIVNNFGMYYSLAMAKQKLPKKKNKHIPRPPQPGSPNYCKPDPPPPPPPHPHHGSGGISPPPPITPPSMGVNVAGAYPPGPHTHPGLLRGGAGGLGIMGLPPLPAPGEPCPLAQEEVIETNRAVDPRPNGDPAAAALAHEDCPAIDQPAMSPEDKSPITPGSRGRYSRDRACFLVTDYAPSPDGSIRKGYEKSRSLSSIVGLSGVSLRLAPLATPPGSPRATRRAPPTLPSIL

SEQ ID NO: 7340 - DNA, 299 bp, Homo sapiens
  ref <308>: DATABASE ACCESSION NUMBER: EMBL / AI346263
  ref <309>: DATABASE ENTRY DATE: 2000-03-03
tttttttttaaatgaaaaggaaacgtggatttttggggggagtgagggtggttgggaagggggcatgacactttttctttggggagaggggggtgacatgcggcagcttctgcattgggcggttcatgcacccagggtgggcgtgggggaggcttggggaaggggccacgccgacccctccctccctgccctgcgggtgggctgagaagacccgccattagcaccagagttggacgatttgcagacctcccctccccacactgtctccgaaccccgcccccatccctgagagcgccccc

SEQ ID NO: 7341 - DNA, 332 bp, Rattus norvegicus
  misc_feature (1)..(332): n=a, c, g or t
  ref <308>: DATABASE ACCESSION NUMBER: EMBL / AI639034
  ref <309>: DATABASE ENTRY DATE: 2000-03-04
ttaacagagtaaaaaggcagcttgctttattcttgggatgtaggtggggatcaggggcatcctgtagcatccagtgagcttcaccaagcctgagaggcaccaaacaagtggcacatttaagtgggtcctaggcatctcttagcccaccttcctttcattgggcccaggcctcccaactcccaccagatcatccctaaactaggtaaggtcttctgtgttgctcatttggtttggcactccttgctttaggccactgagaagagtggctctgtcccagttgacatanaattcttttgcatggatactgagcccaaaatccctgtgatctcact

SEQ ID NO: 7342 - DNA, 498 bp, Rattus norvegicus
  ref <308>: DATABASE ACCESSION NUMBER: EMBL / AI639076
  ref <309>: DATABASE ENTRY DATE: 2000-03-04
ttcggagctggggaccgaacccagggccttgcacatgctaggcaagcgctctaccactgagctaaatccccaacccctcttggtctcatatttatggaagaaaaattcatattttatgagcagctaaaacatacctgcttatatgcacttatatattataatatgtgagatttatatatatacatataattaattatatatcatttacctgcatatatgtatgcttgcgagatttttatatatattacatataatacattttatatatgatgtatatccatacataataaaatatatgatttgtatatatttatatacaaatatataaattatataaaatatataatatagttatattaaattttatgttaatataattaatataatataaaattaagtgtaaatacattacatataaatataaaaattacatataaatatataaatattaatagatattttctatattttcctcctctatttaagtttctgaggttt

SEQ ID NO: 7343 - DNA, 267 bp, Rattus norvegicus
  ref <308>: DATABASE ACCESSION NUMBER: EMBL / AI639079
  ref <309>: DATABASE ENTRY DATE: 2000-03-04
ttaaaaattttcccattgcaaaaaacttttttttaaggtctttgaaaattaggaaaggaaagtcatgtccaaatttcaattttccagggcccgccccgaaggactggttttccctgaaattgcccctggccctccccaaggggggatgtcctccaggctttgctggccccctgaggaaaaggcccaaactttccccccctttgttggggcacatgtcctggggcaactttcccctccttcacaataaaaaacctggggactcaaccc

SEQ ID NO: 7344 - DNA, 460 bp, Rattus norvegicus
  ref <308>: DATABASE ACCESSION NUMBER: EMBL / AI639088
  ref <309>: DATABASE ENTRY DATE: 2000-03-04
ttagaggaaatacttttttattaaaatgtatttttgtataatatatttgtattacagtttcccctcacccaccccctatttcacccctccaaatccacacccatttattcatcttacattagaatagaaacaggcatctaaaatgaaggggaggaggagaagaagaagaagtaaaaatgagcaaagcattacaggaaaaaaagagcccaagaaaatcacaagaaactcactcagacactgagacacttacaattagagaccaaactatatataaaaaatatctgtagcgtgaaaaaagtacccagacaaagcactgtgagtcacaaaaccctctagaaatgccatcacgttcattgcatgttggccatcagggctgtggagcctgctcttaagggtggtttatatgtccagtgagactccattggagaaaactagtttttcctttgacagagtttatcaa

SEQ ID NO: 7345 - DNA, 387 bp, Rattus norvegicus
  ref <308>: DATABASE ACCESSION NUMBER: EMBL / AI639097
  ref <309>: DATABASE ENTRY DATE: 2000-03-04
ttaaacatcccagaaaactttttttaagctgcatggttcacaatttttggacccaatttttaaaggcgatctacaaaaacctttaacataaacccggggtttaataaataagaggaaggtttccatcattttggaaaaaaatcctaacccggaggctttttttccctatatattcgaaaaataagtttccaaactaacgggggcacatgggcgtgggggcccccccccccccccatgttcactcggaagggttttttacggggtcaaactaaaccctttttaaaacgtttaagccgaaacacaaaacaggaagcccactgggaaaaagtctttggtttaaaaaaaaaaaaatccctagctaaaaacggggaaatatttcccttaggg

SEQ ID NO: 7346 - DNA, 508 bp, Rattus norvegicus
  misc_feature (1)..(508): n=a, c, g or t
  ref <308>: DATABASE ACCESSION NUMBER: EMBL / AI639102
  ref <309>: DATABASE ENTRY DATE: 2000-03-04
ttaatcattccttaaagcacacgctgagttattactaactaggagggatatttgaattatattcnnnnnaaggaaagctactaacctggctgagaaaacgtcaaagaccttacattgacttgaagctgtatggagccaaccacagcggatgccaaaggagtttgctttgctgtctgcaaattaagatcttttttctaaaacatctgagacttccaattaaatgtcagccaaaataaattcccagatgtacaaaatgtgtgatttgtccttaaaaaaaaaaactggatgtcagctcaccgtcgttttggtcaacagtcaataaagtgctttacagacactttggactacgtcgaaagacattatccttgctcacctgatatagatcagtttaaaataaaaaacactagagtggtaggttgttacaaatgagatacaattttgtggggattaataaaatctaaaatgagaaaattatgtaaagactgcttattaaaaaaagctactttta

SEQ ID NO: 7347 - DNA, 428 bp, Rattus norvegicus
  ref <308>: DATABASE ACCESSION NUMBER: EMBL / AI639114
  ref <309>: DATABASE ENTRY DATE: 2000-03-04
ttaatggacctaactttgctgttatttgtatgatagagtttacaatatgccacagatatcattttcttaagttttggctataatcaaaaagaataattacattttctttaacattcactcaaatttcaatttaagacttcatttttccctcatatcctgggtttcaagggtctagatgtaagagcttcctttttgctggggcatggcttttctgcgtctgaggaagttacacacttagtcatcagtcacccatggaccctaactggctaaaactctaggtatggtgagaagcattcattttctgtcttccaaagttatatcattgttagcagctggttctaaatatcatggctaagttttccagatcttcacattttagatgcaattctgtcagcagggtggctataaactgtgtaaataccacattt

SEQ ID NO: 7348 - DNA, 383 bp, Homo sapiens
  ref <308>: DATABASE ACCESSION NUMBER: EMBL / AI192090
  ref <309>: DATABASE ENTRY DATE: 2000-03-03
tttttttttcactgacgatcacatttattgacctaactttgctgttatttgtatgacagagtttacaataggccacaattaccattttcttaagttttggttgtgttggtggtaaccaatcaaaaagaataaaggtaattacattttccccaatatccattcaaatttcagtttaagacttcattttcccctcaaatcctgtgttctgaggttctggatgtaagagcttccttcttgctggggtaatggcttgtctgtgtctgaggaagttacacacttagtcatcagtcacccatggactctcactggcgaaaacaccaggcctggtgaggagcattcctcttctgtcttcctcagttacatcattcttgttagctagcagc

SEQ ID NO: 7349 - DNA, 345 bp, Rattus norvegicus
  ref <308>: DATABASE ACCESSION NUMBER: EMBL / AI639118
  ref <309>: DATABASE ENTRY DATE: 2000-03-04
ttgtttgagatactgcaaacatcttttactgcatttaatctacttaatgaacatagaagttgctctgactgaatggatttttattgccagcaagctgtcacacttgttgtcggaagcacacctggcgatgtcgtacgcatggaaaaaaaatgttcagaaacaggatgtaagtctgtgaataatctagcctacatttgggtgtgatactctctgaagtccaggattacacctgcagacaaattcagagttatgaaaaccaagttttctccacatcacaacactggcaaattacagaacaaactttgtacataaatggtaactgggaggcacaccactttgacggaa

SEQ ID NO: 7350 - DNA, 2130 bp, Homo sapiens
  ref <308>: DATABASE ACCESSION NUMBER: EMBL / AK000768
  ref <309>: DATABASE ENTRY DATE: 2000-02-22
agaaaatgtctcgagaaagctgccttgatcaattacactagactcaccgaatatgccaaaatagaagagaccatgaaccaggcatctcctgctagaaagctggaagagattcttcatctggcagagctctgcatagaagtcttacagcagaatgaagagcatcatgcagaggcatttgcctggtggcctgatttattggctgaacatgcagagaaattttgggctttatttacagtggatatggacactgcactagaggctcaaccgcaagactcctgggatagttttcctcttttccaactgcttaataatttcctccgaaatgacacacttttgtgtaatggaaaatttcacaaacacttgcaagaaatctttgtacccttggttgtccgctatgtggatctcatggagtcttccatcgcccagtcaattcacagaggttttgagcaggagacatggcagcctgtcaacaatggctcagcaacatcagaagaccttttttggaagcttgatgcactgcaaatgtttgtctttgatctgcactggccagaacaggaatttgcccaccacttagagcaaagacttaaactaatggccagtgatatgctagaggcctgtgtcaaaagaacaagaactgcatttgaactcaagctacaaaaggcaagcaaaacaactgacttgcgcattccagcttccgtttgcactatgtttaatgtattagtcgatgccaaaaagcaaagcaccaaactctgtgccctggatggaggacaagagtttggtagtcaatggcaacagtaccattcaaaaatagatgatctgatcgacaacagtgtaaaagaaatcatttcactgttagtttcaaagtttgtttcagtgttggaaggcgtgttgtctaagctgtcaaggtatgatgaaggcactttcttttcatccattctgtcattcactgtgaaagcagctgcaaaatatgttgatgttccaaaaccaggaatggatctggcagacacctatattatgtttgttcggcaaaaccaagatattcttcgagaaaaggtcaatgaggaaatgtatatagaaaagttatttgatcaatggtacagcagttccatgaaagtcatttgcgtgtggttgactgatagattagacctccaactccatatttaccagctgaagacgctcatcaagattgtgaagaaaacctacagggactttcgattgcagggtgtgttggaaggaacactgaacagtaagacttatgatactgtgcacagacgtttaacagtagaggaggccacagcctctgtttcagaaggaggaggacttcagggcattactatgaaagacagtgacgaagaagaagaaggctgatatcacacagctttgcagaaggaaggaagaccttgatcgacattgttttttatttttttaaccttgtccttgtaattacattcattgtttgttttggccaaataaaaatgcttgtatttctttaaaaagtaagcctgaatgtagagtaaaaggggaaatgccaagattttggggtttttttgtttcctttttttgtttgtttgtttgtttttttggagaagagcatcctcttttgtgtagtttgacctaaaaatgaaccttggctctgcttgtgatcagaacatgaacttttttttttaaagaagatttgagcatttttctgtaatcacatcaaaatgatgttttctgtgtaaagcgagatacatatttctcataatgcagcattgtgagaagtcagctcggaccactgcaccaacactgtcgtatccttgttaaaatggtgtgtaccttacaaattataatttatgtgccaggttcgttttgtacttaatttgctattattgtgatgtgtataaaatctttaatcttggttcttagtactttgaattggtctacaggtatattcctgggatgaaaggattgccaaacccaaatatagactagattatccaatgggtttgtgtctttgttccattctcaacatttcttctttcaactataagtaatccccaggtgtggggtagcaagtgtgcttccgtcaagataccatattctcctgctccagtataacagcttgcaggcaataaaaatctatttgctcat

SEQ ID NO: 7351 - protein, 1018 aa, Homo sapiens
  ref <308>: DATABASE ACCESSION NUMBER: SWISS-Prot / BAB13417
  ref <309>: DATABASE ENTRY DATE: 2003-02-01
QLYEMFQQILGIKKLEHQLLYNACQLDNADEQAAQIRRELDGRLQLADKMAKERKFPKFIAKDMENMYIEELRSSVNLLMANLESLPVSKGGPEFKLQKLKRSQNSAFLDIGDENEIQLSKSDVVLSFTLEIVIMEVQGLKSVAPNRIVYCTMEVEGEKLQTDQAEASRPQWGTQGDFTTTHPRPVVKVKLFTESTGVLALEDKELGRVILYPTSNSSKSAELHRMVVPKNSQDSDLKIKLAVRMDKPAHMKHSGYLYALGQKVWKRWKKRYFVLVQVSQYTFAMCSYREKKSEPQELMQLEGYTVDYTDPHPGLQGGCMFFNAVKEGDTVIFASDDEQDRILWVQAMYRATGQSYKPVPAIQTQKLNPKGGTLHADAQLYADRFQKHGMDEFISANPCKLDHAFLFRILQRQTLDHRLNDSYSCLGWFSPGQVFVLDEYCARYGVRGCHRHLCYLAELMEHSENGAVIDPTLLHYSFAFCASHVHGNRPDGIGTVSVEEKERFEEIKERLSSLLENQISHFRYCFPFGRPEGALKATLSLLERVLMKDIATPIPAEEVKKVVRKCLEKAALINYTRLTEYAKIEETMNQASPARKLEEILHLAELCIEVLQQNEEHHAEAFAWWPDLLAEHAEKFWALFTVDMDTALEAQPQDSWDSFPLFQLLNNFLRNDTLLCNGKFHKHLQEIFVPLVVRYVDLMESSIAQSIHRGFEQETWQPVNNGSATSEDLFWKLDALQMFVFDLHWPEQEFAHHLEQRLKLMASDMLEACVKRTRTAFELKLQKASKTTDLRIPASVCTMFNVLVDAKKQSTKLCALDGGQEFGSQWQQYHSKIDDLIDNSVKEIISLLVSKFVSVLEGVLSKLSRYDEGTFFSSILSFTVKAAAKYVDVPKPGMDLADTYIMFVRQNQDILREKVNEEMYIEKLFDQWYSSSMKVICVWLTDRLDLQLHIYQLKTLIKIVKKTYRDFRLQGVLEGTLNSKTYDTVHRRLTVEEATASVSEGGGLQGITMKDSDEEEEG

SEQ ID NO: 7352 - DNA, 345 bp, Rattus norvegicus; identical to SEQ ID NO: 7349
  ref <308>: DATABASE ACCESSION NUMBER: EMBL / AI639118
  ref <309>: DATABASE ENTRY DATE: 2000-03-04

SEQ ID NO: 7353 - DNA, 2130 bp, Homo sapiens; identical to SEQ ID NO: 7350
  ref <308>: DATABASE ACCESSION NUMBER: EMBL / AK000768
  ref <309>: DATABASE ENTRY DATE: 2000-02-22

SEQ ID NO: 7354 - protein, 1018 aa, Homo sapiens; identical to SEQ ID NO: 7351
  ref <308>: DATABASE ACCESSION NUMBER: SWISS-Prot / BAB13417
  ref <309>: DATABASE ENTRY DATE: 2003-02-01

SEQ ID NO: 7355 - DNA, 457 bp, Rattus norvegicus
  ref <308>: DATABASE ACCESSION NUMBER: EMBL / AI639120
  ref <309>: DATABASE ENTRY DATE: 2000-03-04
ttgccaagtgaaatgtgtttattggccagttaatcattgtggttaaacatttgcctaagactacaaggcggcaaagacttagatcctaaggaaggaaagaatcatgttcacttttaggttcagaaaggcagaacagagcacctgaggccagctgtgacatcagaaaagccggagagagggtgccctcaggcacacgtccaaggtggtgagcctgagcttcaccatggtgtgcctgggcctttccctagaaaggcttcagtacagtagctgggacatggacatcccactgaggctctgcatccctgggcagcgtctagggtactgtctcatgccccaggacagtgccatatcatgatctggcatggcctgtgtgggtggacaggcctgggaggtgacactgcagagtgaagggctccagttctggctgttgtgctaggttggcagtctcactgggcga

SEQ ID NO: 7356 - DNA, 351 bp, Rattus norvegicus
  ref <308>: DATABASE ACCESSION NUMBER: EMBL / AI639123
  ref <309>: DATABASE ENTRY DATE: 2000-03-04
ttaaagctttctggtttatttgaagaggcaaattagcataagtaaatcacgagttaagatgacaagctaaacctttgtttctactcattagatgaaaccacaggagtttgcagttaagcctctgtgggaaccggggatgtgagtaggaagcagagaccacagctccagtttctgtaaacagaatcagagccaatgatgatactgggtttgagccaaggcaacttttcatcccaaccggaagccacataattctactgtattctcgttaaaaagtcaagacccgtatctcacggcggcaacaacaagcaaggccacagcccctctctactgctttaaaatggacacagcttg

SEQ ID NO: 7357 - protein, 612 aa, Rattus norvegicus
  ref <308>: DATABASE ACCESSION NUMBER: SWISS-Prot / AAC40148
  ref <309>: DATABASE ENTRY DATE: 2003-02-01
MVHGGFPEKIRQRYADLPGELHIIELEKDKNGLGLSLAGNKDRSRMSIFVVGINPEGPAAADGRMRIGDELLEINNQILYGRSHQNASAIIKTAPTRVKLVFIRNEDAVSQMAVAPFPELSHSPSPVEDLGGTELVSSEEESSVDAKHLPEPESSKPEDLSQVVDDNMVAEQQKESESPDSAACQIKQQTYSTQVSSSSQDSPSSPAPLCQSAHADVTGSGNFQAPLPVDPAPLSVDPATCPIVPGQEMIIEISKGRSGLGLSIVGGKDTPLDAIVIHEVYEEGAAARDGRLWAGDQILEVNGVDLRSSSHEEAITALRQTPQKVRLVVYRDEAQYRDEENLEVFLVDLQKKTGRGLGLSIVGKRSGSGVFISDIVKGGAADLDGRLIRGDQILSVNGEDMRHASQETVATILKCVQGLVQLEIGRLRAGSWAASRKTSQNSQGDQHSAHSSCRPSFAPVITSLQNLVGTKRSSDPPQKCTEEEPRTVEIIRELSDALGISIAGGKGSPLGDIPIFIAMIQANGVAARTQKLKVGDRIVSINGQPLDGLSHTDAVNLLKNAFGRIILQVVADTNISAIATQLEIMSAGSQLGSPTADRHPEDTEEQMQRTAD

SEQ ID NO: 7358 - DNA, 5033 bp, Homo sapiens
  misc_feature (1)..(5033): n=a, c, g or t
  ref <308>: DATABASE ACCESSION NUMBER: EMBL / AB044807
  ref <309>: DATABASE ENTRY DATE: 2001-05-29
acgagattatgaagtaatggttgctactttggacacacagattgcagatgatgctgagttacagaaatattcaaagctgctgcctattcacactctgaggcttggtgtggaagtggattcctttgatgggcaccattatatttcttcaattgtttctggtggtcctgttgatacattgggtctcctacagccagaagatgagctgcttgaggtcaatggcatgcagctttatggaaaatctcgccgagaagcagtctcctttcttaaagaagtgccacccccttttactttggtttgctgtcggaggttgtttgatgatgaagcttctgtagatgaaccaaggcgcactgaaacctctcttcctgagacagaggttgaccacaatatggatgtcaatactgaagaagatgatgatggggaattagcactgtggtcccctgaagtcaagattgttgaactagtaaaagattgtaaaggtttgggattcagcattttggattaccaggaccctttagatcctacaagatcagtgattgtgatccgctccctggtagcagatggtgtagcagaaagaagtgggggactattacctggagaccgcctggtctcagtcaatgaatactgtttggacaacacctcacttgctgaagctgtggaaatattgaaagctgtgccaccaggcctagtacaccttggcatctgtaagcctttggtggaagataatgaagaagaaagttgttatattttacattcaagcagtaatgaagacaagactgaattttcaggaacaattcatgatataaattcatctttaatactcgaagcacccaagggatttagagatgaaccatattttaaagaagaacttgtggatgaaccatttctagatctgggaaagtctttccattcccaacaaaaagagatagagcaaagcaaggaggcctgggagatgcatgaatttctgactcctagattgcaggaaatggatgaagaaagagaaatgcttgttgatgaagaatatgagttatatcaagatccctcaccatccatggagttgtatcccttgtcgcacattcaagaggccactcctgtgccctctgtgaatgaacttcactttggtacacagtggttgcatgataatgaaccatccgagtctcaagaggcaagaaccgggaggactgtctattcccaggaggcacagccgtatggctattgccctgaaaatgtgatgaaagaaaattttgtcatggagtccctaccatctgtaccatcaactgaaggaaacagtcaacaaggcagatttgacgacctggaaaatcttaattcattagcaaaaactagtctggatttaggcatgatcccgaatgatgtccaaggtcctagcttgctcattgaccttcctgttgtggctcaaaggagggagcaagaagatttgcctttatatcaacaccaagcgacacgagttatttccaaggcctcagcatacacaggaatgttgtcttctagatatgccactgatacatgtgagttacctgagagagaagaaggcgaaggagaagaaactccaaattttagccactggggtccaccgagaattgttgagatttttagagaacccaatgtgtctcttgggatcagtattgttggtggacaaactgttataaaacgtctaaagaatggagaggagcttaaaggtatattcatcaaacaagttttagaagacagtccagcagggaagacgaacgcacttaaaactggagataaaatacttgaggtgtctggagtagatttgcagaatgcctcacacagcgaagcagttgaggccattaagaatgcaggaaaccctgtggtgttcattgttcagagtttgtcatccactccacgagtcattcctaacgtacataacaaggccaacaaaatcaccggtaaccagaaccaggacacccaagaaaagaaagaaaagaggcaaggaactgctccaccgccaatgaaacttcctcctccttataaagctctgactgatgacagtgatgaaaatgaagaagaagatgcctttaccgaccaaaaaatcagacaaagatatgcagatctgcctggagaactgcacattattgaacttgaaaaagataagaatggacttggactcagccttgctggtaataaagaccgatcacgcatgagcatatttgtggtgggaattaacccggaaggacctgctgccgcagatggacgaatgcatattggagatgaactcttagagataaacaatcagattctgtatggaagaagtcaccaaaatgcatctgccattattaagactgccccatcaaaggtcaagctggttttcatcagaaacgaggatgcagtcaatcagatggccgttactccctttccagtgccatcaagttctccatcttctattgaggatcagagcggcaccgaacctattagtagtgaggaagatggcagcctcgaagttggtattaaacaattgcctgaaagtgaaagcttcaaactggctgtcagccagatgaaacagcaaaaatatccaacaaaagtctccttcagttcacaagagataccattagcaccagcttcatcataccattcaacagatgcagacttcacaggctatggtggtttccaggctcctctgtcagtggaccccgcaacgtgtcccattgtccctggacaggaaatgattatagaaatatccaagggacgttcagggcttggtctcagcattgtgggaggaaaagacacacccttgaatgctatagttatccatgaagtctatgaagaaggggcagcagccagagatggaagactttgggctggtgaccagatattagaggttaatggggttgacctgaggaactccagccacgaagaagccatcacagccctgaggcagaccccccagaaggtgcggctggtggtgtatagagatgaagcacactaccgggatgaggagaacttggagattttccctgtggatctgcagaagaaagctggccggggcctgggcctgagcatcgttgggaaacgaaatggaagcggagtgtttatttctgacatcgtgaaaggcggagccgcagacctggatgggagattgattcagggagatcagatcttatctgtgaatggggaggacatgagaaatgcctcacaggagacagtggccaccatcctcaagtgtgcacagggacttgtgcagctagagattggaagactccgagctggttcctggacctccgcaaggacgacatcacagaacagtcagtcagcagagtgcacacagcagctgtcatccctccttcgctcctgtcatcactggcctgcaaaacctggttggcacaaaaagagtttcagatccttcccagaaaaattcaggcacagatatggaaccaaggactgttgagataaacagggagctcagtgatgcccttggaatcagtattgctggaggaagaggaagtcccttaggagatatccccgtatttattgccatgattcaggctagcggagtggccgcacggacacagaagcttaaagttggagatcggattgtcagcattaacgggcaacctttggatgggctgtctcacgcggatgtggttaatctgctgaagaatgcctacgggcgcattatcctgcaggttgtagcagataccaatataagcgccatagcagctcagcttgaaaacatgtctacaggctaccaccttggttcgcccactgctgaacaccatccagaagacacagaaacacctccacctaagattattactttggagaaaggctctgaaggcttggggtttagtattgtagggggttatggaagtccccatggagacctgccaatttatgtcaagactgtatttgcaaagggagcagctgcagatgacggccgattaaaacgaggggatcagattttagctgttaatggcgagaccctggaaggtgttactcatgagcaagcagtcgccattctaaaacaccagagagggactgtaaccttaactgtgctgtcatgagcctcgggcctgatcacaagatagatgttgttgtttagaatatccacaggcagatgaagttctgagtgggtatgaaaagcaccctcaactaaaatgcaccttcattcttatttcttgccctctctgctcaggagaaatggctgaggtttcatgtgaatttcccaaatcaacaatcatctcctaatgtttcccagttcctgtcacctgttggcgaggttgatttctaaaacttaaatgagtctacctgttttgcatttaatttcagtgttccgatttcttttttttttttttttttttttgagacggagtctcactctgtcacccaggctgggttgcagtgagccaagttcgtgccactccactccagcctgggtgacagagcaagactctgtctcgaaaaagaaaaaaaaccatgaaggatgagtactagagtcagtaatagaagtagttcagcattatttaactacaacacaatgctgcaaatatttcacagtaattatcaaaatttaatgggctctaatttaaaatgttatttaataagtatagattttaattgagaattatctttgagtagatgtaatcacaaagtgcattaactcttgttggaatattttatggctattccaaagtatagagtgcctaaattttgtgttgaaaatgtctttcatgacggtattaagttttctgaaattacacatggcttttaaaatttctaatgtatccaagatgtgcaatgttgttaggatctcattcttcagtgcatgaaaanctactaccctcagaacattttgtgttaattgtacctgcaagaacacctcaggcaagccaagaagaaatgaaacccaaataaaacttgaaaatgcaccttaaaaatatatatacatataatagttttgaaatgggattctgctttattttgatggaatggccattaaatacacattttgagataaaaaaaaaaaaaaaaaaaaaaaaaaaaaaaaaaaaaaaaaaaaa

SEQ ID NO: 7359 - protein, 1134 aa, Homo sapiens [sequence omitted]

SEQ ID NO: 7360 - DNA, 213 bp, Rattus norvegicus
  ref <308>: DATABASE ACCESSION NUMBER: EMBL / AI639125
  ref <309>: DATABASE ENTRY DATE: 2000-03-04
ttaaaaggggccaccaaccttaatggtgggatttcaaaaaaaggaaggcttcccaagccccttcttgtggtattggggtttggaatgaaatgggaaggaaaagcttaatggttggggcttaatttggaatgggaattcttaacaacttgaggccttttttttggttttaagattcctggttggcttggggggtcaagggtttttaattctttg

SEQ ID NO: 7361 - DNA, 501 bp, Rattus norvegicus
  ref <308>: DATABASE ACCESSION NUMBER: EMBL / AI639130
  ref <309>: DATABASE ENTRY DATE: 2000-03-04
ttatggagagcagcttctgggttcggctctcagagaaggaagttccaggagagcagaactgggggcataggaagagacaagagtacctgaagctgcttacaagtgtgggcaaaatgaaggtgacactggtgcatctgttgttcatgatgttactgctgttgctaggactgggggtggggctggggctgggccttcacatggctgctgccatcctggagaatcagccactggatgagttttggcccagtgactcccaggacacagctgaggccactgaagagggacagggcaccaggaccacagaagccctggtacttgacaacaaagaaatggcagtacctgtctggtcagaagatactgtcctcagtgaagatgaagtggggggaagcaggatgctgagagccaagaccctccttcagagcaagcaaggctaccttaagtttgacttgaacatccgggactgtaacgtcatgatggcccacaagataaaggagcacaatc

SEQ ID NO: 7362 - protein, 208 aa, Rattus norvegicus
  ref <308>: DATABASE ACCESSION NUMBER: SWISS-Prot / BAB29898
  ref <309>: DATABASE ENTRY DATE: 2003-02-01
MKVTLVHLLFMMLLLLLGLGLGLGLGLHMAAAVLEDQPLNEFWPSDSQNTEEGEGIWTTEGLALGYKEMAQPVWPEEAVLSEDEVGGSRMLRAEPRFQSKQDYLKFDLSVRDCNTMMAHKIKEPNQSCINQYTFIHEDPNTVKAVCNGSLVDCDLQGGKCYKSPRPFDLTLCKLAKPGQVTPNCHYLTYITEKSIFMTCNDKRQLETK

SEQ ID NO: 7363 - DNA, 419 bp, Rattus norvegicus
  ref <308>: DATABASE ACCESSION NUMBER: EMBL / AI639132
  ref <309>: DATABASE ENTRY DATE: 2000-03-04
ttactatggtcaaaggctgtatgtatttcagaaaaaaatcattttttcttattagcataattttctttaattacccccagtttcatagtagcattttattttatactttaaccttgcaagtcagtataaagtgatcctacatttcaagtcatatgacatgaaaacagaaatgtgaattcttttataaattagttttcatcttctgtaacatctaattcttcatcatcctcatcttctacatgttgatccttttttgttcgacaggtggctacctgtccagttccagatgtgcacttagttgacagtggtctctgaagaggtgactttgaatttgctcttacaatatctaaacgagatggataatctgatagatacagagaatttcggaaaacctctaagtcttcatcctcatcaatttt

SEQ ID NO: 7364 - DNA, 747 bp, Homo sapiens
  ref <308>: DATABASE ACCESSION NUMBER: EMBL / BG722716
  ref <309>: DATABASE ENTRY DATE: 2001-05-09
agcggatgatgaggcgcaccctggaaaaccggaacgctcaaacgaaacaactgcaaacagctgtctcaaatgtggagaagcattttggagaactgtgccaaatcttcgctgcctatgtgcggaaaactgccaggctgagagacaaagcagacctcctggtgaatgaaattaacgcgtatgctgctacagagaccccgcttttaaagctgggcctgatgaactttgcagatgagtttgccaaacttcaggattatcgacaagcagaggttgaaagacttgaagccaaagtagttgaacccttgaaaacttatgggaccattgtgaaaatgaaacgggatgacctcaaagcaacactcacagcaaggaatcgagaagctaagcaattaactcagttagaaagaacacgtcagcgaaacccatctgatcgacatgttatttcacagaaacggaattacagagagctgcaatggatgctagccgaacaagtcgtcatctggaggaaactattaacaactttgaaaggcagaaaatgaaggatataaagactatattttctgaatttatcacaatcgaaatgttatttcacggcaaagctttagaggtctacactgctgcctaccagaatatacaaaacattgatgaagatgaagatttagaggttttccgaaattctctgtatgcaccagattattcatctcgtttagatattgtaagagcaaattcaaagtcacctcttcagagatcacg

SEQ ID NO: 7365 - DNA, 383 bp, Rattus norvegicus
  ref <308>: DATABASE ACCESSION NUMBER: EMBL / AI639139
  ref <309>: DATABASE ENTRY DATE: 2000-03-04
ttgattttttaaaaagcctttttatttgaatattcatttcattaactgtacataatcaatattccttaagagggaaggagcccttttccctggtgacatgggtcaaactgcatgtacggatccaaggcggcaaacagctctcgagcacaggatcttctcaagtaccaagcattttcccggtcctatgctaagaccatctaagaacaaggacagactgtacttagaagctgaagtgttccctgaagagatcacgacaccactcggcatggtgaacctaatgttcaggcacatgcccctgcctcagtgttctctaaattcaagcaccctcctcctgtcagccacgaccggagctggggtgacctgtgactcatggctgggatctt

SEQ ID NO: 7366 - DNA, 383 bp, Rattus norvegicus; identical to SEQ ID NO: 7365
  ref <308>: DATABASE ACCESSION NUMBER: EMBL / AI639139
  ref <309>: DATABASE ENTRY DATE: 2000-03-04

SEQ ID NO: 7367 - DNA, 383 bp, Rattus norvegicus; identical to SEQ ID NO: 7365
  ref <308>: DATABASE ACCESSION NUMBER: EMBL / AI639139
  ref <309>: DATABASE ENTRY DATE: 2000-03-04

SEQ ID NO: 7368 - DNA, 383 bp, Rattus norvegicus; identical to SEQ ID NO: 7365
  ref <308>: DATABASE ACCESSION NUMBER: EMBL / AI639139
  ref <309>: DATABASE ENTRY DATE: 2000-03-04

SEQ ID NO: 7369 - DNA, 411 bp, Rattus norvegicus
  ref <308>: DATABASE ACCESSION NUMBER: EMBL / AI639151
  ref <309>: DATABASE ENTRY DATE: 2000-03-04
ttaataatgaaagatgcatatttatttctacaaaagcaatgtatgatacagaacataaaggaacaattaaagatttacctattaaaatatacagattctgactgaaaagtaatagggtatttaaaaaagatgacaaaggatgttaatctttttttattattatcatttttacatattttggaacctcacataattttgataaataactcttacaaaattatgcaaaaagtacaagaatgtctggtaaacaaacagtctgtattttccaaaaagaatttttacaacatgcaattcttaaggcagcatcctctttacaaggtaatccttttactcatcaaatcttctgctgcaaagaataggctaagcaagcctggcttcttccattaacgccttttgtctttcctgtctgat

SEQ ID NO: 7370 - protein, 725 aa, Rattus norvegicus
  ref <308>: DATABASE ACCESSION NUMBER: Refseq / NP_032917
  ref <309>: DATABASE ENTRY DATE: 2002-09-19
MAVAVRALQEQLEKAKESLKNVDENIRKLTGRDPNDVRPIQGTLLALSGPGGGRGRGSLLLRRGFSDSGGGPPAKQRDLEGAVSRLGGERRTRRESRQESDPEDDDVKKPALQSSVVATSKERTRDLIQDQNMDEKGKQRNRRIFGLLMGTLQKFKQESTVATERQKRRQEIEQKLEVQAEEERKQVENERRELFEERRAKQTELRLLEQKVELAQLQEEWNEHNAKIIKYIRTKTKPHLFYIPGRMCPATQKLIEESQRKMNALFEGRRIEFAEQINKMEARPRRPSMKEKEHQVVRNEEQKAEQEEGKVAQREEELEETGNQHNDVEVEEAGEEEEKEAGIVHSDAEKEQEEEEQKQEMEVKIEEEAEVREGEKQQDSQPEEVMDVLEMVESVKHVIAEQEVMETNQVESIEPSENETSKELEPEMEFDVEPDKECKSLSPGKENINSQEVEKESEEKEEKEEKEPEPQPEPVAQPQPPPQPLPQSQPHSQPHSQPQPVLQSQPLCQPETLPLAVLQPPPQVIQEQGNLLPERKDFPLESIKLPEVSVEPVLTVHSENKSKNKTRSRSRGRARNKTSKSRSRSSSSSSSSSSSTSSSSGSSSSSGSSSSRSSSSSSSSTSGSSSRDSSSSTSSSSESRSRSRGRGHNRDRKHRRSMDRKRRDTSGLERSHKSSKGGSSRDRKGSKDKSSRPDRKRSISESSRSGKRSSRSERDRKSDRKDKRR

SEQ ID NO: 7371 - DNA, 11787 bp, Homo sapiens
  misc_feature (1)..(11787): n=a, c, g or t
  ref <308>: DATABASE ACCESSION NUMBER: EMBL / AF195139
  ref <309>: DATABASE ENTRY DATE: 2000-12-10
tctagatgacattcttgccctcatcactaccatcaagaaaaaggagtccaagtccaccacacaagtcaaaaagtaagtaaatggccaatttatcaaagttgacttctccaaccacaataacatgaggcttttaaagtacgtttctggatagaaaggaaacttatttaatgaggacctactaactattgaacacagcatcctacttatccttctccataaagttaaattgccaaggctcctaggaatagatcctatggaagcaaggacagtgagtgtggtgtgtgtgtgtgtgtgtgtgtgtgtgtgtgtgttttgagacagagttttgctcttgttgcccaggctggagtgcaatggcactatctcagctcactgcaaccccgcctcccgggttcaagtgattctcctgcctcagcttcccgagtaggtgggattacaggcatgcaccaccaagcccagctcattttgtatttttagtagagacggggtttctccatgttggtcaggctgatctcgaactcgtgacctcaggtgatccgcctgcctcggcctcccaaagtgctgggattacagacttgagccactgtgcccagctgtgtgtgttttgttttgtttgagacagagtctcactgttgcccaggccagagtgcagtggcatgatcttggctcactgcatgcaacctccacctcccgggctcaagcaattctgcctcagccttccaagcagctgacactacaggcacttgccaccatgcaggactaattttgtatttttagtagagacagggtttcatcatgttggccaggctggtcttgaactcccaatctcaagtgatccgcccaccaaggcctcccaaaatcctgggattaccgggccgaccatacatgcaaacattcttacacttgctgaacacgctctactattatcacactctcatgcctcaggtactgcctaaggttgtacacagacctgtaataagatcaatgaggctaagtatgctcacaatcagaattagataattgtcaatcttcatccccattattcatctctacatttttttctcctatagtacttcccgctttctaacatgctatactatttatttatttatttatttatttttgagacagagtctcactgctgcccaggctagagtgcagtggtgtgatgacagctcactgcagtctcaaactcctggactcaaacaatcatcccgcctcagcctctccagtacaatttttaaaatttttatttttagagacaggatcgttgctatgttgcccaggctggtcttaactcctgggctgtagcgattctcccacctcagtctcccaagtatctgggattacaggcacaatccactggacttgctcagagagatctttattgtacactgatatacccaagtgcctagaatagcacctggcacatagtgggccctcagtatttgttgaactaatgaatgatcattgctcctttggaagcctacaaaccccacagaagcaggaatcacaactatcttgttctaggctttattttcaaaccctagcttactgctgatacacaatggaagctctaaaagattgctggattaaagtggtagcttgagttaattaatacactgggcccactaattctttgtacacggaagatagatgcctggctgagattatttaaagcattgtttctgtgggaaagtgttttgtttttttgtttgtttgggacggagtctcactctgtcgcacaggctagagtgcagtggtgcaatctcggctcactgcaacctccgcatcccgggctcccgagtagctgggattacaggcgtacaccaccactcccagctaatttttgtatttttagtaaaggcggggtttccccatgttggccaggctggtctccaactcctggcctcaagtgatccacctgcctcagcctccctaagtgctgggattacgggcgtgngncactgtgcctggcctgtgaaaaaatgttttctgagcttcaatttgtatatatatttatagaataaaactagttcctacattggcagtgcaggtagggcagaaccagaagcgggacaacacacacagacaccactaacaacagggccgctcccttaggtctggtcttaaccagctctaggccaggtgaagaggctaactcggccatgactgcgtgtctgtctcgccattgctttcttttctctagtatagatgctcagcgtctaatcagagactgattctcaactggcgtgaccaaaggacagttatattatctccagtctcaatttccttatcagtaataacaggcattttatccacactttcagtttgtgagaaataaggcatgtagacggtttcacagagggtcgggaacaagatcaacccctaacaaacgttagccattatgactaatgacttttactagttttcatttttgtcttccctcttctcactttaacctaatcaggctgggcgtggtggctcacgctgtaatcccagcaccctgggaggtcgaggcaggcgaatcacctgaggtcaggagttcgagaccagcctgcccaacatcctggaatccggtctctaataatacaaaaattagccaggcgtgttgcgcgcgcctgtagtcccaggtactcaggaggctgaggcaggagaatcgcttgaacccgggaggaggaggttgcagtgagccgagatggtgccactgcactccagcctggacgacagagcgagactccgtgtgaaaaaaaaaaaattaacctaatagaggaaagcacgcgcccaccccctctctgagcatgcgcaccaacagaatagccgcgccctttcctaattaaatcattaaccaaggtgagggtaaggaagaaaaggaggcttggctaagtcccactctgatgtgatcacgttaaaacggtgtaaggcacattacatcataggttaaaaggcctagaaaactccgcgctccccttgccagaactgcagactcgcgagcctaagtctccgagaactcagggattgtgaaacccgccccgactctgcgctagcagcgggatccaggcacccgcagctaactggggagggagatgactgcctggctgacttttcattggctcagagtcacaaaggctgcaggttcttcccccttccggtcgctgagtggttgaggccggaagacaacgctcatcgtcattggctgagcccggctgtcagtcctttcgcgcctcggcggcgcggcatagcccggctcggcctgtaaagcagtctcaagcctgccgcagggagaagatggcggtcgccgtgagaactttgcaggaacagctggaaaaggccaaagagagtcttaagaacgtggatgagaacattcgcaagctcaccgggcgggatccgaatgacgtgaggtaagggcctaacgggaactcggaactcggagctcggagaggcagccctcaggtcggggtgaattgggggcggggagggcggccagccttaagaagactggaacctcgaggcctgttcgcggggcggcgggtaaaaccctgttgtcgccgaggtggagaggccccaggtcccctccgtagagcgctggtctcaggtccctgaggaaggagagcgaggcctgggtgcgccggcatgctttcttggcctgtgagaagacccggactgctgattcccgctctcggccctgcaggcccggaactgcagcacaaagccccttcccgctccggcggacacccggcccgttgctggccccgagaccctgccggacgcaacaagccgccttaccccgacttcctgtccacgtgcagcctcctcggggatggcgggatggggacctgatccaggcttgttaatgtgtgggggcatcgaggtgaatataatttctgtgacacaggtcctggagaaacgaggaagttaaatgaaatagtacttcctgtcctgtttcagacatttagatttatttgaaactatctttttggaacttttgtgattttttctccttatgatccacatctctgaaagtatttgggtgcgactgtgtgtgtctacatatgattttgcactgatttgtaaatcttttacaggcccatccaagccagattgctggccctttctggtcctggtggaggtagaggacgtggtagtttattactgaggtaagatttcctttggactttactcatgctgaaactactggtactttactaaatatgttggtttgaacaaaacctgtgataaaatcaataacccagtgtttgtcgtctttgttttgtttaatgttgtatagactagatttctgtataaaagtagttatcctgaaaaactggaggttgaagaatatattaagtttaccaattttgagtgaacttaattcttataaagtaacactataaaagcattttggaatgaatgcccgtttaaggctactttagttggaaagatttttgaaagtttaaccatattctcttgtcaaatggaaataccatttatcttgtatttcaagtgttttatgttgaacattttaaatttcaggcgtggattctcagatagtggaggaggacccccagccaaacagagagaccttgaaggggcagtcagtaggtaggtttaaaaaaagattcctgaaggcttctttagtttctgaggtaccacacaaatataaatatttattaacaataattctgtttcagcaatattaaaattgagtggtatgccactccctgccccccccaagttctgttggtatttgactgaacagttgactatcagttccctcaaaacgcagttctgcactcatgataagctaaattttatccaaataaaggtcatgtgaagagtaaaattggaaaaattgtcaattagtaccattttttctgacttgtacttgaaaaacttaaccagtttgaaatacttagaaaatacaggagagcaaaattggtttgggcgttagttcacacattgtagtatcctttctctgctggaggaaagaataaaatgggatggagacttgatagaacaaagcttctggaaacgagtcctagaagagagggcatttgcccttggtgtgcagttacataaatacctcagtggtcatttaaattaatttttggccaggcacagtggctcatccctgtaatcccagcactttgggaagccaagaccagcagatcacttgagcccaggagttggagaacagcctagatacatggtgaaatcccatccctacaaaaagtacaaaaaagttacccaggcatgctggctcacgcctgtagtcccagctgcttgggaggatgaggcaggaggatcacttgagcctgggaggtcgaggctgcagtgaaccgtggtggcaccactgcacttcagcctgggtggtatagtgaaaccctgtctcaaaaaaattaatattttctatgacaggctgggcggggagcgtcggaccagaagagaatcacgccaggaaagcgacccggaggatgatgatgttaaaaaggtattgagattgaaagaacttaaatgaatgtagtaccttcactttactacatttaaaagcacaccactcatatgctagttaaattactgagattttctttttctgcagccagcattgcagtcttcagttgtagctacctccaaagagcgcacacgtagagaccttatccaggatcaaaatatggatgaaaagggaaagcaaaggtatttccctgggggaaaaaaactctagtgaaataatgcagttataaggaaatcaagggattgttcaagcatcctgtagtatttcttagaaaatcatgggtttaaatgaaatggatcctgttgacagtaaattttcttattctgttctttaggaaccggcgaatatttggcttgttgatgggtacccttcaaaaatttaaacaagaatccactgttgctactgaaagggtatttatccaagttttgttttgcatcatatatttaagttatcaaagtagtagattaatgttttttttaaaaaatccttaaagctcttttaagacctaactgtaaacctgaaacaaagccaagtaaaaacttggtttaacttcttatagaacagctttacttaaacatgtgttggatataacagttgttgatatcatagctaatagtttgaaatttagatatgtgaaaaaaaaaagcctcaagtctccatttccttaaagacaaattacagtcagtaccaagtgctaagttctagttagttggtatcctgaattgaaaatgtgaagcggccaggtgcagtgctcatgcctgtaatcccagcactttgggaggctgaggcaggtggatcacctgaggtcagaagtttttcgagaccagcctggccaacatggtgaaaccctgtctttactaaaaatacaaaattagccgcctgtggtgcatgcgcctgtaatccccagctatttgggaggcggaggcaagagaatcacttgaaccctggaggtgaggttgcaatgagccaagatcacactattgtaccccagcctgggcaacaggcgcaaaactccatctcaaaaaaagaaaaaatgtgaaggatatgcagataccttttttttttctttttctttttttttgtagagatggggttttatcatgttgcccaggctggtctgagctcaaagcaatccacccacctcagcctcccagagtgctgggatgacaggtgtgagccactgtgtttggaatgcagatacctttacatagtgaaaaaaaaaaaaaaaaaaatttttttttgagatggagtttggctcttcttgctcaggctggagtgtagtggcgtgatctcagctcactgcaacctccgcctctggggttcaagtgatttctcctgcttcggcctcccaagtagctgggattataggtgcgtgcaaccacgcctgttaatttttttgtgtttttagtagagatggtggtgttggcttctgacttcagatgatctacctgcctctaatgtttcacgtaattagtatgtgtaataactttttatcataattgaactgaaatcatatataccttttgttgtaactatttcaacacgtaagtattaaagcaggctacttaacttttagcaaaagcggcgccaggaaattgaacaaaaacttgaagttcaggcagaagaagagagaaagcaggttgaaaatgaaaggagagaactgtttgaagagaggcgtgctaaacagacagaactgcggcttttggaacagaaagttgagcttgcgcagctggtgagtggtaatttggaattctaagattggtaatcctttgtgtttacaaaagcactgaccctttaccttttctttagcaagaagaatggaatgaacataatgccaaaataattaaatatataagaactaagacaaagccccatttgttttatattcctggaagaatgtgtccagctacccaaaaactaatagaagagtcacagagaaaaatgaacggtaagtatgcgaagaggtccattgaattgttcatagtgggtaaggtaatatgttcatatgcacacgtttgttttctaaaataattatgattcagtgattggtttgctgtgtttggtttttttttttaaataagataataagatattctaggccgggcgtggtggctcacgcctgtaatcccagcactttgggaggctgaggcaggcagatcatgaggtcaggagatcgagaccatcccggctaacatggtgaacccgtctctagtctctactaaatacaaaaaaaattagctgggcatggtggtgggcacctgtaattccagctacttggcaggctgaggcaggagaatcacttgaacctgggaggcagaagttgcagtgagccgagattacgccactgaactccagcctgggcaacagagctagactccatctcaaaaaaaaaaaaaagatacattctgagatgctggtgagtttgtagtataggaatatttgtatcatgatggagtttaatgtgaaagttatagacagtgcttatgcatctgtattccttaagcatttgtgtaaaattacttttttttgcatgctattattgttctgataaaatgctaataagacaaatgtgaaaaccaactcagtttctagatggaaaacacatggaaggatagacactgctaagatgatgatttatctctttgggactcagaaaaattaatatatatgattttatgccaaaactggttctgttttacagaagttttatttttcatcagacataaagattgatctgttttcttcatcagttagaaaatgtgcagttctgtctgccacaatttctagtatgtagatttcccatggatctttgcttttataattttatgtcagtttgtggttacttaattgccataatcttttgtcataactttacaaaaacaaattcagatgaagcttaatgacaatttgtgaccagttataaaattatggctttgaattttcttaatcggtaaattttacacatgtaaatttttattctttagctttatttgaaggtagacgcatcgaatttgcagaacaaataaataaaatggaggctaggcctagaagacaatcaatgaaggaaaaagagcatcaggtggtgcgtaatgaagaacagaaggcggaacaagaagagggtaaggtggctcagcgagaggaagagttggaggagacaggtaatcagcacaatgatgtagaaatagaggaagcaggagaggaagaggaaaaggaaatagcgattgttcatagtgatgcagagaaagaacaggaggaggaagaacaaaaacaggaaatggaggttaagatggaggaggaaactgaggtaagggaaagtgagaagcagcaggatagtcagcctgaagaagttatggatgtgctagagatggttgagaatgtcaaacatgtaattgctgaggaggaggtaatggaaactaatcgagttgaaagtgtagaaccttcagaaaatgaagctagcaaagaattggaaccagaaatggaatttgaaattgagccagataaagaatgtaaatccctttctcctgggaaagagaatgtcagtgctttagacatggaaaaggagtctgaggaaaaagaagaaaaagaatctgagccccaacctgagcctgtggctcaacctcagcctcagtctcagccccagcttcagcttcaatcccagtcccaaccagtactccagtcccagcctccctctcagcctgaggatttgtcattagctgttttacagccaacaccccaagttactcaggagcaagggcatttactacctgagaggaaggattttcctgtagagtctgtaaaactcactgaggtaccagtagagccagtcttgacagtacatccagagagcaagagcaaaaccaaaactaggagcagaagtagaggtcgagctagaaataaaacaagcaagagtagaagtcgaagcagtagcagtagcagttctagtagcagttcaaccagtagcagcagtggaagtagttccagcagtggaagtagtagcagtcgcagtagttccagtagcagctccagtacaagtggcagcagcagcagagatagtagcagtagcactagtagtagtagtgagagtagaagtcggagtaggggccggggacataatagagatagaaagcacagaaggagcgtggatcggaagagaagggatacttcaggactagaaagaagtcccaaatcttcaaaaggtggtagtagtagagatacaaaaggatcaaaggataagaattcccggtccgacagaaagaggtctatatcagagagtagtcgatcaggcaaaagatcttcaagaagtgaaagagaccgaaaatcagacaggaaagacaaaaggcgttaatggaagaagccaggctttcttagccattctttgcagcagaagatttcttgatgaaaaaggattacctttccttgtaaagaggatgctgccttaagaattgcatgttgtaaaaaatctttttggaagatacagactgtttgtttaccagacattcttgtactttttgcataattttgtaagagttatttatcaaaattatgtgaggttccaaaatatgtaaaaatgataataataaaaaaagattaacatcccttgtcatcttttttaaatatcctatactcttcagtaagaatctgtatattttaataggcaaatctttaagtctgttcccttcaattctgtatcatacattgcttttgtagaaataaatgtgtgtttatttcattatttttgggatgtcctcgttgacacttgtataataaatatcctctttatcattttcagcttttaacactagatactgcacgtgattagaatgtttttgaaggtttcctcgtttttatttgccttggacagtttttagttgtcagagtcagagctttgcagctttgagggggaacagttctctttaaaatcatttgctattttctattctcccttgttattttaatctaagcattttcccccgtttctcatattttaaccatatgttcggtagataactaaacagtatgatctggttggcattttcttcctgatgatgggagcgtcattcttttgtcttcatggttacttgtgtgatataacatacatctgttaaagaaaatcacttctttctaggggagggaggtagaaaagtatctttcaaacttggtttttgagtttgtgtcttgtcttaactttgtgttggctctaacttaaacatgctgatatgtgttttcaagaattttgtttaaggaagtattgtatggaagtccacaaaatgaaggaagttcatctaggttttaatatgtaagcaagataacacacaagtgtaccaagtgattattaactttgttgttttacaaatttgtatgaacttggagtatctgttggccattactatacatgtgcaaataaatgtggcttagacttgtgtgactgcttaagactagtacttgtattaactttctgatgctttatacaagagagcacttaaattgcatccttccttgagtttaacactgtagctttagccttgactttgaatattcattttgccttcccttgacaagtaaatggttacagtgaaaatgtgaagaagtatttccagttagtttttgtgtgtatataactcacttgtgtaagtggatgtgttaaaagatctctttttaaaaatccttttattggagtaattattaaaacagtaaatgcatagagctttgcacagcaatctgtatccatgagccagttccaccactagtaccttcatctgtggcttatccagcaaaatgtttcatttcctgtgtgccctggcaggaaagaggttggtaaatagtgaattaaagggatgatcataaaatttaacctggttaaaaagcaccttatttgatgacagtttgtatgcactaaaatcctttatacaaattaagttttgtctactgatttgtacctggaaaatctgaacaatattcatgttgcttacagaaaaggctagtattggcttgaagctctacgataggaggggtagtaatgggggtataatgaatgcttgaggggaaagtaattttcagtaatttcagttaagcgctactgatcatagtatgtgaaaggaatttttcttatatggaatgcttgatgaatttgcatgtcatccttgtgcaggggccattttaatcttttttttttttttttttttctcggagacagggtcttagtctgtcacccaggctggagtgcagtggcacaaacaatctgactgcagcctcgacctcctgggttcaagggatcc

SEQ ID NO: 7372 - protein, 717 aa, Homo sapiens
  ref <308>: DATABASE ACCESSION NUMBER: SWISS-Prot / AAG33941
  ref <309>: DATABASE ENTRY DATE: 2003-02-01
MAVAVRTLQEQLEKAKESLKNVDENIRKLTGRDPNDVRPIQARLLALSGPGGGRGRGSLLLRRGFSDSGGGPPAKQRDLEGAVSRLGGERRTRRESRQESDPEDDDVKKPALQSSVVATSKERTRRDLIQDQNMDEKGKQRNRRIFGLLMGTLQKFKQESTVATERQKRRQEIEQKLEVQAEEERKQVENERRELFEERRAKQTELRLLEQKVELAQLQEEWNEHNAKIIKYIRTKTKPHLFYIPGRMCPATQKLIEESQRKMNALFEGRRIEFAEQINKMEARPRRQSMKEKEHQVVRNEEQKAEQEEGKVAQREEELEETGNQHNDVEIEEAGEEEEKEIAIVHSDAEKEQEEEEQKQEMEVKMEEETEVRESEKQQDSQPEEVMDVLEMVENVKHVIAEEEVMETNRVESVEPSENEASKELEPEMEFEIEPDKECKSLSPGKENVSALDMEKESEEKEEKESEPQPEPVAQPQPQSQPQLQLQSQSQPVLQSQPPSQPEDLSLAVLQPTPQVTQEQGHLLPERKDFPVESVKLTEVPVEPVLTVHPESKSKTKTRSRSRGRARNKTSKSRSRSSSSSSSSSSSTSSSSGSSSSSGSSSSRSSSSSSSSTSGSSSRDSSSSTSSSSESRSRSRGRGHNRDRKHRRSVDRKRRDTSGLERSPKSSKGGSSRDTKGSKDKNSRSDRKRSISESSRSGKRSSRSERDRKSDRKDKRR

SEQ ID NO: 7373 - DNA, 411 bp, Rattus norvegicus; identical to SEQ ID NO: 7369
  ref <308>: DATABASE ACCESSION NUMBER: EMBL / AI639151
  ref <309>: DATABASE ENTRY DATE: 2000-03-04

SEQ ID NO: 7374 - protein, 725 aa, Rattus norvegicus; identical to SEQ ID NO: 7370
  ref <308>: DATABASE ACCESSION NUMBER: Refseq / NP_032917
  ref <309>: DATABASE ENTRY DATE: 2002-09-19

SEQ ID NO: 7375 - DNA, 11787 bp, Homo sapiens; identical to SEQ ID NO: 7371
  misc_feature (1)..(11787): n=a, c, g or t
  ref <308>: DATABASE ACCESSION NUMBER: EMBL / AF195139
  ref <309>: DATABASE ENTRY DATE: 2000-12-10

SEQ ID NO: 7376 - protein, 717 aa, Homo sapiens; identical to SEQ ID NO: 7372
  ref <308>: DATABASE ACCESSION NUMBER: SWISS-Prot / AAG33941
  ref <309>: DATABASE ENTRY DATE: 2003-02-01

SEQ ID NO: 7377 - DNA, 366 bp, Rattus norvegicus
  ref <308>: DATABASE ACCESSION NUMBER: EMBL / AI639153
  ref <309>: DATABASE ENTRY DATE: 2000-03-04
ttctttaatagcaatttattgcaaaaaagaacatctggggaagattgggagcaaagtaaggcagaggacatgggcagtggggtattaataaagattagggttgagcttcttatctggtgattagttgttgaagttgaatataaattgagccaagtagagtggtgaatctgcctgagccagagcaggaagtagggcacaggcttctaggccttgttgcagagagcttcatgacgacagcacataatttgcattcttgttccatgagagaagaggttcatagatgggcacatgttctcacacccttgaaccatgaactggagctttccaccttcatagatcttctttaacatgcactgctgggaattt

SEQ ID NO: 7378 - protein, 261 aa, Rattus norvegicus
  ref <308>: DATABASE ACCESSION NUMBER: Refseq / NP_031417
  ref <309>: DATABASE ENTRY DATE: 2002-09-18
MKELILLGLYLLGSAQGAPPGQPEELLDSVDQQASVQQLSSEYLSLANPSDAEALYETPLDEKTLSGHSSSEQESSEHAVAEHSAGEHSSGEQSSEHMSGDHMSGEHLSEHTSEEHSSGEHTSTEHTSGEQPATEQSSSDQPSEASSGEVSGDEAGEQVSSETNDKENDAMSTPLPSTSAAITLNCHTCAYMNDDAKCLRGEGVCTTQNSQQCMLKKIFEGGKLQFMVQGCENMCPSMNLFSHGTRMQIMCCRNEPLCNKV

SEQ ID NO: 7379 - DNA, 1043 bp, Homo sapiens
  ref <308>: DATABASE ACCESSION NUMBER: EMBL / M82967
  ref <309>: DATABASE ENTRY DATE: 2000-03-04
gctatgaagcagctgtggcccacactggggtcccctcttttcctaaatccagatgaacaggtttctcttgctaatgagtctttatctgcttggatctgccagaggaacatcaagtcagcctaatgagctttctggctccatagatcatcaaacttcagttcagcaacttccaggtgagttcttttcacttgaaaacccttctgatgctgaggctttatatgagacttcttcaggcctgaacactttaagtgagcatggttccagtgagcatggttcaagcaagcacactgtggccgagcacacttctggagaacatgctgagagtgagcatgcttcaggtgagcccgctgcgactgaacatgctgaaggtgagcatactgtaggtgagcagccttcaggagaacagccttcaggtgaacacctctccggagaacagcctttgagtgagcttgagtcaggtgaacagccttcagatgaacagccttcaggtgaacatggctccggtgaacagccttctggtgagcaggcctcgggtgaacagccttcaggcacaatattaaattgctacacatgtgcttatatgaatgatcaaggaaaatgtcttcgtggagagggaacctgcatcactcagaattcccagcagtgcatgttaaagaagatctttgaaggtggaaaactccaattcatggttcaagggtgtgagaacatgtgcccatctatgaacctcttctcccatggaacgaggatgcaaattatatgctgtcgaaatcaatctttctgcaataagatctagaagcctgggcccttgcttgttttgactcaggcagtaaaaagcctccatcactctatttggctcattttatatttagttccttccccagtcaacaactgaccacatctgcctctgcctgagcattaggatgctcaaacatcctatctttcttcttctattcatgcttttatccattcttctctgtcctgtcttccctgctccaactctttctctcaatattcctgatttttttttcaataaatttcacatg

SEQ ID NO: 7380 - protein, 265 aa, Homo sapiens
  ref <308>: DATABASE ACCESSION NUMBER: SWISS-Prot / P26436
  ref <309>: DATABASE ENTRY DATE: 2002-06-15
MNRFLLLMSLYLLGSARGTSSQPNELSGSIDHQTSVQQLPGEFFSLENPSDAEALYETSSGLNTLSEHGSSEHGSSKHTVAEHTSGEHAESEHASGEPAATEHAEGEHTVGEQPSGEQPSGEHLSGEQPLSELESGEQPSDEQPSGEHGSGEQPSGEQASGEQPSGEHASGEQASGAPISSTSTGTILNCYTCAYMNDQGKCLRGEGTCITQNSQQCMLKKIFEGGKLQFMVQGCENMCPSMNLFSHGTRMQIICCRNQSFCNKI

SEQ ID NO: 7381 - DNA, 567 bp, Rattus norvegicus
  ref <308>: DATABASE ACCESSION NUMBER: EMBL / AI639154
  ref <309>: DATABASE ENTRY DATE: 2000-03-04
ttaagatgttaattgtgctcagggaagccagaagagtggggtttcttagaactgcagtgacaggagttgtgggcacaccgacatgggcactgggaatcaagcttgggtcctattctaaagatatatgtgcttataatctatctctaagtgccaagctctggtgggaatggagtagcatgattcctgcccctgggacagggccctggtgtgagcctcccggagttgctcagcccagtgtggcaagtatccagtgtctgtcgtctgtgggtgtaaggcttgcttgagtaataatgtatatcttttcacatcccttcagggaatgccccctctctgaatgttaatgactccatgataatctgaggcagcctgagtccaggaggcaaaggcgtggctaatgtctcagtaaaatggtaaacctgggatcttcaagacagcccttaaggctgtggaaaagaactctaaatacatgagttcaaaaatatttaattccaggggttggggatttagctcagtggtagacctaggaagcgcaaggccctggggtcgggccccagctcaaaaaaaaaa

SEQ ID NO: 7382 - DNA, 548 bp, Rattus norvegicus
  ref <308>: DATABASE ACCESSION NUMBER: EMBL / AI639157
  ref <309>: DATABASE ENTRY DATE: 2000-03-04
ttagtggtactgactgtgtattaagtccttcctccccaggcaggtccatctgtcacctgagaagatgtgggctgacactagatccagtttcttggctgtcagtgtctctccagggccttgaccagaaggtcattcaggcggcctaccatggcccggggatcatcaacgagtcctgctgctatcatggcgttctcatagatctgatccactagcagctgggctagctccggctcacgctccctcagctggttgagtttctttattagtgtgtgcctggggttgatctccagtgtgggctgtagcaactgagcacgctcctcctgggtcttggccagctgctgcatgcgcaggaaatgtcgagcagcccccatctctagcacggtcaccatggcagggtgggtgtccaggcggaaagtcaccttcacattggtgacacgggaccccagtgcatttctcatccatgccattagctcttctgtttctttctcagagaggcgctcaccagctggagatgtgtcctcaaacttttcctccttgtagtgatcaac

SEQ ID NO: 7383 - protein, 210 aa, Rattus norvegicus
  ref <308>: DATABASE ACCESSION NUMBER: SWISS-Prot / P41123
  ref <309>: DATABASE ENTRY DATE: 1995-02-01
APSRNGMILKPHFHKDWQQRVDTWFNQPARKIRRRKARQAKARRIAPRPASGPIRPIVRCPTVRYHTKVRAGRGFSLEELRVAGIHKKMARTIGISVDPRRRNKSTESLQANVQRLKEYRSKLILFPRKPSAPKKGDSSAEELKLATQLTGPVMPIRNVYKKEKARAITEEEKNFKAFASLRMARANARLFGIRAKRAKEAAEQDVEKKK

SEQ ID NO: 7384 - DNA, 2383 bp, Homo sapiens
  ref <308>: DATABASE ACCESSION NUMBER: EMBL / AK026501
  ref <309>: DATABASE ENTRY DATE: 2000-09-29
ctcgagcatgttggctactctttccgctcggctgttttcctgcgcaggaggtgagggagactgggtcctggcctttgggcatcatccagcgccatcggcctggcgcttcagccaacgcgggagtggatgggccccttcttcttcgcagacagcgttcggccgctgcccgggctctaggcgcggccggacggcccagtctggagggttcggggcggaggcccgggggggtgcgcgcgcccggggtccggcctctcactcgctcccctctcgtccgcagccgcagggccgtaggcagccatggcgcccagccggaatggcatggtcttgaagccccacttccacaaggactggcagcggcgcgtggccacgtggttcaaccagccggcccgtaagatccgcaggtgagccctgcgctcggggctgcccctggggctcgtgcccgcggctgcgccttggcttgcgggtggccgatgccagggcggggggcgctgtctgcaaccgtcgcggagcgctggcctggcggccttaggcaagggtgaccgccgctgcgcttctctccaccagacgtaaggcccggcaagccaaggcgcgccggcatcgccccgcgccccgcgtcgggtcccatccggcccatcgtgcgctgccccacggttcggtaccacacgaaggtgcgcgccggccgcggcttcagcctggaggagctcagggtgagtactggcagcgctgcggtgtcaggaaggccccgaagtcccctctgttggcctcagtcgcgtgatgacattctccggaatcgctgtacggccttgatgaaagcacatttgaacccttttccatctgattgctgaggcttttcatccaggcctcggggctggagaaagcccgggcctgtctccatctctctctggttctggggcaggtggccggcattcacaagaaggtggcccggaccatcggcatttctgtggatccgaggaggcggaacaagtccacggagtccctgcaggccaacgtgcagcggctgaaggagtaccgctccaaactcatcctcttccccaggaagccctcggcccccaagaagggagacagttctgtgagtacacggctctctggccgtcctggtgcgcggggacagtgaggcttggctcctttatcagtgacaccggtccctgggtcttgctggggtgagaagaaccaaaacattgtgggtgatgagctaacgggactgttaaggttcacctgtgcgtttccgcagagataaccttaatggacatggcaaggctgtgtgacttggaggcagctttttccattgacgttgctctccctaaaatgcttcgtattccaaaatatttctagaaagaccttgtaggataaggttgataaagagtccattgtatacgtttccgggtagttaaattagggaacagttttctctgccccgcccgtggttcacaggtagataactgtctcgtgcgtgttgcgtcaactcagtaagatatagtcacctaactaataaggactgttcttaacattggggccacaaagtgtgttgtagaaaaggctcagacactggtcctgaacacggaatccccaggggaaagtttggggccaggtgagggtggagtccttgcagcagtgcggccaaccccacttaactcttctcattcaccaacaggctgaagaactgaaactggccacccagctgaccggaccggtcatgcccgtccggaacgtaagtgaacacttactcaaatccaggcttcagacgagatcagtgggtgaacacgtgggtatctgagatgcgggtaatgggggtcaggcttaagaacgttaatagtggcagttgtgggtgtggaggtttgcggaaaggaacatttcttcttagtttttacttcttgcaaccatgaagccatacattgggaagtatttttgtttgttttgtgtttttttgttgttgttggaaagagagtttctctatgctgcttacattggttttgaattgctgggtttacaggcttgagccgccatgtccagctcagggagggtttttctttttttttttaaatcccagggaaggtgattgactcagggttgcttttcagcagtacttatggcagcgaacctgacccccaatccccgggaggtcctccgggttctcctgacgcttggttgttcccttgccctttggtgcatgtgggtttaacaacctgtctttctcttctaggtctataagaaggagaaagctcgagtcatcactgaggaagagaagaatttcaaagccttcgctagtctccgtatggcccgtgccaacgcccggctcttcggcatacgggcaaaaagagccaaggaagccgcagaacaggatgttgaaaaaaaaaaaaaaaaa

SEQ ID NO: 7385 - protein, 210 aa, Homo sapiens [sequence omitted]

SEQ ID NO: 7386 - DNA, 595 bp, Rattus norvegicus
  ref <308>: DATABASE ACCESSION NUMBER: EMBL / AI639162
  ref <309>: DATABASE ENTRY DATE: 2000-03-04
ttgcacaaattattttcaattttatttaaatgaaataatgttctaatattatgaaaaactgtcatagaaatgacacaacttttattggaatagaaatttaaagacaaagttatagtatctattttatcctccattaattaaatgcaaaagctatgcatgtcaaattgctacacacatgttggcattatacaatgtactcagtatacttctttattataaataactgaaaacaatatcttatttttcaaacccacataacaaaactgcaaataccacactttttttcctcctcgtttcactttattttttgtaatatggatggaaaaacagtttaccttacccaagattagttttaaaacatctgtgggcgcaaaaacagcaacaaccacagtcacaaaaatactaattttctttcacctaaatgaaaaggaagattttacagggctcagcttaagagagttgtgacggagttactaacagtagaaaaactttgtaacgcctggacaaaacactcataaggcaaaatggtcttttttgcagatataagtataagaaagatgtgatggtaaacagtacaaacctttttctaaaacca

SEQ ID NO: 7387 - DNA, 456 bp, Rattus norvegicus
  ref <308>: DATABASE ACCESSION NUMBER: EMBL / AI639165
  ref <309>: DATABASE ENTRY DATE: 2000-03-04
ttgaacagtctcctacatgtgatgccgaggacatgtgtaaccatcatagcgtctctaggaatctgtatttaatttgcgttggggtggaggcagggattggagatctgaagctgccacaggtttgtggcagatggctctgtgtcagctatgacaagcagccaggctcggcttcctctgcagattttcttttctctctgatcaggtaaatatgggcacactctggaaagttcttcagattctgccttaggctgcaagtttgcgacttagccccatctgtcacaaatcttccctgggttctgttgtgagcagagacctgaatttaccatgtagggctgcccaagaaaatggagccacttcacccttataaagatgttttcttataatgtctggtctctcacagaaactcttgagcctttttgaaagctgttcaagtgtggaatacagatactcagctgg

SEQ ID NO: 7388 - DNA, 365 bp, Rattus norvegicus
  ref <308>: DATABASE ACCESSION NUMBER: EMBL / AI639169
  ref <309>: DATABASE ENTRY DATE: 2000-03-04
ttgccttaaatgttttattacaattaaaatttcacaaacacagatcaattaatctcaatcaaaataactcatgtttacatcatatttatagacaagctgtacaataaatacataaatgcattcacagtctgtgcttcagtcatcctcctcctcctcttcatcgctgatcacatacttcttatgctttttattggccttgacatcgtcctctgctttcctcttcccagaagactcaccttcctcgtcactgttgagcttctttgctttgagcagcctctgagctttgtcttcttccgagccctcgtcgctgtctgaggagtagattctggcccgttcctcgcggatgcctcctttgtagcggtttt

SEQ ID NO: 7389 - DNA, 721 bp, Homo sapiens
  ref <308>: DATABASE ACCESSION NUMBER: EMBL / BM015900
  ref <309>: DATABASE ENTRY DATE: 2001-10-31
ggacgcgtggggtagaaatacccaaagtaaacactgatttaggaaacgacttatatttgttaaactgcccaactttctcagtgtagagcccagaccttttgatcctcagtattatgaagatgaatttgaagatgaagaaatgctggatgaagaaggtagaaccaggttaaaattaaaggtagaaaatactataagatggaggatacgccgagatgaagaaggaaatgaaattaaagaaagcaatgctcggatagtcaagtggtcagatggaagcatgtccctgcatttaggcaatgaagtgtttgatgtgtacaaagccccactgcagggcgaccacaatcatctttttataagacaaggtactggtctacagggacaagcagtctttaaaacgaaactcaccttcagacctcactctacggacagtgccacacatagaaagatgactctgtcacttgcagataggtgttcaaagacacagaagattagaatcttgccaatggctggtcgtgatcctgaatgccaacgcacagaaatgattaagaaagaagaagaacgtttgagggcttccatacgtagggaatctcagcagcgccgaatgagagagaaacagcaccagcggggggctgagcgccagttacctggaacctgatcgatacgatgaggaggaggaaggcgaggagtccatcagcttggctgccattaaaacaaaaacaaaaag

SEQ ID NO: 7390 - DNA, 365 bp, Rattus norvegicus; identical to SEQ ID NO: 7388
  ref <308>: DATABASE ACCESSION NUMBER: EMBL / AI639169
  ref <309>: DATABASE ENTRY DATE: 2000-03-04

SEQ ID NO: 7391 - DNA, 721 bp, Homo sapiens; identical to SEQ ID NO: 7389
  ref <308>: DATABASE ACCESSION NUMBER: EMBL / BM015900
  ref <309>: DATABASE ENTRY DATE: 2001-10-31

SEQ ID NO: 7392 - DNA, 463 bp, Rattus norvegicus
  ref <308>: DATABASE ACCESSION NUMBER: EMBL / AI639172
  ref <309>: DATABASE ENTRY DATE: 2000-03-04
ttaatcagttaaagcatctttatttttgcaattatcattccatacaaaagcaatagaaatgcaaatattgacaagtttacaattgaatacatgaacagagttatctgtacacatcatttacagcaatattacatggtaaattaactgatcattaaaaaaaaaaaaaaaacaaagttctttctaaatccctctcttcctctcttctgcatcaactcacagagcatttactaaaatacttacctcacactaatgctatttcaagttccaaattaaaactatataacttacataaaagcccattaatataacagcttaacatctttgctcagagctctgtatgagggaaagctacattcacattgataaaagaccagaaaataagtttttacaaagtcactgcagctgcctgactgagaattcttcatcagttacctaaagggcagccaattctaaattggtccca

SEQ ID NO: 7393 - protein, 275 aa, Rattus norvegicus
  ref <308>: DATABASE ACCESSION NUMBER: SWISS-Prot / AAC53530
  ref <309>: DATABASE ENTRY DATE: 2002-06-15
MACRPRSPPGYGSRRDGGASPRSPARWSLGRKRRADGRDRKPEDSEEGELQTADHRPESFTTPEGHKPRSRCSDWASAVEEDEMRTRVNKEIARYKRKLLINDFGRERKSSSGSSDSKESMSSVPADVETDESVLMRRQKQINYGKNTIAYDRYIKEVPRHLRQPGIHPRTPNKFKKYSRRSWDQQIKLWKVALHFWDPPAEEGCDLQEIQPVDLGEMETEFTESSSESQTSSQDNFDVYAGTPTKVRHVDCQVEDEFDLEACLTEPLKDFSAMS

SEQ ID NO: 7394 - DNA, 1716 bp, Homo sapiens
  ref <308>: DATABASE ACCESSION NUMBER: EMBL / Z71188
  ref <309>: DATABASE ENTRY DATE: 1997-06-19
gcgggtttctgcctcaggccctgccctgctctactctgcgctctctgcccgcgccgccgccgcctcagcctcggccctgcgctgcgcgcccggcccgtgctgccatggcctgccgcccgcgaagcccgccgaggcatcagagccgctgcgacggtgacgccagcccgccgtcccccgcgcgatggagcctgggacggaagcgcagagccgacggcaggcgctggaggcccgaagacgccgaggaggcagagcaccgcggcgccgagcgcagacccgagagctttaccactcctgaaggccctaaaccccgttccagatgctctgactgggcaagtgcagttgaagaagatgaaatgaggaccagagttaacaaagaaatggcaagatataaaaggaaactcctcatcaatgactttggaagagagagaaaatcatcatcaggaagttctgattcaaaggagtctatgtctactgtgccggctgactttgagacagatgaaagtgtcctaatgaggagacagaagcagatcaactatgggaagaacacaattgcctacgatcgttatattaaagaagtcccaagacaccttcgacaacctggcattcatcccaagacccctaataaatttaagaagtatagtcgacgttcatgggaccagcaaatcaaactctggaaggtggctctgcatttttgggatcctccagcggaagaaggatgtgatttgcaagaaatacaccctgtagaccttgaatctgcagaaagcagctccgagccccagaccagctctcaggatgactttgatgtgtactctggcacacccaccaaggtgagacacatggacagtcaagtggaggatgagtttgatttggaagcttgtttaactgaacccttgagagacttctcagccatgagctaactgccccctggcggccaggaagagaaacagctcctccccgactaggtggaaggctggccaggcaccaagcatgtgtgtgcacttgtacctggtggtttctctgttagcagtccattagctcatgctgaattatttttgccttactttcttaagaaacattaattttatgtatagtgagtatattttgcatgttttaaattgtaaatggagctaagtccaagaaagtacttgaagctctcttccagcgagcttaattgcgtaatccctgttgtcctccagggtaagctgacacgtctacataactggttttccacaggcatcttcagttattgcttgtcaggtggactgttttggatttaaccatgtaatccatgggaccaattgagagtcagctacttttataggcatcaaagtattctcagacacctttaatatctttatggaaacttaatttttggccttttatcaatatgtcataacagcattctgaagtcagacattgttaaattgagctattaaactaatgagttttatgtaagttatatggtcttaatttggtacttgtaaatagcactagttagactctttagaatactccaagagttagggcagcagagtggagcgatttagaaagaacattttaaaacaatcagttaatttaccatgtaaaattgctgtaaatgataatgtgtacagattttctgttcaaatattcaattgtaaacttcttgttaagactgttacgtttctattgcttttgtatgggatattgcaaaaataaaaaggaaagaaccctctt

SEQ ID NO: 7395 - protein, 270 aa, Homo sapiens
  ref <308>: DATABASE ACCESSION NUMBER: SWISS-Prot / Q14493
  ref <309>: DATABASE ENTRY DATE: 2002-06-15
MACRPRSPPRHQSRCDGDASPPSPARWSLGRKRRADGRRWRPEDAEEAEHRGAERRPESFTTPEGPKPRSRCSDWASAVEEDEMRTRVNKEMARYKRKLLINDFGRERKSSSGSSDSKESMSTVPADFETDESVLMRRQKQINYGKNTIAYDRYIKEVPRHLRQPGIHPKTPNKFKKYSRRSWDQQIKLWKVALHFWDPPAEEGCDLQEIHPVDLESAESSSEPQTSSQDDFDVYSGTPTKVRHMDSQVEDEFDLEACLTEPLRDFSAMS

SEQ ID NO: 7396 - DNA, 447 bp, Rattus norvegicus
  ref <308>: DATABASE ACCESSION NUMBER: EMBL / AI639176
  ref <309>: DATABASE ENTRY DATE: 2000-03-04
ttatttttaattttaaaaagtcttctattttgcaatgatcaggtgatttctgtctaagtaaacaagcaaaccccaaatggagagaaagaaaacaataaacagtcaaccagaaaatcaatgaacaaagtagttaaaataagtaatcatcttccatgtataatcttaaatgcaaataaacctgatttaccaatgaagaaatgaaaacttgcttgctggattaaaaatcaagatccaactatctttagggtatttgttttaaaggagccacttttcaccagcaaaagaaaatgaacatcaatctgctaagcacatgaaaactggaactggcatacgtatttttgtcaattttaaaaggtagttttgatgggtagagccatcttagatgacaggtcactgtcactgcttttttacttttttatttctttgacaaaagacctgctaaaagca

SEQ ID NO: 7397 - DNA, 430 bp, Rattus norvegicus
  ref <308>: DATABASE ACCESSION NUMBER: EMBL / AI639187
  ref <309>: DATABASE ENTRY DATE: 2000-03-04
ttaactcagtaccaggggccatttattagacaggtgttagttgccctggaacatggctccatcacaggctcagaagacaagctttacaagagttccttccctggcagagactgttgtgaaaccaataccagagtttggaagagctgaggggttattttagagctgtcagcgtccatcgcggggtggtatgggttcactggcttttggacagcatcttgtcctcacccatttaccatgcccaaccggttggtctgcttcaacccttgcccaagaacagaggacttcagagagctttcattagtgttttcaatagtgtgggtgtaagcttaaggtggaaaggctggccccagaatacacccaggcttggggcagagtcctagtttatgttacaaagctgttggctgtgcttgctgtccctgtcacacatcct

SEQ ID NO: 7398 - protein, 247 aa, Rattus norvegicus
  ref <308>: DATABASE ACCESSION NUMBER: SWISS-Prot / AAH05702
  ref <309>: DATABASE ENTRY DATE: 2003-02-01
MPLLFHPAWPLLLGATLTFRALRRVLCRLPQPAHVQTDPLRTWRWHNLLVSFTHSIVSGIWALLCLWQTPEMLVEIETAWSASGYLLVCFSAGYFIHDTVDIVVSKQTRASWEYLVHHVMAMGAFFSGIFWKRFVGGGVLTLLVEVSNIFLTLRMMMKINNAQDLLLYKVNKYINLVMYFLFRLAPQAYLTKFFLQYAGQRTLGTFLLAILLMLDLMIIIYFSRLLRSDFCPERAPRRQQKDKFLTE

SEQ ID NO: 7399 - DNA, 437 bp, Rattus norvegicus
  misc_feature (1)..(437): n=a, c, g or t
  ref <308>: DATABASE ACCESSION NUMBER: EMBL / AI639188
  ref <309>: DATABASE ENTRY DATE: 2000-03-04
ttcaattttcagtatactttattttctattaaatgaaaaccaagaaaatgtcaagttaagttaaaaggctttaccctttcaagaaaaaaatacaaactgtatggtgtgatacttgtataacaggtcatattttacattacacaatataaacaaaatcactaatctacaattatttgaaactacacatgaactacagattaagtgggaaatgggtttacttttttggtgcaaataaacatcttggaaaaacatacagcatgcattttttaactgtatgcataagctctgacagtccattcttaatagccgncaccaccaccaccaccaccttcttttccttgtccaaaataaccacctccataaccccttcgctggaatcctccagatcctctatagcccccaccagatccccggtagtctccactagatcctctgta

SEQ ID NO: 7400 - protein, 1380 aa, Rattus norvegicus
  ref <308>: DATABASE ACCESSION NUMBER: SWISS-Prot / AAC05725
  ref <309>: DATABASE ENTRY DATE: 2001-10-16
MGDIKNFLYAWCGKRKMTPAYEIRAVGNKNRQKFMCEVRVEGFNYRGMGNSTNKKDAQSNAARDFVNYLVRINEVKSEEVPAVGIVPPPPILSDTSDSTASAAEGLPAPMGGPLPPHLALKAEENNSGVESSGYGAPGPTWDRGANLKDYYSRKEEQEVQATLESEEVDLNAGLHGNWTLENAKARLNHYFQKEKIQGEYKYTQVGPDHNRSFIAEMTIYIKQLGRRIFAREHGCNKKLAAQSCALSLVRQLYHLGCIEAYSGLTKKKEGERVEPYKVFLPPDLELQLQNVVQELDLEIVPPPVDPSMPVILNIGKLAHFEPSQRQNAVGVVPWSPPQSNWNPWTSSNIDEGPLAYASTEQISMDLKNELTYQMEQDHNLQSVLQERELLPVKKFEAEILEAISSNSVVIIRGATGCGKTTQVPQYILDDFIQNDRAAECNIVVTQPRRISAVAVAERVAYERGEEPGKSCGYSVRFESILPRPHASIMFCTVGVLLRKLEAGIRGISHVIVDEIHERDINTDFLLVVLRDVVLAYPEVRIVLMSATIDTTMFCEYFFNCPIIEVYGRTFPVQEYFLEDCIQMTQFIPPPKDKKKKDKEDDGGEDDDANCNLICGDEYGPETKLSMSQLNEKETPFELIEALLKYIETLNVPGAVLVFLPGWNLIYTMQKHLENNSHFGSHRYQILPLHSQIPREEQRKVFDPVPDGVTKVILSTNIAETSITINDVVYVIDSCKQKVKLFTAHNNMTNYATVWASKTNLEQRKGRAGRVRPGFCFHLCSRARFDRLETHMTPEMFRTPLHEIALSIKLLRLGGIGQFLAKAIEPPPLDAIIEAEHTLRELDALDANDELTPLGRILAKLPIEPRFGKMMIMGCIFYVGDAVCTISAATCFPEPFISEGKRLGYIHRNFAGNRFSDHVALLSVFQAWDDARMSGEEAEIRFCEQKRLNMATLRMTWEAKVQLKEILINSGFPEDCLLTQVFTNTGPDNNLDVVISLLAFGVYPNVCYHKEKRKILTTEGRNALIHKSSVNCPFSSQDMKYPSPFFVFGEKIRTRAISAKGMTLVTPLQLLLFASKKVQSDGQIVFIDDWIRLQISHEAAACITIRAAMEALVVEVSKQPNIISQLDPVNEHMLNTIRQISRPSAAGINLMIGSVRYGDGPRPPKMARYDNGSGYRRGYGGGGYGGGGYGGGYGSGGFGGGFGSGGGFGGGFNSGGGGFGSGGGGFGSGGGGFGGGGGGFSGGGGGGFGGGRGGGGGGFGGSGGFGNGGGGYGVGGGGYGGGGGGGYGGGSGGYGGGGYGGGEGYSISPNSYRGNYGGGGGGYRGGSQGGYRNNFGGDYRGSSGDYRGSGGGYRGSGGFQRRGYGGGYFGQGRGGGGGGGY

SEQ ID NO: 7401 - DNA, 349 bp, Rattus norvegicus
  ref <308>: DATABASE ACCESSION NUMBER: EMBL / AI639196
  ref <309>: DATABASE ENTRY DATE: 2000-03-04
ttcttgccccaatctctagccatacaaaaggctaaatggcaaagaatacacactcttgtactcatggaaattctgcttttgtgggaaacattctgttcaaatggaaagcctcccaagaattaacctcagtgttctgcctcagatctttttccccagatgtaagagtagccctaggctccttctatatcacgtgcctcagttgtcctgggacgggagtctgtcaggaacaaaacctactttgaatgccataatggctttaactatgtcaatattcacagtcctctacccggaagatggtaagggcagagaaggagacagagaagattatccatgcaatctgctaacaatt

SEQ ID NO: 7402 - protein, 493 aa, Rattus norvegicus
  ref <308>: DATABASE ACCESSION NUMBER: Refseq / NP_076447
  ref <309>: DATABASE ENTRY DATE: 2001-02-21
MQWIRGGSGMLITGDSIVSAEAVWDHVTMANRGVAFKAGDVIKVLDASNKDWWWGQIDDEEGWFPASFVRLWVNQEDGVEEGPSDVQNGHLDPNSDCLCLGRPLQNRDQMRANVINEIMSTERHYIKHLKDICEGYLKQCRKRRDMFSDEQLKVIFGNIEDIYRFQMGFVRDLEKQYNNDDPHLSEIGPCFLEHQDGFWIYSEYCNNHLDACMELSKLMKDSRYQHFFEACRLLQQMIDIAIDGFLLTPVQKICKYPLQLAELLKYTAQDHSDYRYVAAALAVMRNVTQQINERKRRLENIDKIAQWQASVLDWEGDDILDRSSELIYTGEMAWIYQPYGRNQQRVFFLFDHQMVLCKKDLIRRDILYYKGRIDMDKYEVIDIEDGRDDDFNVSMKNAFKLHNKETEEVHLFFAKKLEEKIRWLRAFREERKMVQEDEKIGFEISENQKRQAAMTVRKASKQKGRVGEEENQSLELKRACEVLQRLWSPGKKS

SEQ ID NO: 7403 - DNA, 5413 bp, Homo sapiens
  ref <308>: DATABASE ACCESSION NUMBER: EMBL / AB007884
  ref <309>: DATABASE ENTRY DATE: 1999-01-11
gaagagggatagggccagcaaggcagggatcgaacgagtgtctggcagccgggagcccagcgaagagagcgagcaagcttaggaaaacgagcgaagtaaagggagtaggggagactgagactgaccggtagccaggcaggcggacggacgcacgcccggacagactgagcaggcgccggagaaccactcacaggttccccccgcctttccctttgaaagctaggattttgcctttcccgtggcgcccgagagagaatgctggactctgccgacttcagcgcaagctaagatttctcagctagggacaaacgatcagcccaatcctgagaaggggggaaccaagcaccccgtccccatccccctcccctcccccgactaaactcgggcgccaaacccagcccttctctaaccaccctacttcctcctctcctttctagcatggtggctgtatggacagtctgacagaacagagactgacatctcccaatctgccggccccccacctggaacactacagtgttctgcattgcaccatgaccctggatgtgcaaactgtagtcgtttttgccgtgattgtagtcctcctgcttgtcaatgtcatactcatgtttttcctgggaacgcgctgaatggagtccagccacctgagctgtcgcgaactctcgctttgatttcatcccgagagccaccgagaaaaaaaaaaaatcacagacagagacagggaaagagagagaaagaacaagctttcttactcaggggggaaaacgttttgagcttcaacatggcctcgctgtgatatgtatgacgttgctgatcactggagattccatcgttagtgctgaggcagtatgggatcacgtcaccatggccaaccgggagttggcatttaaagctggcgacgtcatcaaagtcttggatgcttccaacaaggattggtggtggggccagatcgacgatgaggagggatggtttcctgccagctttgtgaggctctgggtgaaccaggaggatgaggtggaggaggggcccagcgatgtgcagaacggacacctggaccccaattcagactgcctctgtctggggcggccactacagaaccgggaccagatgcgggccaatgtcatcaatgagataatgagcactgagcgtcactacatcaagcacctcaaggatatttgtgagggctatctgaagcagtgccggaagagaagggacatgttcagtgacgagcaactgaaggtaatctttgggaacattgaagatatctacagatttcagatgggctttgtgagagacctggagaaacagtataacaatgatgacccccacctcagcgagataggaccctgcttcctagagcaccaagatggattctggatatactctgagtattgtaacaaccacctggatgcttgcatggagctctccaaactgatgaaggacagccgctaccagcacttctttgaggcctgtcgcctcttgcagcagatgattgacattgctatcgatggtttccttttgactccagtgcagaagatctgcaagtatcccttacagttggctgagctcctaaagtatactgcccaagaccacagtgactacaggtatgtggcagctgctttggctgtcatgagaaatgtgactcagcagatcaacgaacgcaagcgacgtttagagaatattgacaagattgctcagtggcaggcttctgtcctagactgggagggcgaggacatcctagacaggagctcggagctgatctacactggggagatggcctggatctaccagccctacggccgcaaccagcagcgggtcttcttcctgtttgaccaccagatggtcctctgcaagaaggacctaatccggagagacatcctgtactacaaaggccgcattgacatggataaatatgaggtagttgacattgaggatggcagagatgatgacttcaatgtcagcatgaagaatgcctttaagcttcacaacaaggagactgaggagatacatctgttctttgccaagaagctggaggaaaaaatacgctggctcagggctttcagagaagagaggaaaatggtacaggaagatgaaaaaattggctttgaaatttctgaaaaccagaagaggcaggctgcaatgactgtgagaaaagtccctaagcaaaaaggtgtcaactctgcccgctcagttcctccttcctacccaccaccgcaggacccgttaaaccacggccagtacctggtccccgacggcatcgctcagtcgcaggtctttgagttcaccgaacccaagcgcagccagtcaccattctggcaaaacttcagcaggttaacccccttcaaaaaatgatacctacagggaggcagataattttaaaataaagtaaataaaattatatttatagatggaccttttttcggagaagcactgttgaaatttatacacacacacacacacagagacccttgagtacacatacacacacacacacacagacacacacacacacacacacacacacacacacacagagagataaggaacaaaagtgttttctgttgttttggggaagtgaaatatgtggttggtaggaagaggtaccaatgacttccaaacatgtgattccgtcttaaaagttttccatttttaccctgtcccccttccctttgctttcagaagttgacatttctattcattgcttttcttgttaagataatctctttactcccctgtgagtgattcactgccttgtcattattacgatagatgtgtttgtattgttttttttctgatgatactgatgttgatgaatttttaattttatttgatgtggtagagttgggaggtttcagggttttttcccctcttttactttccattgaggaagggaatgagctcctttctcctctccttcagccaatcattatcaaatgttccttcagccctgcagttgccccaaataaccttttttcagcatcctctgtcctcagtcatgccagtctggacatgctctgttgtgccctgtgacaaaactgctcagtattcctattgcttttactgtgttttaggtactgtgaagggatcaaaaaaccaaacagaagcaagggagtatcagactatgatgatgctggagtggacttctgttcagggaacattttgcattcaggctgtttcttctatcactggggtttcccatgttgcagcacttctgggtcgttgcaattttgcatctaggagttagtttgatcgagttattctcttttttcaagtcacttttgttataggtctccccctaggcctgtctctcccttagcccaaaagatctgaactggaagcagaggttgagattctgcctcccaggagagggatttacctgccccctagtaccagataggtttagggcagtgatctctacagcaatcagttcagtgtcctggttgtccctgctcccatttacagatgtttgggcagcattgatagaagtatggaggggttcaagacagagcccacctgatcaagatcatcagctaccttcaaattattgacctggacagggtccaagtctgatagtaaccttttacaagaaagaacagggatgggaatggaaagagatagccttgatccacagtattgtacctgcattttctaccaccctaaaattgtgtgagacttctcccattgttaacagattgcatggacaatcttccctggcttctttctttccctctctctttcttctttctcctgccatcctagcacaggaggatttttggtattgatatagttaaagctgttctggcactcaaagaaggccgtgtttccaacatcctctcatcccaggacatttggggcaagtgagttaggggcccaggggcaattttccctctgaataacgtgtctgaggcagggatgctaccctcaggctcgcttttggccagctttttgcttgggaaaatctaacttctttcacaaggaggcaggcttcctatggatgttggagtacctgtttttcctccacacatagcccttttcatggatagaccttgaacaacaaaaagggtataagggaataaggatgaactctgctgtgaagagcaagccactgtagtgaggaatgtggagactgggagtctgtcctaaaccccatgggagaagacttcatcatgacaggacttcagcttaccaagcagcagccatagctgtgtggaggcttcagcatagctagcatgtttactgctctatgcctcctgatccagaccaggcattgcccagcctgggaatcttttctttgtgggaatcaaattacaagctatttaagtttatattccatcacaaccaagtcagacttgtattataagtcaaggatgagcctgatctggggagagggccggggctcgggactggccaccactgttcagcacatgacctaactacgtaagcctctttggcaagggtcctggtgcccagcacccaggctaaaatatcctgtctggcagagtgttttggtagctatgcaggcctcccttcagtgtacctctttttccaacttctcactcctccttactaggcttggccttgacatgcttcttcgagggttggcagcacaccgggaggggatgcttggacaagtttctgggcctacatttcttgactaggccctctcatttcctccctccttggggcttctgcccagggctccaggatcagggatattacttctcaacccgcacttctcctctactgaacccactggcatcacctgatgccactaatttgtgaacaacaagaaatcatttccccattggttggagtattccctcagcctatagcatcaaagcagaccagtggccaacagccccaaggggagcccaattaaatacctgggttcagtatcctaacctgttatgtcctgacagcaatggtaaccccagtaattctgtaatgttgtaatttccgcatggccctgagctcccttttcctcaactcagtgaggccaggatttgctctccaaaaggctttgctagtgtgttcaatgggacctgctgtggggagtcctaagacagacatctaattattctctctttttccccccctctctatgtgtatatttctaatggatctataagaacagcaacaagagagttctaacaattctagtgtgaagccaaatagtgatcttttagtgctttggggatggggtgggctggggtggatggatgggcaacagtgactttgattacccttgctgctctgcatttgccagtttattcttttgtttcttttatctgactgactctgtcaaacaagtgtcaaagttgtgtgttaaaaaatgtttaacaaaaaaaaatgttgtaatgacacaaagccttatgaaaatatttatggagttcaataaaagaagtaaaaagac

SEQ ID NO: 7404 - protein, 516 aa, Homo sapiens
  ref <308>: DATABASE ACCESSION NUMBER: Refseq / NP_056000
  ref <309>: DATABASE ENTRY DATE: 2002-11-05
MTLLITGDSIVSAEAVWDHVTMANRELAFKAGDVIKVLDASNKDWWWGQIDDEEGWFPASFVRLWVNQEDEVEEGPSDVQNGHLDPNSDCLCLGRPLQNRDQMRANVINEIMSTERHYIKHLKDICEGYLKQCRKRRDMFSDEQLKVIFGNIEDIYRFQMGFVRDLEKQYNNDDPHLSEIGPCFLEHQDGFWIYSEYCNNHLDACMELSKLMKDSRYQHFFEACRLLQQMIDIAIDGFLLTPVQKICKYPLQLAELLKYTAQDHSDYRYVAAALAVMRNVTQQINERKRRLENIDKIAQWQASVLDWEGEDILDRSSELIYTGEMAWIYQPYGRNQQRVFFLFDHQMVLCKKDLIRRDILYYKGRIDMDKYEVVDIEDGRDDDFNVSMKNAFKLHNKETEEIHLFFAKKLEEKIRWLRAFREERKMVQEDEKIGFEISENQKRQAAMTVRKVPKQKGVNSARSVPPSYPPPQDPLNHGQYLVPDGIAQSQVFEFTEPKRSQSPFWQNFSRLTPFKK

SEQ ID NO: 7405 - DNA, 432 bp, Rattus norvegicus
  ref <308>: DATABASE ACCESSION NUMBER: EMBL / AI639209
  ref <309>: DATABASE ENTRY DATE: 2000-03-04
ttgtacttagaagaaaaaaatcaaatagtaaccatacacttgaggaataaaatgttacacaaaaagactttcctcagtcttatttgtgagaggaaaatggaaacaattgtcctgtcaaatgatgacacattaaggtaaaacattgtagcatttttgtaaagaagaattcaatctggtaaaaggtgagaggcttgacaaccatacatttgtgccttggtttttgagaaggatttgctatagtctaggctggacagacaactcaatcctggatcactggagttatgaagtttgtgcctctgtgtttttctggtgctgagactcacatatgctctacacaaagctttacttcgataacattagttttaaaggctagaacatgaacaacataaatgctatgtttcccaacatttaaggaatatataaaaattactt

SEQ ID NO: 7406 - DNA, 373 bp, Rattus norvegicus
  ref <308>: DATABASE ACCESSION NUMBER: EMBL / AI639215
  ref <309>: DATABASE ENTRY DATE: 2000-03-04
ttgcagcaagactaatacactaaggttcaaaaaggaaattgtgtaaataactcagatccaaggccagccctgcttgtgtccagaacggagtctccctccaggaccactgccagcaggctttccccgggccaaaggactcagcaaggaaaacaacgctaggcatggtagaacgcccttgcaatgtcagcaagaggaggctgaggcaggagaatctcgagtcaagaaacagccagtaccaagtggcaaagtacttctcagatggaagcaaggaacttaagtaaaacatggagctgctggccagagcccagcgcatgtagggacactcagtgcacttgaggagaaaagtacccatgtgccactcctgctgtgatgg

SEQ ID NO: 7407 - DNA, 508 bp, Rattus norvegicus
  misc_feature (1)..(508): n=a, c, g or t
  ref <308>: DATABASE ACCESSION NUMBER: EMBL / AI639236
  ref <309>: DATABASE ENTRY DATE: 2000-03-04
ttnaaacccactcagggtttcgtgtacccttggctgtcctagaacttgctttgtagaccaggctggctttcaactcagagaaatctacctgcctctgtctttggagtgctgggattaaaggctatgccaccatatctagcaatttgtttttcttttaggtagaaaattgaaggtctgagaaaagaacactttactcagtagttcaccagtccataaactggtcaactaaggaagagcatcagggggctccgaggtcctaacccaggttcttatggacagtctcagtaactctgggtttcagtcacaaaagggtccttcagtgtctctggcacgtggcaggactggaagaataagcagatctgtcatttttttatttcgggtgagcttaggatagaaacaataaacaaacatctacagccattcaggagcaaagttatagagatgaaaaatgcctgctgtgggggcactaagtctctccctttatcattaaaaatgtacaataatcata

SEQ ID NO: 7408 - protein, 56 aa, Rattus norvegicus
  ref <308>: DATABASE ACCESSION NUMBER: SWISS-Prot / AAF69479
  ref <309>: DATABASE ENTRY DATE: 2001-12-01
EVCHRGAHGAIHPGRRVHLQPLHESETVQQHAGETDPVTTMRAIRREKDQFKVPRD

SEQ ID NO: 7409 - DNA, 536 bp, Rattus norvegicus
  ref <308>: DATABASE ACCESSION NUMBER: EMBL / AI639245
  ref <309>: DATABASE ENTRY DATE: 2000-03-04
ttcaggcactgctttttttaaagacagggtagaccacgctggcctcgaactctcagggattcacctgactctgtctcctaagtgctgggatcaaaggcgtgcgccaccaccgcttggctcaattcttcaactttatgagagattctctcattattttataaggaacaacaagggagttaatgcctaagccaagattctcttaaactaaatactctggaagtctctataccacccactgcctgtcacctggaccattctcaaaatggctgtcctacatgtaaatgagcgtgactgtacacgcaacgacttgatctacaagtattcctttctgcgcaagagaccgagaacaaggaaagtcagacacgcattttgaaacaaacaaacaaacaaaaatgattgtttccaaatgttctaggatgtgcttggaccttcaaataaatagggcccaagttcacataacttaagagtgaatgtggggtggaggagacagctcagcccagtacaatccccaccactagggcaatagagaacatgaa

SEQ ID NO: 7410 - DNA, 487 bp, Rattus norvegicus
  ref <308>: DATABASE ACCESSION NUMBER: EMBL / AI639255
  ref <309>: DATABASE ENTRY DATE: 2000-03-04
ttgattgattgattgatttatttatttatttatttatttatttatttatttatttatttatgagacttggtctcactgtgtccatctggctgtcctggagctcgctctgtcgaccaggctggcctccgagagctaggactaaaggtgggtgccagcttcccacttgcttgccgtctgtattccatctttagtattcgttaaggtcgtgagttgtatgaaaaaatatataatttaattctcaaaccatagctttgtttttctttttcctaaaatacactgtaaaaagaatcaaaagcatatattttgtagcacacagaggacgaatgttctggagcgaaggcagagtattacccttgtataaaaatcacctataaaaaaaaataaaaaaaaataaatcaccttatcccagagaagagaaaggagacagtgagagcaagcgtataggaaaccagcaaaacgttctgggagaactgcttccgctctgggg

SEQ ID NO: 7411 - DNA, 487 bp, Rattus norvegicus; identical to SEQ ID NO: 7410
  ref <308>: DATABASE ACCESSION NUMBER: EMBL / AI639255
  ref <309>: DATABASE ENTRY DATE: 2000-03-04

SEQ ID NO: 7412 - DNA, 487 bp, Rattus norvegicus; identical to SEQ ID NO: 7410
  ref <308>: DATABASE ACCESSION NUMBER: EMBL / AI639255
  ref <309>: DATABASE ENTRY DATE: 2000-03-04

SEQ ID NO: 7413 - DNA, 487 bp, Rattus norvegicus; identical to SEQ ID NO: 7410
  ref <308>: DATABASE ACCESSION NUMBER: EMBL / AI639255
  ref <309>: DATABASE ENTRY DATE: 2000-03-04

SEQ ID NO: 7414 - DNA, 481 bp, Rattus norvegicus
  ref <308>: DATABASE ACCESSION NUMBER: EMBL / AI639256
  ref <309>: DATABASE ENTRY DATE: 2000-03-04
ttccaaggcaagtaaagttgattttaatattgttctcttacaggcagattaaacaaacaggcaaagtacatacatagtacatggcagtcttaagtgacctcaaggtgtattattaactcagactgtgctagcaaaaattccagtctcttaggatgtaagatatttttatcacaatgcattgccacagttcctcctttttgttttattaaaaaaaccatgtgggtggagggggtcactggtgaagaactaagaactgatcaagcatggtactgtagggatagcctgaatgcaccacttcattctaggtgatccttctgaaaagttggcaaaggcataacaggacttgagaaggaaaacagaatgcattacctgtagaagatcacacttaagatttattccctgtactaacttaaagaatgaattcatcttctccaaccttcccctcccaagaagattcactggaatgacttacaggctgcag

SEQ ID NO: 7415 - DNA, 481 bp, Rattus norvegicus; identical to SEQ ID NO: 7414
  ref <308>: DATABASE ACCESSION NUMBER: EMBL / AI639256
  ref <309>: DATABASE ENTRY DATE: 2000-03-04

SEQ ID NO: 7416 - DNA, 343 bp, Rattus norvegicus
  ref <308>: DATABASE ACCESSION NUMBER: EMBL / AI639264
  ref <309>: DATABASE ENTRY DATE: 2000-03-04
ttaatggggaaataatggacctttaattgattactaaataaaacctattgcctgtaagttttaaaatttttttattttttaatgactaacttttggcaaatggaccctcccctggattttgctcgttaaatccagttggtggttttgaacaattcgggatgccagtaatttttgaagccccatggaactttttgccagcctgcccaaatcttgtttgttggaccttgggtttgaggacctgaaaaatggggcggactacagtttgatgctgtaggaaatccgatttcagtttcagtgtcttgggaaagtgcaaaagcaaggcaaaaggtcttatccaggtaag

SEQ ID NO: 7417 - DNA, 314 bp, Rattus norvegicus
  ref <308>: DATABASE ACCESSION NUMBER: EMBL / AI639282
  ref <309>: DATABASE ENTRY DATE: 2000-03-04
ttggggaaaagggaagtttattatttacatgtttaaaatgggcataaagatggggcctggcacaacctgacagctttgctcaatcgctgatgatgagctcatccaccccccaatccttatagcttccatttggcaggtaacggcgaatgatgatggggatcttccgggccttgagttccttcatggcgatgagcaaagggtttgtttccccctccaggttcaccattactggggcacacattgtaatttggaaagcccgggtgcccaacacttgggctcgctcgtacttgggcatgtatggaggggggaaaccc

SEQ ID NO: 7418 - protein, 127 aa, Rattus norvegicus; identical to SEQ ID NO: 298
  ref <308>: DATABASE ACCESSION NUMBER: Refseq / NP_112625
  ref <309>: DATABASE ENTRY DATE: 2001-04-25

SEQ ID NO: 7419 - DNA, 528 bp, Rattus norvegicus
  ref <308>: DATABASE ACCESSION NUMBER: EMBL / AI639285
  ref <309>: DATABASE ENTRY DATE: 2000-03-04
ttcctatcttctcattgattcgtgaatttctattaaagataaatatcattaacaaatcacaaacacgtacacccgctcccaaaacacagtatagtcccctgtagaacctcctccacatacaggcaagtgacaattccaaactccagtgacatagacattgaattttttatcctttaggaaaacaaatttgaccacaaagtgtccacagcttcggatgagtcgtttgcagtcatggaaggcattttttttaatgtgaaatgaatcagctctcctcctctgatagttccctgaagcagcttctgggctcccctctgtgtgggacagaggggtggtactggatgacatccagggcagggtaatgtgagaagggtccaatccagtgtgcgcatcaccctgagcatctggtttagcttcatttctgttaccatgacaaagtcaacttgtgggagagagggtttatttggctcacaagtccaggttgtggtgtgctattgcaggcctttcaaggcaggaacatgaagttgatgg

SEQ ID NO: 7420 - DNA, 381 bp, Rattus norvegicus
  ref <308>: DATABASE ACCESSION NUMBER: EMBL / AI639315
  ref <309>: DATABASE ENTRY DATE: 2000-03-04
ttattctgttaaattaaagttttatttaaaaaaaaatacacattataaaattgagatacagaaataaaagcgtaacacttacctactgtatataaactaaataaaccacctcctctctattcccatccttcagaggttatcattgctaatactttaatgtatattctttcatatctttttgaaaactttgcacatacaagtatatataaacatatcatatacatccagtttttgagtcttacataaactgaatcatacatgtctattatttgactcaatttctgtcttcattcaacattctgaaaacttcttaaacaaatctaatcctcgagactttatattcttaaatataacatttactcactggtatctatctctctc

SEQ ID NO: 7421 - DNA, 532 bp, Rattus norvegicus
  ref <308>: DATABASE ACCESSION NUMBER: EMBL / AI639317
  ref <309>: DATABASE ENTRY DATE: 2000-03-04
ttgtagacaaccaaaccctttattgtctaagttacattagacgcaacactgtaaaaaccccatcaggaaacaaggagacagaagattcgtagaggtagtaggaagtctgtaacagtcagaaatgtggaaattaccacaggggcagcaggggttgggggacaaatcaaaacagattggctaaataaataaggaaacaaatcatattaaatactattgttgagctgacataaacaaattaacaaagcagtccaatactgatggccagtgagacagaaaagccatgcaccaggccagcacgcagctggtcccagagaggcgagcactggggacctcgtggccttgtggctacaggaaactgtatctctgtgcttcgaggggcaggtcgtcctgagattggctactctccaggcaaacggtcagctgcagggacctcaggcaccccttccccctgccagaccctgggagggagactcaccggaagacagaccttccagttctcaatgccacgtgcagcttcagacacagtaaaaac

SEQ ID NO: 7422 - DNA, 502 bp, Rattus norvegicus
  misc_feature (1)..(502): n=a, c, g or t
  ref <308>: DATABASE ACCESSION NUMBER: EMBL / AI639318
  ref <309>: DATABASE ENTRY DATE: 2000-03-04
ttatgatttataattttatttacacagctgaaatcatttccttagtcaccttgattacaaaaacaagtcaacatggtacggtttaatagcctttcttaaatggatcttacaaattttagtggctgacagattgctacttaatactcagtaatatttaatatgtggtaacttctgcatatatgtagatgaaaaatctgtctgatagtgctaacaggtataggtacttttaacaagtatgggtacttttgtatctcaggaacagacagacaaatggttattagtcaagtgttaattccccacagatgggtcagctatttagacatggagctcagcccttgaagctaaacctgctgtagcaatactgtgtaggcatgttgagntaattgaacttatctgtatttctgcatttaataaaactattattaagcacatctgaaaaacataatggatcccatgactagagatatttatattaaaaaaaatcttaatacagtgtatttga

SEQ ID NO: 7423 - protein, 1116 aa, Rattus norvegicus
  misc_feature (1)..(1116): Xaa=Unknown amino acid
  ref <308>: DATABASE ACCESSION NUMBER: SWISS-Prot / CAC10568
  ref <309>: DATABASE ENTRY DATE: 2003-02-01
MAKARSGAAGLGLKLFLLLPLLGEAPLGLCFSRDAYWERLYVDQPAGTPLLYVHALRDAPGEVPSFRLGQYLYGVYRTRLHENDWIHIDAGTGLLYLNQSLDHSSWEQLSIRNGGFPLLTVFLQVFLGSTAQREGECHWPGCARVYFSFINDTFPNCSSFKARDLCTPETGVSFRIRENRPPGTFYQFRMLPVQFLCPNISVKYKLLEGDGLPFRCDPDCLEVSTRWALDRELQEKYVLEAECAVAGPGANKEKVAVSFPVTVYDDEDDSPPTFSGGVGTASAVVEFKRKEGTVVATLQVFDADVVPASGELVRRYTSTLLSGDSWAQQTFRVEHTPNETLVQSNNNSVRATMHNYRLVLNRSLSISESRVLQLVVLVNDSDFQGPGSGFLFLHFNVSVLPVTLNLPMAYSFPVNRRARRYAQIGKVCVENCQEFSGVSIQYKLQPSSTNCSALGVVTSTEDTSGTLYVNDTEALRRPECTELQYTVVATDRQTRRQTQASLVVTVEGTYIAEEVGCPKSCAVNKRRPECEECGGLGSPTGRCEWRQGDGKGTTRNFSTCSPSTRTCPDGHCDALESRDINICPQDCLRGPIVGGHERGERQGIKAGYGICNCFPDEKKCFCEPEDSQAPLCDELCRTVITAAVLFSFIISVLLSTFCIHRYHKHXXKPPIXSAEMTFCRPAQGFPISYSSSGXRRPSLDSMENQVSVDSFKIPEDPKWEFPRKNLVLGKTLGEGEFGKVVKATAFRLKDRAGYTTVAVKMLKENASQSELRDLLSEFNLLKQVNHPHVIKLYGACSQDGPLLLIVEYAKYGSLRGFLRDSRKIGPAYVSSGGSRNSSSLDHPDERVLTMGDLISFAWQISRGMQYLAEMKLVHRDLAARNILVAEGRKMKISDFGLSRDVYEEDSYVKKSXGRIPVNWMAINSLSDHFYTTQSDVWSFGVLLWEIVTLGGNPYPGIPPERLFNLLKTGHRMERPNNCSEEMYRLMLQCWKQEPDKRPVFADISKDLEKMMVKSRDYLDLAASTPSDSLLYDDGLSEEETPLVDCNSAPLPRSLPSTWIENKLYGMSDPNWPGESPVPLTRADGTSTGFPRYANDSVYANWMVSPSAAKLMDTFDS

SEQ ID NO: 7424 - DNA, 7005 bp, Homo sapiens
  ref <308>: DATABASE ACCESSION NUMBER: Refseq / NM_020630
  ref <309>: DATABASE ENTRY DATE: 2002-11-05
gcttcagtcccgcgaccgaagcagggcgcgcagcagcgctgagtgccccggaacgtgcgtcgcgcccccagtgtccgtcgcgtccgccgcgccccgggcggggatggggcggccagactgagcgccgcacccgccatccagacccgccggccctagccgcagtccctccagccgtggccccagcgcgcacgggcgatggcgaaggcgacgtccggtgccgcggggctgcgtctgctgttgctgctgctgctgccgctgctaggcaaagtggcattgggcctctacttctcgagggatgcttactgggagaagctgtatgtggaccaggcagccggcacgcccttgctgtacgtccatgccctgcgggacgcccctgaggaggtgcccagcttccgcctgggccagcatctctacggcacgtaccgcacacggctgcatgagaacaactggatctgcatccaggaggacaccggcctcctctaccttaaccggagcctggaccatagctcctgggagaagctcagtgtccgcaaccgcggctttcccctgctcaccgtctacctcaaggtcttcctgtcacccacatcccttcgtgagggcgagtgccagtggccaggctgtgcccgcgtatacttctccttcttcaacacctcctttccagcctgcagctccctcaagccccgggagctctgcttcccagagacaaggccctccttccgcattcgggagaaccgacccccaggcaccttccaccagttccgcctgctgcctgtgcagttcttgtgccccaacatcagcgtggcctacaggctcctggagggtgagggtctgcccttccgctgcgccccggacagcctggaggtgagcacgcgctgggccctggaccgcgagcagcgggagaagtacgagctggtggccgtgtgcaccgtgcacgccggcgcgcgcgaggaggtggtgatggtgcccttcccggtgaccgtgtacgacgaggacgactcggcgcccaccttccccgcgggcgtcgacaccgccagcgccgtggtggagttcaagcggaaggaggacaccgtggtggccacgctgcgtgtcttcgatgcagacgtggtacctgcatcaggggagctggtgaggcggtacacaagcacgctgctccccggggacacctgggcccagcagaccttccgggtggaacactggcccaacgagacctcggtccaggccaacggcagcttcgtgcgggcgaccgtacatgactataggctggttctcaaccggaacctctccatctcggagaaccgcaccatgcagctggcggtgctggtcaatgactcagacttccagggcccaggagcgggcgtcctcttgctccacttcaacgtgtcggtgctgccggtcagcctgcacctgcccagtacctactccctctccgtgagcaggagggctcgccgatttgcccagatcgggaaagtctgtgtggaaaactgccaggcattcagtggcatcaacgtccagtacaagctgcattcctctggtgccaactgcagcacgctaggggtggtcacctcagccgaggacacctcggggatcctgtttgtgaatgacaccaaggccctgcggcggcccaagtgtgccgaacttcactacatggtggtggccaccgaccagcagacctctaggcaggcccaggcccagctgcttgtaacagtggaggggtcatatgtggccgaggaggcgggctgccccctgtcctgtgcagtcagcaagagacggctggagtgtgaggagtgtggcggcctgggctccccaacaggcaggtgtgagtggaggcaaggagatggcaaagggatcaccaggaacttctccacctgctctcccagcaccaagacctgccccgacggccactgcgatgttgtggagacccaagacatcaacatttgccctcaggactgcctccggggcagcattgttgggggacacgagcctggggagccccgggggattaaagctggctatggcacctgcaactgcttccctgaggaggagaagtgcttctgcgagcccgaagacatccaggatccactgtgcgacgagctgtgccgcacggtgatcgcagccgctgtcctcttctccttcatcgtctcggtgctgctgtctgccttctgcatccactgctaccacaagtttgcccacaagccacccatctcctcagctgagatgaccttccggaggcccgcccaggccttcccggtcagctactcctcttccggtgcccgccggccctcgctggactccatggagaaccaggtctccgtggatgccttcaagatcctggaggatccaaagtgggaattccctcggaagaacttggttcttggaaaaactctaggagaaggcgaatttggaaaagtggtcaaggcaacggccttccatctgaaaggcagagcagggtacaccacggtggccgtgaagatgctgaaagagaacgcctccccgagtgagctgcgagacctgctgtcagagttcaacgtcctgaagcaggtcaaccacccacatgtcatcaaattgtatggggcctgcagccaggatggcccgctcctcctcatcgtggagtacgccaaatacggctccctgcggggcttcctccgcgagagccgcaaagtggggcctggctacctgggcagtggaggcagccgcaactccagctccctggaccacccggatgagcgggccctcaccatgggcgacctcatctcatttgcctggcagatctcacaggggatgcagtatctggccgagatgaagctcgttcatcgggacttggcagccagaaacatcctggtagctgaggggcggaagatgaagatttcggatttcggcttgtcccgagatgtttatgaagaggattcctacgtgaagaggagccagggtcggattccagttaaatggatggcaattgaatccctttttgatcatatctacaccacgcaaagtgatgtatggtcttttggtgtcctgctgtgggagatcgtgaccctagggggaaacccctatcctgggattcctcctgagcggctcttcaaccttctgaagaccggccaccggatggagaggccagacaactgcagcgaggagatgtaccgcctgatgctgcaatgctggaagcaggagccggacaaaaggccggtgtttgcggacatcagcaaagacctggagaagatgatggttaagaggagagactacttggaccttgcggcgtccactccatctgactccctgatttatgacgacggcctctcagaggaggagacaccgctggtggactgtaataatgcccccctccctcgagccctcccttccacatggattgaaaacaaactctatggtagaatttcccatgcatttactagattctagcaccgctgtcccctttgcactatccttcctctctgtgatgctttttaaaaatgtttctggtctgaacaaaaccaaagtctgctctgaacctttttatttgtaaatgtctgactttgcatccagtttacatttaggcattattgcaactatgtttttctaaaaggatgtgaaaataagtgtaattaccacattgcccagcaacttaggatggtagaggaaaaaacagatcagggcggaactctcaggggagaccaagaacaggttgaataaggcgcttctggggtgggaatcaagtcatagtacttctactttaactaagtggataaatatacaaatctggggaggtattcagttgagaaaggagccaccagcaccactcagcctgcactgggagcacagccaggttcccccagacccctcctgggcaggcaggtgcctctcagaggccacccggcactggcgagcagccactggccaagcctcagccccagtcccagccacatgtcctccatcaggggtagcgaggttgcaggagctggctggccctgggaggacgcacccccactgctgttttcacatcctttcccttacccaccttcaggacggttgtcacttatgaagtcagtgctaaagctggagcagttgctttttgaaagaacatggtctgtggtgctgtggtcttacaatggacagtaaatatggttcttgccaaaactccttcttttgtctttgattaaatactagaaattttttctgtttcctaacttcatcattgattgtttgaaatcttggagtttcaagcatttttttcaagctgagacggttccttttgcatgcctcctgactcactgactcctcactggctttgtgtctagtgccacactccatttgtgctgacgatgctatgaggctggcccgtgtgcaccctcgatttggaaggtcctcttctccgttgtaggctcagacaacagacgagtgcctcctttacgttagagaatgttttatagaacgtttccgctgcagtaagccattgagtgcagcagtgtgctgttgccctacactgccttagaaaaagagttaagcagttcgacaaatatacatcagattagagagtctcaagttcataaaagtcaaaattggtagtgtctgttaagttacatttaccaagagagcacatgatatttcccctaactataacagtgtttttggaaacctggaacacaaaaccattaatataattggcacagaaaccacgagtttggtttgaacatcaaagggagttttgccaaggccttactgtctgcacttgaagttttggttcttcagtgcagaacaaatgatctgttttcatttttaggcatgtcagacccgaactggcctggagagagtcctgtaccactcacgagagctgatggcactaacactgggtttccaagatatccaaatgatagtgtatatgctaactggatgctttcaccctcagcggcaaaattaatggacacgtttgatagttaacatttctttgtgaaaggtaatggactcacaaggggaagaaacatgctgagaatggaaagtctaccggccctttctttgtgaacgtcacattggccgagccgtgttcagttcccaggtggcagactcgtttttggtagtttgttttaacttccaaggtggttttacttctgatagccggtgattttccctcctagcagacatgccacaccgggtaagagctctgagtcttagtggttaagcattcctttctcttcagtgcccagcagcacccagtgttggtctgtgtccatcagtgaccaccaacattctgtgttcacatgtgtgggtccaacacttactacctggtgtatgaaattggacctgaactgttggatttttctagttgccgccaaacaaggcaaaaaaatttaaacatgaagcacacacacaaaaaaggcagtaggaaaaatgctggccctgatgacctgtccttattcagaatgagagactgcggggggggcctgggggtagtgtcaatgcccctccagggctggaggggaagaggggccccgaggatgggcctgggctcagcattcgagatcttgagaatgattttttttaaatcatgcaacctttccttaggaagacatttggttttcatcatgattaagatgattcctagatttagcacaatggagagattccatgccatctttactatgtggatggtggtatcagggaagagggctcacaagacacatttgtcccccgggcccaccacatcatcctcacgtgttcggtactgagcagccactacccctgatgagaacagtatgaagaaagggggctgttggagtcccagaattgctgacagcagaggctttgctgctgtgaatcccacctgccaccagcctgcagcacaccccacagccaagtagaggcgaaagcagtggctcatcctacctgttaggagcaggtagggcttgtactcactttaatttgaatcttatcaacttactcataaagggacaggctagctagctgtgttagaagtagcaatgacaatgaccaaggactgctacacctctgattacaattctgatgtgaaaaagatggtgtttggctcttatagagcctgtgtgaaaggcccatggatcagctcttcctgtgtttgtaatttaatgctgctacaagatgtttctgtttcttagattctgaccatgactcataagcttcttgtcattcttcattgcttgtttgtggtcacagatgcacaacactcctccagtcttgtgggggcagcttttgggaagtctcagcagctcttctggctgtgttgtcagcactgtaacttcgcagaaaagagtcggattaccaaaacactgcctgctcttcagacttaaagcactgataggacttaaaatagtctcattcaaatactgtattttatataggcatttcacaaaaacagcaaaattgtggcattttgtgaggccaaggcttggatgcgtgtgtaatagagccttgtggtgtgtgcgcacacacccagagggagagtttgaaaaatgcttattggacacgtaacctggctctaatttgggctgtttttcagatacactgtgataagttcttttacaaatatctatagacatggtaaacttttggttttcagatatgcttaatgatagtcttactaaatgcagaaataagaataaactttctcaaattattaaaaatgcctacacagtaagtgtgaattgctgcaacaggtttgttctcaggagggtaagaactccaggtctaaacagctgacccagtgatggggaatttatccttgaccaatttatccttgaccaataacctaattgtctattcctgagttataaaagtccccatccttattagctctactggaattttcatacacgtaaatgcagaagttactaagtattaagtattactgagtattaagtagtaatctgtcagttattaaaatttgtaaaatctatttatgaaaggtcattaaaccagatcatgttcctttttttgtaatcaaggtgactaagaaaatcagttgtgtaaataaaatcatgtatc

SEQ ID NO: 7425 - protein, 1114 aa, Homo sapiens
  ref <308>: DATABASE ACCESSION NUMBER: SWISS-Prot / P07949
  ref <309>: DATABASE ENTRY DATE: 2002-06-15
MAKATSGAAGLRLLLLLLLPLLGKVALGLYFSRDAYWEKLYVDQAAGTPLLYVHALRDAPEEVPSFRLGQHLYGTYRTRLHENNWICIQEDTGLLYLNRSLDHSSWEKLSVRNRGFPLLTVYLKVFLSPTSLREGECQWPGCARVYFSFFNTSFPACSSLKPRELCFPETRPSFRIRENRPPGTFHQFRLLPVQFLCPNISVAYRLLEGEGLPFRCAPDSLEVSTRWALDREQREKYELVAVCTVHAGAREEVVMVPFPVTVYDEDDSAPTFPAGVDTASAVVEFKRKEDTVVATLRVFDADVVPASGELVRRYTSTLLPGDTWAQQTFRVEHWPNETSVQANGSFVRATVHDYRLVLNRNLSISENRTMQLAVLVNDSDFQGPGAGVLLLHFNVSVLPVSLHLPSTYSLSVSRRARRFAQIGKVCVENCQAFSGINVQYKLHSSGANCSTLGVVTSAEDTSGILFVNDTKALRRPKCAELHYMVVATDQQTSRQAQAQLLVTVEGSYVAEEAGCPLSCAVSKRRLECEECGGLGSPTGRCEWRQGDGKGITRNFSTCSPSTKTCPDGHCDVVETQDINICPQDCLRGSIVGGHEPGEPRGIKAGYGTCNCFPEEEKCFCEPEDIQDPLCDELCRTVIAAAVLFSFIVSVLLSAFCIHCYHKFAHKPPISSAEMTFRRPAQAFPVSYSSSGARRPSLDSMENQVSVDAFKILEDPKWEFPRKNLVLGKTLGEGEFGKVVKATAFHLKGRAGYTTVAVKMLKENASPSELRDLLSEFNVLKQVNHPHVIKLYGACSQDGPLLLIVEYAKYGSLRGFLRESRKVGPGYLGSGGSRNSSSLDHPDERALTMGDLISFAWQISQGMQYLAEMKLVHRDLAARNILVAEGRKMKISDFGLSRDVYEEDSYVKRSQGRIPVKWMAIESLFDHIYTTQSDVWSFGVLLWEIVTLGGNPYPGIPPERLFNLLKTGHRMERPDNCSEEMYRLMLQCWKQEPDKRPVFADISKDLEKMMVKRRDYLDLAASTPSDSLIYDDGLSEEETPLVDCNNAPLPRALPSTWIENKLYGMSDPNWPGESPVPLTRADGTNTGFPRYPNDSVYANWMLSPSAAKLMDTFDS

SEQ ID NO: 7426 - DNA, 322 bp, Rattus norvegicus
  ref <308>: DATABASE ACCESSION NUMBER: EMBL / AI639320
  ref <309>: DATABASE ENTRY DATE: 2000-03-04
ttattttttattggtggcctggccaaagcatcggtacaggctcagcaaaattctgatcagtaagttgaactccatttggattctctctagtgccaaggtaagagcagcataggcacatgcaagcagaattctagagtacacaaagcacaatgtacactggttaggttttatggattattagtttccagaggagcctgccacccacttcagtccatataatgtagtttaattattggcttcagaggaagtgtctgaagataggcaagttccatccatttggcttattcatctcgttggtcccacctttccatgcgtgtgggtg

SEQ ID NO: 7427 - DNA, 513 bp, Rattus norvegicus
  ref <308>: DATABASE ACCESSION NUMBER: EMBL / AI639324
  ref <309>: DATABASE ENTRY DATE: 2000-03-04
ttaaagtttttactaaatgtttattttatgttcaagataaagcctatacacaattgaatgtggaaataaataactagaaatgctctggaaactctatttgcccttcaaattcatttttttaaggtcatgaatttttatttaaatcaatatgccaaatataaacactaagaaaagaagaactacatcttagtacagaaacgtaatcttctctgactaagggtttagctggcattatgataacgaaaacacacaagatacaacactttagcaggctgactcagacggctctgctggagaagaaaaaggcacagactgaaggacaatggtgaagagcagaggacatgggctcagtcacctgacacagagaactcagtcaggacaagtgaacacaatcagtgctaaatgacttctttaaattaagatgtataaacataggctataaaggcattacttttggaagcatctttgcatatttcttctatatataaatctttgtatacaatttccatgttc

SEQ ID NO: 7428 - DNA, 2360 bp, Homo sapiens
  ref <308>: DATABASE ACCESSION NUMBER: EMBL / AF177339
  ref <309>: DATABASE ENTRY DATE: 2000-10-04
tgtcagtaagtggaaaaggcaagactccacttcgaaagaggtacaactcccatcagatgggccagtcgaagcagtttcccctcgaggaaagcagctgtgagaaaggctgtcaggtcaccagtgagcagatcaaagccgatatgaaagcagctagggatattcctgaaaagaaaaaaaacaaggatgtttatcccagctgcagcagcaccaccgccagcacagtgggaaactccagctcacacaacactgcttctcaaagccccgactttgtaaggacggtgaacagcggcggctcttccgagcctagccctacagaagtggatgtgtccaggcagtgtgcctgctcccccggtgggtcagaggactctgaggccatggaggagggagatgcagagagttctgtctgcccagatgcttgctgtcacaggccccaggaattcccaaaggagaactagcaggtgttctgatgaggaacgtccttcaaccagccgagcctgtgttgtgaatggcccggatggtacgagatccgccttttcctttaggactctgccacaaggggggtcttcaggcccagcacatgatgagaggactaatgggagtggctctggggctacaggtgaggacaggagggggagctcccagcctgagagttgtgacgtgcagtctaatgaagactaccctcggaggcccctaaccagggccaggagcagactgtcccatgtactgctggtatctgagtcagaagtagccaaaacaaagccacgtcacgccatgaaacggaagcggacagcagataaatccactagtacaagtgatcctgtgatcgaggatgaccatgtgcaggttcttgtattaaaatccaagaatcttgttggagtcactatgaccaattgtggaatcacagatctagtgctaaaagactgtccaaagatgatgttcatccatgctaccaggtgcagggtactaaaacatttaaaggtagaaaatgcaccaattgtaaaccgatttgactatgcacagtgcaagaaactgaacatggatcaggtactagaccagatactaagaatgccacccgagagaaaccgcatcatatacctacgcccaatgcagcaggtggacactctaactttggagcagaagctatttagtggtccctacccctatcacatctgtattatccatgaattcagtaaccctcccaatgtccggaataaggtgcgcattcgcagctggatggacactatagcaaacatcaatcaagagctcattaaatatgaattcttccctgaagccactcgaagtgaagaagacttaaagaaataccccaagtacccctgggggagagaaatctatactttagaaggtgttgtggatggagctccatattccatgatttctgacttcccttggctgaggtcattacgagctgcagagcccaacagcttcgctcgatacgactttgaagacgatgaagaaagcactatctatgctcctagaaggaaaggacagctgtctgcagacatctgtatggaaacaataggagaggaaatttcagagatgcgtcagatgaagaagggtgtatttcagcgagtagtggcaatttttatccactattgtgatgtcaatggagagccagttgaagatgactacatttaattggtccctcctcctttccagctattttgtcagaaagcaagtagggccatccagctgccagagtgctccacagggacttgaggcatgcagttgggaggtcctggctcggtttgctatatagggaatatataaggaacatcgaaattgtatacaaagatttgtacataaaaaatatacaaagacgcttcctaaagtaccaactttatatcatatgtttatacaatttaatttaaaaattcattttaaggaagacagataatttgaaagacttttgtttttcttgacttaattcatgaagtatcattttttgactgagtctccatttacttcattcttaatgattattgtcatccctttaaatctgtgcctttttcttcttgagcgaagctgtttgagtaaacctgttgaagagtgtttgtgtcttgtgtgcttttttgttgttattaaaacaccaactaaaccttatagtcaagacaaggctctatgtttctgtacaaagctgtagttctttcttagtattatagttgccatgtttcttaaaatcaagtaaaaagacttatgagcttaaaaaaaagtgagtttgagagggaaatggaaaagtttccagagtatttctagtaattatttccacattgaattgtgtatatgctttatcttgaatataaaataaaagtttattaaaaactttaaaaaaaaaaaaaaaa

SEQ ID NO: 7429 - protein, 445 aa, Homo sapiens
  misc_feature (1)..(445): Xaa=Unknown amino acid
MCPGSVPAPPVGQRTLRPWRREMQRVLSAQMLAVTGPRNSQRRTSRCSDEERPSTSRACVVNGPDGTRSAFSFRTLPQGGSSGPAHDERTNGSGSGATGEDRRGSSQPESCDVQSNEDYPRRPLTRARSRLSHVLLVSESEVAKTKPRHAMKRKRTADKSTSTSDPVIEDDHVQVLVLKSKNLVGVTMTNCGITDLVLKDCPKMMFIHATRCRVLKHLKVENAPIVNRFDYAQCKKLNMDQVLDQILRMPPERNRIIYLRPMQQVDTLTLEQKLFSGPYPYHICIIHEFSNPPNVRNKVRIRSWMDTIANINQELIKYEFFPEATRSEEDLKKYPKYPWGREIYTLEGVVDGAPYSMISDFPWLRSLRAAEPNSFARYDFEDDEESTIYAPRRKGQLSADICMETIGEEISEMRQMKKGVFQRVVAIFIHYCDVNGEPVEDDYIX

SEQ ID NO: 7430 - DNA, 513 bp, Rattus norvegicus; identical to SEQ ID NO: 7427
  ref <308>: DATABASE ACCESSION NUMBER: EMBL / AI639324
  ref <309>: DATABASE ENTRY DATE: 2000-03-04

SEQ ID NO: 7431 - DNA, 2360 bp, Homo sapiens; identical to SEQ ID NO: 7428
  ref <308>: DATABASE ACCESSION NUMBER: EMBL / AF177339
  ref <309>: DATABASE ENTRY DATE: 2000-10-04

SEQ ID NO: 7432 - protein, 445 aa, Homo sapiens; identical to SEQ ID NO: 7429
  misc_feature (1)..(445): Xaa=Unknown amino acid

SEQ ID NO: 7433 - DNA, 413 bp, Rattus norvegicus
  ref <308>: DATABASE ACCESSION NUMBER: EMBL / AI639329
  ref <309>: DATABASE ENTRY DATE: 2000-03-04
ttaatgaattcatacagcttgctttttaacaattctgcagagcccaggacatgtatataaatttactcttacataaatatatgaagatacaatctattacatcaattaggaatgtgctttcagattatccccaacacagtaaagacaaaaatagaaagctcaagagactgacattttacaagtaatataaatcaattctatttacttggtttaaactttacagaaaacagaaaaggacttgctcaaatctcaaacccaccactgtcagcttacctttctgaaagctagcctccctcctacaatcaaaaaaagcatccctctacaatgcataagagctcctgtttacagaaaacaccactgagatgcccaacagtagtacattttaggggagagaagtcacagaccacataaaa

SEQ ID NO: 7434 - DNA, 424 bp, Rattus norvegicus
  ref <308>: DATABASE ACCESSION NUMBER: EMBL / AI639336
  ref <309>: DATABASE ENTRY DATE: 2000-03-04
ttatttgtattaaattgtattttcaggaagattacaaggtttgacataggcacagagaaaagaacaaactaaagctagtataaacaaggtcagttacagactgacctctgaaatatgttagaaaatatacagtagtcacacttttttaaaaatatgactgaggaaaaatgttttaattcaagtcttctcaatcacttgaaatacttgtgagctaaactcatacattaaggcagatattgatttttaaatactcatttaattgatgaaatgtttaaactgcaatcaaaggagaaagttcttgttttaaaaaaaagagagaacattttattgctacaaagggaactgtacacaaaatccttgaagccatcttaatgctaactgctattcaatgtaaaaaaaaaaaaaaactccaatcaggacaaaa

SEQ ID NO: 7435 - protein, 580 aa, Rattus norvegicus
  ref <308>: DATABASE ACCESSION NUMBER: Refseq / NP_061229
  ref <309>: DATABASE ENTRY DATE: 2002-01-07
MDFEDDYVHSTCRGAYQDFNGMDRDYGPGSYGGLDRDYGHGSYGGQRSMDSYLNQSYGMDNHSGGGGGSRFGPYESYDSRSSLGGRDLYRSGYGFNEPEQTRFGGSYGGRFESSYRNSLDSFGGRNQGGSSWEAPYSRSKLRPGFMEDRGRENYSSYSSFSSPHMKPAPVGSRGRGTPAYPESTFGSRSYDAFGGPSTGRGRGRGHMGDFGSFHRPGIIVDYQNKPANVTIATARGIKRKMMQIFIKPGGAFIKKPKLAKPMDKMNLSKSPTKTDPKNEEEEKRRIEARREKQRRRREKNSEKYGDGYRMAFTCSFCKFRTFEEKDIELHLESSSHQETLDHIQKQTKFDKVVMEFLHECMVNKFKKASIRKQQTLNHPEAYKIIEKDIMEGVTADDHMMKVETVHCSACSVYIPALHSSVQLHLKSPDHSKGKQAYKEQIKRESVLTATSILNNPIVKARYERFVKGENPFEIQDHPQDQQIEGDEEDEEKIDEPIEEEEEEEEEEEEEGEEAGSVEEEGDVEGEEGTAEAAAAGEADAVGEAEGAGEAEEAEEEEEEEGTQEFAAQACATEQCEHRQM

SEQ ID NO: 7436 - DNA, 811 bp, Homo sapiens
  ref <308>: DATABASE ACCESSION NUMBER: EMBL / BG190460
  ref <309>: DATABASE ENTRY DATE: 2001-04-26
cgtgccgcatccggttttattgctacaaagggaaacatggtcacaaagagcctttaagcgtatcttaacgcaaattactattcaatgtctaatgctgtaaaaaaatacacagagcacaaaatacttgcccagtttatatcttccagggtaagtattaaaaaaattgatgcacacttgaatattcactcccaagagcagcatttaagataaaatgattagaatagatatactaacaatacacatttgttatccttaacaccaataaagtaataaaaattaagcttaaaaattatacaaacaatttatcggatctaagtctggtagctataaaaactaaactaaaatagttttgccttcattttattaaacaaatgttaaacatttagaaattatataaaacaaattttaatatgtggaatgcatgcaacatgggtgttaattcatattttaagctattaaatttcttacccttttttacattagaaccgaaatgtaaagctccttttaaatctaataccttacatttaattatactaaggccgctcaacagggaagttagcccgatgcttcttcgctgactctaccttaattactctacttacctacttacccaactttctctcttccccactaccttggtactagtaccccaattcatactacacttatccatgagccgactcagtttgctgttatacctccaatctacttctataggtgacccagagacggttttgattgtataagatatctccccataacaaatcggccagtcggccattctgttggcactgaattgcatgttattaat

SEQ ID NO: 7437 - DNA, 500 bp, Rattus norvegicus
  misc_feature (1)..(500): n=a, c, g or t
  ref <308>: DATABASE ACCESSION NUMBER: EMBL / AI639342
  ref <309>: DATABASE ENTRY DATE: 2000-03-04
ttaaaaaagacttttatacatacattcacataaacacattaatacagagatacattaggaatgaactgtctgctaggttttgcaatctaattttaaactccatgcctttacaagagcttgcttgtcatttctgatgagggacgtggggatgagactgtaatgggtgtgactagtattcaacttattcatgttggcgcctatacaatacagttttaatattaagtagaattctgcaaaagaattggggagccattttaatatttacagggaacgaatcagcagaacaagattctatcaaataggctgtgtacagtagctgcagcttacaaaacacaccagtaatctgtgcctggtgtataaagagaaccaaggacacagatggctttacaaccaagtgagtacacagcatcaacaaattagaggacaaaagaattcacattttctacattaaaaaaattacagatctcacaaatgtctttgaagacacagaanattccaag

SEQ ID NO: 7438 - DNA, 224 bp, Rattus norvegicus
  ref <308>: DATABASE ACCESSION NUMBER: EMBL / AI639343
  ref <309>: DATABASE ENTRY DATE: 2000-03-04
ttaatgttgcaaagacccgaatgatgttggataattgtgggaaaagtaaatccgtctcaggatcactgtcactgctgttgccactagtgattcttaggaaaacacagtcgacttttccaacaaaatgtatgatactatatgctcgatattagaacagtgagcccatgaatgattctatgaagctatgcatcatagacctcttgagctgtgaattagcactattt

SEQ ID NO: 7439 - DNA, 301 bp, Rattus norvegicus
  ref <308>: DATABASE ACCESSION NUMBER: EMBL / AI639347
  ref <309>: DATABASE ENTRY DATE: 2000-03-04
ttgtctttttgttctttcttgctttgtgatacgaagacaagaagttttgccccacccccgacactgaacaaggaggcgggctgaaaaaaaggaggggggggggctctaagaagcttataaaaacgtaaaaagagcccgcccgccatctaggagggtccccccgagaattgttcacaccacccacggtgctgggggggggcttcaaaaggaaaaaaaataccgagagaagaaccgagacggagctgaaggattttaaaaaagacgtactgccccggggggttttgttcccggggcccaatgc

SEQ ID NO: 7440 - DNA, 483 bp, Rattus norvegicus
  misc_feature (1)..(483): n=a, c, g or t
  ref <308>: DATABASE ACCESSION NUMBER: EMBL / AI639365
  ref <309>: DATABASE ENTRY DATE: 2000-03-04
ttncatttgaatggaactagatttgtccatgtggcacacagagagaagtatgaaatacggacccacagtgtcatagtgggtgagccagggtagcttcaggtttccatcacagatgttcatttgagacggccacacccaggctctctctcaatccactcagcctcagatccctcaggagcactcaggtgggacagatgaaggacagaaataattccacttcattgcggacaataagctttcttgggtggatgttgtctggcacagccaagctggaggtcatttcccacgcatccacaaaggccacgcggagaccaacaaaggcagcgcggaggaagcggttcatctggagtgtgagccagtcactgccatacaccgatttgtagccagtgttggccagtttgatgacgaccagagtactgggttcccggtccagcagggccttcacagctgcccgaatccctgccagtcttcgagcaaagatgg

SEQ ID NO: 7441 - DNA, 221 bp, Rattus norvegicus
  ref <308>: DATABASE ACCESSION NUMBER: EMBL / AI639390
  ref <309>: DATABASE ENTRY DATE: 2000-03-04
ttggagacaaggtctcactctgtagccttgtctagtctgaactcacgatgtagatcaggctagctccaaactcacagatccgcctgcctctatattcccagtacatgtgtcaccccagtaggcaccatctgttctctgaatacagctctgccttcattctatatctgtttgtgctaagccgcaggaggcacacagggagtgtcttcaaaccagggacaggt

SEQ ID NO: 7442 - DNA, 375 bp, Rattus norvegicus
  ref <308>: DATABASE ACCESSION NUMBER: EMBL / AI639391
  ref <309>: DATABASE ENTRY DATE: 2000-03-04
ttgagctgtgaggaatctttattccctcaggtgaagcattcagagaaacagctctgagtacagaattctgggctcctctctccaacaccattctgcttcacacacaccctccaccaccggttttgcttgtgtgtgaacctatcccccagtcttcccatcctcttcttaagtcccatcattctggggcctcttctccttagcattaactgcaggctcagagacagggagtgcaatggctgacagggaaccaactaccatcctccagggccattaccttcaccggggagcaaaaggtacattgcaagtgcccaggagagcccacaggaggaagatggcatggtattctaggctctgtcacagggagagctctttgaa

SEQ ID NO: 7443 - DNA, 541 bp, Rattus norvegicus
  ref <308>: DATABASE ACCESSION NUMBER: EMBL / AI639393
  ref <309>: DATABASE ENTRY DATE: 2000-03-04
ttacctcagaacaaataaataaagaaaatgtatttacattagttcatcattggaaaatctggcataactgaacgatgggaaaccaggactgtgtcctagtctcttgggtctagacctagctcacagggcaggcatgggcaccttacaaccttctgtagaaacggagagaggtggcatgggtcttgagcaggttgagcagcagcgtcgacgcccctcagtgaagagaatcccagcgtcccaatcaaggagctcctgctgagggcatgggcttcgtctaaccatgttaagttcacgtagacatctgtccaagttaaacaaagtccttccattcagcagtacataggacaaggagccatggtcaggaatggcaacctcttgccacaaactatgtgacaagagggatgtggaattcatgtgtgtcaaatatcaggggcctcctgggtggttttgggtccctgttggctttgtgtagcagtttgaagagaccagttccaatgttcattgggattcccatgatgatgcactcagacacaccacacac

SEQ ID NO: 7444 - DNA, 4176 bp, Homo sapiens
  ref <308>: DATABASE ACCESSION NUMBER: EMBL / AF021351
  ref <309>: DATABASE ENTRY DATE: 2000-03-03
atggtgaaggagcagttccgggagacggatgtggccaagaaaacaagccacatctgttttggaatgaagtcacctgaggagatgcgccagcaggcgcacatccaagttgtgagtaagaacctgtacagccaggacaaccaacatgcccccttgctatatggggtgctcgaccataggatgggtacgagtgagaaggatcgtccatgtgaaacctgtgggaaaaacttggctgactgtctaggccactatgggtatatcgacctggagttgccgtgttttcatgtagggtacttcagagcagtcataggcatcttacagatgatctgcaaaacctgctgccacatcatgctgtcccaagaggagaagaagcagtttctggactatctaaagaggcccggcctgacctaccttcagaagcgaggactgaaaaagaaaatctctgacaagtgccggaagaaaaacatctgccatcactgtggcgcttttaatggtaccgtaaagaagtgtggactgctgaaaataattcatgagaaatacaagaccaacaaaaaagtggtggatcccattgtatcaaatttccttcagtcttttgaaacagccattgaacataataaagaagtggagcctctgctgggaagggcacaggaaaacttgaatcccttagtagttctgaatttatttaaacgaatcccagctgaagatgttcctctacttctgatgaacccagaagccggaaagccgtctgatttgattctcacacgacttttggtgcctcctttgtgtttcagaccctccgttgtgagtgatttgaagtctggcaccaatgaagatgatctgacaatgaaactgacagaaatcattttcctaaacgatgttattaaaaagcatcggatctcaggagccaagacccagatgatcatggaggactgggatttcctgcagctgcagtgtgccctctacattaacagtgagctctcgggcattcccctcaacatggcacccaagaagtggaccagaggcttcgtccaacgcctgaagggaaaacagggtcgatttagaggaaatctctcaggaaagagagtggatttttctggcagaacagtcatctcgcccgaccccaacctccggattgatgaggtagctgtgccagttcatgtggccaaaattctaacttttcctgagaaggtaaacaaagcaaacatcaatttcttgaggaaactggttcaaaacggccctgaggttcacccaggagcaaacttcattcagcagagacatacgcagatgaaaaggtttttgaaatacggaaatcgagaaaagatggctcaagagctcaagtatggtgacatcgtagagagacacctcatcgatggagatgtggtgctgttcaatcggcagccctcgctgcacaaattgagcattatggctcatctggccagggtcaagccccaccggaccttcagatttaatgagtgtgtctgtacaccctataatgctgactttgatggtgatgaaatgaaccttcatcttcctcaaacagaagaagctaaagcagaggcccttgttctgatggggactaaagcaaatcttgtaaccccgaggaatggggaaccgctgattgctgctattcaggattttctaacaggtgcctatctcctcactctcaaggacactttctttgatcgagccaaggcttgccaaatcattgcttcaatactggttggcaaggatgagaaaattaaagttcgcctcccaccgcctacaatcctaaagcctgtcaccctgtggacgggaaagcagatcttcagtgtcatcctcaggcctagcgatgacaatccagtgagggccaacctgcgaaccaagggcaagcagtactgtggcaaaggggaagatctctgtgccaatgattcctatgttacaatccagaacagtgagttgatgagtggcagcatggacaaaggaaccctagggtcaggatccaagaacaatattttttacattttgctgcgagactggggacagaatgaagctgcagatgccatgtcacggctcgccaggctggctcctgtctacctgtctaaccgtggtttctcaattgggatcggtgatgtcacacctggccaaggactgctgaaggccaagtatgagttgctgaatgccggctacaagaaatgtgatgagtacatcgaagccctgaacacgggcaagctgcagcagcagcctggctgcactgctgaggagaccctggaggcactgatcctgaaggagctgtctgtgatccgtgaccacgctggcagtgcctgcctccgggagctggacaagagcaacagccccctcaccatggctctgtgcggctccaaaggttccttcattaacatatcacagatgattgcctgtgtgggacagcaggccatcagtggctctcgagtgccagacggctttgaaaacaggtccttgcctcattttgaaaaacactcaaagctcccagctgccaaaggctttgtggctaatagcttttattccggtttgacaccaactgagtttttcttccacacaatggccggccgggaaggtctagtcgacacggctgtaaagacagctgaaacgggatacatgcagcgaaggcttgtcaaatctcttgaagatctttgctcccagtatgatctgacagtccgaagctctactggcgatattatccagttcatttatggaggagatggcttagatcctgcagctatggagggaaaagatgaacctttggagtttaaaagggttctggacaacatcaaagcagtcttcccgtgtcccagtgagcctgctctcagcaaaaacgagctgatcctgaccacagagtccatcatgaagaagagtgagttcctctgctgccaggacagcttcctgcaggaaataaaaaaattcattaagggggtctctgagaagatcaagaaaaccagagataaatatggcatcaatgataacggcacaacagagccccgtgtgctgtaccagctggaccgcatcacccccacccaagtagaaaagtttctggagacctgtagggacaagtacatgagggcacagatggagccaggttctgcagtgggtgctctgtgtgcccagagcattggtgagccaggcacccagatgaccctgaagactttccactttggaggtgtggcctccatgaacatcaccctgggcgtgccccggattaaagagatcatcaacgcttccaaggccatcagcactccaattatcacagcacagctagacaaggatgacgacgcggattatgctcgcctcgtgaaagggagaattgagaaaaccctcttgggagagatttccgagtatattgaagaagtgtttcttcctgatgactgctttattctcgtcaagctctccctggaacggattaggcttctgagactggaagtgaacgctgagacagtgagatattccatctgcacatccaagctccgtgtgaagcccggtgatgtggctgttcatggtgaggctgtggtgtgtgtcacccccagagagaacagcaagagctccatgtactacgtgctgcagttcctgaaagaggatctccccaaggtggtggtgcagggcattccagaggtgtccagagctgtcatccacattgacgagcagagtggaaaggagaagtacaagcttctggtggaaggtgataacctgcgggcagtcatggccacacacggtgtgaagggcacccgaaccacctccaataacacctatgaggtggagaaaactctgggcatcgaggccgcccggacaacgatcatcaatgaaatccagtacaccatggtggtgaaccacggcatgagcatcgacaggaggcacgtgatgctgctctccgacctcatgacctacaagggtgaagtcctgggcatcactaggtttggcctggccaagatgaaggagagtgtgctgatgctggcctcctttgagaagacggctgaccatctctttgacgctgcctacttcgggcagaaggactctgtgtgtggggtgtctgagtgcatcatcatgggaatcccaatgaacattggaaccgggctcttcaagctgcttcacaaggctgacagggacccgaaccctcccaagaggcccctgatcttcgacacaaatgaattccacatcccccttgtcacatag

SEQ ID NO: 7445 - protein, 1391 aa, Homo sapiens
  ref <308>: DATABASE ACCESSION NUMBER: SWISS-Prot / O14802
  ref <309>: DATABASE ENTRY DATE: 2001-10-16
MVKEQFRETDVAKKTSHICFGMKSPEEMRQQAHIQVVSKNLYSQDNQHAPLLYGVLDHRMGTSEKDRPCETCGKNLADCLGHYGYIDLELPCFHVGYFRAVIGILQMICKTCCHIMLSQEEKKQFLDYLKRPGLTYLQKRGLKKKISDKCRKKNICHHCGAFNGTVKKCGLLKIIHEKYKTNKKVVDPIVSNFLQSFETAIEHNKEVEPLLGRAQENLNPLVVLNLFKRIPAEDVPLLLMNPEAGKPSDLILTRLLVPPLCFRPSVVSDLKSGTNEDDLTMKLTEIIFLNDVIKKHRISGAKTQMIMEDWDFLQLQCALYINSELSGIPLNMAPKKWTRGFVQRLKGKQGRFRGNLSGKRVDFSGRTVISPDPNLRIDEVAVPVHVAKILTFPEKVNKANINFLRKLVQNGPEVHPGANFIQQRHTQMKRFLKYGNREKMAQELKYGDIVERHLIDGDVVLFNRQPSLHKLSIMAHLARVKPHRTFRFNECVCTPYNADFDGDEMNLHLPQTEEAKAEALVLMGTKANLVTPRNGEPLIAAIQDFLTGAYLLTLKDTFFDRAKACQIIASILVGKDEKIKVRLPPPTILKPVTLWTGKQIFSVILRPSDDNPVRANLRTKGKQYCGKGEDLCANDSYVTIQNSELMSGSMDKGTLGSGSKNNIFYILLRDWGQNEAADAMSRLARLAPVYLSNRGFSIGIGDVTPGQGLLKAKYELLNAGYKKCDEYIEALNTGKLQQQPGCTAEETLEALILKELSVIRDHAGSACLRELDKSNSPLTMALCGSKGSFINISQMIACVGQQAISGSRVPDGFENRSLPHFEKHSKLPAAKGFVANSFYSGLTPTEFFFHTMAGREGLVDTAVKTAETGYMQRRLVKSLEDLCSQYDLTVRSSTGDIIQFIYGGDGLDPAAMEGKDEPLEFKRVLDNIKAVFPCPSEPALSKNELILTTESIMKKSEFLCCQDSFLQEIKKFIKGVSEKIKKTRDKYGINDNGTTEPRVLYQLDRITPTQVEKFLETCRDKYMRAQMEPGSAVGALCAQSIGEPGTQMTLKTFHFGGVASMNITLGVPRIKEIINASKAISTPIITAQLDKDDDADYARLVKGRIEKTLLGEISEYIEEVFLPDDCFILVKLSLERIRLLRLEVNAETVRYSICTSKLRVKPGDVAVHGEAVVCVTPRENSKSSMYYVLQFLKEDLPKVVVQGIPEVSRAVIHIDEQSGKEKYKLLVEGDNLRAVMATHGVKGTRTTSNNTYEVEKTLGIEAARTTIINEIQYTMVVNHGMSIDRRHVMLLSDLMTYKGEVLGITRFGLAKMKESVLMLASFEKTADHLFDAAYFGQKDSVCGVSECIIMGIPMNIGTGLFKLLHKADRDPNPPKRPLIFDTNEFHIPLVT

SEQ ID NO: 7446 - DNA, 522 bp, Rattus norvegicus
  ref <308>: DATABASE ACCESSION NUMBER: EMBL / AI639410
  ref <309>: DATABASE ENTRY DATE: 2000-03-04
ttcaaaaagtggatgaaactttattattgtcttcaatgtacagtacaatcattagtcaaatatcaagtacttgaaatagcataatagaatcacatatttaaatgcaaagcaaagagataatgtgtaattttataagcaaattatcaaataaaaagacaacattggctgactgttgacttttcaaatatactccactcaacacccaagaaaatgttttatactataaaattcttctatatattttgaggaattttctaatataacaaaatttatatgaaaaatgaaatttaaaaattgttagaaaacactaaatatgagcccaatgtagaaatctgaagatagactgttcctttggcagaaaataaatagctacaaacatcttaaaataagtacagttcaataggatcatggaaaaaatatatctttacatttcgtattaatactgaaatcagatcaatacagatttactatcatttttaggctatcaataactctgcaacacaaatttatgaatggaaaaaa

SEQ ID NO: 7447 - DNA, 522 bp, Rattus norvegicus; identical to SEQ ID NO: 7446
  ref <308>: DATABASE ACCESSION NUMBER: EMBL / AI639410
  ref <309>: DATABASE ENTRY DATE: 2000-03-04

SEQ ID NO: 7448 - DNA, 454 bp, Rattus norvegicus
  ref <308>: DATABASE ACCESSION NUMBER: EMBL / AI639425
  ref <309>: DATABASE ENTRY DATE: 2000-03-04
ttgagttctttagactttaccaaatgtattttccatttgttagtttttaaagtagcttcaactgatgttgcacacaccatagctctgtacacttatgcagttagcctgtctcagaaagcgaataaaccgcaggtaacatctcccccagaactcctcgggaaacataattaggctgtacaaacacatcacaaattcaacagcacacggtgcacccgaaaccttttctatgaacctcaaaagttctttggacgtaatcactgaacattggtgtcgagcaaagatcagatttcgagcctccaattttgtgctgtgttgtgtcagcgacaagagcgccatccaagtcctttaagcaacgaagacatgcgcagaaccagttcagaaatcgtcaaatttgacgacaaaacagaaggatggctgcctactcccttcctcagcacgaaccctgttacgttct

SEQ ID NO: 7449 - DNA, 693 bp, Homo sapiens
  ref <308>: DATABASE ACCESSION NUMBER: EMBL / BE792880
  ref <309>: DATABASE ENTRY DATE: 2000-09-21
gccccggcggccgggtgagctcctcaaggtctcggagggccgagggcagacaccggcgggcgggcggagcgcttactgctctctctcttccaggccgtccgggcgctgaggctcataggctgggcttcccgaagccttcatccgttgcccggttcccgggatcgggcccaccctgccgccgaggaagaggacgaccctgaccgccccattgagttttcctccagcaaagccaaccctcaccgctggtcggtgggccataccatgggaaagggacatcagcggccctggtggaaggtgctgcccctcagctgcttcctcgtggcgctgatcatctggtgctacctgagggaggagagcgaggcggaccagtggttgagacaggtgtggggagaggtgccagagcccagtgatcgttctgaggagcctgagactccagctgcctacagagcgagaacttgacggggtgcccgctggggctggcaggaagggagccgacagccgcccttcggatttgatgtcacgtttgcccgtgactgtcctggctatgcgtgcgtcctcagcactgaaggacttggctggtggatggggcacttggctatgctgattcgcgtgaaggcggagcagaatctcagcagatcggaaactgctcctcgcctggtcttgatgtccaaggattccatcggcaagacttct

SEQ ID NO: 7450 - DNA, 454 bp, Rattus norvegicus; identical to SEQ ID NO: 7448
  ref <308>: DATABASE ACCESSION NUMBER: EMBL / AI639425
  ref <309>: DATABASE ENTRY DATE: 2000-03-04

SEQ ID NO: 7451 - DNA, 693 bp, Homo sapiens; identical to SEQ ID NO: 7449
  ref <308>: DATABASE ACCESSION NUMBER: EMBL / BE792880
  ref <309>: DATABASE ENTRY DATE: 2000-09-21

SEQ ID NO: 7452 - DNA, 369 bp, Rattus norvegicus
  ref <308>: DATABASE ACCESSION NUMBER: EMBL / AI639427
  ref <309>: DATABASE ENTRY DATE: 2000-03-04
ttaaattttttagtgaaaacattatattataacatgcttttccaaatcaaattattaaaattaatatttaagtttaaacaaagtctttaaattctacatgcataattttgactggctaaactacacattaaacacctcgataacattctactcacagctcagacttttaaacaccaacaatctattaatagagctactgcaggacagattcgaattagaggtcttaggtcattttttaagctcgctttcagagcaccgatcatcaacaattatttctgcgttgtattcacaaacactgatacaatttgtacatttatatgaaaacagatacaatgtttaaaaatgaacgcgcattaaagtagtttaact

SEQ ID NO: 7453 - DNA, 369 bp, Rattus norvegicus; identical to SEQ ID NO: 7452
  ref <308>: DATABASE ACCESSION NUMBER: EMBL / AI639427
  ref <309>: DATABASE ENTRY DATE: 2000-03-04

SEQ ID NO: 7454 - DNA, 422 bp, Rattus norvegicus
  ref <308>: DATABASE ACCESSION NUMBER: EMBL / AI639434
  ref <309>: DATABASE ENTRY DATE: 2000-03-04
ttaggatttgcaaatacaggttattttacagaaattcaacattataaacagcaggcacctccgacgaggtatgagaagcagctggcacagattgatggcaccctgtcaaccatcgagttccagcgggaggccctatagaatgccaacaccaacacggaggtgctcaagaacatgggctatgccgccaaggccatgaaggctgcccacgacaacatggacattgataaagtggatgagttaatgcaggacattgctgaccagcaagaacttgcagaagagatttccacagctatctccaaacctgtgggctttggagaagagtttgacgaggatgagctcatggcagagctggaggaactcgaacaagaggagctagacaagaatttgttggagatcagagggcccgaaacagtccctctacc

SEQ ID NO: 7455 - DNA, 258 bp, Homo sapiens
  ref <308>: DATABASE ACCESSION NUMBER: EMBL / AW603521
  ref <309>: DATABASE ENTRY DATE: 2000-03-25
gtggccggtaccttcaacatctcaggctccttccaacatctcatggctccttccaacatctcattcctccttccaacatctcatccctccttccaacatctcattgctgttgaaatctcctctgcaagttcttgctggtcagcaatgtcctgcattaactcatcaactttatcgatgtccatgttgtcatgggccgccttcatggccttggcggcatagcccatgttcttgagcacctcgggatgagatgttggaagg

SEQ ID NO: 7456 - DNA, 445 bp, Rattus norvegicus
  ref <308>: DATABASE ACCESSION NUMBER: EMBL / AI639438
  ref <309>: DATABASE ENTRY DATE: 2000-03-04
ttgaacatcatgataattttttatttttttgtatattgggggttgaaataataggagtatatacacataaaaaatagaaataagactctggctgaaaatatgtaacctaaacaagtgttaacagccagacaacagtccatttatctgattctgagagaaggacactatgagtttcaaaagtagctcacacgccaagtattcactggagtaaaacattacatctttctcatacttacataaaaatacaaaatagtaacccagaagaaaaatctgtaagaatcgagatattgtttgtcgagtaagggggcatttgaggatacttgcaatgcatttccttccagtggcttgggtggacatgattgttatgccttcagcaccgagtccatgctatgtctcacaacagaagcctgtgcctggttttgaaaatacattcatggctcttcac

SEQ ID NO: 7457 - protein, 1002 aa, Rattus norvegicus
  ref <308>: DATABASE ACCESSION NUMBER: SWISS-Prot / AAK84214
  ref <309>: DATABASE ENTRY DATE: 2002-06-15
MVRLYNLHPFGSQQVVPCQWEPEQVCCGGSDALFVAAGCKVEAFAVQGEELCRQRCAFSTLGRVLRMAYSEAGDYLVAIEEKNKTIFLRAYVNWRSKRSDNSRVCIRMVGHNVEASFCESFRDQMSIIEMPMSEAPLCFSCCPVKGDLLVGCTNKLVLFTLKYDIINEEFSILNFERSLIIHIDNITPVEISFCVGYVAVMSDLEVLLLKLESDPIHGESVDHHPQETSNPLKEAEGVSNETSQLESEDFVICLKPMELIGEKCEQSGISVKLESTGLEDEKVKYLRVRHLLYRRFAPDISSYVLSDNIKLHSLQLLPIHQSGFHPDENDLSPKKEMPNLFCFFSLPHVGYLYMVVKSVELMSVYWYPEKSQQAVLTPQFLHVITSQSLQCFTVRCSAAVAHEEDLYMDTTLKACPPVSMDVCALRIQLFIGLKAICHFKNHIILLTKAEPEAIPERRESPKKLISRKDASVRSGTPHVAEAAWNLYLVNTTAPVQLYKEMVDYSNSYKTVKTESCLHLLSEAHLLVRAALMDGSQLEPAEKAELLEAFKESCGHLGDCYSRLTTEQSHLALPYYKMSGLSLAEVLARVDWTEESESQKYERGLVFYINHSLYENLDEELSKELAAKVAQIFHMAEPKQLPHVLSSPSMKNIDPLTALHYLRKLDSCGVSPVLVTLTKAAVALKMGDLDMYRNEMKSHSEMKLVYGFILEPRLLIQQWKGQIVPTELAIDLKETQPGLLVASVLGLQKNDKIGIVETDSFFKVLCGKDEDAVPQLLIDFWEAQLVACLPNVVLEELFFKLISQYVWRLSERRCPDTVPLRTAEDLINACSHYGLVNPWVHVLTTSDSLADKNYTDDLLKLQSLICSPSLDVASIIPFLEPLSEDTVAGLSAHALCHTRLQEYEQCIDTLLERCPEAVIAYANQELKEDHWILWWKKLLPELCQRVKSGGERSHLHLSLLKETLSVIAVGLDLRDFLNVLPEDGAAAFFLPYLLFCSRKKSLT

SEQ ID NO: 7458 - DNA, 3912 bp, Homo sapiens
  ref <308>: DATABASE ACCESSION NUMBER: EMBL / AY033141
  ref <309>: DATABASE ENTRY DATE: 2001-08-26
ccgcgggcggggccggctggcgttcacgtgacccggcgtcattggctcgctcgcggaagtagtcctacattcgcggtcagcgcggggtctccgggcgccctgcagggcgggcaggctgtgccatcccgccggacgtcgggatggtgcagctgtacaacctgcacccgttcgggtcgcagcaggtggtgccctgcaagctggagccggaccggttctgtggcggggggcgtgacgcgcttttcgtggcggcgggctgcaaggtggaggcgttcgcggtggccggccaggagctgtgccagccgcggtgcgccttctccacgctgggccgggtgttgcgcctggcctacagcgaggctggagattatttggtagcaattgaagagaaaaacaaagctacatttctacgtgcttatgtgaactggagaaataaaaggactgaaaactctcgtgtgtgtatccgaatgattgggcataatgtggagggaccattcagcaaagccttcagagaccagatgtacattattgaaatgccgctttcggaggcccccttgtgcatttcctgttgccctgtgaaaggagaccttctcgttggctgcacaaataaattagtcttatttagtttgaagtaccagatcattaatgaggaattctcactattggactttgaacgttctttaattatacacatagataatatcactcctgttgaggtttctttttgtgttggatatgttgctgtcatgtcagacttagaagtcttaatcgtaaaactggagtcaggccctaaaaatggagagagagttcaccaccatccacataagaccaacaatcgaataagacggacagaagaaggcatcagtaatgaaatttcacagcttgagtcagatgattttgtcatctgccagaagcccctggaacttcttggtgaaaaaagtgaacagtctggattatctgttacactggagtctacgggattagctgatgaaaaaagaaaatattcccactttcagcacctgctctatagacgttttgctcctgatatttcgtcctatgtcttgtctgatgacatcaagctacattccctccagctgctacccatttaccagaccggttctcttacatctgatggaaaaaatttgtctcaggaaaaagaattgctgagtctcttttgctttttctccttacctcatgtgggctatctctacatggttgtcaaatctgttgaattgatgtcagtctaccagtatcctgaaaagtctcagcaggcagtactcacgccacaatttttgcacgtcattacaagtaacaacctgcagtgtttcactgtgcggtgcagtgcggcggcagctcgtgaggaggacccgtacatggacaccaccctgaaggcttgcccacctgtcagtatggatgtctgtgctttaagaatacagcttttcataggcttgaaagccatctgtcactttaaaaaccacatcatacttttgactaaagcagaacctgaagccattccagagagaagacagtcacccaagaggcttctttcgagaaaagataccagtgttaaaatcaaaatacctcctgtagctgaggctgggtggaatttgtatattgtgaatacgatctcaccagtgcagctgtacaaagagatggtagactatagcaatacctataagactgtcaaaacccagagctgcattcaccttctcagtgaggctcatctgttagtgcgagctgccctgatggatgccagtcagctggaacctggagagaaggcagagcttttggaagcatttaaggaaagctgtgggcaccttggggactgttacagcaggcttgactcccagcattctcatctcaccttgccatactataagatgtctggtttgtctatggctgaagttctggcccgcacggactggacagtagaggatggattacagaaatacgagagaggattaatcttttacattaatcattcactttatgaaaacctggatgaagaattaaatgaagaattagcagcaaaagtggttcagatgttttatgtggctgagccaaagcaagtgccccatattctctgtagtccttctatgaagaatattaatcctttaactgccatgagctatctaaggaagctggatacttctgggttttcatcgatcttagtgacattgaccaaggcagcagtggctctgaaaatgggagatcttgacatgcacagaaatgaaatgaaaagccattcagagatgaagttggtatgtggcttcattctggaacctcggctgttgattcaacagagaaagggacagattgttccaaccgagcttgcacttcacttgaaggaaactcagcctggattgcttgtggcttcagttctgggcttgcagaagaacaacaaaattggaattgaagaagcagattccttttttaaggtgctttgtgctaaggatgaagatacaattcctcagctcttggtagacttttgggaagctcagctagtggcatgtctcccagatgtggtacttcaggaactctttttcaaactcacatcacagtacatctggagattgtctaagaggcagcctcctgacaccacaccattgcgaacatcggaggatctgataaatgcctgtagtcattatggcttaatttatccatgggttcacgtcgtaatatcatctgattctttagctgataaaaattatacagaagatctttcaaaattacagtctcttatatgtggtccttcatttgacatagcttccattattccgttcttggagccactttcagaagacactattgccggcctcagtgtccatgttctgtgtcgtacacgcttgaaagagtatgaacagtgcatagacatactgttagagagatgcccggaggcagtcattccatatgctaatcatgaactgaaagaagagaaccggactctgtggtggaaaaaactgttgcctgaactttgtcagagaataaaatgtggtggagagaagtatcaactctacctgtcatcattaaaagaaacattgtcaattgttgctgtggaactagaactgaaggatttcatgaatgttctcccagaagatggtactgcaacatttttcttgccatatcttctctattgcagtcgaaagaaaccattgacttaaaggtatcatttgaaaaataccataatggcatttgagactgaatttctaaaaattgaatgccaaagtacaagtagaggagttttttattttatatatacacacacacacacacacacacacacacacacacacatatatgatacaaatgctttcaggctgcttaccttaccgtgtagtggtaactattcacttcttaatttatgacctcaatcaatttaattgtctagaatgtaaaaagtctttaagacataagaattcctcaaagaagccatacattttttaaggtggggattgacttttattccaaggaacaacatcagttcactgttgttggagacatgacaatcattttcatcccaagaacactttaaggaaacattttacaagtatgcttgaaagaatgtcactaactggtccagaattttatcttcttgatttttccagatttctctatgtttttgagaaagatgttaatgttttgccatggtaaaagatttcaaacctcattttttttgttccttttcttgttacttttaagaaaactcatgctctgtttctctgaatcaaatgaagtagaagtttacaaagctaactttcttcttgtctagctattaacatgatttgtcaaatgcatgtttttttcagccaaagccttgtttccatttttgttgatgtgtactcttgctcttttagctagagtgtatgtgaaaataaagaaatacatcattgtattcacaaaaaaaaaaaaaaaaaaaaa

SEQ ID NO: 7459 - protein, 1004 aa, Homo sapiens
  ref <308>: DATABASE ACCESSION NUMBER: SWISS-Prot / Q969F9
  ref <309>: DATABASE ENTRY DATE: 2002-06-15
MVQLYNLHPFGSQQVVPCKLEPDRFCGGGRDALFVAAGCKVEAFAVAGQELCQPRCAFSTLGRVLRLAYSEAGDYLVAIEEKNKATFLRAYVNWRNKRTENSRVCIRMIGHNVEGPFSKAFRDQMYIIEMPLSEAPLCISCCPVKGDLLVGCTNKLVLFSLKYQIINEEFSLLDFERSLIIHIDNITPVEVSFCVGYVAVMSDLEVLIVKLESGPKNGERVHHHPHKTNNRIRRTEEGISNEISQLESDDFVICQKPLELLGEKSEQSGLSVTLESTGLADEKRKYSHFQHLLYRRFAPDISSYVLSDDIKLHSLQLLPIYQTGSLTSDGKNLSQEKELLSLFCFFSLPHVGYLYMVVKSVELMSVYQYPEKSQQAVLTPQFLHVITSNNLQCFTVRCSAAAAREEDPYMDTTLKACPPVSMDVCALRIQLFIGLKAICHFKNHIILLTKAEPEAIPERRQSPKRLLSRKDTSVKIKIPPVAEAGWNLYIVNTISPVQLYKEMVDYSNTYKTVKTQSCIHLLSEAHLLVRAALMDASQLEPGEKAELLEAFKESCGHLGDCYSRLDSQHSHLTLPYYKMSGLSMAEVLARTDWTVEDGLQKYERGLIFYINHSLYENLDEELNEELAAKVVQMFYVAEPKQVPHILCSPSMKNINPLTAMSYLRKLDTSGFSSILVTLTKAAVALKMGDLDMHRNEMKSHSEMKLVCGFILEPRLLIQQRKGQIVPTELALHLKETQPGLLVASVLGLQKNNKIGIEEADSFFKVLCAKDEDTIPQLLVDFWEAQLVACLPDVVLQELFFKLTSQYIWRLSKRQPPDTTPLRTSEDLINACSHYGLIYPWVHVVISSDSLADKNYTEDLSKLQSLICGPSFDIASIIPFLEPLSEDTIAGLSVHVLCRTRLKEYEQCIDILLERCPEAVIPYANHELKEENRTLWWKKLLPELCQRIKCGGEKYQLYLSSLKETLSIVAVELELKDFMNVLPEDGTATFFLPYLLYCSRKKPLT

SEQ ID NO: 7460 - DNA, 458 bp, Rattus norvegicus
  ref <308>: DATABASE ACCESSION NUMBER: EMBL / AI639443
  ref <309>: DATABASE ENTRY DATE: 2000-03-04
ttggggggctgggtctttacattgcatttacagtattttttaatagtacataaataaagaaattgttcattgcactgttaaatgtcatcacttccatgagtttggacctgatggtcctcaaagcgtctttgtatgtctcctctcagttactctgtaaactgcccttgactatttgagcccacatatccaatgtcgagaaggtcattggcattccgctggtggctgcccctcagaatctcagccttccgaggaccagtggaccctttagaggaggctgttccggatgagctgtgcccgcctggagatgggaagctgggcttgctgtaaggcaccagggactcctctgatccaacccctggtttgtgtggggctttccgtgtttcttcttggcgctctgtagagtttatccagtcctgggtttgatgctgccactttacagtagttttagccggacaatc

SEQ ID NO: 7461 - DNA, 5324 bp, Homo sapiens
  ref <308>: DATABASE ACCESSION NUMBER: Refseq / XM_031246
  ref <309>: DATABASE ENTRY DATE: 2002-08-01
tgttacgagatgacttccgacaaaaccccacagatgttgtagtggcagctggagagcctgcaatcctggagtgccagcctccccggggacacccagaacccaccatctactggaaaaaagacaaagttcgaattgatgacaaggaagaaagaataagtatccgtggtggaaaactgatgatctccaataccaggaaaagtgatgcagggatgtatacttgtgttggtaccaatatggtgggagaaagggacagtgacccagcagagctgactgtctttgaacgacccacatttctcaggaggccaattaaccaggtggtactggaggaagaagctgtagaatttcgttgtcaagtccaaggagatcctcaaccaactgtgaggtggaaaaaggatgatgcagacttgccaagaggaaggtatgacatcaaagacgattacacactaagaattaaaaagaccatgagtacagatgaaggcacctatatgtgtattgctgagaatcgggttggaaaaatggaagcctctgctacactcaccgtccgagctcccccacagtttgtggttcggccaagagatcagattgttgctcaaggtcgaacagtgacatttccctgtgaaactaaaggaaacccacagccagctgttttttggcagaaagaaggcagccagaacctacttttcccaaaccaaccccagcagcccaacagtagatgctcagtgtcaccaactggagacctcacaatcaccaacattcaacgttccgacgcgggttactacatctgacaggctttaactgtggcaggaagcattttagcaaaagctcaactggaggttactgatgttttgacagatagacctccacctataattctacaaggcccagccaaccaaacgctggcagtggatggtacagcgttactgaaatgtaaagccactggtgatcctcttcctgtaattagctggttaaaggagggatttacttttccgggtagagatccaagagcaacaattcaagagcaaggcacactgcagattaagaatttacggatttctgatactggcacttatacttgtgtggctacaagttcaagtggagagacttcctggagtgcagtgctggatgtgacagagtctggagcaacaatcagtaaaaactatgatttaagtgacctgccagggccaccatccaaaccgcaggtcactgatgttactaagaacagtgtcaccttgtcctggcagccaggtacccctggaacccttccagcaagtgcatatatcattgaggctttcagccaatcagtgagcaacagctggcagaccgtggcaaaccatgtaaagaccaccctctatactgtaagaggactgcggcccaatacaatctacttattcatggtcagagcgatcaacccccaaggtctcagtgacccaagtcccatgtcagatcctgtgcgcacacaagatatcagcccaccagcacaaggagtggaccacaggcaagtgcagaaagagctaggagatgtccttgtccgtcttcataatccagttgtgctgactcccaccacggttcaggtcacatggacggttgatcgccaaccccagtttatccaaggctaccgagtgatgtatcgtcagacttcaggtctgcaggcgacatcttcgtggcagaatttagatgccaaagtcccgactgaacgaagtgctgtcttagtcaacctgaaaaagggggtgacttatgaaattaaagtacggccatattttaatgagttccaaggaatggatagtgaatctaaaacggttcgtactactgaagaagccccaagtgccccaccacagtctgtcactgtactgacagttggaagctacaatagcacaagtattagtgtttcctgggatcctcctcctccagatcaccagaatggaattatccaagaatacaagatctggtgtctaggaaatgaaacgcgattccatatcaacaaaactgtggatgcagccattcggtccgtaataattggtggattattcccaggtattcaataccgggtagaggttgcagctagtaccagtgcaggggttggagtaaagagtgagccacagccaataataatcgggagacgcaatgaagttgtcattactgaaaacaataacagcataactgagcaaatcactgatgtggtgaagcaaccagcctttatagctggtattggtggtgcctgctgggtaattctgatgggttttagcatatggttgtattggcgaagaaagaagaggaagggactcagtaattatgctgttacgtttcaaagaggagatggaggactaatgagcaatggaagccgtccaggtcttctcaatgctggtgatcccagctatccatggcttgctgattcttggccagccacgagcttgccagtaaataatagcaacagtggcccaaatgagattggaaattttggccgtggagatgtgctgccaccagttccaggccaaggggataaaacagcaacgatgctctcagatggagccatttatagtagcattgacttcactaccaaaaccagttacaacagttccagccaaataacacaggctaccccatatgccacgacacagatcttgcattccaacagcatacatgaattggctgtcgatctgcctgatccacaatggaaaagctcaattcagcaaaaaacagatctgatgggatttggttattctctacctgatcagaacaaaggtaacaatggtgggaaaggtggaaaaaagaagaaaaataaaaactcttctaaaccacagaaaaacaatggatccacttgggccaatgtccctctacctccccccccagtccagccccttcctggcacggagctggaacactatgcagtggaacaacaagaaaatggctatgacagtgatagctggtgcccaccattgccagtacaaacttacttacaccaaggtctggaagatgaactggaagaagatgatgatagggtcccaacacctcctgttcgaggcgtggcttcttctcctgctatctcctttggacagcagtccactgcaactcttactccatccccacgggaagagatgcaacccatgctgcaggctcacctggatgagttgacaagagcctatcagtttgatatagcaaaacaaacatggcacattcaaagcaataatcaacctccacagcctccagttccaccgttaggttatgtgtctggagccttgatttctgatttggaaacggatgttgcagatgatgatgccgacgacgaagaggaagctttagaaatccccaggcccctgagagcactggaccagactcctggatccagcatggacaatctagacagctctgtgacagcaatatttggtatcttcatatgttatctctaggtagatttacaggttagtcatagtgcagaaatataggacagaatcagtgtgctataatgtcattctctagaacccattccctttattttcattttaggaaaagcctttacctcctctcaaagacctcgacctaccagcccattttctactgacagtaacaccagtgcagccctgagtcaaagtcagaggcctcggcccactaaaaaacacaagggagggcggatggaccaacaaccagcattgcctcatcgaagggaaggaatgacagatgaggaggccttggtgccctatagcaagcccagtttcccatctccaggtggccacagctcatcaggaacagcttcttctaagggatccactggacctaggaaaaccgaggtgttgagagcaggccaccagcgcaatgccagcgaccttcttgacataggatatatgggctccaacagtcaaggacagtttacagagtaaatgagaggagacatacaaagctgctctgaaggaccatcaggtccggactcatggaagtgatgactctaaacagtgcaatgaacaatttatttatgtactattaaaagaactgtaaatgcaatgtaaagacacacagccacacatatcccacagatattttcattgtgttcttctcttaagtacaccacccaccttaactctttcttgtcaggagtatataaaaaagaaagaaaacaaaactcgccctacaggaagaaaaggattctcctctgtatataatttcttttgtgcattgctatgcaagctcactctttttagctctgctcatattattgtctgttcttattggtctgttgtactatatgtgaattaataggctgtggtgccatatattaacttttaattgtgtaacttttatgtttaaattttgcactgcaattttatttggtgataagcacaaatctctactcctcatgacatgaagaaaaagactgaatgtgaagggagtttctgtactgtaagctagattggataatgatggctgtaacaaatcatgttagatggttttcagttggggtgtagaaataggaagatgcaaaggaacaatggtgttggcaaagtcttctttgaatatcagggactgagtcaataaaaaaaatagtagaaaggtggcttttactattgacaaaagccggggtcaaaaaaagtagtttaagtcttaagactgaatatgcattaaagtatgcaggtagcaaagatgtaataaatttgcttaaaaaaagaaattaaagttttatttagaatcaattttacctgtcattgtaattgacccatctgagaattacaataagcaagaggaaattaaggtgttttgcaagagctgtatttatattacagttttttaaaaacattttctgaattatcgtaattaagctctccaactcgttaagtcagaatataatatgaagttccccaaggaaacgaacaaaatgaactctagaatatctagcaaatagttaaagaagcaatttattattagggcatactcgggctgtttccaaatataaactctattgcaatatcttatttcatctttctaatacatgtacagtgcacactagaggatagagctgcatcacttaaattcatgacttaaaaaataatacagtttatatacaacttgttttttatttgattaagaagtgaagtttacgccacccaatgtatagccaaattgtacgtgcttaaaaaacagtgccgagagtatgttcagttcgcagtaagtagatttattggaataaatattctatggtacattctcagaaattggcttccaactaaaatacgtttgacccattttgaataaggaaattgaaaagaaaaatttaaaaggagaaaaaaatgcatgtttataaactttttaaataaaaccagaccttgtaagtggacatt

SEQ ID NO: 7462 - protein, 670 aa, Homo sapiens
  ref <308>: DATABASE ACCESSION NUMBER: Refseq / XP_031246
  ref <309>: DATABASE ENTRY DATE: 2002-08-01
MVRAINPQGLSDPSPMSDPVRTQDISPPAQGVDHRQVQKELGDVLVRLHNPVVLTPTTVQVTWTVDRQPQFIQGYRVMYRQTSGLQATSSWQNLDAKVPTERSAVLVNLKKGVTYEIKVRPYFNEFQGMDSESKTVRTTEEAPSAPPQSVTVLTVGSYNSTSISVSWDPPPPDHQNGIIQEYKIWCLGNETRFHINKTVDAAIRSVIIGGLFPGIQYRVEVAASTSAGVGVKSEPQPIIIGRRNEVVITENNNSITEQITDVVKQPAFIAGIGGACWVILMGFSIWLYWRRKKRKGLSNYAVTFQRGDGGLMSNGSRPGLLNAGDPSYPWLADSWPATSLPVNNSNSGPNEIGNFGRGDVLPPVPGQGDKTATMLSDGAIYSSIDFTTKTSYNSSSQITQATPYATTQILHSNSIHELAVDLPDPQWKSSIQQKTDLMGFGYSLPDQNKGNNGGKGGKKKKNKNSSKPQKNNGSTWANVPLPPPPVQPLPGTELEHYAVEQQENGYDSDSWCPPLPVQTYLHQGLEDELEEDDDRVPTPPVRGVASSPAISFGQQSTATLTPSPREEMQPMLQAHLDELTRAYQFDIAKQTWHIQSNNQPPQPPVPPLGYVSGALISDLETDVADDDADDEEEALEIPRPLRALDQTPGSSMDNLDSSVTAIFGIFICYL

SEQ ID NO: 7463 - DNA, 409 bp, Rattus norvegicus
  ref <308>: DATABASE ACCESSION NUMBER: EMBL / AI639461
  ref <309>: DATABASE ENTRY DATE: 2000-03-04
ttaaatgggagctttgtgcaccccccacacacacataggactccacatactatgagtggatggtagcctatgcaaatgagaaccggaacataatcaaatctgacttgtaaatcagcaaaggaaacgtgtttctccagaagtcaagatgtcaaagatacattttaccggttctgtatacactccgccttaagggtccatccgctttgaatgttctagacgcacacctctgaggaaatctagtgtgttttgaggcaggagacatcaggcagatccaaattctcgtcttgggaaggtcttcagaccctgcgcatggagacgcagcttggcattgtctttagcaggagcgatcttttcagtgtgagcctgcatttcctttggagcttgactccaattcacagaacacgtcccg

SEQ ID NO: 7464 - DNA, 315 bp, Rattus norvegicus
  ref <308>: DATABASE ACCESSION NUMBER: EMBL / AI639465
  ref <309>: DATABASE ENTRY DATE: 2000-03-04
ttgggagttacaggaaaagagcgctgtgagtttattttttattctttttcatttttttatttttgagacagagagtctctctatgttgccctggctggtctggaactctccatgtagaccaggctagcctcgaactcatagagatccaactgcctctgcctccagagtgctgggatcaaagggtgtgcaccccccaatacccagccccttctgcatttattaaaacaacatataacacaaattcagtcctctccccatgtttggggatgggtactgaagttcagtacattgcccctttctaggcctttgagtgag

SEQ ID NO: 7465 - DNA, 1903 bp, Homo sapiens
  ref <308>: DATABASE ACCESSION NUMBER: EMBL / AF361946
  ref <309>: DATABASE ENTRY DATE: 2001-05-14
ttaagtaaaataagtgccgaggggtggagaacgggctggttggagtgggggtctccatcatctccagcaaaaggctgtgctgaagtctgagcaaagggaagggctcagagagaggggctgcccgacccttccatctaggagctgcccaggactccagaggaggggaaggaattgatttaggtcagtgaggggttgcgtggggctgggagggggttgaggttgggaggctgaaggaggagactcccttcaacctgggaggtggaggttgcagtgagcagagatcgtgccactgcacaatcctttctatctcccttcctgggctgtgagtttctcggggcagggaaacagatcactcatccatctgtcacgttgtgatgtaaactagttacctgatttatatactagtactcagaaaaatgtctgatgaatgaataaaattcatccatgaaacattttcatcatagcattggctattaaccccttgaatccccgtggctcacttgctgggtcccatccctgacccactaacctggtgccgtggggacaccaatttttggaggaaagctctgggtaccctttcttgccctaagcctgcctctgaacaggctgttcttgtttatgacccccgtcccagcagaatagtgattgctcatccctgcatgtgatttgagagggccagtctttcaggcctggaggaaactcaagccccaccagcccgcttggcatcggaatgctcagctagtcccctcctggggctcatgtgaccaagatctagctataaatatcagaggggcctcagaccaagacagaattcgggcaccaggagaaggaaagccaacaggatccgacccggtgttttgtgacaaaggcaagacccccaggtctacttagagcaaagttagtacaggaggcagctaggcgtggctctcattccttcccacagaaaggattataagtcgagcctgatccaggaagggaatcccatggagaacttggagaagcagctgatctgccctatctgcctggagatgtttaccaagccagtggtcatcttgccgtgccagcacaacctgtgccggaagtgtgccaatgacatcttccaggctgcaaatccctactggaccagccggggcagctcagtgtccatgtctggaggccgtttccgctgccccacctgccgccacgaagtgatcatggatcgtcacggagtgtacggcctgcagaggaacctgctggtggagaacatcatcgacatctacaaacaggagtgctccagtcggccgctgcagaagggcagtcaccccatgtgcaaggagcacgaagatgagaaaatcaacatctactgtctcacgtgtgaggtgcccaccctgttccatggcaaggttttgggatccaaaggcctgggggggggccccttgcagccccaggggggggggtcggggcccctggagggcaatggggaggtgatttttttttttgttcagggggcagggattagggtaggaccctcaccgtgggtccagcagacattgaaccagaattggaaacgtgctttgaaacaatcacacaggacacttttttacattgggcaaaatggaatattttgtacatttttaaaatgtgatttttgtaaatacttgtatatgtatgccaatttggtgctttttgtaaaggaacttttgtataataatgcctggtcattggggacctgcgattgtcagaaagaggggaaggaagccaggttgatacagctgcccatttcctttcctgagcaggaggatggggtagcactcacagggacgatgtgctgtatttcagtgtttatcccagacatacggggtggtaaatgagtttgtgttatatgttgttttaataaatgcacaatgcttttttcctgtttttc

SEQ ID NO: 7466 - protein, 353 aa, Homo sapiens
  ref <308>: DATABASE ACCESSION NUMBER: SWISS-Prot / Q969Q1
  ref <309>: DATABASE ENTRY DATE: 2002-06-15
MDYKSSLIQDGNPMENLEKQLICPICLEMFTKPVVILPCQHNLCRKCANDIFQAANPYWTSRGSSVSMSGGRFRCPTCRHEVIMDRHGVYGLQRNLLVENIIDIYKQECSSRPLQKGSHPMCKEHEDEKINIYCLTCEVPTCSMCKVFGIHKACEVAPLQSVFQGQKTELNNCISMLVAGNDRVQTIITQLEDSRRVTKENSHQVKEELSQKFDTLYAILDEKKSELLQRITQEQEKKLSFIEALIQQYQEQLDKSTKLVETAIQSLDEPGGATFLLTAKQLIKSIVEASKGCQLGKTEQGFENMDFFTLDLEHIADALRAIDFGTDEEEEEFIEEEDQEEEESTEGKEEGHQ

SEQ ID NO: 7467 - DNA, 315 bp, Rattus norvegicus; identical to SEQ ID NO: 7464
  ref <308>: DATABASE ACCESSION NUMBER: EMBL / AI639465
  ref <309>: DATABASE ENTRY DATE: 2000-03-04

SEQ ID NO: 7468 - DNA, 1903 bp, Homo sapiens; identical to SEQ ID NO: 7465
  ref <308>: DATABASE ACCESSION NUMBER: EMBL / AF361946
  ref <309>: DATABASE ENTRY DATE: 2001-05-14

SEQ ID NO: 7469 - protein, 353 aa, Homo sapiens; identical to SEQ ID NO: 7466
  ref <308>: DATABASE ACCESSION NUMBER: SWISS-Prot / Q969Q1
  ref <309>: DATABASE ENTRY DATE: 2002-06-15

SEQ ID NO: 7470 - DNA, 413 bp, Rattus norvegicus
  ref <308>: DATABASE ACCESSION NUMBER: EMBL / AI639471
  ref <309>: DATABASE ENTRY DATE: 2000-03-04
ttgttttttaaaacataaaaccaacttttatttttgaaccaaaccataaataattttttttaaaacaaagcgggccccgggggaaattttaaggccttagccacccttccaagaagggaaaaagtaacaccccctgaaacctcgccgccacttgtttttaaaaacctgctttacctccaaaaaatgggcggccccacttggaggtccccggcccggtttgtgactgcggagggagaatccccaacttagaccaaagcctggcaaaaccccggggtggggggggcccaaaaagccacccgcccaatttttttttcggaaaacacctgttacgaaaggaaaaaccaaggcttttttccactggaaacaaaaaaaggggcaaggccgggccctctttctgaaccaacaatacaatt

SEQ ID NO: 7471 - DNA, 413 bp, Rattus norvegicus; identical to SEQ ID NO: 7470
  ref <308>: DATABASE ACCESSION NUMBER: EMBL / AI639471
  ref <309>: DATABASE ENTRY DATE: 2000-03-04

SEQ ID NO: 7472 - DNA, 502 bp, Rattus norvegicus
  ref <308>: DATABASE ACCESSION NUMBER: EMBL / AI639474
  ref <309>: DATABASE ENTRY DATE: 2000-03-04
ttcacgtgttacatgattctttatgaaatgtccaggagagacagaaagactgacgattaactagagagaagagaaaatgggggtacaaacagttactgggtttcttttaggaatgagaaaaaacaaattggaattacatagaaatggttgtagatttgaccaaaaccagtgacttgcatatttaaaaagagtaaatattttatggtatgtaaactgcacacagacacacaaaaaaggtgaacaaactaatttcttctctattgtctcaggttacctactgagtcacaaaaatatagaaataagtgcaaagacgcctgacaagtataaccacactgcaacaagttcagtaaaagcaggccctcggcctccagacctgggtcaaatccagggcctcacacgtgccagtaggaaggactcttccactgagctatagccccaacgcctttctccctcttttgggcagggtcgtatgtggtccagactggccttaagccaagtttga

SEQ ID NO: 7473 - DNA, 286 bp, Rattus norvegicus
  ref <308>: DATABASE ACCESSION NUMBER: EMBL / AI639484
  ref <309>: DATABASE ENTRY DATE: 2000-03-04
ttccactaagtagttttaataaaacgaaaggtcaaaagtcagcatcaggagatcccacagcacagttgaaactgttgaagaagcaactcccaaagaagccatcataaaacacatcatgaacagcgaacggtcttgctcaatgagggaacagctcgtccctttagccctcagtagaaaccactgggagtctctcagggcaaaacaaaaaaaagaaaaaaaaagaaaagaattgatggctaaaaatgttgtacattatatcccagtgacctgccacagggactgtttt

SEQ ID NO: 7474 - DNA, 1739 bp, Homo sapiens; identical to SEQ ID NO: 2856
  ref <308>: DATABASE ACCESSION NUMBER: EMBL / AK000592
  ref <309>: DATABASE ENTRY DATE: 2000-02-22

SEQ ID NO: 7475 - protein, 216 aa, Homo sapiens; identical to SEQ ID NO: 2857
  misc_feature (1)..(216): Xaa=Unknown amino acid

SEQ ID NO: 7476 - DNA, 286 bp, Rattus norvegicus; identical to SEQ ID NO: 7473
  ref <308>: DATABASE ACCESSION NUMBER: EMBL / AI639484
  ref <309>: DATABASE ENTRY DATE: 2000-03-04

SEQ ID NO: 7477 - DNA, 1739 bp, Homo sapiens; identical to SEQ ID NO: 2856
  ref <308>: DATABASE ACCESSION NUMBER: EMBL / AK000592
  ref <309>: DATABASE ENTRY DATE: 2000-02-22

SEQ ID NO: 7478 - protein, 216 aa, Homo sapiens; identical to SEQ ID NO: 2857
  misc_feature (1)..(216): Xaa=Unknown amino acid

SEQ ID NO: 7479 - DNA, 401 bp, Rattus norvegicus
  ref <308>: DATABASE ACCESSION NUMBER: EMBL / AI639488
  ref <309>: DATABASE ENTRY DATE: 2000-03-04
ttagactaagacaatgctccggctttaatgtatgaaaataatacccatgttgtctaatttgggggtcatacattagaagtgtaaaggtctgcgtctgcccgccgtctagttgaagtacgtgagcacaatcatttggatcggctgtctgcacacggggcagggcttattcctcttctttagcttctttgcacacgtgaaacatgacatcaggtgtccggttttgccgtgaacaatgcaaccatttttaggccgcccctggcaaatcacacatggctcgatggcgttcagagagaagctggattccatactttcctctttgtcttgtgtgtcctccttcaactctttgccactttcttggctgctgtaaacaatgctactggaagtcgacggctgggaatagt

SEQ ID NO: 7480 - protein, 489 aa, Rattus norvegicus
  ref <308>: DATABASE ACCESSION NUMBER: SWISS-Prot / AAA91167
  ref <309>: DATABASE ENTRY DATE: 2002-06-15
MCNTNMSVSTEGAASTSQIPASEQETLVRPKPLLLKLLKSVGAQNDTYTMKEIIFYIGQYIMTKRLYDEKQQHIVYCSNDLLGDVFGVPSFSVKEHRKIYAMIYRNLVAVSQQDSGTSLSESRRQPEGGSDLKDPLQAPPEEKPSSSDLISRLSTSSRRRSISETEENTDELPGERHRKRRRSLSFDPSLGLCELREMCSGGSSSSSSSSSESTETPSHQDLDDGVSEHSGDCLDQDSVSDQFSVEFEVESLDSEDYSLSDEGHELSDEDDEVYRVTVYQTGESDTDSFEGDPEISLADYWKCTSCNEMNPPLPSHCKRCWTLRENWLPDDKGKDKVEISEKAKLENSAQAEEGLDVPDGKKLTENDAKEPCAEEDSEEKAEQTPLSQESDDYSQPSTSSSIVYSSQESVKELKEETQDKDESVESSFSLNAIEPCVICQGRPKNGCIVHGKTGHLMSCFTCAKKLKKRNKPCPVCRQPIQMIVLSYFN

SEQ ID NO: 7481 - DNA, 2372 bp, Homo sapiens
  ref <308>: DATABASE ACCESSION NUMBER: Refseq / NM_002392
  ref <309>: DATABASE ENTRY DATE: 2002-11-05
gcaccgcgcgagcttggctgcttctggggcctgtgtggccctgtgtgtcggaaagatggagcaagaagccgagcccgaggggcggccgcgacccctctgaccgagatcctgctgctttcgcagccaggagcaccgtccctccccggattagtgcgtacgagcgcccagtgccctggcccggagagtggaatgatccccgaggcccagggcgtcgtgcttccgcagtagtcagtccccgtgaaggaaactggggagtcttgagggacccccgactccaagcgcgaaaaccccggatggtgaggagcaggcaaatgtgcaataccaacatgtctgtacctactgatggtgctgtaaccacctcacagattccagcttcggaacaagagaccctggttagaccaaagccattgcttttgaagttattaaagtctgttggtgcacaaaaagacacttatactatgaaagaggttcttttttatcttggccagtatattatgactaaacgattatatgatgagaagcaacaacatattgtatattgttcaaatgatcttctaggagatttgtttggcgtgccaagcttctctgtgaaagagcacaggaaaatatataccatgatctacaggaacttggtagtagtcaatcagcaggaatcatcggactcaggtacatctgtgagtgagaacaggtgtcaccttgaaggtgggagtgatcaaaaggaccttgtacaagagcttcaggaagagaaaccttcatcttcacatttggtttctagaccatctacctcatctagaaggagagcaattagtgagacagaagaaaattcagatgaattatctggtgaacgacaaagaaaacgccacaaatctgatagtatttccctttcctttgatgaaagcctggctctgtgtgtaataagggagatatgttgtgaaagaagcagtagcagtgaatctacagggacgccatcgaatccggatcttgatgctggtgtaagtgaacattcaggtgattggttggatcaggattcagtttcagatcagtttagtgtagaatttgaagttgaatctctcgactcagaagattatagccttagtgaagaaggacaagaactctcagatgaagatgatgaggtatatcaagttactgtgtatcaggcaggggagagtgatacagattcatttgaagaagatcctgaaatttccttagctgactattggaaatgcacttcatgcaatgaaatgaatcccccccttccatcacattgcaacagatgttgggcccttcgtgagaattggcttcctgaagataaagggaaagataaaggggaaatctctgagaaagccaaactggaaaactcaacacaagctgaagagggctttgatgttcctgattgtaaaaaaactatagtgaatgattccagagagtcatgtgttgaggaaaatgatgataaaattacacaagcttcacaatcacaagaaagtgaagactattctcagccatcaacttctagtagcattatttatagcagccaagaagatgtgaaagagtttgaaagggaagaaacccaagacaaagaagagagtgtggaatctagtttgccccttaatgccattgaaccttgtgtgatttgtcaaggtcgacctaaaaatggttgcattgtccatggcaaaacaggacatcttatggcctgctttacatgtgcaaagaagctaaagaaaaggaataagccctgcccagtatgtagacaaccaattcaaatgattgtgctaacttatttcccctagttgacctgtctataagagaattatatatttctaactatataaccctaggaatttagacaacctgaaatttattcacatatatcaaagtgagaaaatgcctcaattcacatagatttcttctctttagtataattgacctactttggtagtggaatagtgaatacttactataatttgacttgaatatgtagctcatcctttacaccaactcctaattttaaataatttctactctgtcttaaatgagaagtacttggttttttttttcttaaatatgtatatgacatttaaatgtaacttattattttttttgagaccgagtcttgctctgttacccaggctggagtgcagtgggtgatcttggctcactgcaagctctgccctccccgggttcgcaccattctcctgcctcagcctcccaattagcttggcctacagtcatctgccaccacacctggctaattttttgtacttttagtagagacagggtttcaccgtgttagccaggatggtctcgatctcctgacctcgtgatccgcccacctcggcctcccaaagtgctgggattacaggcatgagccaccg

SEQ ID NO: 7482 - protein, 491 aa, Homo sapiens
  ref <308>: DATABASE ACCESSION NUMBER: SWISS-Prot / Q9UMT8
  ref <309>: DATABASE ENTRY DATE: 2002-06-15
MCNTNMSVPTDGAVTTSQIPASEQETLVRPKPLLLKLLKSVGAQKDTYTMKEVLFYLGQYIMTKRLYDEKQQHIVYCSNDLLGDLFGVPSFSVKEHRKIYTMIYRNLVVVNQQESSDSGTSVSENRCHLEGGSDQKDLVQELQEEKPSSSHLVSRPSTSSRRRAISETEENSDELSGERQRKRHKSDSISLSFDESLALCVIREICCERSSSSESTGTPSNPDLDAGVSEHSGDWLDQDSVSDQFSVEFEVESLDSEDYSLSEEGQELSDEDDEVYQVTVYQAGESDTDSFEEDPEISLADYWKCTSCNEMNPPLPSHCNRCWALRENWLPEDKGKDKGEISEKAKLENSTQAEEGFDVPDCKKTIVNDSRESCVEENDDKITQASQSQESEDYSQPSTSSSIIYSSQEDVKEFEREETQDKEESVESSLPLNAIEPCVICQGRPKNGCIVHGKTGHLMACFTCAKKLKKRNKPCPVCRQPIQMIVLTYFP

SEQ ID NO: 7483 - DNA, 408 bp, Rattus norvegicus
  ref <308>: DATABASE ACCESSION NUMBER: EMBL / AI639490
  ref <309>: DATABASE ENTRY DATE: 2000-03-04
ttgctgtatgaaaactgtatttttttcttttaatataaaactattgtcactgccacaaaatagaacaagtttctgattattttacaacagcgggcaggcggccgaggggaaggagcaggaggcgggggaagggattgtgctggaagaagtgtccagaccaggctctcccctccctgcccatgctggtcctcagctcgatctgccgctttcccatgaaatgttgagtacaaatatatgtgcaaatgccccctagaacttgagaaaagaaaaaaagtcttaaaaaacagtcaaaaagttttcttcatttcatgcaaagattgtagttgaagggtttctggtataaaaaacacccgggcttggttcgtatacatttttgcattgcaagaatcttggatgggtgtccaggcc

SEQ ID NO: 7484 - DNA, 403 bp, Rattus norvegicus
  ref <308>: DATABASE ACCESSION NUMBER: EMBL / AI639494
  ref <309>: DATABASE ENTRY DATE: 2000-03-04
ttgacggaggccggttgcatttagaaccactcaattaacacagctggaccacatagctggtccctgataaaggggctggaggtacaactcagagctctcaaatctaaatgaagtgattccatggacttggggatctcccttcccttcaccagggcagggaaatttcatcatgaagagaccaaggggactcactactgtactcacaccccggtaccacataacctcgggtcagtgacagatgcgttcacaccacgccttgaaaagttgactgcagagcccaaatgaaggcactgactagggttgtgatgactctactccagaaaggtgcatgaagaggtctcctagctacgctacatccacatgatacaggctggggacttgccgggtttatcggttctcgata

SEQ ID NO: 7485 - protein, 648 aa, Rattus norvegicus
  ref <308>: DATABASE ACCESSION NUMBER: SWISS-Prot / P11345
  ref <309>: DATABASE ENTRY DATE: 2002-06-15
MEHIQGAWKTISNGFGLKDAVFDGSSCISPTIVQQFGYQRRASDDGKLTDSSKTSNTIRVFLPNKQRTVVNVRNGMSLHDCLMKALKVRGLQPECCAVFRLLQEHKGKKARLDWNTDAASLIGEELQVDFLDHVPLTTHNFARKTFLKLAFCDICQKFLLNGFRCQTCGYKFHEHCSTKVPTMCVDWSNIRQLLLFPNSTASDSGVPAPPSFTMRRMRESVSRMPASSQHRYSTPHAFTFNTSSPSSEGSLSQRQRSTSTPNVHMVSTTLPVDSRMIEDAIRSHSESASPSALSSSPNNLSPTGWSQPKTPVPAQRERAPGSGTQEKNKIRPRGQRDSSYYWEIEASEVMLSTRIGSGSFGTVYKGKWHGDVAVKILKVVDPTPEQLQAFRNEVAVLRKTRHVNILLFMGYMTKDNLAIVTQWCEGSSLYKHLHVQETKFQMFQLIDIARQTAQGMDYLHAKNIIHRDMKSNNIFLHEGLTVKIGDFGLATVKSRWSGSQQVEQPTGSVLWMAPEVIRMQDNNPFSFQSDVYSYGIVLYELMTGELPYSHINNRDQIIFMVGRGYASPDLSRLYKNCPKAMKRLVADCVKKVKEERPLFPQILSSIELLQHSLPKINRSASEPSLHRAAHTEDINACTLTTSPRLPVF

SEQ ID NO: 7486 - DNA, 2602 bp, Homo sapiens
  ref <308>: DATABASE ACCESSION NUMBER: EMBL / X06409
  ref <309>: DATABASE ENTRY DATE: 1991-03-20
gcggtcagggatcatgagggagagtgcgttggagccggggcctgtgcccgaggcgccggcggggggtcccgtgcacgccgtgacggtggtgaccctgctggagaagctggcctccatgctggagactctgcgggagcggcagggaggcctggctcgaaggcagggaggcctggcagggtccgtgcgccgcatccagagcggcctgggcgctctgagtcgcagccacgacaccaccagcaacaccttggcgcagctgctggccaaggcggagcgcgtgagctcgcacgccaacgccgcccaagagcgcgcggtgcgccgcgcagcccaggtgcagcggctggaggccaaccacgggctgctggtggcgcgcgggaagctccacgttctgctcttcaaggaggagggtgaagtcccagccagcgctttccagaaggcaccagagcccttgggcccggcggaccagtccgagctgggcccagagcagctggaggccgaagttggagagagctcggacgaggagccggtggagtccagggcccagcggctgcggcgcaccggattgcagaaggatgcaattcgaagtcacagcgaatcagcctcaccttcagccctgtccagtagccccaacaatctgagcccaacaggctggtcacagccgaaaacccccgtgccagcacaaagagagcgggcaccagtatctgggacccaggagaaaaacaaaattaggcctcgtggacagagagattcaagctattattgggaaatagaagccagtgaagtgatgctgtccactcggattgggtcaggctcttttggaactgtttataagggtaaatggcacggagatgttgcagtaaagatcctaaaggttgtcgacccaaccccagagcaattccaggccttcaggaatgaggtggctgttctgcgcaaaacacggcatgtgaacattctgcttttcatggggtacatgacaaaggacaacctggcaattgtgacccagtggtgcgagggcagcagcctctacaaacacctgcatgtccaggagaccaagtttcagatgttccagctaattgacattgcccggcagacggctcagggaatggactatttgcatgcaaagaacatcatccatagagacatgaaatccaacaatatatttctccatgaaggcttaacagtgaaaattggagattttggtttggcaacagtaaagtcacgctggagtggttctcagcaggttgaacaacctactggctctgtcctctggatggccccagaggtgatccgaatgcaggataacaacccattcagtttccagtcggatgtctactcctatggcatcgtattgtatgaactgatgacgggggagcttccttattctcacatcaacaaccgagatcagatcatcttcatggtgggccgaggatatgcctccccagatcttagtaagctatataagaactgccccaaagcaatgaagaggctggtagctgactgtgtgaagaaagtaaaggaagagaggcctctttttccccagatcctgtcttccattgagctgctccaacactctctaccgaagatcaaccggagcgcttccgagccatccttgcatcgggcagcccacactgaggatatcaatgcttgcacgctgaccacgtccccgaggctgcctgtcttctagttgactttgcacctgtcttcaggctgccaggggaggaggagaagccagcaggcaccacttttctgctccctttctccagaggcagaacacatgttttcagagaagctgctgctaaggaccttctagactgctcacagggccttaacttcatgttgccttcttttctatccctttgggccctgggagaaggaagccatttgcagtgctggtgtgtcctgctccctccccacattccccatgctcaaggcccagccttctgtagatgcgcaagtggatgttgatggtagtacaaaaagcaggggcccagccccagctgttggctacatgagtatttagaggaagtaaggtagcaggcagtccagccctgatgtggagacacatgggattttggaaatcagcttctggaggaatgcatgtcacaggcgggactttcttcagagagtggtgcagcgccagacattttgcacataaggcaccaaacagcccaggactgccgagactctggccgcccgaaggagcctgctttggtactatggaacttttcttaggggacacgtcctcctttcacagcttctaaggtgtccagtgcattgggatggttttccaggcaaggcactcggccaatccgcatctcagccctctcagggagcagtcttccatcatgctgaattttgtcttccaggagctgcccctatggggcggggccgcagggccagccttgtttctctaacaaacaaacaaacaaacagccttgtttctctagtcacatcatgtgtatacaaggaagccaggaatacaggttttcttgatgatttgggttttaattttgtttttattgcacctgacaaaatacagttatctgatggtccctcaattatgttattttaataaaataaattaaatttaaaaaaaaaaaaaaaa

SEQ ID NO: 7487 - protein, 648 aa, Homo sapiens [sequence omitted]

SEQ ID NO: 7488 - DNA, 370 bp, Rattus norvegicus
  ref <308>: DATABASE ACCESSION NUMBER: EMBL / AI639499
  ref <309>: DATABASE ENTRY DATE: 2000-03-04
ttaacagttgtgactggttaactttaatttgtcaaaataaatctgcagtattttgcatgttagtaatacagtgctggtattgacaggtaaaatcatcatctgcgtacatagaaaccttcatttaggagcacaccttaggagggaaatgaatacacagtaaaaggtagatgcaggccaagcagcgagccctagagcaagcagaacaggctggatgtcagagttgaagattatctaatacaactgtttagctgccaatctgataaagggaaagctctccgctgggttacaaccaggagggaaaacatactctgccttttgtagagtggtggccgtcggtgccttcgacacacggttgaatcagttcatcagt

SEQ ID NO: 7489 - DNA, 486 bp, Rattus norvegicus
  misc_feature (1)..(486): n=a, c, g or t
  ref <308>: DATABASE ACCESSION NUMBER: EMBL / AI639501
  ref <309>: DATABASE ENTRY DATE: 2000-03-04
ttccacatagataactttaggttaactacaaaaatcatgaaatgaagaacagatcatgggactgcacactcaagcatcactggagtgacacacaggtttccccagatgactgctaagagggaaaaaaggaaccaggatacaacaaactcatatttaagtagtaaacatgtcagatattttaaaataataaatacagaatagcaggagagaaactaaaatcataaaacagcatggagtatattttattttctttaagacagatgaaatttctaggcacagttttaggcattaaggaggacacagaggcataggttagtgtgtgctgctctgtacaaaaatacagtctgaataaattacattgctagccatacaattagacaatcacttatcagtcaattcactgcatgtttaataatatacaggtacatgcgaatccatatatatcatttatatttcaaacacataagnctctctatatttggtttt

SEQ ID NO: 7490 - DNA, 3803 bp, Homo sapiens
  ref <308>: DATABASE ACCESSION NUMBER: Refseq / NM_031442
  ref <309>: DATABASE ENTRY DATE: 2001-10-04
cgcccaggaatggcttcggcgggcagcggcatggaggaggtgcgcgtgtcggtgctgacccccttgaagctggtcgggctggtgtgcatcttcctggcgctgtgtctggacctgggggcggtgctgagcccggcctgggtcacagctgaccaccagtactacctgtcgttgtgggagtcctgccgcaaacccgccagcttggacatctggcactgcgagtccacgctcagcagcgattggcagattgctactctggctttactcctgggcggcgctgccatcattctcattgcattcctggtgggtttgatttctatctgcgtgggatctcgaaggcgtttctatagacctgttgcggtcatgctttttgcagcagttgttttacaggtttgcagcctggtcctttacccaatcaagttcattgaaactgtgagcttgaaaatttaccatgagttcaactggggttatggcctggcctggggtgcaactatattttcgtttgggggtgccatcctttattgcctgaaccctaagaactatgaagactactactagaaccaatagtctcaaagtaaaaacaaccaccaccatccaacaaaaggattacgtctgcatcttttctaacttactattttctaaaacacttgtggagcatcaagcagtttgctcagttgatttaatcttttttgccttttggctgtcaatatcataaccagcttttacatccattttagaaatctgcacaaattaagagagctgattagacataggcaaatgctgcaaacttccaatatgttcatatcgtttttcttgacaaatgaagggtctatatgacagcaaccattgtgagaaactagttggaatgagatttgcctcaatctcctattgcctgcaggggagcagttggcataagcaacatttagaagttcctttgcgctgacaaggattccactgttagagcccttaccgcctgcttatcctacccaatgactacattggctgttggttatttgcttgagtgagcccttgaaaaatgaactgcccttcagcatctaatgggagttgtgaatgtaactggttaatgatacacattccaccttcaggaacactctttttaatgggaggttatgctttggcaatcagcgtctccctgggaagagagtcaagacttggagacatgtgcttctcattatgtggttagaaattggtgcctcagccctatctagactggggaaaaattgaggatctctgtttttcctggggcaaacagaaagaaatctgcatgagttgcttttgtaccctttaaatcatttgccaaacattgcagcaaacaagtgtgcgtatgtaacaagcttcactgtttttatagaaggtgaaccattagtataaatggtaataagttgttccctaaccctccacatacatttgcctatcacacgtaaaattaatatttactctagtgaagtggtttgagcactaaccttgtacacattgttaagaggcttagattggtattcatacttatttaccatacaaaagtatggtaccttaaagcttttgctctatgttctttactgtttcactggaaagtgtcaatagagttgcctaagaataaaaattgaaatggtgttaatctgaaaattaatgattctctgtaagcactgtagttgaaaagagagtagcaattaggatgatcattttgtgtaaaattcattaaaatagaaggctgctattttttgcaagtattttaaatgtcttcatttttttaagaaaggaatagcgatagatttatataaatatctaaatgtctcagtagaggagtagaattcatctggttatcacctggtcctctgaagttaactgatgggctaaccgatttgtgcacacacttaggatggatttatgttaagggaattacttactgactgttcaatggaaggaagtattaataatagggaataagtttgcaactaatctcatgctgcaaacttgtgttaattctgtttaatatacaaatttggatagcttaattataaacatatttttatatcaaatatacagttctaatataaaagttataaataattatttttgttaacaaagacactaaaacagtatgttctggttttggccctcttgcagaaagaagcattagaaaaattactttaaaagtagctatatgttactgtattgcaaaatctgttaagagcaggaccacatcgatagtatttaataatttgttttacctcccaaaacacagttcttctttcagcttgtcttaagaatggttgccaaaaacaacagccaaaaaaaaaaaaacctattttattatccaaatgctagaaaacacacatgaattttctataaaatcacgaatatgaagtaccaggtttagtcttactttagcaatgatagacaaaagcgaataaatacatcacagacagaaacctttataaaaatatatgattctataaagaatcattagaaattatgagtggaaattctccagaaagatagtattatagagtcttttgaagcaattttttgagaaatagtaaaatctggggcagagtgtcttgcagttaattgcatattgtcagagcagcatgagaaatatgatatttggatagggatttcagcaactaaacattctctgttctgagatctctttattcctgaataatgaaagaatagtactttggtgctgacaccaatgaggcacttctcttggtcctagtagaggatgcagtgtactgttaaaccaatatcatcacatctcgagtcttatcaagttttcattctctgtcaatatgacaagctcaaagtgacagaatatgttataggttgaagcacacatatttgcagtttactgaaaagtagatttcttatgtgacttttttcccttctcagcaaagagccctacactagatttctaccatcactaatatttggaagtatttcattactaacaatctcagtacaacatgaaaattgttgcttctcatctaaaatacaattttgtctatcagaataaacacaagtgaaattttcacctacattaacattatgtctttgcagctttaggtttgttagatgtgttcttaagcataatttttagccacaaacccattgttagatagatatctatggatatagatctacatctatagatatagatatacacacatatatatactcacacacatatagcataaaatactcagcagggctagttattccgatttcttgcacaattatttagctttttgtaagttcaacatgtaaattttaaagacataaatatagagagacttatgtgtttgaatataaatgatatatatggattagcatgtacctgtatattattaaacatgcaatgaactgactggtaagtgacgtctaattgtatggctagcaatgtaatttattcagactgtatttttgtacagagcagtgcactctaacctatgcctctgtgtcctctttaatgcctaaagctgtgcctagaaatttcatctgtcttaaaagtaaaatatacttcatgctgtttatgctattagtttctgtactgctattctatatttattatttttaaatatatgacatgtttactacttaaacatgaattcatggtatcctggttattttttttaagtcatctgggggaaaacctgtttatcactccagtgattttgagtttgcagtttcacaatcagttcttcatttcatgatttttgtagttgacatgaagtcatctatgtggaaaaaaataaaaataaaagtgaaaaaaaaaaaaaaaaaaa

SEQ ID NO: 7491 - protein, 181 aa, Homo sapiens
  ref <308>: DATABASE ACCESSION NUMBER: Refseq / NP_113630
  ref <309>: DATABASE ENTRY DATE: 2001-10-04
MASAGSGMEEVRVSVLTPLKLVGLVCIFLALCLDLGAVLSPAWVTADHQYYLSLWESCRKPASLDIWHCESTLSSDWQIATLALLLGGAAIILIAFLVGLISICVGSRRRFYRPVAVMLFAAVVLQVCSLVLYPIKFIETVSLKIYHEFNWGYGLAWGATIFSFGGAILYCLNPKNYEDYY

SEQ ID NO: 7492 - DNA, 543 bp, Rattus norvegicus
  ref <308>: DATABASE ACCESSION NUMBER: EMBL / AI639504
  ref <309>: DATABASE ENTRY DATE: 2000-03-04
ttagagagcatcagccgttctatttcttgcatgatcattggcatgaaggaaaagtccaaaacaggggctttgcattctggggattgcgggccaagtgttataagctcctcatagcactttgcctgggttcatgagacctcggggatccagtgtgtctttgagttgcctcatggtctccacacccacaggacccacttcctcttgaagcagctgcctcttgcccagaccgatgccatgttctccagtacatgtcccatggagtgccagggcacgcctgcccagattttctgcaaaggccttgaccctcctctgctcctccacatcatctgggttgaccaacaggatgcagtgaaagttgccgtcacccacatgcccaacaatgactcctgtgagttttgaggccttaagctcctccttggtctctaccaagatctctggcaaccgggagatgggcacacacacgtccgtggaataggccttacttcctggacgcagggccaaagctgcataccaagcattgtgccgtgcagcccaaagttcatt

SEQ ID NO: 7493 - DNA, 266 bp, Homo sapiens
  ref <308>: DATABASE ACCESSION NUMBER: EMBL / BI517972
  ref <309>: DATABASE ENTRY DATE: 2001-08-30
atggtctccacgcccacggcgcccacctcctcctgcagcagctgccgcttgcccattccgatgccatgctcccccgtgcacgttccgtggagagccagtgcccgcctgcccagctgttctgcaaaagccttgaccctgcccagttcctcggcgtcatcagggttgaccagcaggatgcagtggaagttgccgtcacccacatgcccgacaatgcttcctgtgagtcctgaggcattcagatcctccttggtctgcaccacgatctc

SEQ ID NO: 7494 - protein, 489 aa, Homo sapiens; identical to SEQ ID NO: 1391
  ref <308>: DATABASE ACCESSION NUMBER: SWISS-Prot / Q9BR76
  ref <309>: DATABASE ENTRY DATE: 2002-06-15

SEQ ID NO: 7495 - DNA, 382 bp, Rattus norvegicus
  ref <308>: DATABASE ACCESSION NUMBER: EMBL / AI639516
  ref <309>: DATABASE ENTRY DATE: 2000-03-04
ttaaacagaggtaaactttttttggaattttggcccccaaatttggtaaaaaacattttttggcaaaatttcgttttaaagttaaaggggcaaaaacaaaccccaatttttactttttttgaagggaaggttttttaaggccccattagggggaaaattttttgggtttaaaattttaaaaaaaaggatattagcaaagggggggcaaaattttcgggggggggttttgattaagctcctttttaaaaaaatccggggaaaaaggggaaaaaccccattaaacatccgggattaaacccctaaggggggtgggaattttatccggccaaactttaattttacagataggggcatttaaatcctgcccttgaaaagtactttt

SEQ ID NO: 7496 - DNA, 437 bp, Rattus norvegicus
  ref <308>: DATABASE ACCESSION NUMBER: EMBL / AI639518
  ref <309>: DATABASE ENTRY DATE: 2000-03-04
ttgggagaagagtctgaaaaagtaaactttaattaaaaaaaaataataataatacaacttcaggttcgtgctaggctctcccacttggccttttacagactggtcggttttccactgaattcggagaagctgaagatgtaccacagaggacacagagcaccatcacttctacaggcaaacagctcgtgcacaggcttgaccaatgtccgtggctcgagtgactaagcggcaaggctggtttcccggaagttcaaaacgccagcttcttcatcagcaggtagactcgggagtccacctcaaatccatgcaggttgttggcgtccccctgaagcctcatgaggaggccgccataggacacatacgcagagagacgtgtggctgcttccgttgaggtctcgtccccttcgatcctgtacactttcccatacattacatac

SEQ ID NO: 7497 - protein, 83 aa, Rattus norvegicus
  ref <308>: DATABASE ACCESSION NUMBER: SWISS-Prot / AAD19908
  ref <309>: DATABASE ENTRY DATE: 2002-10-01
MAGILFEDIFDVKDIDPEGKKFDRVSRLHCESESFKMDLILDVNIQIYPVDLGDKFRLVIASTLYEDGTLDDGEYNPTDDRPS

SEQ ID NO: 7498 - DNA, 812 bp, Homo sapiens
  ref <308>: DATABASE ACCESSION NUMBER: EMBL / Z49199
  ref <309>: DATABASE ENTRY DATE: 1997-10-16
gtccacgctagggggtgcacgtactcccaactgtggtcgcgctctcaccccttctgctgctctcgtggccccctcgcgatggcgggcatcctgtttgaggatattttcgatgtgaaggatattgacccggagggcaagaagtttgaccgagtgtctcgactgcattgtgagagtgaatctttcaagatggatctaatcttagatgtaaacattcaaatttaccctgtagacttgggtgacaagttccggttggtcatagctagtaccttgtatgaagatggtaccctggatgatggtgaatacaaccccactgatgataggccttccagggctgaccagtttgagtatgtaatgtatggaaaagtgtacaggattgagggagatgaaacttctactgaagcagcaacacgcctctctgcgtacgtgtcctatgggggcctgctcatgaggctgcagggggatgccaacaacctgcatggattcgaggtggactccagagtttatctcctgatgaagaagctagccttctgaacctcgcctgaagccagcctctctgccaagtcactcaggtcatgggcattgttcaagcctgagtggcagccgctcttgctcacctgttgaggaagggctggctcactgtccaccgtggcggcatctttaactggcctccactcaatgggaaactgactcgcctgtgaaagacacagtgggagagctgaaaatgaatcagaagctttatgtatatgatttttaaattaaactttactttttcagactgcccctcccctttttgtaaaaagtccatttactgt

SEQ ID NO: 7499 - protein, 150 aa, Homo sapiens
  ref <308>: DATABASE ACCESSION NUMBER: SWISS-Prot / P52434
  ref <309>: DATABASE ENTRY DATE: 2002-06-15
MAGILFEDIFDVKDIDPEGKKFDRVSRLHCESESFKMDLILDVNIQIYPVDLGDKFRLVIASTLYEDGTLDDGEYNPTDDRPSRADQFEYVMYGKVYRIEGDETSTEAATRLSAYVSYGGLLMRLQGDANNLHGFEVDSRVYLLMKKLAF

SEQ ID NO: 7500 - DNA, 406 bp, Rattus norvegicus
  ref <308>: DATABASE ACCESSION NUMBER: EMBL / AI639520
  ref <309>: DATABASE ENTRY DATE: 2000-03-04
ttgcttattcaccaaatttatttttgaacataaagaacaccagattatgacaaattaaaaacaaagcaccaaaagtcgctacacgttagtacctgagcggagactgaaggcaaatattcacataataaagccacatcataatgctgaaacacaggtaaaaacattcacaatactccacgaagtagaataagtagcactttcccccaaatcacaaccagttaaatgtaacagtgttaattacacgataccaaaaatacacaggaaactacacgcacgtgtgttcagtgccctgcacgtggtacaccgcactggggaacagcatgcaggctaagagagggagagccgtgctgaggctgttctcagcggtcacttcaggacaggctccctgcacggcgcattggtacta

SEQ ID NO: 7501 - DNA, 270 bp, Homo sapiens
  misc_feature (1)..(270): n=a, c, g or t
  ref <308>: DATABASE ACCESSION NUMBER: EMBL / AI919101
  ref <309>: DATABASE ENTRY DATE: 1999-12-21
gcgtattcaaccaaatttatttttgaacattcagaacaccagattatcacagattaaaaagaaagcaccaaaaattactacacattaatacctgagcagagactgaaggcaaatattcatctattaaacctacaccataatgctcaaacacaggtaaaaacattcacaacacactctacagaatatagtaagtagtactttttgtgaattacaatcacataaatgtaataattntaattataccatataaaaatacacacaaaattacac

SEQ ID NO: 7502 - DNA, 528 bp, Rattus norvegicus
  ref <308>: DATABASE ACCESSION NUMBER: EMBL / AI639525
  ref <309>: DATABASE ENTRY DATE: 2000-03-04
ttcctttttctttttttcagagctggggaccgaacccagggccttgcgcttcctaggcaagcgctctaccactgagctaaatccccaacccctcacacctgcttttaaacaagtgaaccagctttgctaagggcttaccagtcaagacattgctccctgctcctcactgttgatacccggtgttcctgaggatggagggactccaaaccagtgggagttttgtctgatagggtaacaggaatagtctctgctggtgggaaacttccagaaagggggagttcaaagcaaggcagaagtttctgctattttttgtttgttgcttttcttttagaggcagggtctcatttagccaaggctgacctccaactccctaagtataagtagtcaaggatgaccatgaacttctgatcctcttgcctctactgcttgagggttgggattacaggcatatgtcactgcctgtaccgtgtatctggtactgagattggactctgggcttcatgcatactagagaagcactcttaacaa

SEQ ID NO: 7503 - protein, 413 aa, Rattus norvegicus
  ref <308>: DATABASE ACCESSION NUMBER: SWISS-Prot / AAK68636
  ref <309>: DATABASE ENTRY DATE: 2002-10-01
MYDPERRWSLSFAGCGFLGFYHVGATLCLSERAPHLLRDARTFFGCSAGALHAVTFVCSLPLGRIMEILMDLVRKARSRNIGTLHPFFNINKCIRDGLQESLPDNVHQVISGKVHISLTRVSDGENVLVSEFHSKDEVVDALVCSCFIPLFSGLIPPSFRGERYVDGGVSDNVPVLDAKTTITVSPFYGEHDICPKVKSTNFFHVNITNLSLRLCTGNLQLLTRALFPSDVKVMGELCYQGYLDAFRFLEENGICNGPQRSLSLSLVAPEACLENGKLVGDKVPVSLCFTDENIWETLSPELSTALSEAIKDREGYLSKVCNLLPVRILSYIMLPCSLPVESAIAAVHRLVTWLPDIQDDIQWLQWATSQVCARMTMCLLPSTRSRASKDDHRMLKHGHHPSPHKPQGNSAGL

SEQ ID NO: 7504 - DNA, 453 bp, Rattus norvegicus
  ref <308>: DATABASE ACCESSION NUMBER: EMBL / AI639534
  ref <309>: DATABASE ENTRY DATE: 2000-03-04
ttctaaaaaggctggtttattgaggtttagaaggtcagggggtcaaaatggaggcaagggattttagggtttcttctcttctggatctctgcaggaaggcacatgtagacatggccgtttctcttccaccaccagcttctgcccctgtagcacctcacacagtggccgtgggatcccccagaaggtaacattcttctcaccctgaccttcaaccatggaaactgtaggcgagtacttggggagcaaaggtgtgcaaagtcgctgacggacacgggtggggttgggtccacatggtggtgtgcacagaccccaggtactccactgtgaccatgaacctttcaagacacagttatggatgtcatagcagtgtcgaatatcttggagtttcccagtacatggctgcccatcaaatttgcggccaccacagctccttgaacgtgactgctggcctgg

SEQ ID NO: 7505 - protein, 437 aa, Rattus norvegicus
  ref <308>: DATABASE ACCESSION NUMBER: SWISS-Prot / CAA31389
  ref <309>: DATABASE ENTRY DATE: 2002-06-15
CFTQYEESSGRCKGLLGRDIRVEDCCLNAAYAFQEHDGGLCQACRSPQWSAWSLWGPCSVTCSEGSQLRHRRCVGRGGQCSENVAPGTLEWQLQACEDQPCCPEMGGWSEWGPWGPCSVTCSKGTQIRQRVCDNPAPKCGGHCPGEAQQSQACDTQKTCPTHGAWASWGPWSPRSGSCLGGAQEPKETRSRSCSAPAPSHQPPGKPCSGPAYEHKACSGLPPCPVAGGWGPWSPLSPCSVTCGLGQTLEQRTCDHPAPRHGGPFCAGDATRNQMCNKAVPCPVNGEWEAWGKWSDCSRLRMSINCEGTPGQQSRSRSCGDRKFNGKPCAGKLQDIRHCYNIHNCIMKGSWSQWSTWSLCTPPCSPNATRVRQRLCTPLLPKYPPTVSMVEGQGEKNVTFWGTPRPLCEALQGQKLVVEEKRSCLHVPVCKDPEEKKP

SEQ ID NO: 7506 - DNA, 1553 bp, Homo sapiens
  ref <308>: DATABASE ACCESSION NUMBER: EMBL / X57748
  ref <309>: DATABASE ENTRY DATE: 1994-08-05
gagcctatcaacccagataaagcgggacctcctctctggtagaggtgcagggggcagtactcaacatgatcacagagggagcgcaggcccctcgattgttgctgccgccgctgctcctgctgctcaccctgccagccacaggctcagaccccgtgctctgcttcacccagtatgaagaatcctccggcaagtgcaagggcctcctggggggtggtgtcagcgtggaagactgctgtctcaacactgcctttgcctaccagaaacgtagtggtgggctctgtcagccttgcaggtccccacgatggtccctgtggtccacatgggccccctgttcggtgacgtgctctgagggctcccagctgcggtaccggcgctgtgtgggctggaatgggcagtgctctggaaaggtggcacctgggaccctggagtggcagctccaggcctgtgaggaccagcagtgctgtcctgagatgggcggctggtctggctgggggccctgggagccttgctctgtcacctgctccaaagggacccggacccgcaggcgagcctgtaatcaccctgctcccaagtgtgggggccactgcccaggacaggcacaggaatcagaggcctgtgacacccagcaggtctgccccacacacggggcctgggccacctggggcccctggaccccctgctcagcctcctgccacggtggaccccacgaacctaaggagacacgaagccgcaagtgttctgcacctgagccctcccagaaacctcctgggaagccctgcccggggctagcctacgagcagcggaggtgcaccggcctgccaccctgcccagtggctgggggctgggggccttggggccctgtgagcccctgccctgtgacctgtggcctgggccagaccatggaacaacggacgtgcaatcaccctgtgccccagcatgggggccccttctgtgctggcgatgccacccggacccacatctgcaacacagctgtgccctgccctgtggatggggagtgggactcgtggggggagtggagcccctgtatccgacggaacatgaagtccatcagctgtcaagaaatcccgggccagcagtcacgcgggaggacctgcaggggccgcaagtttgacggacatcgatgtgccgggcaacagcaggatatccggcactgctacagcatccagcactgccccttgaaaggatcatggtcagagtggagtacctgggggctgtgcatgcccccctgtggacctaatcctacccgtgcccgccagcgcctctgcacacccttgctccccaagtacccgcccaccgtttccatggtcgaaggtcagggcgagaagaacgtgaccttctgggggagaccgctgccacggtgtgaggagctacaagggcagaagctggtggtggaggagaaacgaccatgtctacacgtgcctgcttgcaaagaccctgaggaagaggaactctaacacttctctcctccactctgagccctgaccttccaaacctcaataaactagcctcttcgaaaaaaaaaaaaaaaaaaa

SEQ ID NO: 7507 - protein, 469 aa, Homo sapiens
  ref <308>: DATABASE ACCESSION NUMBER: SWISS-Prot / P27918
  ref <309>: DATABASE ENTRY DATE: 2002-06-15
MITEGAQAPRLLLPPLLLLLTLPATGSDPVLCFTQYEESSGKCKGLLGGGVSVEDCCLNTAFAYQKRSGGLCQPCRSPRWSLWSTWAPCSVTCSEGSQLRYRRCVGWNGQCSGKVAPGTLEWQLQACEDQQCCPEMGGWSGWGPWEPCSVTCSKGTRTRRRACNHPAPKCGGHCPGQAQESEACDTQQVCPTHGAWATWGPWTPCSASCHGGPHEPKETRSRKCSAPEPSQKPPGKPCPGLAYEQRRCTGLPPCPVAGGWGPWGPVSPCPVTCGLGQTMEQRTCNHPVPQHGGPFCAGDATRTHICNTAVPCPVDGEWDSWGEWSPCIRRNMKSISCQEIPGQQSRGRTCRGRKFDGHRCAGQQQDIRHCYSIQHCPLKGSWSEWSTWGLCMPPCGPNPTRARQRLCTPLLPKYPPTVSMVEGQGEKNVTFWGRPLPRCEELQGQKLVVEEKRPCLHVPACKDPEEEEL

SEQ ID NO: 7508 - DNA, 453 bp, Rattus norvegicus; identical to SEQ ID NO: 7504
  ref <308>: DATABASE ACCESSION NUMBER: EMBL / AI639534
  ref <309>: DATABASE ENTRY DATE: 2000-03-04

SEQ ID NO: 7509 - protein, 437 aa, Rattus norvegicus; identical to SEQ ID NO: 7505
  ref <308>: DATABASE ACCESSION NUMBER: SWISS-Prot / CAA31389
  ref <309>: DATABASE ENTRY DATE: 2002-06-15

SEQ ID NO: 7510 - DNA, 1553 bp, Homo sapiens; identical to SEQ ID NO: 7506
  ref <308>: DATABASE ACCESSION NUMBER: EMBL / X57748
  ref <309>: DATABASE ENTRY DATE: 1994-08-05

SEQ ID NO: 7511 - protein, 469 aa, Homo sapiens; identical to SEQ ID NO: 7507
  ref <308>: DATABASE ACCESSION NUMBER: SWISS-Prot / P27918
  ref <309>: DATABASE ENTRY DATE: 2002-06-15

SEQ ID NO: 7512 - DNA, 453 bp, Rattus norvegicus; identical to SEQ ID NO: 7504
  ref <308>: DATABASE ACCESSION NUMBER: EMBL / AI639534
  ref <309>: DATABASE ENTRY DATE: 2000-03-04

SEQ ID NO: 7513 - protein, 437 aa, Rattus norvegicus; identical to SEQ ID NO: 7505
  ref <308>: DATABASE ACCESSION NUMBER: SWISS-Prot / CAA31389
  ref <309>: DATABASE ENTRY DATE: 2002-06-15

SEQ ID NO: 7514 - DNA, 1553 bp, Homo sapiens; identical to SEQ ID NO: 7506
  ref <308>: DATABASE ACCESSION NUMBER: EMBL / X57748
  ref <309>: DATABASE ENTRY DATE: 1994-08-05

SEQ ID NO: 7515 - protein, 469 aa, Homo sapiens; identical to SEQ ID NO: 7507
  ref <308>: DATABASE ACCESSION NUMBER: SWISS-Prot / P27918
  ref <309>: DATABASE ENTRY DATE: 2002-06-15

SEQ ID NO: 7516 - DNA, 453 bp, Rattus norvegicus; identical to SEQ ID NO: 7504
  ref <308>: DATABASE ACCESSION NUMBER: EMBL / AI639534
  ref <309>: DATABASE ENTRY DATE: 2000-03-04

SEQ ID NO: 7517 - protein, 437 aa, Rattus norvegicus; identical to SEQ ID NO: 7505
  ref <308>: DATABASE ACCESSION NUMBER: SWISS-Prot / CAA31389
  ref <309>: DATABASE ENTRY DATE: 2002-06-15

SEQ ID NO: 7518 - DNA, 1553 bp, Homo sapiens; identical to SEQ ID NO: 7506
  ref <308>: DATABASE ACCESSION NUMBER: EMBL / X57748
  ref <309>: DATABASE ENTRY DATE: 1994-08-05

SEQ ID NO: 7519 - protein, 469 aa, Homo sapiens; identical to SEQ ID NO: 7507
  ref <308>: DATABASE ACCESSION NUMBER: SWISS-Prot / P27918
  ref <309>: DATABASE ENTRY DATE: 2002-06-15

SEQ ID NO: 7520 - DNA, 373 bp, Rattus norvegicus
  misc_feature (1)..(373): n=a, c, g or t
  ref <308>: DATABASE ACCESSION NUMBER: EMBL / H31217
  ref <309>: DATABASE ENTRY DATE: 2000-03-04
actcggcaggttcttaaattttattagttaattagttaattaatctgaaggctttggaggagaaaatcctatctcacttctactctggggacttttatttgaggaggtgactgatacaaagaagctagtggcattgaaagtgttattggtcagctggctaggatctttctgctctgtgggataagaactgtaggtatgtgggaagtcattctagtgttggtatatctggatgagcgtctgtcttagtttgggtttcagtgctgtgaagggaccatatgaccaaggcaactcttataaagtcacacatttatnggggctggtttacagtttcagaagttccagnccattatccatcatggctggaggcataaca

SEQ ID NO: 7521 - DNA, 362 bp, Rattus norvegicus
  misc_feature (1)..(362): n=a, c, g or t
  ref <308>: DATABASE ACCESSION NUMBER: EMBL / H31342
  ref <309>: DATABASE ENTRY DATE: 2000-03-04
gatttgtgattctgcagtgccatgtttaatgtccacgagtgagagatgactgtaaggaaagaggctgacttctgaggtgccgcctctgtgctgcctgctgtagctgtcactgacacagaacatgagtgatctggctaccacaggtctctgcccctgtnacaatgttctagcctcttctagaaacaagatgggaacagtagaatgagacaaaatactccggttaagccagagagctttgcaaccatcctccattcaaccaaaagcccagcctctgacccgcctgcagcctgcagtctctctaacttttcatcgtatttnttgtgtgtggatacacaccataacacacgtgcagcggtcagaag

SEQ ID NO: 7522 - DNA, 341 bp, Rattus norvegicus
  misc_feature (1)..(341): n=a, c, g or t
  ref <308>: DATABASE ACCESSION NUMBER: EMBL / H31418
  ref <309>: DATABASE ENTRY DATE: 2000-03-04
agaatgaatgccttttaatattatacacatgattatgaacaggtaatctcaagtattcaatcactttcttattggtagacgtgatacgtgatttggtaattatagttacttatgtttncttactacgaagtgttcttttcagtcaagcagcaagcatttccaaagctagttagcagatgagtaccaacaatggcactgtacccagtaaactcaagactcttagtaaaatgatttcnctagtgttaaggaagtagtcattttttttaaaaaaatattagaacgttatgaaagtttactctcgttaagttaatgattttattcattgtgtccattcttcatgg

SEQ ID NO: 7523 - DNA, 375 bp, Rattus norvegicus
  misc_feature (1)..(375): n=a, c, g or t
  ref <308>: DATABASE ACCESSION NUMBER: EMBL / H31479
  ref <309>: DATABASE ENTRY DATE: 2000-03-04
ctaaaaagaacagctgaaaaaccctttcaacgacatgctaactggttgtcaccctttgatatggtcacactatggtcaggatgggtgctaagggctcggaatagatgcacattataaaattcttgaaaaagggatgtnccttgtggcttttttcttggttaagtgcctaggggcaggagaggggttaacaaaacactgctcgatgatgaatttncttttacacaccagtccgttcccaaaaggccctcatattgcagtggttctatcagaagttaaaatgaagacaagaaaaagaaatatcctttcaaataacagagtcgacacttttttccccttaaataaatcagcataagtttttccacataatgtaccaag

SEQ ID NO: 7524 - DNA, 1393 bp, Homo sapiens
  ref <308>: DATABASE ACCESSION NUMBER: EMBL / AL080181
  ref <309>: DATABASE ENTRY DATE: 2000-02-18
ggcagccatagtgcatagctactaaaatcagtgaccttgaacatatcttagatggggagcctcgggaaaaggtagaggagtcacgttaccatttacatgttttaaagaaagaagtgtggggattttcactgaaacgtctaggaaatctagaagtagtcctgaaggacagaaactaaactcttaccatatgtttggtaagactccagactccagctaacagtccctatggaaagatggcatcaaaaaagatagatctatatatatatataaatatatattctattacattttcagtgagtaattttggattttgcaaggtgcatttttactattgttacattatgtggaaaacttatgctgatttatttaagggggaaaaagtgtcaactctttgttatttgaaaacatttttatttttcttgtctttattttaacctttgatagaaccattgcaatatgggggccttttgggaacggactggtatgtaaaagaaaatccgttatcgagcagcattttatttacccctcccctatccctaggcacttaaccaagacaaaaagccacaattaacatccctttttcaatgaattttataatctgcagctctattccgagcccttagcacccattccgaccatagtataatcatatcaaagggtgagaatcatttagcatgttgttgaaaggttttttttcagttgttctttttagaaaaaaagaaaaacaaaaacaaaaacaaaaaaaaaaaatcacaccattgctcacagaattggcatctcatttttgggacctcccatctttctgttttgaaaagtgtacagtagtgcagtgttcctgatgtaactttatggcttacaatgttgacatgtctcaggttcatgtgttgcgattggtgttttccgtctcaggtagattgcaaagtgtaggccccacacattggaaaaaataataataaaacaaagcaaaaacaggaaattatggattttagttgtatattggtttatgtattttttcttaagtatacagtgcactgtttgaaatgtattgttgagtattactttgtacaggttgatcactttttttagagtgaagaaagaacaaacttgttttttgtgttttttaaaggaatataaaataatgaaggatgtataattgatgccaaataagcttgttctttagtcacaccgacgtcttatttttccctttaggccagttctgtttttaaggtgtacatggacaatgttacagtgtaagaaactccatatccatatgttcccattcgcattttgtattggttcatgtataccatttttacaaaaaaaaaaaagaaaaaaaagaagtactataaaatatctgtcttcttaaaaaaaaaaattaatgttaaaaaaaaaa

SEQ ID NO: 7525 - protein, 442 aa, Homo sapiens
  ref <308>: DATABASE ACCESSION NUMBER: SWISS-Prot / AAF69029
  ref <309>: DATABASE ENTRY DATE: 2003-02-01
MASVVLPSGSQCAAAAAAAAPPGLRLRLLLLLFSAAALIPTGDGQNLFTKDVTVIEGEVATISCQVNKSDDSVIQLLNPNRQTIYFRDFRPLKDSRFQLLNFSSSELKVSLTNVSISDEGRYFCQLYTDPPQESYTTITVLVPPRNLMIDIQRDTAVEGEEIEVNCTAMASKPATTIRWFKGNTELKGKSEVEEWSDMYTVTSQLMLKVHKEDDGVPVICQVEHPAVTGNLQTQRYLEVQYKPQVHIQMTYPLQGLTREGDALELTCEAIGKPQPVMVTWVRVDDEMPQHAVLSGPNLFINNLNKTDNGTYRCEASNIVGKAHSDYMLYVYDPPTTIPPPTTTTTTTTTTTTTILTIITDSRAGEEGSIRAVDHAVIGGVVAVVVFAMLCLLIILGRYFARHKGTYFTHEAKGADDAADADTAIINAEGGQNNSEEKKEYFI

SEQ ID NO: 7526 - DNA, 375 bp, Rattus norvegicus; identical to SEQ ID NO: 7523
  misc_feature (1)..(375): n=a, c, g or t
  ref <308>: DATABASE ACCESSION NUMBER: EMBL / H31479
  ref <309>: DATABASE ENTRY DATE: 2000-03-04

SEQ ID NO: 7527 - DNA, 1393 bp, Homo sapiens; identical to SEQ ID NO: 7524
  ref <308>: DATABASE ACCESSION NUMBER: EMBL / AL080181
  ref <309>: DATABASE ENTRY DATE: 2000-02-18

SEQ ID NO: 7528 - protein, 442 aa, Homo sapiens; identical to SEQ ID NO: 7525
  ref <308>: DATABASE ACCESSION NUMBER: SWISS-Prot / AAF69029
  ref <309>: DATABASE ENTRY DATE: 2003-02-01

SEQ ID NO: 7529 - DNA, 360 bp, Rattus norvegicus
  misc_feature (1)..(360): n=a, c, g or t
  ref <308>: DATABASE ACCESSION NUMBER: EMBL / H31550
  ref <309>: DATABASE ENTRY DATE: 2000-03-04
ctgctgcaacgtgtttattatgtgccaaaaaaagtacaccacagcttactccacaatctgtacagagtgcagtcttgcctgcatgtacaacaatgaggtagagacttcacacacagcttcacgagcccacagagtagctgggatatgcgacaatgcaacgtcagctcagcaggggggcgacactggttctttggcacacagcttccctaagaggggcaagtagtaactaaatttttaaaaaaagagtcaagttttcaattccagtaacatttttgtcancaataactgttgattcatacattcttcaaataaaagttgtaaggaagggtacttgcccctctaagngaaagggctcctgtg

SEQ ID NO: 7530 - DNA, 1923 bp, Homo sapiens
  ref <308>: DATABASE ACCESSION NUMBER: EMBL / AK023265
  ref <309>: DATABASE ENTRY DATE: 2002-08-06
aaaaaatgcagacgggataggggtgtgtgtgtgaggggagggggcctgtatggcaactgctcttgccccagcgtccccaaaagtgcagaggcagcggctgcagcatccagccagcttggatgtctggcctacttccaggactctgaagaaacagttacaagcaggatgcttttcccaacctctgcgcaagaatcttcccgtggcctcccagatgcaaatgacttgtgccttggcctgcagtccctcagtttgacaggctgggaccgaccctggagcacccaggactcagattcctcagcccagagcagcacacactcggtactgagcatgctccataacccactgggaaatgtcctaggaaaaccccccttgagcttcctgcctctggatccccttgggtctgacttggtggacaagtttccagcaccctcagttagaggatcacgcctggacacccggcccatcctggactctcgatctagcagcccctctgactcagacaccagtggcttcagctctggatcagatcatctctcagatttgatttcaagccttcgcatttctccacctctgcccttcctgtctctgtcagggggtggtcccagagaccctttaaagatgggggtagggtctcggatggaccaagagcaagctgctcttgctgcagtcactccctccccaaccagtgcttcaaagagatggccaggagcttctgtgtggccatcctgggacctcctcgaagctcccaaagaccccttcagcatagagagagaggccaggctgcaccgacaagctgcagctgtgaatgaagccacctgtacctggagtggccagcttcctccccggaactataagaaccccatctactcttgcaaggtgtttctaggaggtgttccttgggatattacagaagctggattagttaacaccttccgtgtttttggctctttgagtgtggagtggcctggtaaggatggcaagcatccccggtgtcctcccaaagggtatgtgtatctggtcttcgaactagagaagtctgtccgatccttgcttcaggcttgctctcatgacccgctgagcccagatggcctgagtgaatattatttcaagatgtccagccgaaggatgcgctgcaaggaggtgcaggtgatcccctgggtattagccgacagtaactttgtccggagcccatctcagaggcttgaccccagcaggacggtgtttgtcggtgctctgcatggaatgctaaatgctgaggcccaggcagccatcttgaacgacctatttggtggagtggtgtatgccgggattgacacagataagcacaagtatcccattggttctggtcgtgtgactttcaataaccaacggagttacctgaaagcagtcagcgctgcttttgtggagatcaaaaccaccaagttcacaaagaaggttcagattgacccctacctggaagattctctgtgtcatatctgcagttctcagcctggtcctttcttctgtcgagatcaggtctgcttcaaatacttctgccggagctgctggcactggcggcacagcatggagggcctgcgccaccacagccccctgatgcggaaccagaagaaccgagattccagctagaggagctggccttgcccagtggcctgtggcgcccaaagctggcaggtcaggcaagcagcctgcaccaccctgccactggcgaccagggagctggcttcccaaggacaagggaaaattgtagtcacctttgcacttgctgaatctgtctttgtttctgcactaattaatgcacattgagttttgtcaggttttgttttcagggggtgtaccaagggcaaggaccctctggcttaccctccaagcgactctgtagttttcccagattttagttcctcattttgcagatgaaaagcgggg

SEQ ID NO: 7531 - protein, 487 aa, Homo sapiens
  misc_feature (1)..(487): Xaa=Unknown amino acid
MLFPTSAQESSRGLPDANDLCLGLQSLSLTGWDRPWSTQDSDSSAQSSTHSVLSMLHNPLGNVLGKPPLSFLPLDPLGSDLVDKFPAPSVRGSRLDTRPILDSRSSSPSDSDTSGFSSGSDHLSDLISSLRISPPLPFLSLSGGGPRDPLKMGVGSRMDQEQAALAAVTPSPTSASKRWPGASVWPSWDLLEAPKDPFSIEREARLHRQAAAVNEATCTWSGQLPPRNYKNPIYSCKVFLGGVPWDITEAGLVNTFRVFGSLSVEWPGKDGKHPRCPPKGYVYLVFELEKSVRSLLQACSHDPLSPDGLSEYYFKMSSRRMRCKEVQVIPWVLADSNFVRSPSQRLDPSRTVFVGALHGMLNAEAQAAILNDLFGGVVYAGIDTDKHKYPIGSGRVTFNNQRSYLKAVSAAFVEIKTTKFTKKVQIDPYLEDSLCHICSSQPGPFFCRDQVCFKYFCRSCWHWRHSMEGLRHHSPLMRNQKNRDSSX

SEQ ID NO: 7532 - DNA, 343 bp, Rattus norvegicus
  misc_feature (1)..(343): n=a, c, g or t
  ref <308>: DATABASE ACCESSION NUMBER: EMBL / H31588
  ref <309>: DATABASE ENTRY DATE: 2000-03-04
gtattattagttttgggtaattatccctaagatgtctgagtncctccttccagctccttcagtaggctgttggagaatgaagagagtcagcagtcaaggtacagaaacactagagacttccgtgtcccattatctccctttgtcacacctgttaagttagtacttcttggaatcctattttgagtagttctttcaagtgacatcttcagggacctgacattttttacttggcatgaacatttgaaatattctgctaatatttggtgttttctgtcttcctatccccaagctctccatggactcccttaactctattttgcagaccaactggctgtcagacttt

SEQ ID NO: 7533 - DNA, 374 bp, Homo sapiens
  ref <308>: DATABASE ACCESSION NUMBER: EMBL / AA947174
  ref <309>: DATABASE ENTRY DATE: 2000-03-03
tttaattttaagtaatttatttcaatagaaatatttcagaaaactgtacttaaattcatcttaagttagcttatgcagacacactgaagatcgcacactcacatttgcatattaaaaagaaacaaaaagtgagagaggaaccaagctgcacatcactcaaggaggtcatagtgcaatcgagtgcttcatcatcagagtacctcaagttaattgggataaagaataaaaatggcttgtgttttcagatatattatcatcactgggtacctgtccttacagatgtttgatctccttcagattatgttgtgaaccagttccccaccccctccccacacacatgttctttagtaggatgtaaaacaatgaatttgtca

SEQ ID NO: 7534 - DNA, 498 bp, Rattus norvegicus
  misc_feature (1)..(498): n=a, c, g or t
  ref <308>: DATABASE ACCESSION NUMBER: EMBL / H31590
  ref <309>: DATABASE ENTRY DATE: 2000-03-04
ccttcagaatttaatcgttttcatgtttatttaaaataatatctaagaaaagcctatganctgagcnctgggaatcttaaaatacagttagcgaactagaatgagctgtctgtgatggatgagagaggncggcagggcttgggcaggtgcactgcttaccagcgcgctgtgcctgctgaagccacatttaggccaccagcgtactctgagccatggcatagctggggataagtctgatgataagtaacaacagcattacttaaaatcagttaattcatgtttattataagcaaagggggccaagtgcttcctcttgaatgaggatattctttaaaacttcaaataataaaaagtctttaaataccatgtcctcaattacggaaaataaaatataaaatttnaatccttaagtaggaaatagagctcatgtcatgcgctagtnggcttcacctccctggaaatacaagctatatgaactctctgcttcaagtctgcccc

SEQ ID NO: 7535 - DNA, 349 bp, Rattus norvegicus
  misc_feature (1)..(349): n=a, c, g or t
  ref <308>: DATABASE ACCESSION NUMBER: EMBL / H31665
  ref <309>: DATABASE ENTRY DATE: 2000-03-04
atgttcagacttattttaataacaatacatacaccatcttggcactgtggatggaatgtaagtncaggttggacagggggattttacagtgcatttaatattctgtgtatccaaatttgtatgtaaatattggaaaaaccagcccgcccaccgttcacctctcaccttcggtactttaatagccatggccttatagacggtggccacgcggcctgcacaggctgtgtgcattaggccctttagccttgttttacacttgcagcacctacttctgctggggttcaactcagtgcacagcacttgcttagcctatgtgaggcccctgcacttaaatgcccagcaccacaaa

SEQ ID NO: 7536 - DNA, 340 bp, Rattus norvegicus
  misc_feature (1)..(340): n=a, c, g or t
  ref <308>: DATABASE ACCESSION NUMBER: EMBL / H31695
  ref <309>: DATABASE ENTRY DATE: 2000-03-04
gtggagcacaaagatattttattttctgtttagggaagatactcaccccaacctctttctttttaggatgacagagtgcatttctcagctaaaatgatcaggtcaattacctggngtgggggtgggtgtaattcgtttacacagcagaaaatggccgaaatgtctggccacagattacagcattaacattgtttgaagggtcacgtgcctngcaattttatctgcagacactcctaaatctgtcaataccaacactggtttggcctttaagatttctattcacagacagtaggactgtgagggaactgcagggaagaagccctccaccattacccacacg

SEQ ID NO: 7537 - DNA, 518 bp, Rattus norvegicus
  misc_feature (1)..(518): n=a, c, g or t
  ref <308>: DATABASE ACCESSION NUMBER: EMBL / H31802
  ref <309>: DATABASE ENTRY DATE: 2000-03-04
agattaaatgagtttattctcaccgatagccaaaggagctttagagacaaacagtgtgctgtnccagagggagctaacagaagcgtttataaaggtagatgccaaaggtgcccattaaaattatctacggaattcatagctgggcaggaaaattggttttctccccttacttttttttttttaaggtttatttatttaatgatttaaagtatatgagtacactgcagctgtcttcagacacaccagaagagggcactagatctcattacagatggttgtgagccaccatgtggttgctgagaactgaactcaggacctatggaagagcagtcagtgttcttaaccactgagccatctctccagcttgcccaccccaccccccacccccgttgtttctttttcctgtgtataataatgaaaagatcacttactctagtcacataacaatgatggagtttacaaaatcagagagcagggacaccattatctttctctgatctcaccagcaggccactaag

SEQ ID NO: 7538 - DNA, 445 bp, Rattus norvegicus
  misc_feature (1)..(445): n=a, c, g or t
  ref <308>: DATABASE ACCESSION NUMBER: EMBL / H31887
  ref <309>: DATABASE ENTRY DATE: 2000-03-04
ctactagagtttttatttattgaggtctctatcccaaccagtcatttaaaaaccaagtaccacagacctgaggggtaggagctaggaactgtacctcctcaccacacgaacagcagtggggaagaagatgagggcagcagaggtggagaagggagacgacaatagcagcagcaatggggcatcaatgtcacagagacagccactcggtcctcccccaatccctagctagagcccctatggcttggggtggaagaggtaagtcccaccccaggtccctcctctcagacagcctcctcagggctcaacccatttnttctgtcaggagactcaggcacatgggagaggaggaagtggggggaggagactttgggagaggcagggtntggtaggatnaaggcagaagtgggggggcattagcaaggttttaaccctgccattcccacca

SEQ ID NO: 7539 - DNA, 1241 bp, Homo sapiens
  ref <308>: DATABASE ACCESSION NUMBER: EMBL / AK024220
  ref <309>: DATABASE ENTRY DATE: 2002-08-06
gtgctcggcgttgagctcctgcagccgccgccgctgcagtggtcgtccctgccctccccggccccggggtgcaccccgcaaggctcccgctggtgtccctggagcatgggaggctgctgagcgtgagtggcggtgtctggcaggagctgcgtggcagggagggcgtccatggctgcagccaacaagggcaacaagcccagagtccggagtatccgctttgcggcaggccacgatgcagaaggatcccacagccacgtccactttgatgagaagctgcatgactcggtggtcatggtcacccaggagagtgacagcagctttctggtcaaggttggcttcctgaagatcctgcacaggtatgagattaccttcactctgcccccagtgcacaggctgagcaaggatgtccgcgaggcacctgtccccagcctgcacctcaagctcctcagcgtggtgcccgtccctgaaggttatagtgtcaagtgtgagtactcggcgcacaaagagggcgtcctcaaagaggagatactgctagcctgcgaaggtggcactggcacctgtgtgcgcgtgacggtgcaggcccgcgtcatggaccggcaccacggcacgcccatgctgctggatggtgtcaagtgtgtgggcgccgagctggaatacgactcagagcacagcgactggcacggctttgactgaggcccgaggccccgcctgccccgggcccctcagccttaaaccccgccttgtccccccgacatgctgcgtgatggtgtggcttcctcgcccctctctggggtgggtgtgggggtggagtggccttgcccacgcctctcacctctgccttcatttgtgctgccaccctgcccctccctcgtcctcctctcccacttcctcctctctgtgtgcctcagtctcctgccggaagaaatgggttgagcccgaaaggaggctgtctgaggaagggagagggagggcctggggtgggtcccccactccccaccccaagccacagggactcccaccagggtctgggagaggacggagctggctctgtggcgtcgtggccccattactgctgccttgcttcagccacctctcctgcccctccctagtccccactgctgtccaccatgagtaggagggaggtgcagtccccagcccccacccctcaggtctgtgttacttggtttttaagcgactggttgggatagaaccctaaagaaataaacttccagtggataccg

SEQ ID NO: 7540 - protein, 175 aa, Homo sapiens
  misc_feature (1)..(175): Xaa=Unknown amino acid
MAAANKGNKPRVRSIRFAAGHDAEGSHSHVHFDEKLHDSVVMVTQESDSSFLVKVGFLKILHRYEITFTLPPVHRLSKDVREAPVPSLHLKLLSVVPVPEGYSVKCEYSAHKEGVLKEEILLACEGGTGTCVRVTVQARVMDRHHGTPMLLDGVKCVGAELEYDSEHSDWHGFDX

SEQ ID NO: 7541 - DNA, 373 bp, Rattus norvegicus
  misc_feature (1)..(373): n=a, c, g or t
  ref <308>: DATABASE ACCESSION NUMBER: EMBL / H31897
  ref <309>: DATABASE ENTRY DATE: 2000-03-04
aattggaattcactttaataatttttaagtgacatatggcactgtaaggncaggaaggaaaaagtcacaaagtccacaaactcgtgaaggtgtcagctcaaaaggctagaagtcactgcactgttggntcgacgctcacagtaaacgttttgtaacgaaggcatgttgaatttagtgtcattcattacagagcagagggtgtttctcttatttggtcacgtgtttttcacttaagaaatattttaaaaatggtattcactttttatttcaacacgttcactgggcatctccaaaaccagcagcttctcaaangaaatcaaccagggttgtaaacataagatacaaggttctgactcccgacactcaggtttcg

SEQ ID NO: 7542 - DNA, 469 bp, Homo sapiens
  misc_feature (1)..(469): n=a, c, g or t
  ref <308>: DATABASE ACCESSION NUMBER: EMBL / AA033555
  ref <309>: DATABASE ENTRY DATE: 2000-03-03
aaaagaacagtcgaaatgagcaactcaccttaccctctgaccctgattagacaggatcaattgtaaagtgagggcttctccatgacaccatagttctgcccaatactgcatttgggataagaaattctacacttggatgtctcgcttcacaataaaacacagcttaaaaataaaataactgaaagaaatagaattcagcaaatagttattttttgcacttgaactgaaacgtactgtactgtanattatgactcattttaagtgacctttaaaatcagatgtatttattatgcttgtgtaattatagaaataaagaaatgggtgacaggcttaacctcacctatgaatgtacagtatgtggatttgtgaaactgactgtaggaagtcaanaacttgtactgtgtcttgtgtttacagttctgatttattcctttganaagcctgctgttttgggaaatgcacagttgaa

SEQ ID NO: 7543 - DNA, 397 bp, Rattus norvegicus
  misc_feature (1)..(397): n=a, c, g or t
  ref <308>: DATABASE ACCESSION NUMBER: EMBL / H31914
  ref <309>: DATABASE ENTRY DATE: 2000-03-04
cttgcaaaatgaganactttaattatttaaagcaaaggcacaagtaaacattttaggttatacagtgttacaattaagaaaacccaacagtacaatgaaatacatttataactttgcatgtccaatgtattaccgtgccacctcttctctggaaggaagaggtatgtaggtccatgggtgtaatgtaaaaagttggattttaaatagcatctgcctactctactgtcaataagaaattttaattaatttcagaattaataagaaattaattaaaaattgcttgctcatctagagtagcagtaactttcacgctgaaactcactgctttagtgagttactgactctgcatacgntagccagcaatgtcttgggtgttgtgcagtgaccatgcttgacc

SEQ ID NO: 7544 - protein, 712 aa, Rattus norvegicus; identical to SEQ ID NO: 3693
  ref <308>: DATABASE ACCESSION NUMBER: SWISS-Prot / P13383
  ref <309>: DATABASE ENTRY DATE: 2002-06-15

SEQ ID NO: 7545 - DNA, 10942 bp, Homo sapiens
  ref <308>: DATABASE ACCESSION NUMBER: EMBL / M60858
  ref <309>: DATABASE ENTRY DATE: 2000-03-04
attctgctgtagacatagagatgatgatcatagctgactatgatgatgatcccccgcgagcctgaaagaggaaatgctctggtttgctaagcccgcgaatcgagtgagacccacccacaaagctaaccgtggaagtcactggcggcctccttcgccctgccagccggggaacccatccggtggctctcgacctgctcccgggccatctggtgacactgacttcgcagccaccaccttaattggcgcattcgacccaaataataacctgggaacctgtgggcggtctaaggcccggctctgcggtcgccctcccaggcccctctccctggccctgtgaggccagaaagttacttctccgaggccagttccccatgtctgagaaatatctcccaacttgaggttctgtggggtaggggagggttcgtgactttctcacagaaaacctcgtacagaccccgccactgcctttattaacagctctcaggagactgcctgcaggaggggggtcgctccggccccatgctcgcgggcaagcagggataagctgtgcctccaaaagggccaacgggaactccgcggtccctgaacttccggtgctggaggactcctcgctccagggccaccaggagccgcggcgtgagtgcgtgccggaaccgagggcggggtctctgaggaactccaaggctgcccaagcctacggacccagccacattggcgaaccggagaccgcccgattccaccacccccgcgctcccctcacagccggcgccaaaaacgccagtcccacgacgcaggccgggacccgcgcgcccacggcccaatcagcgcgaccttgcacaaagcgagccccgcccccacggcgccgttgccagcccctccccctcccgtgccgcctcggcccgcctactccccgccccgcgccgttcacggttagaggctcgcgattggctcatggggacggccgcgagctttggttggtcggcgcggagtcacgaggcgccgtcgtcgcctttccacaggcgttactgggcaggctcagtctttcgcctcagtctcgagctctcgctggcttcgggtgtacgtgctccgggatcttcagcacccgcggccgccatcgccgtcgcttggcttcttctggactcatctgcgccacttgtccgcttcacactccgccgccatcatggtgaagctcgcgaaggtaaacggccttgagcgcgacgcagacgtgtaggcctgcttccgaggggcgagcgcggcgccgcggggaggagggcctgcgcgcagtcccgggcgcgttctagggcgccatgctgcgggaagtctcgcgcgattagtggggaggtctcgcgcttctggctacttggtggcgaggtgaagagcttctgcaggtgctgggggagggggcgctgggcctcggggtggagagatgagaccaaacttttgcgacgcgtacgagctgggactgactctgacgcacgtgcccgggagcgtgcctgccacgtgggccggcgtaggtctggaatctccagagggaccgggtgccttgggccgggaaatggcggtatcggccctagtcggagtcccggctgcgctcggatgtctccgccccggcctggcaagccgatacgtggtgggccccggaaggtggctctgccgcgtgccttttgcgctgtgtttcgggcaagaggtggtcctgccaggtacccccacgtggccgcacccgcctctttaaggggcggggtagtgctggggaaaggcataagcttcatgagaaaataaggtagtatttttaagtgccttaatgatcttcaccgttaatttgattcaaataagggtggtagataaagtaccgggatttgtagtataaaaacacggttgtgcttaactaaggtaacgggaggagaaatcatttcctcaggttgactttttaccttagggcaggttttctgttggtaaagcctgggaggaaaaatgtgggcggttgagaagtagtccctcttgcattgccatcaggagtagtttctatgttagttgtggtgtttggcactatgagaaatgatctgagacggagatgatggcgtatgaacactaatggcaaaatatgaatggcctgaaatgtcgaggtggaggtgtaatgatctatttgtgtccattttaggcaggtaaaaatcaaggtgaccccaagaaaatggctcctcctccaaaggaggtagaagaagatagtgaagatgaggaaatgtcagaagatgaagaagatgatagcagtggagaagaggtaattttatccaacttaatgcagaattatgttaaaactacaaaatggagagttaagacatgaaattggatatctgtggcaaaaataagattttatcaggtatgtcttattgtagtggttgagtgtttcacaagctcttcattgacatgtcaagatgtcatttggctagtatttgaatgtgagtgctaagacgagactgggaatttcttttacatgttcctctgcagggcttggagtgtgatttgttgtgttaaatcattacatttttccagtttcaacatgttagctcacccccacatgtagagctgggcattgtattcagagctgagaataaccttaccagattcctttcctatcctccgaattaaaattaattggtctccattccatatatatataactgtatcactactggttaagtactcgggtgtagactgagggctgccacctctctttggtaccattgaccctctttagccacctcctggccttttatttgcctccactataaagacagctgagcactgaattgtgctcaggttttcgttgagaacctgaatgaaagttttactctccacacattgccttgataaaactacgggattttaatgtagctaaatgatgacttttatcaaactaccatgcacactctttgatgtgtgatagttttgtaaggaatatttatatttagcctattcattttttgtctcaggtcctaagaattgagcttcactgggcttggtggaccgcaaccacgagggccccaatgatttaataagttaatgcttggagcctcctatgtgtaacgttctgaataatttacacatagcaattcatgaccttaaacatgtaaggatgatactattaccattttcagatgagaaagttggggcttgggaaagtatgaggtgtaagaattcagagggtctggttcagaggtattttcagtgttcaaaagagttccttatgtctgggtattcaccttattataggggctctgacttaagacaacataacagaagcctggagttttaacatgtcatatgtgtcatgcgtatgtcttgaaccagaggcattgccagagtctaacaactcattgggaccatggttatctttttgggtgtggggctggacttactggtttggttttcatttatctcaaggtcgtcatacctcagaagaaaggcaagaaggctgctgcaacctcagcaaagaaggtggtcgtttccccaacaaaaaaggttgcagttgccacaccagccaagaaagcagctgtcactccaggcaaaaaggcagcagcaacacctgccaagaagacagttacaccagccaaagcagttaccacacctggcaagaagggagccacaccaggcaaagcattggtagcaactcctggtaagaagggtgctgccatcccagccaagggggcaaagaatggcaagaatgccaagaaggaagacagtgatgaagaggaggatgatgacagtgaggaggatgaggaggatgacgaggacgaggatgaggatgaagatgaaattgaaccagcagcgatgaaagcagcagctgctgcccctgcctcagaggatgaggacgatgaggatgacgaagatgatgaggatgacgatgacgatgaggaagatggtaaggagttgtcttggtagttactgggcttctgattacaaggtatcttgagattctgggatcacatattccttcatcgtacaacctggagatgagattagaatcttgtgggaattctcttgggttgttgtggtgtgctagacttaattacccatgaatgattttgtcctcttgagaaaatttcaatagcacatctattagtgttttttataatgtaggattttcgtttctaagtgatttttttttttttttaaatttttttgagatggagcttttgctgtttcccaggcgggagtgcaatggcgcgctatctcggcgcactgcagcctccatctcctgggttcaagcagttctgcctcagcctcccgagtagcgggattacaggtgcccaccaccacaccctactaattttgtattttagtagagacgacatttcaccatgttggccaggctggctctgaactttgacctcaggtgatccacccaccttaggctctcccaaagtgctaggattacaggtgagatatgctgcgcccggccccaagtgatctattcttgccatgactgttaactaaacatggtgacaggattcgattttctttacattagatttgaaaaccgatgttggttttgggagattgctgcaatttttaggtgacttctctttcagactctgaagaagaagctatggagactacaccagccaaaggaaagaaagctgcaaaagttgttcctgtgaaagccaagaacgtggctgaggatgaagatgaagaagaggatgatgaggacgaggatgacgacgacgacgaagatgatgaagatgatgatgatgaagatgatgaggaggaggaagaagaggaggaggaaggtacttaaattagattctgacatacgacatgagttatgtttaaaggaggcacttaagtgtttgtggctactgatgtgtgatacattgtttgacatcttgtccagagcctgtcaaagaagcacctggaaaacgaaagaaggaaatggccaaacagaaagcagctcctgaagccaagaaacagaaagtggaaggtaacttgcagaattaggggatatgggggagataaacagcacaaatgatgaataacaaagggacttaatactgaaaccagatgttacattgtagtgtgctgatgtgctgtgtatagaaattttgctttggaaactaactttttaccacactacaagtagactgagttgagctttttttgtgcaggcacagaaccgactacggctttcaatctctttgttggaaacctaaactttaacaaatctgctcctgaattaaaaactggtatcagcgatgtttttgctaaaaatgatcttgctgttgtggatgtcagaattggtatgactaggtagctgcttcactgcacgttacataccgtgggtctgttaatttttccttcccctgttagcacagttactttagcctgccactgttaaacatgaatactgtaaacacttcaaggttagcattagtgaactaagttagaattaaactgtagatcccctaagttgcaatttccataatcagtcgtaacttggtatagcacagaataatttttagtaatttttttgttgtttttgttatgtattgagacggacgctggcttttgttcaggctggagtacagtggcgcaatcttggctcactgcaacctctgcctcccgggttcaagcgattctcctgcctaacctcccaagtgactgggatacgggtgccactcaccatgcatggctaatttttgttttgtatttagtatcgatttcaccatgttggtcggctggttttgaactcctgacctcaagtgatccacccacctcggcctctcgaagtgctggtacagcgtcaccaccctgccagtaagttttaataatttggtgttaggtgggagaatgcttgaacctgggaggcagaggttgcagtgagccaagttcgcgccactgtactccagcctgggcaacagattgagacaccgtctcaatttaaaataatgtttattttcttggaagtaccttgaaactattagacctgtctagtcatcatagtgaatacttttatccagacaggattctcctgtattagtgcttataggtgttcttttgtcagctgctactgtgaattcttataagcaatttagctccatgatgaagacctcaaacgtgaatgtgcatgtcatatcttcatgctgagccgtgttctgtagctgcagtttgcagagccttgactttgttttgctatactaggggtgctttttaaaatgtgatctttgtttgcaccatcacatttgtctagatacagattgtgattttgatttgtgttttcacctgttgtaattttgccctcctctccacctgaaggaaatttggttatgtggattttgaatctgctgaagacctggagaaagcgttggaactcactggtttgaaagtctttggcaatgaaattaaactagagaaaccaaaaggaaaagacagtaagaaaggtatgtaaggctttatgagttatgcaatgaactcaggagctagactgctagggaaaatgctttgtaacccatttccctttggtttcctcttattttttttaaatcatttttttcctttggtttcctcttaatgtgggaattaaatgagctacagtgtttacaaggtacttggcactgcttgtcagtgtataggtaaattcctgagttaggcaagcaagagcactcttatacagaacaagaaccattacatgcacctaaattaagctaaggatctttcttcactgaaactagttaggtccctaattactccctatatacagtgtaatgttttgaattggtacattcactttttttgttatgcgcgtctactctaggttgaactccagtgtacctaacagagagtttgacatcaaggctgtgacaacatggagggaccacttgtgtgttgacactgctatatctccatatttagcaccgagccttgtacatataggatctcaaattatttgttgatagagctatgtgtgtttttcccctctttttgttgttgccccccacctttggtttttcaggccacagagctcatttttgtttttttaatctagagcgagatgcgagaacacttttggctaaaaatctcccttacaaagtcactcaggatgaattgaaagaagtgtttgaagatgctgcggagatcagattagtcagcaaggatgggaaaagtaaagggtatgttcttctattgaaatgtaagggttttattaacattaatgcacttcctgctttataaaagaaatattggtttgatttccttaggcgtgtaacttggacagtttaacctgtaagtttgtgcctcagtaacccatctgtaccatggggataatgtactcatagggtgattttaaaagacaaagctaatacttacaaagaagcaagtttaatgcctatcttacataaatactttgtaagtagtagcagttctttcagtgaggtgaggttacatgaaaaaattccaagtatttgtaaaactagtgggaagtaagagggaagctcgagttttgattgaaaagtggactaaacaagggcattttatgtactcagatctgaagcaagttctgtgttgctgaggtaaaagcatttgtgttaatatggttttaaaaaccatgagttcttctccctccattgcaggattgcttatattgaatttaagacagaagctgatgcagagaaaacctttgaagaaaagcagggaacagagatcgatgggcgatctatttccctgtactatactggagagaaaggtcaaaatcaagactatagaggtggaaagaatagcacttggagtggtaagaaattaggcttgttccaaggttttcagaattggttgagggaactcttctagtctttgtatttcataagtttataaatactttttaatcaaagttactcaaatgtaggtgaagatcaaggacatgataccccaagtcatactcttatttggaatagtaatttccaatcttgaaatgagagctctaaatcattttgcattggaatacagtaggcaaatcaagcttcctttgtaggcatgttttatactttaaatgacttgaccatgtgcgttttgaactcagatgattctaggaaaacagaccagtcatcagcctatgtaagaacaaccagcaggacattgcaacacgtactaggtacttaatatgttgagtaacagaaatggatttagcttacgtcatgagtatttgtatataactcaagcactgaaattcttagggaatagatattactgttgtgaccgaagctgggacactgtttcagagtcttaggaatgtggctctctatttcgaggtgaatcaaaaactctggttttaagcaacctctcctacagtgcaacagaagaaactcttcaggaagtatttgagaaagcaacttttatcaaagtaccccagaaccaaaatggcaaatctaaagggtaagataatacctttgtatcatcagttataggcctatatatgtcttagaggtctaaggacgtaaggtcatgtgtcctgtagaaaaaagctaaataattttagcctagtaaatgagtgtaaaataagtatatttaggtccaaccttgagagaagggccttggccagatcatgtgaccagtggtatagagagcatgtgcctggtaaattactctaagcattaactgttcatcctcaggtatgcatttatagagtttgcttcattcgaagacgctaaagaagctttaaattcctgtaataaaagggaaattgagggcagagcaatcaggctggagttgcaaggacccaggggatcacctaatgccagaagccgtaagttcacctggttagggtgctgtggttgggggtagcactctcggtgctttgtttatttttgcacaaattctgtgtttcctgttcgctactgagtgaacaataactggatatcgatgactgattacctgagaaataattgatgaaatctcaagaaaattcctctagatagtcaagttctgatccagctgtcgtcaactcagagtagcaagtttgcccatgatttcctgccccatccactgggccccacctgcttgggttgctttcccactttccatagaagactggggcaggatatcaactatgcaatggcaattaaaaaatgtaaacccagaatagcctttactttaattaaggactagttggcttagttgcttttaactgctttttcactataacaagtatcttggctagtagtcatactaggcattgtgcaaattcagtgtacgaactgtgaattcacataaatcgcaaatttttttttccttcccagagccatccaaaactctgtttgtcaaaggcctgtctgaggataccactgaagagacattaaaggagtcatttgacggctccgttcgggcaaggatagttactgaccgggaaactgggtcctccaaagggtaagggaaggaagcgtgagtgctgcttccacttgaaggggtttttgttctgtgcagaccttgagtctaatgtgtcttctcattgagctccttctgtctatcagtggcagtttatggattcgcacgagaagaagagagaattcacagaactagcattattttaccttctgtctttacagaggtatatttagctgtattgtgagacattctggggttcaagctgtcacaccagttagttttccatagagagctactctgctgcactggtatctttttcccaaataaacaaggctacttctgtgggatggctccccagcatgtacagttaacttgggacatgtgtagtaggtgctttttataatgggcaatttcatttggtgttctaggtttggttttgtagacttcaacagtgaggaggatgccaaggaggccatggaagacggtgaaattgatggaaataaagttaccttggactgggccaaacctaagggtgaaggtggcttcgggggtcgtggtggaggcagaggcggctttggaggacgaggtggtggtagaggaggccgaggaggatttggtggcagaggccggggaggctttggaggtaaggcacgcagagataatgacaccacatagcatgtgctcttcagaccctgtgccctgtcacggttcctaatcactggggaggaggagctttgtacccattcttttaacagtgtcttgccttcctcctgtagggcgaggaggcttccgaggaggcagaggaggaggaggtgaccacaagccacaaggaaagaagacgaagtttgaatagcttctgtccctctgctttcccttttccatttgaaagaaaggactctggggtttttactgttacctgatcaatgacagagccttctgaggacattccaagacagtatacagtcctgtggtctccttggaaatccgtctagttaacatttcaagggcaataccgtgttggttttgactggatattcatataaactttttaaagagttgagtgatagagctaacccttatctgtaagttttgaatttatattgtttcatcccatgtacaaaaccattttttcctacaaatagtttgggttttgttgttgttacttttttttttgtttttgttttttttttttttgcgttcgtggggttgtaaaagaaaagaaagcagaatgttttatcatggtttttgcttcaccgctttaggacaaattaaaagtcaactctggtgccagacgtgttacttcctaaagagtgtttcccctggaatctcactggagagcatggcaaagccagctctgccacttgcttcacccatcccaatggaaatggcttagtgcgtgtttccagtatcccagccctaactaacttggttgaaatgctggtgaggggacctgctcctgcagccctggtgctgacttgaaggctgctgcagcttctcctacttttagcaggtctcgaggattatgtctgaagaccactctggaaagaggtcgaggaacagattagtcaggtttcctagg

SEQ ID NO: 7546 - protein, 706 aa, Homo sapiens
  ref <308>: DATABASE ACCESSION NUMBER: SWISS-Prot / P19338
  ref <309>: DATABASE ENTRY DATE: 2002-06-15
VKLAKAGKNQGDPKKMAPPPKEVEEDSEDEEMSEDEEDDSSGEEVVIPQKKGKKAAATSAKKVVVSPTKKVAVATPAKKAAVTPGKKAAATPAKKTVTPAKAVTTPGKKGATPGKALVATPGKKGAAIPAKGAKNGKNAKKEDSDEEEDDDSEEDEEDDEDEDEDEDEIEPAAMKAAAAAPASEDEDDEDDEDDEDDDDDEEDDSEEEAMETTPAKGKKAAKVVPVKAKNVAEDEDEEEDDEDEDDDDDEDDEDDDDEDDEEEEEEEEEEPVKEAPGKRKKEMAKQKAAPEAKKQKVEGTEPTTAFNLFVGNLNFNKSAPELKTGISDVFAKNDLAVVDVRIGMTRKFGYVDFESAEDLEKALELTGLKVFGNEIKLEKPKGKDSKKERDARTLLAKNLPYKVTQDELKEVFEDAAEIRLVSKDGKSKGIAYIEFKTEADAEKTFEEKQGTEIDGRSISLYYTGEKGQNQDYRGGKNSTWSGESKTLVLSNLSYSATEETLQEVFEKATFIKVPQNQNGKSKGYAFIEFASFEDAKEALNSCNKREIEGRAIRLELQGPRGSPNARSQPSKTLFVKGLSEDTTEETLKESFDGSVRARIVTDRETGSSKGFGFVDFNSEEDAKEAMEDGEIDGNKVTLDWAKPKGEGGFGGRGGGRGGFGGRGGGRGGRGGFGGRGRGGFGGRGGFRGGRGGGGDHKPQGKKTKFE

SEQ ID NO: 7547 - DNA, 270 bp, Rattus norvegicus
  misc_feature (1)..(270): n=a, c, g or t
  ref <308>: DATABASE ACCESSION NUMBER: EMBL / H31955
  ref <309>: DATABASE ENTRY DATE: 2000-03-04
acaacttgaatacaaacatttatttatcaaatccaaaatttaaaaacaaggacttgcaacactgcccagactcattttgaactacagagttcaagtgatcctcccacaccagactcctgagtagctgggatcagagtaagtatacatgcaccactgggctcagcaacaaaatcaacttcttataaatccactagagagcaaagtcaatgcttctaagtaaagaactgtaagccactaaggtcaaggccagcctggnctccacccagcaag

SEQ ID NO: 7548 - DNA, 219 bp, Rattus norvegicus
  misc_feature (1)..(219): n=a, c, g or t
  ref <308>: DATABASE ACCESSION NUMBER: EMBL / H31964
  ref <309>: DATABASE ENTRY DATE: 2000-03-04
agttttaggacatttaattaacacttgatgtgcatatgantgggaaaactggagcnagggtggagggtggttccctgagctggggacccagagagtgatgctgacagatgggacccttggtagaaagacccattcctgagataagctgtgattcccatgctgactgggtgggtggagacttctccaagaacccagatgtgagcacagtcagttgggatt

SEQ ID NO: 7549 - DNA, 2112 bp, Homo sapiens
  ref <308>: DATABASE ACCESSION NUMBER: EMBL / AK025590
  ref <309>: DATABASE ENTRY DATE: 2000-09-29
ttgatgcgacccaaagatacagcggtgggatctctgctgccagctctcccagcccctcagcttcgcagcctggcgcagcatcctctgaggccccggggcctgttggggcggggttggaagagccgtctgcagctacttcagaggagctgtttatccctctccacgcggggcagactctggcgggtctcctagcgtccgagagatggcttatttttctacagtatttaaaatggatgcagccctaactgcaaaagtcagagaggctgacaaggaccaatgcttctttatctggtgctcagttctcagtcagacgtgcagcgtggctgcagggtggaccagctgcctggcattcaggcccagatgcctgcagggctggggctctcgggacagatgcagggatgtgtgctgcagggctgctgggaggagagtggtgggggcctgagggctgagtgattctgtaaccacctgagaccttcacgtttgctgccgttgggggctcaggctgcactccccgggtcacctgacctgctgcccaggggcttccagtcctgtctgtgtggactggcacctgggctgctggagaagtctcctcccgttcggaccagcctcagggctgcacgttacctcaggaatgggccccaccatgaaggggcccatctgtcagcagcgtcttctaggtccccagctcagggagccatccccagctccagttttctcatgcgaatatgcacagttttaattcacgttgttacactagcctgccgatgagacccagacacaggcagacctggcgctcttgacccctgattccagtgaggactggccctgaggagtccttgcagacctgctgcctgccccacgacaggcccaaagatggaccccccctggccttgtgacagctccccaagtgttctccggtggagaaactgcagaggactggtgggcggggctccccagccatcaccatcctgtgtacaatggctgtagacttgtatatggctcctttaatattgtaaagatgctgatgtacaattgtcgtgcatttgtgtgaacacattgcgttcccagtccatgccataaatgatgctctcaagcaaaagactggaggctctgtcctgtgcagaagcagcagccagactcccgcattcgatgttgtgcagggaggtttgggggcggaacggattcctcccttggatccttcagttcccatcgaggaataacccgcagcagtggtggaggaaggtcagtggctgggtcctgagcttggtgttatttattgcatttgggtgcctgtcccctcagggcagcacagattctgaattctgattcacagtccctagccagatgggaactgggaaagagacagaaggcgtctgggtgcttttgaaccctgtctcaaatgtttgggattttctctctcactattctttggttggggatgatgtcctctttagacccccacgtaatggtatgagaaggtggcaggcagtggctcagccagccagggggcaccaagtcatgcagccagcgtgagacctgcagttcacctaagcacagaacgagatctcagtatgcctccatgtaaacagattcacataggcctccaatttcaatgagaccttttgcattttttctcaaagcccttatgttctaacccatgagaaccattttacctgccctctaagggccaccagcttcgacctgcctcaggggacagcagcacagaccagtggctccctgtccaaggccgcagagcagacgccatcccactgtacaatcgaatttgctggacaaacttgataggtttctctgcttagcaacgagcctatagttagttggcacatctgcgttttggcatctgaggctcccatctgagtggaggagaaagtgttgtgtttattagcaggaagtcttgtgaaaacagctcgctgctgtgtatgtttatggatttttctgatataacagccagcatggttaccgagtggtagagattctcgaacattctcaaactctctttttgggtaaatgattgtgctaaaataaaatttattaataaagaaggggaaaaaggagtaactctacctgaaaaaaaaaaaaaaaaaaaaaaaaaaa

SEQ ID NO: 7550 - DNA, 363 bp, Rattus norvegicus
  misc_feature (1)..(363): n=a, c, g or t
  ref <308>: DATABASE ACCESSION NUMBER: EMBL / H31982
  ref <309>: DATABASE ENTRY DATE: 2000-03-04
gtttgtnctttttttcagagctggggaccgaacccagggccttgcgcttcctaggcaagcgctctaccattgagttaaatccccaaccccaagactttcttttaaaaagacagtactctacggattgaaggattacaatccttcaatcctgatgaactctccatattactggaaccacacactggagcactactgggagccagtgaagttggtgcctcaggatatggggctgttcccctcagccatgggttatctgtgaatatgacccatcacagtctgaatttatctgggaagaaaaagagctcataagtctgtgtacacacttaacacaccacagcacttagactgcattaggtattaggg

SEQ ID NO: 7551 - DNA, 367 bp, Rattus norvegicus
  misc_feature (1)..(367): n=a, c, g or t
  ref <308>: DATABASE ACCESSION NUMBER: EMBL / H31990
  ref <309>: DATABASE ENTRY DATE: 2000-03-04
tttgaactctgaattagacagtttgtattctaaaacacacacaaatctgtaccaattaaatacaaagtcgaaagggaatataaattacagttttngttttcaacggatgatagtaaaacactaccgtcagctcaccacacacacaaacagcagcttttcaatagagtctcccaggcctccctcaccaatgctaaggacttaaaaaataaaaagtacagcaggctgcacatgctctctcacttcctcacaatacacggatagctgtacactgaggtccattgtacaggcatctacagagtaagtacataaaatatatttgtaaaattcttccacgcacgatcctacaatgtctctcctcgcaggatac

SEQ ID NO: 7552 - DNA, 305 bp, Homo sapiens
  ref <308>: DATABASE ACCESSION NUMBER: EMBL / AW016287
  ref <309>: DATABASE ENTRY DATE: 1999-09-13
tttttttttttttttttaagacccgaattacacagtttgtattctaaaacacatacacacacacacacacagaaatgtgtaccaattaaacacaataaagttcaaaggggatataaattacagtttttctttttttaacagacaatagtaaaatactacagtcagctcactatacacacaaatcatgaacagcagcttttcattaaggtttccaatatcttactcatttaccaactcgaagtaatttaaaagaaaaaaggtacagcacgctctacgcattctctctctcttgctctcacaacaca

SEQ ID NO: 7553 - DNA, 396 bp, Rattus norvegicus
  misc_feature (1)..(396): n=a, c, g or t
  ref <308>: DATABASE ACCESSION NUMBER: EMBL / H32977
  ref <309>: DATABASE ENTRY DATE: 2000-03-04
aaaggtttggcactttattaaataagcnccaaaattacatacaaatcaaaagagtaagaaaaataaacactcagcaaaatgtctctnggtagcatccagcaccactgcagttaaagtatggcatagctgtggtatcaccatgctcgctctccccgtccccaaggatggcaggacagggacatcagctttccaaaccaaactgtcatcattcattgctatccctttctttaccatttaacatacagngaacacacttcaatggaatagactaataagccaagagctttattgatgcagcaggcactttacaatggancccaagagagcctgccttctctgagaagacaggatgtctgtacaaactctcatcaggttttttccacttcagaacccaag

SEQ ID NO: 7554 - protein, 153 aa, Rattus norvegicus
  ref <308>: DATABASE ACCESSION NUMBER: SWISS-Prot / BAB25561
  ref <309>: DATABASE ENTRY DATE: 2003-02-01
MARNTLSSRFRRVDIDEFDENKFVDEHEEAAAAAGEPGPDPCEVDGLLRQGDMLRAFHAALRNSPINTKNQAVKERAQGVVLKVLTNFKSSEIEQAVQSLDRNGIDLLMKYIYKGFEKPTENSSAVLLQWHEKALAVGGLGSIIRVLTARKTV

SEQ ID NO: 7555 - DNA, 347 bp, Rattus norvegicus
  misc_feature (1)..(347): n=a, c, g or t
  ref <308>: DATABASE ACCESSION NUMBER: EMBL / H33086
  ref <309>: DATABASE ENTRY DATE: 2000-03-04
gggaaagggttctncattgcacatttaatagttcatgcagcacttggtgacataaataggggatgggggaacagggccacagaatccacagatagtccacagtgcaggcaagacacacatggccagggccacacagcagggagctgatggtcagctggaagggtcacctagacgtgcacagcggggcagacaaaggttgntcacactgtctcatgacatgctggtcatccagaggacactgagcagttntggacactcatgtggccctcgggcctggctggctcatatcacagtccactgttgatggtttagggatgtggggtcaagcctggtttcaatacattatc

SEQ ID NO: 7556 - DNA, 351 bp, Rattus norvegicus
  misc_feature (1)..(351): n=a, c, g or t
  ref <308>: DATABASE ACCESSION NUMBER: EMBL / H33101
  ref <309>: DATABASE ENTRY DATE: 2000-03-04
cggagctggggactgaacccagggccttgtgcttgcnaggcaagcgctctaccactgagctaaatccccaacccctagagcagacactcttaagtggcacagtggtaaccgggctcctagagtgtcagaaccctgacatctttcttttcagagacagagggggccggatggaggggaagcagcctctgctccttaccttactctgcaacactgagaaaccagaaaaaaagacctgggactatattaagactcccaaagtaaaactatatggaagtgtttattttttaaagtctagtaccagagaacaggacagacatgacagttactactcacaaggggcagtgtcccact

SEQ ID NO: 7557 - DNA, 381 bp, Rattus norvegicus
  misc_feature (1)..(381): n=a, c, g or t
  ref <308>: DATABASE ACCESSION NUMBER: EMBL / H33219
  ref <309>: DATABASE ENTRY DATE: 2000-03-04
cttttaaattattttattattgtataagctaaanggaaatttacacactgaaatctcaaaacccttgggcatgcatattaacccgttagaggttcttctacatgtctctcctgcttccataggaattgccccaaacgtttaaaacccacagcttgtttttttgtttttttactgtatatacagcctaaaccatagcaatctaggattatgtcattttacactgtgcaaaatcctcaaaaaatagtggtatgacagagcagaaagatctctacaaatttcattttaagacattcatataattnggtccttctccaaatcacaccaattaaaacaggcacattctctgtcaagcctccagtcacgncctgacagtgatcccgg

SEQ ID NO: 7558 - DNA, 422 bp, Rattus norvegicus
  misc_feature (1)..(422): n=a, c, g or t
  ref <308>: DATABASE ACCESSION NUMBER: EMBL / H33426
  ref <309>: DATABASE ENTRY DATE: 2000-03-04
aaagatttattcatgcagtttatgtatatgagtnctgtcttcatacacatcagaaggaatcagacctcatagatggttgtnagccactatggggttgttgggaattgaacttaggacctctggaagaactactgggtgctatcactcagacccaggtttttgggagagacagtgtcctgtgtagcctataactgattaggaatttgaatctcttctgcctccacctaccacatgctgggatgactgctaagagttgtagcttccagaaaggatgaacattaagacctttgtgcttctgtaacagaagttaaagaaccatgggaacattactttggtttcaacaggatggtgtttgttcaaggctgagagcctcaagtgagcaatttagcagagtctgtatacaaacagatttaccactgggg

SEQ ID NO: 7559 - protein, 339 aa, Rattus norvegicus
  ref <308>: DATABASE ACCESSION NUMBER: Refseq / NP_031824
  ref <309>: DATABASE ENTRY DATE: 2002-09-19
MWWSLILLSCLLALTSAHDKPSFHPLSDDLINYINKQNTTWQAGRNFYNVDISYLKKLCGTVLGGPKLPGRVAFGEDIDLPETFDAREQWSNCPTIGQIRDQGSCGSCWAFGAVEAISDRTCIHTNGRVNVEVSAEDLLTCCGIQCGDGCNGGYPSGAWSFWTKKGLVSGGVYNSHVGCLPYTIPPCEHHVNGSRPPCTGEGDTPRCNKSCEAGYSPSYKEDKHFGYTSYSVSNSVKEIMAEIYKNGPVEGAFTVFSDFLTYKSGVYKHEAGDMMGGHAIRILGWGVENGVPYWLAANSWNLDWGDNGFFKILRGENHCGIESEIVAGIPRTDQYWGRF

SEQ ID NO: 7560 - DNA, 1996 bp, Homo sapiens
  ref <308>: DATABASE ACCESSION NUMBER: Refseq / NM_001908
  ref <309>: DATABASE ENTRY DATE: 2002-11-05
tccggcaacgccaaccgctccgctgcgcgcaggctgggctgcaggctctcggctgcagcgctgggctggtgtgcagtggtgcgaccacggctcacggcagcctcagccacccagatgtaagcgatctggttcccacctcagcctcccgagtagtggatctaggatccggcttccaacatgtggcagctctgggcctccctctgctgcctgctggtgttggccaatgcccggagcaggccctctttccatcccctgtcggatgagctggtcaactatgtcaacaaacggaataccacgtggcaggccgggcacaacttctacaacgtggacatgagctacttgaagaggctatgtggtaccttcctgggtgggcccaagccaccccagagagttatgtttaccgaggacctgaagctgcctgcaagcttcgatgcacgggaacaatggccacagtgtcccaccatcaaagagatcagagaccagggctcctgtggctcctgctgggccttcggggctgtggaagccatctctgaccggatctgcatccacaccaatgcgcacgtcagcgtggaggtgtcggcggaggacctgctcacatgctgtggcagcatgtgtggggacggctgtaatggtggctatcctgctgaagcttggaacttctggacaagaaaaggcctggtttctggtggcctctatgaatcccatgtagggtgcagaccgtactccatccctccctgtgagcaccacgtcaacggctcccggcccccatgcacgggggagggagatacccccaagtgtagcaagatctgtgagcctggctacagcccgacctacaaacaggacaagcactacggatacaattcctacagcgtctccaatagcgagaaggacatcatggccgagatctacaaaaacggccccgtggagggagctttctctgtgtattcggacttcctgctctacaagtcaggagtgtaccaacacgtcaccggagagatgatgggtggccatgccatccgcatcctgggctggggagtggagaatggcacaccctactggctggttgccaactcctggaacactgactggggtgacaatggcttctttaaaatactcagaggacaggatcactgtggaatcgaatcagaagtggtggctggaattccacgcaccgatcagtactgggaaaagatctaatctgccgtgggcctgtcgtgccagtcctgggggcgagatcggggtagaaatgcattttattctttaagttcacgtaagatacaagtttcaggcagggtctgaaggactggattggccaaacatcagacctgtcttccaaggagaccaagtcctggctacatcccagcctgtggttacagtgcagacaggccatgtgagccaccgctgccagcacagagcgtccttccccctgtagactagtgccgtgggagtacctgctgcccagctgctgtggccccctccgtgatccatccatctccagggagcaagacagagacgcaggatggaaagcggagttcctaacaggatgaaagttcccccatcagttcccccagtacctccaagcaagtagctttccacatttgtcacagaaatcagaggagagatggtgttgggagccctttggagaacgccagtctccaggtccccctgcatctatcgagtttgcaatgtcacaacctctctgatcttgtgctcagcatgattctttaatagaagttttatttttcgtgcactctgctaatcatgtgggtgagccagtggaacagcgggagcctgtgctggtttgcagattgcctcctaatgacgcggctcaaaaggaaaccaagtggtcaggagttgtttctgacccactgatctctactaccacaaggaaaatagtttaggagaaaccagcttttactgtttttgaaaaattacagcttcaccctgtcaagttaacaaggaatgcctgtgccaataaaaggtttctccaacttga

SEQ ID NO: 7561 - protein, 339 aa, Homo sapiens [sequence omitted]

SEQ ID NO: 7562 - DNA, 422 bp, Rattus norvegicus; identical to SEQ ID NO: 7558
  misc_feature (1)..(422): n=a, c, g or t
  ref <308>: DATABASE ACCESSION NUMBER: EMBL / H33426
  ref <309>: DATABASE ENTRY DATE: 2000-03-04

SEQ ID NO: 7563 - protein, 339 aa, Rattus norvegicus; identical to SEQ ID NO: 7559
  ref <308>: DATABASE ACCESSION NUMBER: Refseq / NP_031824
  ref <309>: DATABASE ENTRY DATE: 2002-09-19

SEQ ID NO: 7564 - DNA, 1996 bp, Homo sapiens; identical to SEQ ID NO: 7560
  ref <308>: DATABASE ACCESSION NUMBER: Refseq / NM_001908
  ref <309>: DATABASE ENTRY DATE: 2002-11-05

SEQ ID NO: 7565 - protein, 339 aa, Homo sapiens [sequence omitted]

SEQ ID NO: 7566 - DNA, 419 bp, Rattus norvegicus
  misc_feature (1)..(419): n=a, c, g or t
  ref <308>: DATABASE ACCESSION NUMBER: EMBL / H33459
  ref <309>: DATABASE ENTRY DATE: 2000-03-04
gaacatgttaccttttatttaaaagtgttactagccctgcctggggctcctatacaaaaacaacacacaacccaaatnaggctgnttcccgtctctagactcggggacagtgttggggtttagcgagtggaatgtgtgctgaaggagggcacccaggnggctcctaccccagtcctcaggatggcaccagctgtcccgttgcctttctatttaccacagaggaaggaaaggcagtnttttgagatgctcagtagaagtcgagcatggatggcttcatcaccaggctggggcagtnttggcaagacgcctcattcgccttgtgttcctgtcttgatcccggntcttcttctccatctcagcatccgtcantgtctccagcagggggcaccactggtcagcatctccagtatttcggatgg

SEQ ID NO: 7567 - DNA, 419 bp, Rattus norvegicus; identical to SEQ ID NO: 7566
  misc_feature (1)..(419): n=a, c, g or t
  ref <308>: DATABASE ACCESSION NUMBER: EMBL / H33459
  ref <309>: DATABASE ENTRY DATE: 2000-03-04

SEQ ID NO: 7568 - DNA, 551 bp, Rattus norvegicus
  misc_feature (1)..(551): n=a, c, g or t
  ref <308>: DATABASE ACCESSION NUMBER: EMBL / H33461
  ref <309>: DATABASE ENTRY DATE: 2000-03-04
gcattacatgaagctctgaaatttaattgatgaattgttgccacatggcttattgttggtttcctacaagaaagaatacaagtnctagtttatnctatctttncattttggaggccacttgacagtaagcttgcacattcgccaagtctactgagttacagtattgtctacgatagtcactgccctccggtaagagcagatgctaatggtaactaataacatataccacttagaaaaaaacacgtttttatttcaaaacaatttgcttccttttgagcagaaaacaaaacaaaactaaaatgtattgggggagttggtatgcaacgaggctaaaacaagagaactgtaaaacagtgtatatggcacaatgttgaagaaatatgcaagttttagttttgtacttatggtaatgccctattaagctacaaatatgtaaatagtattacttngcttaatatattaaatcccataggntcatngaattccccttctcctctggcaatttngtaacnctatctgaaaatccagtggtggaaacatgcggcccaacc

SEQ ID NO: 7569 - protein, 216 aa, Rattus norvegicus
  ref <308>: DATABASE ACCESSION NUMBER: SWISS-Prot / AAK29401
  ref <309>: DATABASE ENTRY DATE: 2003-02-01
MSRLWYGKKGRRHQQVNHKYTLITTREDINSKQAAPAKADLEPESFRPNLSDPSELLLPDQIEKLTKHLPPRTIGYPWTLVYGTGKHGTSLKTLYRTMTGLDTPVLMVIKDSDGQVFGALASEPFKVSDGFYGTGETFVFTFCPEFEVFKWTGDNMFFIKGDMDSLAFGGGGGEFALWLDGDLYHGRSHSCKTFGNHTLSKKEDFFIQDIEIWAFE

SEQ ID NO: 7570 - DNA, 779 bp, Homo sapiens
  ref <308>: DATABASE ACCESSION NUMBER: EMBL / BG718301
  ref <309>: DATABASE ENTRY DATE: 2001-05-09
agcgggcctcttgggaggcgcgcggagccgcctcccctgggtcaggtctgatgggccggtgggcgcgctagtggtggccgccaccgccgaaaccgtcgacctcctgggccccagttccgcgtccagccccgcggcagcatggactacctgacgacgttcaccgagaagagtgggcgccttctgcggggcacggccaaccgcctgttggggttcgggggcggcggcgaagcccggcagacactggccaaaagaagaccctagacaagaaagatggaagacgaatgtcttttcagaaacctaaagggactattgagtatactgttgaatcaagggattctttgaatagcatagccctgaagtttgatacaacacctaacgaacttgttcaattaaataagttattctcccgagcagttgttactggacaggttctgtatgttcctgatcctgaatatgtctccagtgttgagagctctccatctctaagccccgtaagtcctctgtcaccaacatcatctgaggctgaatttgataagaccactaatcctgatgtccatccaacagaagcaactccctcatctactttcactggtattcgacctgcacgagttgtatcttcaacttctgaggaggaggaagcatttactgagaaatttcttaaaattaattgcaaatatattaccagtggcaagggcacagtcagtggtgtgctgctagttacaccaaaataatataagtgtttgatccacataaaaatgaccctttggttcagagaatgg

SEQ ID NO: 7571 - DNA, 352 bp, Rattus norvegicus
  misc_feature (1)..(352): n=a, c, g or t
  ref <308>: DATABASE ACCESSION NUMBER: EMBL / H33467
  ref <309>: DATABASE ENTRY DATE: 2000-03-04
cacagtgaaatgctttattcttaaattcaccccctccaccgtggacaacgtgacagttgcacatgatgaaactcatcagacaaaggtctttcagttaggaaagaagtcctctccacaagtctgcttgaaggtgaacactggagagtgaggtgagatcctcacaacagatgcacaatatctgacgaaacctcacacacttggaaatcctagtcactccttaaatatgtaatacaaaagcagaaaaatcacttctagtgagtgatctgtcctgtagtaattccatcctcgtggggcttggagtccagggngcccagagcgcccccttcagatgaattgtgcctcactttcaacg

SEQ ID NO: 7572 - DNA, 569 bp, Rattus norvegicus
  misc_feature (1)..(569): n=a, c, g or t
  ref <308>: DATABASE ACCESSION NUMBER: EMBL / H33491
  ref <309>: DATABASE ENTRY DATE: 2000-03-04
ttcctggttttggacagggacttcccatcttctcttccaccctttctctatggtccctggcagtagctccgcatgtnccctaccttttctnactctggccctttgagtgtggcaaatcccatagctctgaccctccaaaactgttcgaggagaaggaggaagaggaggaggaggattcgagtcttctggtaagcggggagagcgcctcctcagacaggtctcagctcactctccgtctctttagttatgcttgctcttaattttcatgactttgttgtccagcatgctctgagcgtttgtnagatgcttgatggcatcaaacacaaggatgcccggtatcaccaaccatatggcattcatgataacgaagtaggaaccagaaataaagggggtgacctagctctccatgctggaatccatcgcggagttcggtcaggaagtacagcacatccccatatatctggcccacagacaccacaagctgtaggacaaagcggaagggtttgatgacggagaaaggcgatcaccacccataggctnagtgggtccccagagacaagctgtgacaa

SEQ ID NO: 7573 - protein, 230 aa, Rattus norvegicus
  ref <308>: DATABASE ACCESSION NUMBER: SWISS-Prot / Q9JJ46
  ref <309>: DATABASE ENTRY DATE: 2001-10-16
MTTNMLPLHPYWPRHLRLDNFVPNDLPTWHILVGLFSFSGVLIVITWLLSSRVSVVPLGTGRRLALCWFAVCTFIHLVIEGWFSFYHEILLEDQAFLSQLWKEYSKGDSRYILSDGFIVCMESVTACLWGPLSLWVVIAFLRHQPFRFVLQLVVSVGQIYGDVLYFLTELRDGFQHGELGHPLYFWFYFVIMNAIWLVIPGILVFDAIKHLTNAQSMLDNKVMKIKSKHN

SEQ ID NO: 7574 - DNA, 1073 bp, Homo sapiens
  ref <308>: DATABASE ACCESSION NUMBER: EMBL / Z37986
  ref <309>: DATABASE ENTRY DATE: 1995-04-20
cggagccagcgtgggaggccgctgccgtcgcgcgccttggtttttctgttccttttttttttttttttttaacttcctgcctatcacacgcagccatcagcccacaaagacatgactaccaacgcgggccccttgcacccatactggcctcagcacctaagactggacaactttgtacctaatgaccgccccacctggcatatactggctggcctcttctctgtcacaggggtcttagtcgtgaccacatggctgttgtcaggtcgtgctgcggttgtcccattggggacttggcggcgactgtccctgtgctggtttgcagtgtgtgggttcattcacctggtgatcgagggctggttcgttctctactacgaagacctgcttggagaccaagccttcttatctcaactctggaaagagtatgccaagggagacagccgatacatcctgggtgacaacttcacagtgtgcatggaaaccatcacagcttgcctgtggggaccactcagcctgtgggtggtgatcgcctttctccgccagcatcccctccgcttcattctacagcttgtggtctctgtgggccagatctatggggatgtgctctacttcctgacagagcaccgcgacggattccagcacggagagctgggccaccctctctacttctggttttactttgtcttcatgaatgccctgtggctggtgctgcctggagtccttgtgcttgatgctgtgaagcacctcactcatgcccagagcacgctggatgccaaggccacaaaagccaagagcaagaagaactgaggagtggtggaccaggctcgaacactggccgaggaggagctctctgcctgccagaagagtctagtcctgctcccacagtttggagggacaaagctaattgatctgtcacactcaggctcatgggcaggcacaagaaggggaataaaggggctgtgtgaaggcactgctgggagccattagaacacagatacaagagaagccaggaggtctatgatggtgacgatttttaaaatcaggaaataaaagatcttgactctaaaaaaaaaaaa

SEQ ID NO: 7575 - protein, 230 aa, Homo sapiens [sequence omitted]

SEQ ID NO: 7576 - DNA, 224 bp, Rattus norvegicus
  misc_feature (1)..(224): n=a, c, g or t
  ref <308>: DATABASE ACCESSION NUMBER: EMBL / H33614
  ref <309>: DATABASE ENTRY DATE: 2000-03-04
agtgcaaacatggctatttatttctnagaatctggaggcctcagggagcttcctctggggccttagtacagacacttgtggtggctagcgtctgtaattgcagaaggatgtctgatggtccgtggtcatctctgtgttcctcctgcttcatcttaacctcttggggacattagccagttttaatggattcattgcaacttcattttattattttngctttatac

SEQ ID NO: 7577 - DNA, 411 bp, Rattus norvegicus
  misc_feature (1)..(411): n=a, c, g or t
  ref <308>: DATABASE ACCESSION NUMBER: EMBL / H33636
  ref <309>: DATABASE ENTRY DATE: 2000-03-04
cactgcattgtctttattgcatccggagcaagttggccagaccattccacatttggagaaggtttaaaaaaaaagcccaacaatcttctcatcttaccttccccccccccaccccttccccacaactgcacagcaatgtctgaacacatttggtgacaagaacaatttgcaaaagtggtctagaaattacattatgaattgttccaacacaagacacagttggcttccttctgagtcagttatttttacataaactacatggattttttttattacatcaaagacaacagantagattcttcacaagaaacaacaggagtaccaaggttacatgcgaggatttgtaaggaaacaagggtggttgtcacaaatggctagagctaagtcaagagtgagcagttggcagcaaag

SEQ ID NO: 7578 - protein, 461 aa, Rattus norvegicus
  ref <308>: DATABASE ACCESSION NUMBER: SWISS-Prot / AAB34938
  ref <309>: DATABASE ENTRY DATE: 2002-06-15
MYNTVWSMDRDDADWREVMMPYSTELIFYIEMDPPALPPKPPKPMTPAVTNGMKDSFISLQDAEWYWGDISREEVNDKLRDMPDGTFLVRDASTKMQGDYTLTLRKGGNNKLIKIYHRDGKYGFSEPLTFTSVVELINHYHHESLAQYNPKLDVKLTYPVSRFQQDQLVKEDNIDAVGKNLQEFHSQYQEKSKEYDRLYEEYTRTSQEIQMKRTAIEAFNETIKIFEEQCHTQEQHSKDYIERFRREGNEKEIERIMMNYDKLKSRLGEIHDSKLRLEQDLKKQALDNREIDKKMNSIKPDLIQLRKIRDQHLVWLNHRGVRQRRLNAWLGIKNEDSDESYFINEEDENLPHYDEKTWFVEDINRVQAEDLLYGKPDGAFLIRESSKKGCYACSVVADGEVKHCVIYSTARGYGFAEPYNLYSSLKELVLHYQQTSLVQHNDSLNVRLAYPVHAQMPTLCR

SEQ ID NO: 7579 - DNA, 3371 bp, Homo sapiens
  ref <308>: DATABASE ACCESSION NUMBER: Refseq / NM_003629
  ref <309>: DATABASE ENTRY DATE: 2002-05-14
tttctcccaacgtgttcttttttttcctcttcattctccctccttcgaggacacaaaagtggcttccgcggaaagatttggaggcggtgggagcttttctccccggagagcgactgtgtagaaaggatttttgggaagccgctttttaacacctctgctctccgtcccccaagcctctgtgtaatcctctgaggagaaaagcccatagcttgaaagttcgggggcattttgttgtgttctgtaggagagagggggaggaccctgttcgggtagtttggccggactggtactggccgttggaaaacccgaagtacatttccgtgtggaacttttgcagatatatatttttagatttttaaataccagataaaaaatatatgccttctatatatctcctggcgacctgcccctgacagcgcgatgtacaatacggtgtggagtatggaccgcgatgacgcagactggagggaggtgatgatgccctattcgacagaactgatattttatattgaaatggatcctccagctcttccaccaaagccacctaagccaatgacttcagcagttccaaatggaatgaaggacagttctgtttctcttcaggatgcagaatggtactggggggatatttcaagggaggaggtaaatgacaaattgcgggatatgccagatgggaccttcttggtccgagatgcctcaacaaaaatgcagggagattatactttgactttgcggaagggaggcaataataagttaataaagatctatcaccgggatggtaaatatggcttttctgatcctctgacatttaattccgtggtggagctcattaaccactatcaccatgaatctcttgctcagtacaatcccaaacttgatgtgaagctgatgtacccagtgtccagataccaacaggatcagttggtaaaagaagataatattgatgcagtaggtaaaaaactgcaagaataccactctcagtatcaggagaagagtaaagagtatgataggctgtatgaagaatatactagaacatcccaggaaatacagatgaagaggactgcaatagaagcttttaatgaaacaattaaaatatttgaagagcagtgtcacacacaagaacaacatagcaaagaatatattgagcgatttcgcagagaggggaatgaaaaggagattgaacgaattatgatgaattatgataaattgaaatcacgtctgggtgagattcatgatagcaaaatgcgtctagagcaggatttgaagaaacaagctttggacaaccgagaaatagataaaaaaatgaatagtatcaaacctgacctgatccagctgcgaaagatccgagatcaacaccttgtatggctcaatcacaaaggagtgagacagaaacgcctgaatgtctggctgggaattaagaatgaggatgctgatgagaactattttatcaatgaggaagatgaaaacctgccccattatgatgagaaaacctggtttgttgaggatatcaatcgagtacaagcagaggacttgctttatgggaaacctgatggtgcattcttaattcgtgagagtagcaagaaaggatgctatgcttgctctgtggtggccgatggggaagtgaagcactgtgtgatctacagcactgctcggggctatggctttgcagagccctacaacctgtacagctctctgaaggagctagtgctccattaccagcagacatccttggttcagcacaacgactccctcaacgtcaggcttgcctaccctgttcatgcacagatgccctcgctttgcagataaagaggaagtgggaagagaggtggtcttctggcatttttttctacagtttttattagactacgatgagggcattctttctacatagactgcttgttttgcacaagaagtgattttgtgaatgtgaagtggagaggccgaggagcagccggccgggatgggggcattagaggcctgaggttctctaggactcagccatgccgctgcactgacatactaagctggaagcagatgttttttttgaaagtctgtttcattggggtttttgttttgtttagccagacaccctcaacagaatattaggcttgatggttatagcgggtggggttgtatttggaagcctctgaagagaccatgtctttttaaaatctaactcttgagagtgcagcaggggcatggctctgctgggagttgtgttttgctttggcagtctctcttccccccacgaagaaggctgtttaggttttgtgatagaatgggatttgatgaaaaagacaaccaaaggaaaatggggaggcttgggatttcatttaaataatctaagccaagatgataaaaaaaaccttcaactgaaggtactttgtttcttacaacataatttaggcttcagcatctcaccagcccctccctctgaagaagtattatgttcagaagccaacaaaacagtttgttgccagaccaatgtttgatgggaaaacgtggcactcatagttgaatgtatacttctgtaccaaaacttgaacataaaagactagaatttgtgagttttagcaaacgctaaattgatcactgtaactaaccccttctgtccttcctgcctgtttctctgagatgaggaatagcattctttttgtggggatggtgagctttgaatcataaaatgaagttggtgcttgtatggtgtttccttagcctaaagaatgatctgttgtttgaaacctttgtaacttgtttgtatgagtaaagaaaaggtgcaatgcagtgcttttagatggcttgatataccaaataacaatatagacaacattattatatgtgcttccccaagtttaaaggccctgcagaaatagtaaacatggtttaatttcccttcatttccccctcctttgctggatggggttttgggagctataggttgctaaggaggggagtcagattgtggtcaggtgcctcagtaaatcacagacccaggggccctgtggtccagggtgagagtcacaccacattacacatgtgcttccatacagtggtttctgaagcttttgcagggagagaagatggcttagtgtttagactgttagtagaagccatctggaagcttttctctttgcctttttttgtgatcctgccattaaggctatgtgcagtctgccctcctgctccagtggccttgattttaggccaggaatcttctgctccatgtggcttaagccttccagctgagtgaagctaggcaaatggagtgggggcaggcatctattcctgcccccatcatgccccacacccatcagtcaacactcatttgacaaatagagtccagctgcctctgagccaatcctgggacctaa

SEQ ID NO: 7580 - protein, 461 aa, Homo sapiens
  ref <308>: DATABASE ACCESSION NUMBER: SWISS-Prot / Q92569
  ref <309>: DATABASE ENTRY DATE: 2001-10-16
MYNTVWSMDRDDADWREVMMPYSTELIFYIEMDPPALPPKPPKPMTSAVPNGMKDSSVSLQDAEWYWGDISREEVNDKLRDMPDGTFLVRDASTKMQGDYTLTLRKGGNNKLIKIYHRDGKYGFSDPLTFNSVVELINHYHHESLAQYNPKLDVKLMYPVSRYQQDQLVKEDNIDAVGKKLQEYHSQYQEKSKEYDRLYEEYTRTSQEIQMKRTAIEAFNETIKIFEEQCHTQEQHSKEYIERFRREGNEKEIERIMMNYDKLKSRLGEIHDSKMRLEQDLKKQALDNREIDKKMNSIKPDLIQLRKIRDQHLVWLNHKGVRQKRLNVWLGIKNEDADENYFINEEDENLPHYDEKTWFVEDINRVQAEDLLYGKPDGAFLIRESSKKGCYACSVVADGEVKHCVIYSTARGYGFAEPYNLYSSLKELVLHYQQTSLVQHNDSLNVRLAYPVHAQMPSLCR

SEQ ID NO: 7581 - DNA, 447 bp, Rattus norvegicus
  misc_feature (1)..(447): n=a, c, g or t
  ref <308>: DATABASE ACCESSION NUMBER: EMBL / H33651
  ref <309>: DATABASE ENTRY DATE: 2000-03-04
cttttctttttttcttatttttgtttctctgtgtaatggccctggttgtcctagaacttgatctgtagaccatgctggcctcaaacacacagagatctgtctacctctgcctccaaagaatttattctgattaatggatatctaatattatatggcaaagccagacttagaaaaaaatacagctgcaaggtgtggtaggtatcgtatgcctgtncctgtnactctaccactcaggaagcacaggcaaatgttcaagttcaaggccagcctgatctatataatgggttccagacagtgagagcctgtctcaaacaaaaaatataatagtgttctactgcaggctagattctagaaattcaatggtgaagaacatggatgtggattcgtgtaatcaaagttcctaagataaaagagttttacaataaacggccaaatgattccaagaac

SEQ ID NO: 7582 - DNA, 360 bp, Rattus norvegicus
  misc_feature (1)..(360): n=a, c, g or t
  ref <308>: DATABASE ACCESSION NUMBER: EMBL / H33656
  ref <309>: DATABASE ENTRY DATE: 2000-03-04
ggagaccaaagggcttgggttttatttgccattccataaatacgggccgcaccttggtccgagtctgtcaggaagctggaggcgtttgcggtcggccttggtggggtgcagttagcgaggagccacgctcgtnaaaaaatggggagagaaagcacgttatgtacacggccagagcgggcacccaggtgccctcctgtgcctcaggaccctgggtctgggatgagcaggagcagggctccatgtgccagatcctatacatagccctcctcctgcaccaggcctgacagactacttcaagagggtggagagaggctggcttggtctgaccagcaggcagttggactaaaggaaggagaggcc

SEQ ID NO: 7583 - protein, 367 aa, Rattus norvegicus
  ref <308>: DATABASE ACCESSION NUMBER: SWISS-Prot / AAA75174
  ref <309>: DATABASE ENTRY DATE: 2001-10-16
MYPESTTGSPARLSLRQTGSPGMIYSTRYGSPKRQLQFYRNLGKSGLRVSCLGLGTWVTFGGQITDEMAEHLMTLAYDNGINLFDTAEVYAAGKAEVVLGNIIKKKGWRRSSLVITTKIFWGGKAETERGLSRKHIIEGLKASLERLQLEYVDVVFANRPDPNTPMEETVRAMTHVINQGMAMYWGTSRWSSMEIMEAYSVARQFNLIPPICEQAEYHMFQREKVEVQLPELFHKIGVGAMTWSPLACGIVSGKYDSGIPPYSRASLKGYQWLKDKILSEEGRRQQAKLKELQAIAERLGCTLPQLAIAWCLRNEGVSSVLLGASNAEQLMENIGAIQVLPKLSSSIVHEIDSILGNKPYSKKDYRS

SEQ ID NO: 7584 - DNA, 3019 bp, Homo sapiens
  misc_feature (1)..(3019): n=a, c, g or t
  ref <308>: DATABASE ACCESSION NUMBER: Refseq / NM_003636
  ref <309>: DATABASE ENTRY DATE: 2000-11-01
caccgagcaagtctggataagtgaggctggctccatgtatccagaatcaacgacgggctccccggctcggctctcgctgcggcagacgggctcccccgggatgatctacagtactcggtatgggagtcccaaaagacagctccagttttacaggaacctgggcaagtctggcctgcgggtctcctgcctgggacttggaacatgggtgaccttcggaggccagatcaccgatgagatggcagagcagctcatgaccttggcctatgataatggcatcaacctcttcgatacagcagaagtctacgcagccggcaaggctgaagtggtactgggaaacatcattaagaagaaaggatggaggcggtccagcctcgtcatcaccaccaagatcttctggggcggaaaggcggagacggagcggggcctgtccaggaagcacataatcgaaggtctgaaagcttccctggagcgactgcagctggagtacgtggatgtggtgtttgccaaccgcccggaccccaacaccccgatggaagagaccgtccgcgccatgacccacgtcatcaaccaggggatggccatgtactggggcacgtcacgctggagctccatggagatcatggaggcctactccgtggcccggcagttcaacctgaccccgcccatctgcgagcaggctgagtaccacatgttccagcgtgagaaagtggaggtgcagctgccggagctgttccacaagataggagtgggcgccatgacctggtcccctctggcctgtggcattgtttctggcaagtacgacagtggcatcccaccctactcaagagcctccttgaagggctaccagtggctgaaggacaagatcctcagtgaggagggccggcgccagcaagccaagctgaaggagctgcaggccatcgccgagcgcctgggctgcaccctgccccagctggccatagcctggtgcctgaggaatgagggagtcagctccgtgctcctgggggcctccaatgcggaccagctcatggagaacattggggcaatacaggtccttccgaaactgtcgtcttccattatccacgagattgatagtattttgggcaataaaccctacagcaaaaaggactacagatcctaagccgcccccgcccgcctgctcggacagtttccgttccctcctagtctctgttcgctcgcttaagctgttttgaagcaagtgaagagtgtggtttgcatccaagagaaaacaccacactgtgatgtcatcgggaaatgatctcccaagtcgctgccagacaccacccactgcttcgccggacaatgtcgaagtccantctgtgccggggaaggcactggttaggaaggatgttcaaacggtcccacccaagcctgtcacctctgctcatcctccaagaccacccagctttttcccagccacagccaagattcccaaagtcaaggcccaaagatttccaaggttcccaaagtcaaggccaggccaaggcctggttgggtccttggggcgggcagggccggcctctcctctgctgagaatccccacttggtgtagggggagagggaaagggtctggcccatcgagggcccctttctgccaggcccttggttgctggggcaggcctccccactgggggtcttcctccacctcccactttccaagggctccaggaatctggggcctgaccacagattcctctcccatccttttctgctccaacctgccccactgggtcacggcaggggccatgcctaccaagctcgagctggcccttgacccccacccacccccacccttgctggcaggggcagggaccccagggggattgactctgcagtttgggagccacaaaaagcgtagcggtcgtgatttctagctcagcctcccaccgtcttcctcctacacaccaatgatgagcctcatgccagtgaggcccggagcgcttgggaggggtcccagtggggcaggcccctctgtctggccacccctctgtcctggccccggaaggccctgtggtcatgtgctcctagctgcacggtggctgctggcacaccacggcaagtggcagcaggggcggcctgtgcacaaggatgcactcctctcggccctgtagaatttctctaaagccgcccgccagcccaggccgctgctctgcaccgagctggtgggcttgggttttgtggagcgcatgcttggaccctttcagtaaggaagggtctttgggattttctgtgcccatgacttgggggctgcacccccacagcacccccacaatgtaggaaaagacctcagggaacctctccctggaaagacgggcagggctggttagcccctcccactgcctgacacctgggacaggctgggcagaggggagagagggcaggacaggccagagtgacgcccccgtgcagcttgggccggagggcaagggatgccagtaagtctgcaggtgcggggtgccacctacaggcccaggcctgtgtcccaagcagtacccaggctttgcagaccacgcggggcagggctccactgaagccacccccacccctcgccagctagctccatagggaagcctgtgtctcctgcccccagggcgcaccctcagtgcaggcacctctgttcccgctttgcccctggaggagccactattccagaaggctccaccctgccgtcctgcgggagactgctgtccagtcctggccgggccaaggcctgggaaactgtgaaagtcagaaaggccagcggggagagcctggggcgaggggaggagggggatcagcttctgctattaccgaccccacttcatgctgcacctggcgcctagaactcttgcccctcctcatagaccaagtcccgggggtctccactcagtcctgctgcctgcttcaccagaagcagccctgtgagtgtggggtggggaagtcccttcccaacggaggtcccagcctatgccctgggcccaggtgggggtcgcctgcttccttcccggacagggtcctgcag

SEQ ID NO: 7585 - protein, 367 aa, Homo sapiens
  ref <308>: DATABASE ACCESSION NUMBER: SWISS-Prot / Q13303
  ref <309>: DATABASE ENTRY DATE: 2001-10-16
MYPESTTGSPARLSLRQTGSPGMIYSTRYGSPKRQLQFYRNLGKSGLRVSCLGLGTWVTFGGQITDEMAEQLMTLAYDNGINLFDTAEVYAAGKAEVVLGNIIKKKGWRRSSLVITTKIFWGGKAETERGLSRKHIIEGLKASLERLQLEYVDVVFANRPDPNTPMEETVRAMTHVINQGMAMYWGTSRWSSMEIMEAYSVARQFNLTPPICEQAEYHMFQREKVEVQLPELFHKIGVGAMTWSPLACGIVSGKYDSGIPPYSRASLKGYQWLKDKILSEEGRRQQAKLKELQAIAERLGCTLPQLAIAWCLRNEGVSSVLLGASNADQLMENIGAIQVLPKLSSSIIHEIDSILGNKPYSKKDYRS

SEQ ID NO: 7586 - DNA, 389 bp, Rattus norvegicus
  misc_feature (1)..(389): n=a, c, g or t
  ref <308>: DATABASE ACCESSION NUMBER: EMBL / H33660
  ref <309>: DATABASE ENTRY DATE: 2000-03-04
aagagcttnctaaaactctttattaatcaaattgttaacttttaatagaacttgagacaaaaatctacagtttaaacagctatcttatggtaataaacattaatcctgtaagtnctgtggagaagcagttactccacatatagagacctaggtcaggaattggaaccaactagattacttagggaaggagttttncgaagttagttttgacatgaccaaattcagtgtgttctgaatacttgtgttatttctctctactatagaagaatttctnccgcttgtttttccatttncttctgattcaagggggaggagagtatgcgggttgaatagatttcgaggttcccccaagatgccaactacgggcataaccacagactccagattcg

SEQ ID NO: 7587 - DNA, 1405 bp, Homo sapiens
  ref <308>: DATABASE ACCESSION NUMBER: EMBL / AK058044
  ref <309>: DATABASE ENTRY DATE: 2001-10-31
agcgacgccccgccccgctccgcgccccgggcagccgtgtgcaggcgcctgcgggcggtatcctcggcgacgccgtatggctgccagggcgaggccatgtaccgggtgcccgagttttatgcgaggaggaagcggttaggtgggcagaccccttacttgatggatcagttgggattacgattagggatgtggtactggaaagatgaaaccagaactcttgaattcagaaggtttgccgcagaagattctgtccagtggctcctgaaacatcaccctcattttacacctgcagcagaagtcaaggaaaaaggaaagaaaggcaaagcagttcactttgcagaaactgatggtccagcttcagacaggttgacagataaaagacttgctgcaaaagatgataagtcagctaaagctgtagagaaacgaggtcaacagggcaccattacactggatgatgttaaatttgttactttgcttttgctacaagatactgagatgcagcggatctgttcttttacaacatttatgaggaataagaatcttgataatttcctcatggcattattgtactacttatcccattacttggaaaaaaactcactggaaaagaaacccaaaagctatatggtaggccttgtagagaaaaaagaaatggaattggttttaagtgaattagaagcagcacagaggtacttggcgcagaagtactgtatccttgtgctgggcttggccgtgccggataagcatcacatgtgctgtggaaaggagaaaatatcagatacacagaaagactggaagttctttgagtccttttatactttctgtacatatgtggcttggattgtcttccgacgtcaacacttgacagagattgaagaagaagtagggagactctttcgtaccaatatgttcaacattcctcgcaggaggcgtgaagatgaggaatcaggaggggaaaagaaacgcatgacttttgttcagttcaggagaatgatggcaaaacgcccagcaattaaaaaagctatcaacatgcgttctccagtcatgtctactctgctgccatctctcagagaaaaagctcaaaacgtctttgagaaaaagtatcatcaagtagacgtcagattcccagccgagatgcaaaagcatgtgggaactctggactctgtgcccatgccggtagttggcatcttgggggagcctcgatgtctattcaacccacatacgcttcacccccttgatccagaagaaaacacaaaatcatttgggagatatccttccttgatggaaaacaataacatgaggattcaggatacactggacttggtcatgaaaacactgtcctctcatacatcatgccctaagtaacctggtacattccatatctcaagtaaactactttgacttt

SEQ ID NO: 7588 - protein, 423 aa, Homo sapiens
  misc_feature (1)..(423): Xaa=Unknown amino acid
MYRVPEFYARRKRLGGQTPYLMDQLGLRLGMWYWKDETRTLEFRRFAAEDSVQWLLKHHPHFTPAAEVKEKGKKGKAVHFAETDGPASDRLTDKRLAAKDDKSAKAVEKRGQQGTITLDDVKFVTLLLLQDTEMQRICSFTTFMRNKNLDNFLMALLYYLSHYLEKNSLEKKPKSYMVGLVEKKEMELVLSELEAAQRYLAQKYCILVLGLAVPDKHHMCCGKEKISDTQKDWKFFESFYTFCTYVAWIVFRRQHLTEIEEEVGRLFRTNMFNIPRRRREDEESGGEKKRMTFVQFRRMMAKRPAIKKAINMRSPVMSTLLPSLREKAQNVFEKKYHQVDVRFPAEMQKHVGTLDSVPMPVVGILGEPRCLFNPHTLHPLDPEENTKSFGRYPSLMENNNMRIQDTLDLVMKTLSSHTSCPKX

SEQ ID NO: 7589 - DNA, 2524 bp, Rattus norvegicus
  ref <308>: DATABASE ACCESSION NUMBER: EMBL / S45392
  ref <309>: DATABASE ENTRY DATE: 2000-03-04
ggcctaggcttgccgtgcgagtcggacgtggtccgggcccaccctgctctgtactactactcggctttctcgtcaagatgcctgaggaagtgcaccatggagaggaagaggtggagaccttcgcctttcaggcagaaattgcccagctgatgtccctcatcatcaacactttttactcaaacaaagagattttcctccgggagttgatctctaatgcttctgatgccctggacaagattcggtatgagagcctgactgacccttccaagttggacagcgggaaagagctgaagattgacatcatccccaaccctcaggaagccacgctgactttggtggacacaggcattggcatgaccaaggctgacctcataaataacttgggaaccattgctaagtctggtacaaaggcgttcatggaggctctccaggctggtgcagacatctccatgattgggcagtttggtgtcggcttctactctgcctacctggtggcagagaaagtggttgtgatcacgaagcacaacgatgatgagcagtatgcctgggagtcttctgctggtggatccttcactgtccgtgcagaccacggtgagcccattggccggggtaccaaagtgatccttcacctcaaagaagaccagacagagtacttagaggagaggagggtcaaggaggtggtgaagaaacactcacagttcataggctaccccatcaccctctatctggagaaggaacgcgagaaggagatcagtgatgatgaggcagaggaagagaaaggggagaaggaggaggaagataaggaggatgaggagaagcctaagattgaggatgtgggatctgatgaggaggatgacagcggcaaagataagaaaaagaaaacaaagaagatcaaggagaagtacattgaccaggaagagctgaataagacgaagcccatctggaccagaaatcctgatgacatcactcaagaggaatatggtgaattctacaagagcctcaccaatgactgggaagaccacttggcagtcaagcacttctctgtagaagggcagttggaattcagggcattgctcttcattccccggcgagctccctttgacctctttgagaacaagaagaagaagaacaacatcaaattgtatgtccgtcgtgtgttcatcatggacagctgtgatgacctgatacctgagtacctcaacttcatccgtggtgtggttgattccgaggacctgcctctgaacatctcccgagaaatgctccagcagagcaagatcctgaaagtcatccgcaaaaacattgtgaagaagtgccttgagctcttctctgagttggctgaagacaaagagaactacaagaaattttatgaggcattctctaagaatttaaagcttggaatccatgaggattccactaaccgtcgccgcctctctgagctccttcgctaccatacctctcagtctggagatgagatgacttccctgtcagagtatgtgtctcgcatgaaggagacacagaagtccatctactatatcactggtgagagcaaagagcaggtggccaactctgccttcgtggagcgtgtgcggaaacggggctttgaggtggtatacatgactgagcccattgatgagtactgcgtacagcagctcaaggagttcgatggcaagagcctggtctccgtgaccaaggagggcctggagctaccagaggatgaggaagagaagaaaaaaatggaggagagcaaggcaaggtttgagaatctctgcaagctcatgaaggagatcttggacaagaaggttgaaaaagtgactatctccaataggcttgtgtcttccccctgctgcattgtgaccagcacctacggctggacagccaacatggaacggattatgaaggcccaggcactgcgggacaactcgacaatgggctacatgatggccaagaaacacctagagatcaaccctgaccaccccattgtggagactctgcggcagaaggctgaggcagacaaaaacgacaaagctgtcaaagacctggtggtgctgctgtttgagactgctctgtcttctctcgcttctcactttaggaggcccaaaacccactccaaccgcatctaccgcatgattaaactaggcctgggcattgatgaagatgaggtcactgcagaagagcccagtgctgctgttcccgatgagatccccccactggagggtgatgaggatgcctctcgcatggaagaagtggattaaaggctcctgggaagcccccgccctctgtatagtatccctgtggctcccccaacagccttgactggccctgacccacctgggctctctctgctcatgtctacaagaatctcttctatcctgtccttgtgccttaaggcaggaagatcccctcccacagatagcagggttgggtgttgtgtattgtgtttttttgtttgttttattttgttctgaaattaaaagtatgcaaaataaagatgatgcagttttaaaaaaaaaaaaaaaaaaaaagg

SEQ ID NO: 7590 - protein, 723 aa, Rattus norvegicus
  ref <308>: DATABASE ACCESSION NUMBER: SWISS-Prot / AAB23369
  ref <309>: DATABASE ENTRY DATE: 2002-06-15
PEEVHHGEEEVETFAFQAEIAQLMSLIINTFYSNKEIFLRELISNASDALDKIRYESLTDPSKLDSGKELKIDIIPNPQEATLTLVDTGIGMTKADLINNLGTIAKSGTKAFMEALQAGADISMIGQFGVGFYSAYLVAEKVVVITKHNDDEQYAWESSAGGSFTVRADHGEPIGRGTKVILHLKEDQTEYLEERRVKEVVKKHSQFIGYPITLYLEKEREKEISDDEAEEEKGEKEEEDKEDEEKPKIEDVGSDEEDDSGKDKKKKTKKIKEKYIDQEELNKTKPIWTRNPDDITQEEYGEFYKSLTNDWEDHLAVKHFSVEGQLEFRALLFIPRRAPFDLFENKKKKNNIKLYVRRVFIMDSCDDLIPEYLNFIRGVVDSEDLPLNISREMLQQSKILKVIRKNIVKKCLELFSELAEDKENYKKFYEAFSKNLKLGIHEDSTNRRRLSELLRYHTSQSGDEMTSLSEYVSRMKETQKSIYYITGESKEQVANSAFVERVRKRGFEVVYMTEPIDEYCVQQLKEFDGKSLVSVTKEGLELPEDEEEKKKMEESKARFENLCKLMKEILDKKVEKVTISNRLVSSPCCIVTSTYGWTANMERIMKAQALRDNSTMGYMMAKKHLEINPDHPIVETLRQKAEADKNDKAVKDLVVLLFETALSSLASHFRRPKTHSNRIYRMIKLGLGIDEDEVTAEEPSAAVPDEIPPLEGDEDASRMEEVD

SEQ ID NO: 7591 - DNA, 2567 bp, Homo sapiens
  ref <308>: DATABASE ACCESSION NUMBER: Refseq / NM_007355
  ref <309>: DATABASE ENTRY DATE: 2002-11-05
ctccggcgcagtgttgggactgtctgggtatcggaaagcaagcctacgttgctcactattacgtataatccttttcttttcaagatgcctgaggaagtgcaccatggagaggaggaggtggagacttttgcctttcaggcagaaattgcccaactcatgtccctcatcatcaataccttctattccaacaaggagattttccttcgggagttgatctctaatgcttctgatgccttggacaagattcgctatgagagcctgacagacccttcgaagttggacagtggtaaagagctgaaaattgacatcatccccaaccctcaggaacgtaccctgactttggtagacacaggcattggcatgaccaaagctgatctcataaataatttgggaaccattgccaagtctggtactaaagcattcatggaggctcttcaggctggtgcagacatctccatgattgggcagtttggtgttggcttttattctgcctacttggtggcagagaaagtggttgtgatcacaaagcacaacgatgatgaacagtatgcttgggagtcttctgctggaggttccttcactgtgcgtgctgaccatggtgagcccattggcaggggtaccaaagtgatcctccatcttaaagaagatcagacagagtacctagaagagaggcgggtcaaagaagtagtgaagaagcattctcagttcataggctatcccatcaccctttatttggagaaggaacgagagaaggaaattagtgatgatgaggcagaggaagagaaaggtgagaaagaagaggaagataaagatgatgaagaaaaacccaagatcgaagatgtgggttcagatgaggaggatgacagcggtaaggataagaagaagaaaactaagaagatcaaagagaaatacattgatcaggaagaactaaacaagaccaagcctatttggaccagaaaccctgatgacatcacccaagaggagtatggagaattctacaagagcctcactaatgactgggaagaccacttggcagtcaagcacttttctgtagaaggtcagttggaattcagggcattgctatttattcctcgtcgggctccctttgacctttttgagaacaagaagaaaaagaacaacatcaaactctatgtccgccgtgtgttcatcatggacagctgtgatgagttgataccagagtatctcaattttatccgtggtgtggttgactctgaggatctgcccctgaacatctcccgagaaatgctccagcagagcaaaatcttgaaagtcattcgcaaaaacattgttaagaagtgccttgagctcttctctgagctggcagaagacaaggagaattacaagaaattctatgaggcattctctaaaaatctcaagcttggaatccacgaagactccactaaccgccgccgcctgtctgagctgctgcgctatcatacctcccagtctggagatgagatgacatctctgtcagagtatgtttctcgcatgaaggagacacagaagtccatctattacatcactggtgagagcaaagagcaggtggccaactcagcttttgtggagcgagtgcggaaacggggcttcgaggtggtatatatgaccgagcccattgacgagtactgtgtgcagcagctcaaggaatttgatgggaagagcctggtctcagttaccaaggagggtctggagctgcctgaggatgaggaggagaagaagaagatggaagagagcaaggcaaagtttgagaacctctgcaagctcatgaaagaaatcttagataagaaggttgagaaggtgacaatctccaatagacttgtgtcttcaccttgctgcattgtgaccagcacctacggctggacagccaatatggagcggatcatgaaagcccaggcacttcgggacaactccaccatgggctatatgatggccaaaaagcacctggagatcaaccctgaccaccccattgtggagacgctgcggcagaaggctgaggccgacaagaatgataaggcagttaaggacctggtggtgctgctgtttgaaaccgccctgctatcttctggcttttcccttgaggatccccagacccactccaaccgcatctatcgcatgatcaagctaggtctaggtattgatgaagatgaagtggcagcagaggaacccaatgctgcagttcctgatgagatcccccctctcgagggcgatgaggatgcgtctcgcatggaagaagtcgattaggttaggagttcatagttggaaaacttgtgcccttgtatagtgtccccatgggctcccactgcagcctcgagtgcccctgtcccacctggctccccctgctggtgtctagtgtttttttccctctcctgtccttgtgttgaaggcagtaaactaagggtgtcaagccccattccctctctactcttgacagcaggattggatgttgtgtattgtggtttattttattttcttcattttgttctgaaattaaagtatgcaaaataaagaatatgccgttttaaaaaaaaaaaaaaaaaaaaaaaaaaaaa

SEQ ID NO: 7592 - protein, 723 aa, Homo sapiens
  ref <308>: DATABASE ACCESSION NUMBER: SWISS-Prot / P08238
  ref <309>: DATABASE ENTRY DATE: 2002-06-15
PEEVHHGEEEVETFAFQAEIAQLMSLIINTFYSNKEIFLRELISNASDALDKIRYESLTDPSKLDSGKELKIDIIPNPQERTLTLVDTGIGMTKADLINNLGTIAKSGTKAFMEALQAGADISMIGQFGVGFYSAYLVAEKVVVITKHNDDEQYAWESSAGGSFTVRADHGEPIGRGTKVILHLKEDQTEYLEERRVKEVVKKHSQFIGYPITLYLEKEREKEISDDEAEEEKGEKEEEDKDDEEKPKIEDVGSDEEDDSGKDKKKKTKKIKEKYIDQEELNKTKPIWTRNPDDITQEEYGEFYKSLTNDWEDHLAVKHFSVEGQLEFRALLFIPRRAPFDLFENKKKKNNIKLYVRRVFIMDSCDELIPEYLNFIRGVVDSEDLPLNISREMLQQSKILKVIRKNIVKKCLELFSELAEDKENYKKFYEAFSKNLKLGIHEDSTNRRRLSELLRYHTSQSGDEMTSLSEYVSRMKETQKSIYYITGESKEQVANSAFVERVRKRGFEVVYMTEPIDEYCVQQLKEFDGKSLVSVTKEGLELPEDEEEKKKMEESKAKFENLCKLMKEILDKKVEKVTISNRLVSSPCCIVTSTYGWTANMERIMKAQALRDNSTMGYMMAKKHLEINPDHPIVETLRQKAEADKNDKAVKDLVVLLFETALLSSGFSLEDPQTHSNRIYRMIKLGLGIDEDEVAAEEPNAAVPDEIPPLEGDEDASRMEEVD

SEQ ID NO: 7593 - DNA, 2104 bp, Rattus norvegicus
  ref <308>: DATABASE ACCESSION NUMBER: EMBL / S45812
  ref <309>: DATABASE ENTRY DATE: 2000-06-09
gcccaatctcgcaggccacatgttcgacgtagtcgtgattggaggcggcatctcaggattggctgctgccaaactgttgtctgaatacaaaattaatgtcttggttttggaagcccgggatagagttggaggaagaacatatactgtgaggaatgagcatgtcaaatgggtagatgttggtggagcctatgtgggaccaacccagaacagaatcttacgcttgtctaaggagctaggcatagagacctataaagtgaatgtcaatgagcgtctagttcaatatgtcaaggggaaaacttacccattccgtggtgcattcccacctgtgtggaaccccttggcatatttggattacaacaacctatggagaacaatggatgaaatgggaaaagagatccccgttgatgcaccgtggcaagcaagacacgctcaggaatgggacaagatgaccatgaaagatctcattgataaaatctgttggacaaaaactgctcgggaatttgcgtatctttttgtgaacattaatgtgacttctgagcctcatgaggtatctgccctgtggttcctgtggtatgtgaggcagtgtgggggcactgctcggatattctcagtcaccaatggcggccaggaacggaaatttgtaggtggatctggccaagtaagtgaacagataatgggtctccttggagataaagtgaagctgagctctcctgttacttatattgaccaaacagatgacaacatcattgtagaaacactgaatcatgaacactatgagtgcaaatacgtaattagtgccatcccaccgattttgactgccaagatccactttaaaccagagcttccacctgagagaaaccaattaattcagcgtcttccaatgggggctgttatcaagtgcatggtgtattacaaggaagccttctggaagaaaaaggactattgtggctgcatgatcattgaagatgaggaggctccaatcgccatcactctggatgacactaaaccagatgggtcactgcctgccatcatgggcttcatacttgcccggaaagctgatcgacttgctaaactacataaagacataaggaagaggaaaatctgtgagctgtatgccaaagttctgggatctcaagaagcattatatccagtccattatgaagagaagaactggtgtgaggagcagtactccgggggctcgtacacagcctacttccctcctggtatcatgacccagtatggaagggtgattcgccagccagtaggtaggatttactttgcaggcacagagacagcaacacagtggagtggctacatggaaggagcagttgaacgtggagaacgagcagctagagaggtgttgaatgctctaggaaaagtcgcgaagaaggatatatgggttgaagaacccgagtccaaggatgttccagccattgaaattacccacaccttcttagagaggaacctgccttccgtgcctggtctgctcaagatcactggtgtttccacttctgtggctcttctctgctttgtattgtacaagattaagaagctcccatgctgaagtttcaccctcaggcctcctgcacgatcatcgcatgtgaaagaaagtgtggataaattacagcctatggtttgggccatttaagtgcacttgatttaaccctcatcagtttaatttcagtctttgtaaagtgataacaatccaaagaatcacctagctaatttccataagaacaagtttcatcctgtttgttagactaatttgtgtgggttgagagaataaaatgttgagtgcttaatttcaaaaagtgaagtgcttctgaggaataatttctgggttcttttgttttctttttgcctttaatgcaaaatagctaattcagaaataaaacacttgacttactgtgacttttgtgtagcgtccaaggtgtacagaggaaaatagtggctgaagtgttccctaggtatcctcactgactagctccatgtgatacacactacccttggcactttcttttctggactgtatctagacatgcattgacccttgtcagtaacattctgtgctcatttaaggaaattagcattattttaatatagt

SEQ ID NO: 7594 - DNA, 1949 bp, Homo sapiens
  ref <308>: DATABASE ACCESSION NUMBER: EMBL / M68840
  ref <309>: DATABASE ENTRY DATE: 2000-03-04
catagaagggtccttcccaccctttgccgtccccactcctgtgcctacgacccaggagcgtgtcagccaaatcatggagaatcaagagaaggcgagtatcgcgggccacatgttcgacgtagtcgtgatcggaggtggcatttcaggactatctgctgccaaactcttgactgaatatggcgttagtgttttggttttagaagctcgggacagggttggaggaagaacatatactataaggaatgagcatgttgattacgtagatgttggtggagcttatgtgggaccaacccaaaacagaatcttacgcttgtctaaggagctgggcatagagacttacaaagtgaatgtcagtgagcgtctcgttcaatatgtcaaggggaaaacatatccatttcggggcgcctttccaccagtatggaatcccattgcatatttggattacaataatctgtggaggacaatagataacatggggaaggagattccaactgatgcaccctgggaggctcaacatgctgacaaatgggacaaaatgaccatgaaagagctcattgacaaaatctgctggacaaagactgctaggcggtttgcttatctttttgtgaatatcaatgtgacctctgagcctcacgaagtgtctgccctgtggttcttgtggtatgtgaagcagtgcgggggcaccactcggatattctctgtcaccaatggtggccaggaacggaagtttgtaggtggatctggtcaagtgagcgaacggataatggacctcctcggagaccaagtgaagctgaaccatcctgtcactcacgttgaccagtcaagtgacaacatcatcatagagacgctgaaccatgaacattatgagtgcaaatacgtaattaatgcgatccctccgaccttgactgccaagattcacttcagaccagagcttccagcagagagaaaccagttaattcagcggcttccaatgggagctgtcattaagtgcatgatgtattacaaggaggccttctggaagaagaaggattactgtggctgcatgatcattgaagatgaagatgctccaatttcaataaccttggatgacaccaagcctgatgggtcactgcctgccatcatgggcttcattcttgcccggaaagctgatcgacttgctaagctacataaggaaataaggaagaagaaaatctgtgagctctatgccaaagtgctgggatcccaagaagctttacatccagtgcattatgaagagaagaactggtgtgaggagcagtactctgggggctgctacacggcctacttccctcctgggatcatgactcaatatggaagggtgattcgtcaacccgtgggcaggattttctttgcgggcacagagactgccacaaagtggagcggctacatggaaggggcagttgaggctggagaacgagcagctagggaggtcttaaatggtctcgggaaggtgaccgagaaagatatctgggtacaagaacctgaatcaaaggacgttccagcggtagaaatcacccacaccttctgggaaaggaacctgccctctgtttctggcctgctgaagatcattggattttccacatcagtaactgccctggggtttgtgctgtacaaatacaagctcctgccacggtcttgaagttctgttcttatgctctctgctcactggttttcaataccaccaagaggaaaaatattgacaagtttaaaggctgtgtcattgggccatgtttaagtgtactggatttaactacctttggcttaattccaatcattgttaaagtaaaaacaattcaaagaatcacctaattaatttcagtagatcaagctccatcttatttgtcagtgtagatcactcatgttaattgatagaataaagccttgtgatcatttctgaaattcacaagtaacgtgtatgtgctcatcagaac

SEQ ID NO: 7595 - protein, 527 aa, Homo sapiens; identical to SEQ ID NO: 1558
  ref <308>: DATABASE ACCESSION NUMBER: SWISS-Prot / P21397
  ref <309>: DATABASE ENTRY DATE: 2002-06-15

SEQ ID NO: 7596 - DNA, 2190 bp, Rattus norvegicus
  ref <308>: DATABASE ACCESSION NUMBER: EMBL / S46785
  ref <309>: DATABASE ENTRY DATE: 2000-03-04
gctgccagctacaggcagtggggaaatccacagggcagcagctgtattgtagacggcccttgctcactgcctgcctgcagccagctctgtacaaggaacaatggccctgaggacaggaggcccagccctggtggtgcttctggctttctgggtggcactgggcccctgtcacctgcaggggacagatcccggagcgtcggcagatgccgagggcccccagtgccccgtcgcctgtacctgcagccatgatgactacacagatgagctcagcgtcttttgcagttcaaagaacctcacacatctgcctgatgacatcccagtcagcaccagagccctgtggcttgatggcaacaacctctcttctatcccctcagcggccttccagaacctgtccagcctggactttctcaacctgcagggcagctggctgaggagcctggagccacaggcactgctggggctgcagaacctctactatctgcacctggaacggaaccggctccggaacctcgccgtgggcttgttcacacacacaccgagtctggcttcactcagcctgagcagcaacctcttgggccggctggaggaagggctgttccagggcctcagtcacctttgggacctcaacctgggttggaacagtctagtggtcctgcctgacacagtgttccagggactgggcaacctccacgagctggtgctggctggcaacaaactgacttacctgcagcctgcgctcttctgtggcttgggcgagctgcgggagctggatctgagcaggaacgcactccgaagcgtcaaagctaacgtctttgtacatttgcccaggctgcagaagctgtacctggaccggaacctcattacagccgtggcccctggtgcctttctgggcatgaaggccctgcgttggctggacctgtcgcacaaccgcgtggctggcctcatggaggacaccttcccaggcctgctgggcctgcacgtcctgcgcctggcacacaatgcgatcgctagcttgcggccgcgcactttcaaagacctgcacttcctggaggaactgcagctgggccacaatcgaatcaggcagctcggggagaggacattcgagggcctggggcagctggaggtgctgacgctcaatgacaaccagatcactgaggtcagggtgggcgccttctctggccttttcaatgtggcggttatgaatctctccggcaactgtctgaggagcctcccggagcgggtgtttcagggtctggacaaactgcacagcctgcacctagagcacagctgcctgggtcacgtccgcctgcacacttttgctggcctctcagggctgcgcaggctcttcctcagggacaacagcatctccagcatcgaagaacagagcctggcagggctttcggagctcctggaactggatcttactaccaaccgcctcacacatctgccccgccagctcttccagggcctcggccacctggagtacctgcttctctcctacaaccaactgacgactttatccgcggaggtcctgggccctctgcagcgggccttctggttggatatctcacacaaccacctggagacgctggccgaaggccttttctcatctctggggcgcgttcgctacctcagcctcaggaataactccttgcagaccttttcaccacagcccggcctggagcgcctgtggcttgatgccaacccctgggactgcagctgtcccctcaaggcgcttcgagactttgccctgcagaaccctggtgttgtcccccgctttgttcagactgtctgtgagggggacgactgccagccggtgtacacctacaacaatatcacttgcgctggccccgccaacgtctcgggcctcgacctaagagacgttagtgaaacacattttgtgcactgctgacactggctacttactggcccggtctggccgaacactgtctcatggccaggacggtgtctcattgttaacagaataagctggctctcaaattcctacccatctctaggggacaggtcctggctgctcacttcctggaagcaggctgtactggaagctatgtggcctagaaagggtgggctcaggccaagtgtccaagggcccaaaggagggaggtgctcgctgaatttaagcatattagtcagcggaggaaaagaaactaaccaggattccctcagtaa

SEQ ID NO: 7597 - protein, 603 aa, Rattus norvegicus
  ref <308>: DATABASE ACCESSION NUMBER: SWISS-Prot / P35859
  ref <309>: DATABASE ENTRY DATE: 2001-10-16
MALRTGGPALVVLLAFWVALGPCHLQGTDPGASADAEGPQCPVACTCSHDDYTDELSVFCSSKNLTHLPDDIPVSTRALWLDGNNLSSIPSAAFQNLSSLDFLNLQGSWLRSLEPQALLGLQNLYYLHLERNRLRNLAVGLFTHTPSLASLSLSSNLLGRLEEGLFQGLSHLWDLNLGWNSLVVLPDTVFQGLGNLHELVLAGNKLTYLQPALFCGLGELRELDLSRNALRSVKANVFVHLPRLQKLYLDRNLITAVAPGAFLGMKALRWLDLSHNRVAGLMEDTFPGLLGLHVLRLAHNAIASLRPRTFKDLHFLEELQLGHNRIRQLGERTFEGLGQLEVLTLNDNQITEVRVGAFSGLFNVAVMNLSGNCLRSLPERVFQGLDKLHSLHLEHSCLGHVRLHTFAGLSGLRRLFLRDNSISSIEEQSLAGLSELLELDLTTNRLTHLPRQLFQGLGHLEYLLLSYNQLTTLSAEVLGPLQRAFWLDISHNHLETLAEGLFSSLGRVRYLSLRNNSLQTFSPQPGLERLWLDANPWDCSCPLKALRDFALQNPGVVPRFVQTVCEGDDCQPVYTYNNITCAGPANVSGLDLRDVSETHFVHC

SEQ ID NO: 7598 - DNA, 2125 bp, Homo sapiens
  ref <308>: DATABASE ACCESSION NUMBER: EMBL / M86826
  ref <309>: DATABASE ENTRY DATE: 2000-03-04
ggcacagcagacgtaccctccctcgctgcctgcctgcggcctgccctgcatgcaggatggccctgaggaaaggaggcctggccctggcgctgctgctgctgtcctgggtggcactgggcccccgcagcctggagggagcagaccccggaacgccgggggaagccgagggcccagcgtgcccggccgcctgtgtctgcagctacgatgacgacgcggatgagctcagcgtcttctgcagctccaggaacctcacgcgcctgcctgacggagtcccgggcggcacccaagccctgtggctggacggcaacaacctctcgtccgtccccccggcagccttccagaacctctccagcctgggcttcctcaacctgcagggcggccagctgggcagcctggagccacaggcgctgctgggcctagagaacctgtgccacctgcacctggagcggaaccagctgcgcagcctggcactcggcacgtttgcacacacgcccgcgctggcctcgctcggcctcagcaacaaccgtctgagcaggctggaggacgggctcttcgagggcctcggcagcctctgggacctcaacctcggctggaatagcctggcggtgctccccgatgcggcgttccgcggcctgggcagcctgcgcgagctggtgctggcgggcaacaggctggcctacctgcagcccgcgctcttcagcggcctggccgagctccgggagctggacctgagcaggaacgcgctgcgggccatcaaggcaaacgtgttcgtgcagctgccccggctccagaaactctacctggaccgcaacctcatcgctgccgtggccccgggcgccttcctgggcctgaaggcgctgcgatggctggacctgtcccacaaccgcgtggctggcctcctggaggacacgttccccggtctgctgggcctgcgtgtgctgcggctgtcccacaacgccatcgccagcctgcggccccgcaccttcaaggacctgcacttcctggaggagctgcagctgggccacaaccgcatccggcagctggctgagcgcagctttgagggcctggggcagcttgaggtgctcacgctagaccacaaccagctccaggaggtcaaggcgggcgctttcctcggcctcaccaacgtggcggtcatgaacctctctgggaactgtctccggaaccttccggagcaggtgttccggggcctgggcaagctgcacagcctgcacctggagggcagctgcctgggacgcatccgcccgcacaccttcaccggcctctcggggctccgccgactcttcctcaaggacaacggcctcgtgggcattgaggagcagagcctgtgggggctggcggagctgctggagctcgacctgacctccaaccagctcacgcacctgccccaccgcctcttccagggcctgggcaagctggagtacctgctgctctcccgcaaccgcctggcagagctgccggcggacgccctgggccccctgcagcgggccttctggctggacgtctcgcacaaccgcctggaggcattgcccaacagcctcttggcaccactggggcggctgcgctacctcagcctcaggaacaactcactgcggaccttcacgccgcagcccccgggcctggagcgcctgtggctggagggtaacccctgggactgtggctgccctctcaaggcgctgcgggacttcgccctgcagaaccccagtgctgtgccccgcttcgtccaggccatctgtgagggggacgattgccagccgcccgcgtacacctacaacaacatcacctgtgccagcccgcccgaggtcgtggggctcgacctgcgggacctcagcgaggcccactttgctccctgctgaccaggtccccggactcaagccccggactcaggcccccacctggctcaccttgtgctggggacaggtcctcagtgtcctcaggggcctgcccagtgcacttgctggaagacgcaagggcctgatggggtggaaggcatggcggcccccccagctgtcatcaattaaaggcaaaggcaatcgaaaaaaaaaaaaaaaaaaaaaaaaaaaaaaaaaaaaaaaaaaaaaaaaaaaaaaaaaaaaaaaaaaaaaaa

SEQ ID NO: 7599 - protein, 605 aa, Homo sapiens
  ref <308>: DATABASE ACCESSION NUMBER: SWISS-Prot / P35858
  ref <309>: DATABASE ENTRY DATE: 2002-06-15
MALRKGGLALALLLLSWVALGPRSLEGADPGTPGEAEGPACPAACVCSYDDDADELSVFCSSRNLTRLPDGVPGGTQALWLDGNNLSSVPPAAFQNLSSLGFLNLQGGQLGSLEPQALLGLENLCHLHLERNQLRSLALGTFAHTPALASLGLSNNRLSRLEDGLFEGLGSLWDLNLGWNSLAVLPDAAFRGLGSLRELVLAGNRLAYLQPALFSGLAELRELDLSRNALRAIKANVFVQLPRLQKLYLDRNLIAAVAPGAFLGLKALRWLDLSHNRVAGLLEDTFPGLLGLRVLRLSHNAIASLRPRTFKDLHFLEELQLGHNRIRQLAERSFEGLGQLEVLTLDHNQLQEVKAGAFLGLTNVAVMNLSGNCLRNLPEQVFRGLGKLHSLHLEGSCLGRIRPHTFTGLSGLRRLFLKDNGLVGIEEQSLWGLAELLELDLTSNQLTHLPHRLFQGLGKLEYLLLSRNRLAELPADALGPLQRAFWLDVSHNRLEALPNSLLAPLGRLRYLSLRNNSLRTFTPQPPGLERLWLEGNPWDCGCPLKALRDFALQNPSAVPRFVQAICEGDDCQPPAYTYNNITCASPPEVVGLDLRDLSEAHFAPC

SEQ ID NO: 7600 - DNA, 2141 bp, Rattus norvegicus
  ref <308>: DATABASE ACCESSION NUMBER: EMBL / S47609
  ref <309>: DATABASE ENTRY DATE: 2002-09-15
gctgcagctatggaccgagagctggcccaggcctgcatccctgctgagcctgcccaagtgtggctgctcccaccatgggctcctcggtgtacatcacggtggagctggccatcgctgtgctggccatcctgggcaacgtgctcgtgtgctgggccgtgtggatcaacagtaacctgcagaacgtcaccaacttctttgtggtatcgctggcggcggctgacattgcagtgggtgtgctcgccatccccttcgctatcaccatcagcaccggcttctgcgccgcctgccacggctgcctcttcttcgcctgttttgtcctggtcctcacgcagagttccatctttagcctcttggctatcgccatcgaccgctacatcgccatccgaattccactccggtacaatggcttggtgacaggtgtgagggcgaagggcatcattgcaatttgctgggtgctgtcgtttgccattggcctgacccccatgctgggctggaacaactgcagtcagaaagacgggaactccacgaagacctgcggcgagggccgggtgacctgtctgttcgaggacgtggtgcccatgaattacatggtttactacaacttctttgcgttcgtgttactgccccttctgctcatgctggccatctacctacggatttttctggcggcccggagacagctgaagcagatggagagccagcccctgccaggggagcggactcggtccacgctgcagaaggaggtccacgctgccaagtccctggccatcatcgtcgggctctttgctctgtgctggttgccgctgcacatcatcaactgtttcaccttcttctgctccacgtgccggcacgcccctccgtggctcatgtacctggccatcatcctctcccacagcaactccgtcgtcaaccccttcatctacgcctacaggatccgggagttccgccagaccttccggaagatcatccgaacccacgtcctgaggcggcaggaacccttccaggcagggggttccagtgcctgggccctggcagctcacagcactgagggagagcaggttagcctccgccttaatggccaccccctgggggtatgggccaacggcagtgccacccattccggacggcggcccaatggctacactctggggctggggggtggagggagtgcccaaggctctcctcgggatgtggagcttcctacccaggagcgccaggaaggccaagagcaccctggcctaaggggtcatctggtccaggctagagtaggagcttcctcatggtcttcagagtttgccccttcctgagggaaagacattttaatatttttggttggctggaccaatctcactaagggaagagaaacccaatgggcgcgtggctcccactttgaactacaaagagggggcatgaagttggagcagcatgaagcccagtaagaaaggcctggggtggaggaagcgatgcttctgcttcgtgctacggggccctgtgttaggtcagggctgcagtagcatctgcaaaggcagggcccagttcccctgctccagaagcgtccaaaaagctgtcttgtctctctagagcggttgtggcttagaggactggcctggcccgatgctagaatataggagcttcagacctcctgctgtagtacactactctccccagactgtctagggctcagggagctgctggcctagaagtggcacttggctatttctttttcaagaagataaaaatgtgaggaaacccattctattttattgacttcccccctcccctgcctgctgggtctgtggtcgatcctgctgggaacccccccaaccaaggaattgaaggtggtcttcttgggctagcccaagctaccatgcacttagtcacagggctatctctgaccaacaaagctggcctggaagacagcaactatgaagggaaggattccagagcatgggctcaggtcccatgagagagattagagatgtcaagccatggacctgaacctgggtagttcagcgctaccctgtctgaggccctgactactgcctttccttccagagggacttgtttgtttgtttgtttgtggttttttttttccctgaggtaaaataaaatgagccacactgtgttttaaatttaaaaaa

SEQ ID NO: 7601 - protein, 410 aa, Rattus norvegicus
  ref <308>: DATABASE ACCESSION NUMBER: SWISS-Prot / AAA11888
  ref <309>: DATABASE ENTRY DATE: 2001-10-16
MGSSVYITVELAIAVLAILGNVLVCWAVWINSNLQNVTNFFVVSLAAADIAVGVLAIPFAITISTGFCAACHGCLFFACFVLVLTQSSIFSLLAIAIDRYIAIRIPLRYNGLVTGVRAKGIIAICWVLSFAIGLTPMLGWNNCSQKDGNSTKTCGEGRVTCLFEDVVPMNYMVYYNFFAFVLLPLLLMLAIYLRIFLAARRQLKQMESQPLPGERTRSTLQKEVHAAKSLAIIVGLFALCWLPLHIINCFTFFCSTCRHAPPWLMYLAIILSHSNSVVNPFIYAYRIREFRQTFRKIIRTHVLRRQEPFQAGGSSAWALAAHSTEGEQVSLRLNGHPLGVWANGSATHSGRRPNGYTLGLGGGGSAQGSPRDVELPTQERQEGQEHPGLRGHLVQARVGASSWSSEFAPS

SEQ ID NO: 7602 - DNA, 2572 bp, Homo sapiens
  ref <308>: DATABASE ACCESSION NUMBER: EMBL / S46950
  ref <309>: DATABASE ENTRY DATE: 2000-03-04
aattttcagctgttctttgctcaataataacttttttatcaccaagatatctctctaagtttttgacatattcctcatttgttttgataaaagttttcttattttcttagaaaaataagttactaaaagtcatatatcattgtatatcttcaaaatattgcttaaaactaggacttgtatttaaatgttttttcttcttaaagacaatttgcaggtgccctcaggaaccctgaagctgggctgagccatgatgctgctgccagaacccctgcagagggcctggtttcaggagactcagagtcctctgtgaaaaagcccttggagagcgccccagcagggctgcacttggctcctgtgaggaaggggctcaggggtctgggcccctccgcctgggccgggctgggagccaggcgggcggctgggctgcagcaatggaccgtgagctggcccagcccgcgtccgtgctgagcctgcctgtcgtctgtggccatgcccatcatgggctcctcggtgtacatcacggtggagctggccattgctgtgctggccatcctgggcaatgtgctggtgtgctgggccgtgtggctcaacagcaacctgcagaacgtcaccaactactttgtggtgtcactggcggcggccgacatcgcagtgggtgtgctcgccatcccctttgccatcaccatcagcaccgggttctgcgctgcctgccacggctgcctcttcattgcctgcttcgtcctggtcctcacgcagagctccatcttcagtctcctggccatcgccattgaccgctacattgccatccgcatcccgctccggtacaatggcttggtgaccggcacgagggctaagggcatcattgccatctgctgggtgctgtcgtttgccatcggcctgactcccatgctaggttggaacaactgcggtcagccaaaggagggcaagaaccactcccagggctgcggggagggccaagtggcctgtctctttgaggatgtggtccccatgaactacatggtgtacttcaacttctttgcctgtgtgctggtgcccctgctgctcatgctgggtgtctatttgcggatcttcctggcggcgcgacgacagctgaagcagatggagagccagcctctgccgggggagcgggcacggtccacactgcagaaggaggtccatgctgccaagtcactggccatcattgtggggctctttgccctctgctggctgcccctacacatcatcaactgcttcactttcttctgccccgactgcagccacgcccctctctggctcatgtacctggccatcgtcctctcccacaccaattcggttgtgaatcccttcatctacgcctaccgtatccgcgagttccgccagaccttccgcaagatcattcgcagccacgtcctgaggcagcaagaacctttcaaggcagctggcaccagtgcccgggtcttggcagctcatggcagtgacggagagcaggtcagcctccgtctcaacggccacccgccaggagtgtgggccaacggcagtgctccccaccctgagcggaggcccaatggctacgccctggggctggtgagtggagggagtgcccaagagtcccaggggaacacgggcctcccagacgtggagctccttagccatgagctcaagagagtgtgcccagagccccctggcctagatgaccccctggcccaggatggagcaggagtgtcctgatgattcatggagtttgccccttcctaagggaaggagatctttatctttctggttggcttgaccagtcacgttgggagaagagagagagtgccaggagaccctgagggcagccggttcctactttggactgagagaagggagccccaggctggagcagcatgaggcccagcaagaagggcttgggttctgaggaagcagatgtttcatgctgtgaggccttgcaccaggtgggggccacagcaccagcagcatctttgctgggcagggcccagccctccactgcagaagcatctggaagcaccaccttgtctccacagagcagcttgggcacagcagactggcctggccctgagactggggagtggctccaacagcctcctgccacccacacaccactctccctagactctcctagggttcaggagctgctgggcccagaggtgacatttgactttttttccaggaaaaatgtaagtgtgaggaaaccctttttattttattacctttcactctctggctgctgggtctgccgtcggtcctgctgctaacctggcaccagagcctctgcccggggagcctcaggcagtcctctcctgctgtcacagctgccatccacttctcagtcccagggccatctcttggagtgacaaagctgggatcaaggacagggagttgtaacagagcagtgccagagcatgggcccaggtcccaggggagaggttggggctggcaggccactggcatgtgctgagtagcgcagagctacccagtgagaggccttgtctaactgcctttccttctaaagggaatgtttttttctgagataaaataaaaacgagccaca

SEQ ID NO: 7603 - protein, 412 aa, Homo sapiens
  ref <308>: DATABASE ACCESSION NUMBER: SWISS-Prot / P29274
  ref <309>: DATABASE ENTRY DATE: 2002-06-15
MPIMGSSVYITVELAIAVLAILGNVLVCWAVWLNSNLQNVTNYFVVSLAAADIAVGVLAIPFAITISTGFCAACHGCLFIACFVLVLTQSSIFSLLAIAIDRYIAIRIPLRYNGLVTGTRAKGIIAICWVLSFAIGLTPMLGWNNCGQPKEGKNHSQGCGEGQVACLFEDVVPMNYMVYFNFFACVLVPLLLMLGVYLRIFLAARRQLKQMESQPLPGERARSTLQKEVHAAKSLAIIVGLFALCWLPLHIINCFTFFCPDCSHAPLWLMYLAIVLSHTNSVVNPFIYAYRIREFRQTFRKIIRSHVLRQQEPFKAAGTSARVLAAHGSDGEQVSLRLNGHPPGVWANGSAPHPERRPNGYALGLVSGGSAQESQGNTGLPDVELLSHELKGVCPEPPGLDDPLAQDGAGVS

SEQ ID NO: 7604 - DNA, 2066 bp, Rattus norvegicus
  ref <308>: DATABASE ACCESSION NUMBER: EMBL / S50879
  ref <309>: DATABASE ENTRY DATE: 2000-03-04
atgaggcctccctggtatcccctgcatacaccctccctggcttctccactcctcttcctcctcctctccctcctgggaggaggggcaagggctgagggccgggaagaccctcagctgctggtgagggttcgagggggccagctgaggggcatccgcctgaaggcccctggaggcccagtctcagcttttctgggcatcccctttgcagagccacctgtgggctcacgtagatttatgccaccagagcccaagcgcccctggtcaggaatattggatgctaccaccttccaaaatgtctgctaccaatacgtggacaccctgtaccctgggtttgagggtaccgagatgtggaaccccaatcgagagctgagtgaagactgcctttatcttaatgtgtggacaccataccccaggcctacttctcccacacctgtcctcatctggatctatgggggtggtttctacagtggagcatcctccttggacgtgtatgacggccgtttcctggcccaggttgagggaaccgtgttggtatctatgaactaccgagtgggaacctttggcttcttggctctaccaggaagcagagaagcccctggcaatgtaggcctgctggatcaacggcttgccttgcaatgggtacaagaaaatatcgcagcctttgggggagacccaatgtcagtgactctgtttggggagagtgcaggtgcagcctcagtgggcatgcacattctgtccctgcccagcaggagcctcttccacagggctgtcctgcagagtggcacacccaatgggccctgggccactgtgagtgcgggagaggccaggcgcagggccacactgctggcccgccttgtgggctgtcccccaggtggcgctggtggcaatgacaccgagctgatatcctgcttgaggacaaggcccgctcaggacctggtggaccacgagtggcatgtgctgcctcaagaaagtatcttccggttttccttcgtgcctgtggtggacggggatttcctcagtgacacgccggacgctctcatcaatactggagattttcaagacctgcaggtgctggtgggtgtggtgaaggacgagggctcctactttctggtttacggggtcccaggcttcagcaaagacaatgaatctctcatcagccgggcccagttcctggctggggtgcggatcggtgtaccccaagcgagtgacctggcggccgaggctgtggtcctgcattatacagactggctgcaccctgaggaccctgcccacctgagagatgccatgagtgcggtggtaggcgaccacaacgttgtgtgccctgtggcccagctggctgggcgactggctgcccaaggggctcgggtctatgcctacatctttgaacaccgtgcctccacattgacttggcccctctggatgggggtgccccatggctatgaaatcgagttcatctttgggctccccctggatccctcactgaactacaccgtggaggagagaatctttgctcagcgacttatgcaatactggaccaattttgcccgcacaggggaccccaatgaccctcgagactctaagtctccacggtggccaccgtacaccactgccgcgcagcaatacgtgagcctgaacctgaagcctttggaggtgcggcggggactgcgcgcccagacctgcgccttctggaatcgttttctccccaaattgctcagcgccacagacacgctggacgaggcggagcgccagtggaaggccgagttccaccgctggagctcctacatggtgcactggaagaaccagttcgaccactatagcaagcaggaacgctgctcagacctgtgaccccttggggacccaggtcctgccgtcctgcccgagcccctgattgtatatacactatttatttaagggctgggatataatacaaccgagcccccaggccctgtccacccctccccgacttcctcccactaggggatcctcatcttctgcatgttttaaactgagctcccctccccgcggtgccttgccccctctgggccgccaataaactgttacagctc

SEQ ID NO: 7605 - protein, 614 aa, Rattus norvegicus
  ref <308>: DATABASE ACCESSION NUMBER: SWISS-Prot / AAB24586
  ref <309>: DATABASE ENTRY DATE: 2002-06-15
MRPPWYPLHTPSLASPLLFLLLSLLGGGARAEGREDPQLLVRVRGGQLRGIRLKAPGGPVSAFLGIPFAEPPVGSRRFMPPEPKRPWSGILDATTFQNVCYQYVDTLYPGFEGTEMWNPNRELSEDCLYLNVWTPYPRPTSPTPVLIWIYGGGFYSGASSLDVYDGRFLAQVEGTVLVSMNYRVGTFGFLALPGSREAPGNVGLLDQRLALQWVQENIAAFGGDPMSVTLFGESAGAASVGMHILSLPSRSLFHRAVLQSGTPNGPWATVSAGEARRRATLLARLVGCPPGGAGGNDTELISCLRTRPAQDLVDHEWHVLPQESIFRFSFVPVVDGDFLSDTPDALINTGDFQDLQVLVGVVKDEGSYFLVYGVPGFSKDNESLISRAQFLAGVRIGVPQASDLAAEAVVLHYTDWLHPEDPAHLRDAMSAVVGDHNVVCPVAQLAGRLAAQGARVYAYIFEHRASTLTWPLWMGVPHGYEIEFIFGLPLDPSLNYTVEERIFAQRLMQYWTNFARTGDPNDPRDSKSPRWPPYTTAAQQYVSLNLKPLEVRRGLRAQTCAFWNRFLPKLLSATDTLDEAERQWKAEFHRWSSYMVHWKNQFDHYSKQERCSDL

SEQ ID NO: 7606 - DNA, 2156 bp, Homo sapiens
  ref <308>: DATABASE ACCESSION NUMBER: Refseq / NM_000665
  ref <309>: DATABASE ENTRY DATE: 2001-02-03
cagcctgcgccggggaacatcggccgcctccagctcccggcgcggcccggcccggcccggctcggccgcctcagacgccgcctgccctgcagccatgaggcccccgcagtgtctgctgcacacgccttccctggcttccccactccttctcctcctcctctggctcctgggtggaggagtgggggctgagggccgggaggatgcagagctgctggtgacggtgcgtgggggccggctgcggggcattcgcctgaagacccccgggggccctgtctctgctttcctgggcatcccctttgcggagccacccatgggaccccgtcgctttctgccaccggagcccaagcagccttggtcaggggtggtagacgctacaaccttccagagtgtctgctaccaatatgtggacaccctatacccaggttttgagggcaccgagatgtggaaccccaaccgtgagctgagcgaggactgcctgtacctcaacgtgtggacaccatacccccggcctacatcccccacccctgtcctcgtctggatctatgggggtggcttctacagtggggcctcctccttggacgtgtacgatggccgcttcttggtacaggccgagaggactgtgctggtgtccatgaactaccgggtgggagcctttggcttcctggccctgccggggagccgagaggccccgggcaatgtgggtctcctggatcagaggctggccctgcagtgggtgcaggagaacgtggcagccttcgggggtgacccgacatcagtgacgctgtttggggagagcgcgggagccgcctcggtgggcatgcacctgctgtccccgcccagccggggcctgttccacagggccgtgctgcagagcggtgcccccaatggaccctgggccacggtgggcatgggagaggcccgtcgcagggccacgcagctggcccaccttgtgggctgtcctccaggcggcactggtgggaatgacacagagctggtagcctgccttcggacacgaccagcgcaggtcctggtgaaccacgaatggcacgtgctgcctcaagaaagcgtcttccggttctccttcgtgcctgtggtagatggagacttcctcagtgacaccccagaggccctcatcaacgcgggagacttccacggcctgcaggtgctggtgggtgtggtgaaggatgagggctcgtattttctggtttacggggccccaggcttcagcaaagacaacgagtctctcatcagccgggccgagttcctggccggggtgcgggtcggggttccccaggtaagtgacctggcagccgaggctgtggtcctgcattacacagactggctgcatcccgaggacccggcacgcctgagggaggccctgagcgatgtggtgggcgaccacaatgtcgtgtgccccgtggcccagctggctgggcgactggctgcccagggtgcccgggtctacgcctacgtctttgaacaccgtgcttccacgctctcctggcccctgtggatgggggtgccccacggctacgagatcgagttcatctttgggatccccctggacccctctcgaaactacacggcagaggagaaaatcttcgcccagcgactgatgcgatactgggccaactttgcccgcacaggggatcccaatgagccccgagaccccaaggccccacaatggcccccgtacacggcgggggctcagcagtacgttagtctggacctgcggccgctggaggtgcggcgggggctgcgcgcccaggcctgcgccttctggaaccgcttcctccccaaattgctcagcgccaccgacacgctcgacgaggcggagcgccagtggaaggccgagttccaccgctggagctcctacatggtgcactggaagaaccagttcgaccactacagcaagcaggatcgctgctcagacctgtgaccccggcgggacccccatgtcctccgctccgcccggccccctagctgtatatactatttatttcagggctgggctataacacagacgagccccagactctgcccatccccaccccaccccgacgtcccccggggctcccggtcctctggcatgtcttcaggctgagctcctccccgcgtgccttcgccctctggctgcaaataaactgttacaggcc

SEQ ID NO: 7607 - protein, 614 aa, Homo sapiens
  ref <308>: DATABASE ACCESSION NUMBER: SWISS-Prot / P22303
  ref <309>: DATABASE ENTRY DATE: 2002-06-15
MRPPQCLLHTPSLASPLLLLLLWLLGGGVGAEGREDAELLVTVRGGRLRGIRLKTPGGPVSAFLGIPFAEPPMGPRRFLPPEPKQPWSGVVDATTFQSVCYQYVDTLYPGFEGTEMWNPNRELSEDCLYLNVWTPYPRPTSPTPVLVWIYGGGFYSGASSLDVYDGRFLVQAERTVLVSMNYRVGAFGFLALPGSREAPGNVGLLDQRLALQWVQENVAAFGGDPTSVTLFGESAGAASVGMHLLSPPSRGLFHRAVLQSGAPNGPWATVGMGEARRRATQLAHLVGCPPGGTGGNDTELVACLRTRPAQVLVNHEWHVLPQESVFRFSFVPVVDGDFLSDTPEALINAGDFHGLQVLVGVVKDEGSYFLVYGAPGFSKDNESLISRAEFLAGVRVGVPQVSDLAAEAVVLHYTDWLHPEDPARLREALSDVVGDHNVVCPVAQLAGRLAAQGARVYAYVFEHRASTLSWPLWMGVPHGYEIEFIFGIPLDPSRNYTAEEKIFAQRLMRYWANFARTGDPNEPRDPKAPQWPPYTAGAQQYVSLDLRPLEVRRGLRAQACAFWNRFLPKLLSATDTLDEAERQWKAEFHRWSSYMVHWKNQFDHYSKQDRCSDL

SEQ ID NO: 7608 - DNA, 2066 bp, Rattus norvegicus; identical to SEQ ID NO: 7604
  ref <308>: DATABASE ACCESSION NUMBER: EMBL / S50879
  ref <309>: DATABASE ENTRY DATE: 2000-03-04

SEQ ID NO: 7609 - protein, 614 aa, Rattus norvegicus; identical to SEQ ID NO: 7605
  ref <308>: DATABASE ACCESSION NUMBER: SWISS-Prot / AAB24586
  ref <309>: DATABASE ENTRY DATE: 2002-06-15

SEQ ID NO: 7610 - DNA, 2156 bp, Homo sapiens; identical to SEQ ID NO: 7606
  ref <308>: DATABASE ACCESSION NUMBER: Refseq / NM_000665
  ref <309>: DATABASE ENTRY DATE: 2001-02-03

SEQ ID NO: 7611 - protein, 614 aa, Homo sapiens; identical to SEQ ID NO: 7607
  ref <308>: DATABASE ACCESSION NUMBER: SWISS-Prot / P22303
  ref <309>: DATABASE ENTRY DATE: 2002-06-15

SEQ ID NO: 7612 - DNA, 2066 bp, Rattus norvegicus; identical to SEQ ID NO: 7604
  ref <308>: DATABASE ACCESSION NUMBER: EMBL / S50879
  ref <309>: DATABASE ENTRY DATE: 2000-03-04

SEQ ID NO: 7613 - protein, 614 aa, Rattus norvegicus; identical to SEQ ID NO: 7605
  ref <308>: DATABASE ACCESSION NUMBER: SWISS-Prot / AAB24586
  ref <309>: DATABASE ENTRY DATE: 2002-06-15

SEQ ID NO: 7614 - DNA, 2156 bp, Homo sapiens; identical to SEQ ID NO: 7606
  ref <308>: DATABASE ACCESSION NUMBER: Refseq / NM_000665
  ref <309>: DATABASE ENTRY DATE: 2001-02-03

SEQ ID NO: 7615 - protein, 614 aa, Homo sapiens; identical to SEQ ID NO: 7607
  ref <308>: DATABASE ACCESSION NUMBER: SWISS-Prot / P22303
  ref <309>: DATABASE ENTRY DATE: 2002-06-15

SEQ ID NO: 7616 - DNA, 2066 bp, Rattus norvegicus; identical to SEQ ID NO: 7604
  ref <308>: DATABASE ACCESSION NUMBER: EMBL / S50879
  ref <309>: DATABASE ENTRY DATE: 2000-03-04

SEQ ID NO: 7617 - protein, 614 aa, Rattus norvegicus; identical to SEQ ID NO: 7605
  ref <308>: DATABASE ACCESSION NUMBER: SWISS-Prot / AAB24586
  ref <309>: DATABASE ENTRY DATE: 2002-06-15

SEQ ID NO: 7618 - DNA, 2156 bp, Homo sapiens; identical to SEQ ID NO: 7606
  ref <308>: DATABASE ACCESSION NUMBER: Refseq / NM_000665
  ref <309>: DATABASE ENTRY DATE: 2001-02-03

SEQ ID NO: 7619 - protein, 614 aa, Homo sapiens; identical to SEQ ID NO: 7607
  ref <308>: DATABASE ACCESSION NUMBER: SWISS-Prot / P22303
  ref <309>: DATABASE ENTRY DATE: 2002-06-15

SEQ ID NO: 7620 - DNA, 2520 bp, Rattus norvegicus
  ref <308>: DATABASE ACCESSION NUMBER: EMBL / S54008
  ref <309>: DATABASE ENTRY DATE: 1993-11-30
ggggcaccagcttcggctccattgttcccgccgggctggaggcgcccggctccgagtgccgccgggagtcgtgcctcggccgcggagctctcgagaccccaccaggacctgaacggatcccagggacgagctgctggagcgcaagacacagacacccgccgcgccacggcgagctctccagaggcgggaccgcagcgccaagtgagagtcagcttgcgaaggcagatcccgctcaccgcagcggcagagtatccatggaggtgcggagccttgttaccaacctctaactgcagaactgggatgtggggctggaggggcctcctcttctgggctgtgctggtcacagccactctctgcactgccagaccagccccaaccttgcccgaacaagatgcactgccatcctcggaggacgatgacgatgatgatgactcctcctcagaggagaaagagacagacaacaccaaaccaaaccctgtggcgccatactggacatccccagagaaaatggagaagaaactgcacgcagtgccagctgccaagacggtgaaattcaaatgcccgtcgagtgggacacccagccccactttgcgctggttgaaaaacggcaaggaattcaaacctgaccaccggatcggaggctacaaggttcgttacgccacttggagcatcataatggactctgtggtgccttctgacaagggcaactacacctgcatcgtggagaacgagtatgggagcattaaccacacctaccagctagacgttgtggagcgatcccctcaccggcccatccttcaggcagggctaccagccaacaagaccgtggccctgggcagcaacgtggagttcatgtgcaaggtgtacagtgacccccagcctcacatccagtggctgaagcacatcgaggtgaatgggagtaagatcggtccagacaacttgccatatgtccagatcctgaagactgctggagttaataccaccgacaaggaaatggaggtgcttcatctacggaatgtctcctttgaggatgcgggggagtatacgtgcttggcgggtaactctatcggactctcccatcactctgcatggttgaccgttctggaagccctggaagagagaccagccgtgatgacctcacctctgtacctggaaatcattatctactgcaccggggccttcctgatctcctgtatggtgggctccgtcatcatctacaagatgaagagcggcaccaagaagagcgacttccatagccagatggctgtgcataagctggctaagagcatccctctccgcagacaggtgtcagctgactccagcgcatccatgaactccggggttctcctggttcggccttcgcgactgtcctccagcggaacccccatgctagctggcgtctctgaatatgagctccctgaagatccccgctgggagctgccccgggacagactggtcttaggaaaaccgcttggcgagggctgcttcgggcaggtggtgttggccgaagccatcggtctggataaggacaaacccaaccgcgtgaccaaagtggccgtgaagatgttgaagtctgatgcgacggagaaggacctgtcggacctgatctcggagatggagatgatgaaaatgatcgggaagcacaagaatatcatcaacctgctgggggcgtgcacacaggatggtcctctctatgtcattgtggagtatgcctccaaaggcaatcttcgggagtatctgcaggcccggaggcctcctgggctggagtattgctacaaccccagccacaaccctgaggaacagctgtcttccaaagatctggtgtcctgtgcctatcaggtggcccggggcatggagtatcttgcctcgaagaagtgtatacaccgagacctggctgctaggaatgtcctggtgacagaggataatgtcatgaagatcgcagactttggcctagctcgagacattcaccatatcgactactataagaaaaccaccaatggccggctgcctgtgaagtggatggcacctgaggcattgtttgaccggatctacacccaccagagtgatgtgtggtcttttggggtgctcttatgggagatcttcactctgggtggctccccataccccggtgtgcctgtggaagaacttttcaagctgctgaaggagggtcatcgaatggacaagcccagtaactgtaccaatgagctgtacatgatgatgcgggactgctggcacgcagtgccctctcagagacctactttcaagcagttggtggaagacctggaccgcattgtggccttgacctccaaccaggagtatctggacctgtccatgccactggaccagtactcgccaagctttccggacacacggagctctacctgctcttcaggggaggactctgtcttctctcatgagccattacctgaggagccctgtctgccccgacaccccacccagcttgcaaatggtggactcaaacggcgctgatgaccagccgtccccagccttcccccattc

SEQ ID NO: 7621 - protein, 822 aa, Rattus norvegicus; identical to SEQ ID NO: 1634
  ref <308>: DATABASE ACCESSION NUMBER: SWISS-Prot / Q04589
  ref <309>: DATABASE ENTRY DATE: 2002-06-15

SEQ ID NO: 7622 - DNA, 3328 bp, Homo sapiens
  ref <308>: DATABASE ACCESSION NUMBER: EMBL / M37722
  ref <309>: DATABASE ENTRY DATE: 1999-07-02
ccggccgcggagctcttgcgaccccgccaggacccgaacagagcccgggggcggcgggccggagccggggacgcgggcacacgcccgctcgcacaagccacggcggactctcccgaggcggaacctccacgccgagcgagggtcagtttgaaaaggaggatcgagctcactgtggagtatccatggagatgtggagccttgtcaccaacctctaactgcagaactgggatgtggagctggaagtgcctcctcttctgggctgtgctggtcacagcaacactctgcaccgctaggccgtccccgaccttgcctgaacaagatgctctcccctcctcggaggatgatgatgatgatgatgactcctcttcagaggagaaagaaacagataacaccaaaccaaaccccgtagctccatattggacatccccagaaaagatggaaaagaaattgcatgcagtgccggctgccaagacagtgaagttcaaatgcccttccagtgggaccccaaaccccacactgcgctggttgaaaaatggcaaagaattcaaacctgaccacagaattggaggctacaaggtccgttatgccacctggagcatcataatggactctgtggtgccctctgacaagggcaactacacctgcattgtggagaatgagtacggcagcatcaaccacacataccagctggatgtcgtggagcggtcccctcaccggcccatcctgcaagcagggttgcccgccaacaaaacagtggccctgggtagcaacgtggagttcatgtgtaaggtgtacagtgacccgcagccgcacatccagtggctaaagcacatcgaggtgaatgggagcaagattggcccagacaacctgccttatgtccagatcttgaagactgctggagttaataccaccgacaaagagatggaggtgcttcacttaagaaatgtctcctttgaggacgcaggggagtatacgtgcttggcgggtaactctatcggactctcccatcactctgcatggttgaccgttctggaagccctggaagagaggccggcagtgatgacctcgcccctgtacctggagatcatcatctattgcacaggggccttcctcatctcctgcatggtggggtcggtcatcgtctacaagatgaagagtggtaccaagaagagtgacttccacagccagatggctgtgcacaagctggccaagagcatccctctgcgcagacaggtaacagtgtctgctgactccagtgcatccatgaactctggggttcttctggttcggccatcacggctctcctccagtgggactcccatgctagcaggggtctctgagtatgagcttcccgaagaccttcgctgggagctgcctcgggacagactggtcttaggcaaacccctgggagagggctgctttgggcaggtggtgttggcagaggctatcgggctggacaaggacaaacccaaccgtgtgaccaaagtggctgtgaagatgttgaagtcggacgcaacagagaaagacttgtcagacctgatctcagaaatggagatgatgaagatgatcgggaagcataagaatatcatcaacctgctgggggcctgcacgcaggatggtcccttgtatgtcatcgtggagtatgcctccaagggcaacctgcgggagtacctgcaggcccggaggcccccagggctggaatactgctacaaccccagccacaacccagaggagcagctctcctccaaggacctggtgtcctgcgcctaccaggtggcccgaggcatggagtatctggcctccaagaagtgcatacaccgagacctggcagccaggaatgtcctggtgacagaggacaatgtgatgaagatagcagactttggcctcgcacgggacattcaccacatcgactactataaaaagacaaccaacggccgactgcctgtgaagtggatggcacccgaggcattatttgaccggatctacacccaccagagtgatgtgtggtctttcggggtgctcctgtgggagatcttcactctgggcggctccccataccccggtgtgcctgtggaggaacttttcaagctgctgaaggagggtcaccgcatggacaagcccagtaactgcaccaacgagctgtacatgatgatgcgggactgctggcatgcagtgccctcacagagacccaccttcaagcagctggtggaagacctggaccgcatcgtggccttgacctccaaccaggagtacctggacctgtccatgcccctggaccagtactcccccagctttcccgacacccggagctctacgtgctcctcaggggaggattccgtcttctctcatgagccgctgcccgaggagccctgcctgccccgacacccagcccagcttgccaatggcggactcaaacgccgctgactgccacccacacgccctccccagactccaccgtcagctgtaaccctcacccacagcccctgctgggcccaccacctgtccgtccctgtcccctttcctgctggcaggagccggctgcctaccaggggccttcctgtgtggcctgccttcaccccactcagctcacctctccctccacctcctctccacctgctggtgagaggtgcaaagaggcagatctttgctgccagccacttcatcccctccagatgttggaccaacacccctccctgccaccaggcatctgccggatgggcagagtggagcaatgaacaggcatgcaagtgagagcttcctgagctttctcctgtcggtttggtctgttttgccttcacccataagcccctcgcactctggtggcaggtgcttgtcctcagggctacagcagtagggaggtcagtgcttcgtgcctcgattgaaggtgacctctgccccagataggtggtgccagtggcttattaattccgatactagtttgctttgctgaccaaatgcctggtaccagaggatggtgaggcgaaggccaggttgggggcagtgttgtgccctggcccagccaaactgggggctctgtgggggctctgtatatagctatgaagaaaacacaaagtgtataaatctgagtatatatttacatgtctttttaaaagggtcgttaccagagatttacccatcgggtaagatgctcctggtggctgggaggcatcagttgctatatattaaaaacaaaaaagaaaaaaaaggaaaatgtttttaaaaaggtcatatattttttgctacttttgctgttttatttttttaaattatgttctaaacctattttcagtttaggtccctcaataaaaattgctgctgcttaaaaacc

SEQ ID NO: 7623 - protein, 822 aa, Homo sapiens [sequence omitted]

SEQ ID NO: 7624 - DNA, 1736 bp, Rattus norvegicus
  ref <308>: DATABASE ACCESSION NUMBER: EMBL / S55427
  ref <309>: DATABASE ENTRY DATE: 2000-03-04
gggggaagccagcaacctagaggacgcccccgagtttgtgcctgaggctactccgctctgagccggctgtccctttgaactgaaagcaccgctccaccgagcccgagcccaactccagccaccatgcttctactcttgttggggatcctgttccttcacatcgcggtgctagtgttgctcttcgtctccaccatcgtcagccaatggctcgtgggcaatggacacaggactgatctctggcagaactgtaccacatccgccttgggagccgtccagcactgctactcctcatctgtgagcgaatggcttcagtctgtccaggccaccatgatcctgtctgtcatcttcagcgtcctgtccctgttcctgttcttctgccagctcttcactctcaccaaaggcggccgcttttacatcactggagtcttccaaatccttgctggtctgtgtgtgatgagtgcagcggccatctacacagtgagacacagtgagtggcatgtcaacaacgactactcctatggctttgcttacatcctggcctgggtggctttcccgctggccctccttagtggcatcatctacgtgatcctgcggaaacgcgaatgaggcgcccgacgcaccatccgtctaggctctgagcgtgcatagggtacacagggagggaggaaggaaaccagaaaaccaaaccaaccaacccaaaagagctagcccccaaacccaaacgcaagccaaaccaaacagaacacagttgagtggggattgctgtcgattgaagatgtatataatatctatggtttataaaacctatttataacactttttacatacatgtacataggattgtttgctttttatgttgaccgtcagcctcgtgttgaatcttaaacgactctacatcctaacactataaccaagctcagtattttcgttttgtttcgtttttttcatcttttgttttgctcagacataaaaaaaaaaaaaaaaatccacgtggccccctttcatctgaaagcagatccctccctcccattcaacctcataggataaccaaagtgcggggacaaaccccagatggccagaggccttcacactatgggtgacccagtgaatttagcaggaataatccgctgcccgaatcaatgtgtgaagccctaagcactcacagacgaaacgccctgaccagagccctctgcgaaaccaatagctggtggctgcggaacacttgaccctgaaggcggagtactggggcacatgtttaaatgagacgtcagagacaagcaatctgtgaaatggtgctatagatttaccattccttgttattactaatcatttaaaccactcactggaaactcaattaacagttttatgacctacagcagaacagagacccgatacaaacggttcgtaactgctttcgtacatagctaggctgttgttattactacaataaataaatctcaaagccttcgtcactcccacagttttctcacggtcggagcatcaggacgagggtctagacccttgggactagcaaattccctggctttctgggtctagagtgttctgtgcctccaaggactgtctagcgatgacttgtattggccaccaactgtagatgtatatacggtgtccttctgatgctaagactccagacctttcttggttttgctggctttttctgattttataccaactgtgtggactaagatgcattaaaataaacatcagagtaactc

SEQ ID NO: 7625 - protein, 160 aa, Rattus norvegicus; identical to SEQ ID NO: 6300
  ref <308>: DATABASE ACCESSION NUMBER: SWISS-Prot / AAB25374
  ref <309>: DATABASE ENTRY DATE: 2001-10-16

SEQ ID NO: 7626 - DNA, 601 bp, Homo sapiens
  ref <308>: DATABASE ACCESSION NUMBER: EMBL / S61788
  ref <309>: DATABASE ENTRY DATE: 2000-03-04
gcgctctcctcgcaggcagaaactccgctgagcagaacttgccgccagaatgctcctcctgttgctgagtatcatcgtcctccacgtcgcggtgccggtgctgctgttcgtctccacgatcgtcagccaatggatcgtgggcaatggacacgcaactgatctctggcagaactgtagcacctcttcctcaggaaatgtccaccactgtttctcatcatcaccaaacgaatggctgcagtctgtccaggccaccatgatcctgtcgatcatcttcagcattctgtctctgttcctgttcttctgccaactcttcaccctcaccaaggggggcaggttttacatcactggaatcttccaaattcttgctggtctgtgcgtgatgagtgctgcggccatctacacggtgaggcacccggagtggcatctcaactcggattactcctacggtttcgcctacatcctggcctgggtggccttccccctggcccttctcagcggtgtcatctatgtgatcttgcggaaacgcgaatgaggcgcccagacggtctgtctgaggctctgagcgtacatagggaagggaggaagggaaaacagaaagcag

SEQ ID NO: 7627 - protein, 160 aa, Homo sapiens; identical to SEQ ID NO: 6302
  ref <308>: DATABASE ACCESSION NUMBER: SWISS-Prot / Q01453
  ref <309>: DATABASE ENTRY DATE: 2002-06-15

SEQ ID NO: 7628 - DNA, 3208 bp, Rattus norvegicus
  misc_feature (1)..(3208): n=a, c, g or t
  ref <308>: DATABASE ACCESSION NUMBER: EMBL / S56141
  ref <309>: DATABASE ENTRY DATE: 2000-03-03
gaattccgcctaagaatagcaaagtagtaaagagagatttggatgatgatgtcattgaatctgtcaaagacctcctgtccaatgaagactcagtggaagatgtttctaagaagagcgaactaattgttgatgttcaagaagagaaagatacagatgctgaagatggatctgaagttgatgatgaaaggccagcttggaacagtaagctgcaatacatcctggcgcaagttggattttctgtaggtctggggaatgtgtggcggttcccatacctctgccaaaagaatggcggtggtgcatatcttttgccatatttaatactacttctggtgataggaattccactcttcttcttggaactttctgtgggtcaaagaattcggagaggcagcatcggggtttggaattacataagccctaaactgggtgggattggattcgcaagctgtgtagtgtgctattttgtggctctctactacaatgtcatcattggctggacattgttttacttttctcagtcttttcaacaacctctcccttgggatcaatgccccctggtgaaaaacgcatctcatacttatattgagccagaatgtgaaaaaagttctgccaccacttattactggtaccgggaagcactggctatcagcagctccatctctgaaagtgggggcttaaactggaagatgactggctgcctgctggctgcctgggtcatggtttgtctggccatgatcaaaggcattcagtcctctggaaaaatcatgtattttagttctctgttcccctacgtggtacttatatgcttcctaataagatctctccttttaaatggttcaattgatggcatccgacacatgttcacccctaagcttgaaatgatgctggagcccaaggtttggagagaggcagcgactcaagtcttctttgccttgggtttgggatttggtggagtcatcgcgttttccagttacaacaagagagacaacaactgccacttcgacgctgtcctcgtgtcttttatcaactttttcacttcagtcctggcaacactggtggtgttcgcagttctggggttcaaagccaatatcgtaaatgaaaagtgcatttcacaaaattctgagatgatcttgaaacttttgaaaacgggaaacgttagttgggatgtcattccccgtcacatcaacctttcagctgtcactgcggaagattatcatgtagtttacgacatcattcaaaaagtgaaggaggaggagtttgctgttctccatctcaaagcctgtcaaattgaggatgagctaaataaagctgtgcagggcactggcttggctttcattgcctttacagaggccatgacacattttcctgcatctcccttctggtcagtgatgtttttcctcatgctgataaatctcgggctcggcagcatgtttggaaccattgaaggaatcatcactcctgttgtggacacattcaaagtgaggaaggaaatactcaccgttatctgttgcctcctagcattttgtatcggcttgatgtttgtgcagcgctctggaaattacttcgttacaatgtttgatgattattctgccacattgcctctgttaatcgtggtcatcttggagaatattgctgtaagcttcgtttacggcatagataagtttctagaagacctaacagacatgttaggatttgctccaagcaaatattactattacatgtggaaatacatttctcctctaatgctagtaacattgttaatagctagcattgtgaatatgggattaagtcctccgggatataatgcatggatcaaggagaaggcatccgaagaatttctgagctacccgatgtgggggatggtggtctgtttctctctgatggtgctggctatacttcctgtcccagtcgttttcgtcattcgtcgctgcaacctcatagatgatagttctggtaacttggcctctgtgacctataagagaggaagagtcctgaaagaacccgtgaacttagacggagatgatgcaagcctcattcacggaaagataccaagtgaaatgtcgtctccaaattttggtaaaaatatctatcgaaaacagagtggttctccgaccctggacactgctcccaatggacgctatgggattgggtatttgatggcagatatgccagatatgcccgagtctgacttgtagctgagtgaaagcaaagggttgagcttggttcatttttatcaatgagcattggttctactatgagaagcagtgagcttcacttgtcacaaggtgatctcaggtgtccatagccgccatctttaatctcaacagtttaagacagttccagaagagcaatcctcagtttacaattacaaagtaacaattgcagacaaagcttacattgactggggtcctttgccaggatttttttaaaaagcactttgacatactttcaagtatttctatctcttaaaaaaaaggtgttacctcagtttctaatagtttccggatttaatattattggcgatttgaaaaaaaatccctgttatatcttacaattcataattttgccttcggagtaagttccagtattaccatgaacagttgtgtgtgagcgggtgcttctcagcacattgccatgagtacgttctgtagatagcctgtacttatctttggtagcattgaaaccttaggcacttagttggagaaaacttcaaagtattttcttatatgatagccgtctagagcaatagtattaaagagtaaaaaggcactgatggtggatgagaggttaagtccagatgtgatcgagggtttcctggagtggccatatattttgtgtaaaataggtgtgtgcaaatgattgaagggactctcgagaattatgcagactgcatttttcttatgccgtgtgcctaataaacctacttaatatttattgtggttttgagatcacttatagtatatttatataatatacttgcaatgtatagagatgcgcatcaggactcttaagtgctggtttgaaaacttgaagcaagatagcatctgatttcatatgtttctgttttgcttcattttatgcaaatacgaattcttttttttaagtgattgttaaaactgtatggcattacattttaacctacaaataaacgaagtttancaaaaaaaaaaaaaaaaaaaaaaaaaaaaaaaaaaaaaaaaaggaattc

SEQ ID NO: 7629 - protein, 729 aa, Rattus norvegicus
  ref <308>: DATABASE ACCESSION NUMBER: SWISS-Prot / AAA41729
  ref <309>: DATABASE ENTRY DATE: 2001-10-16
MPKNSKVVKRDLDDDVIESVKDLLSNEDSVEDVSKKSELIVDVQEEKDTDAEDGSEVDDERPAWNSKLQYILAQVGFSVGLGNVWRFPYLCQKNGGGAYLLPYLILLLVIGIPLFFLELSVGQRIRRGSIGVWNYISPKLGGIGFASCVVCYFVALYYNVIIGWTLFYFSQSFQQPLPWDQCPLVKNASHTYIEPECEKSSATTYYWYREALAISSSISESGGLNWKMTGCLLAAWVMVCLAMIKGIQSSGKIMYFSSLFPYVVLICFLIRSLLLNGSIDGIRHMFTPKLEMMLEPKVWREAATQVFFALGLGFGGVIAFSSYNKRDNNCHFDAVLVSFINFFTSVLATLVVFAVLGFKANIVNEKCISQNSEMILKLLKTGNVSWDVIPRHINLSAVTAEDYHVVYDIIQKVKEEEFAVLHLKACQIEDELNKAVQGTGLAFIAFTEAMTHFPASPFWSVMFFLMLINLGLGSMFGTIEGIITPVVDTFKVRKEILTVICCLLAFCIGLMFVQRSGNYFVTMFDDYSATLPLLIVVILENIAVSFVYGIDKFLEDLTDMLGFAPSKYYYYMWKYISPLMLVTLLIASIVNMGLSPPGYNAWIKEKASEEFLSYPMWGMVVCFSLMVLAILPVPVVFVIRRCNLIDDSSGNLASVTYKRGRVLKEPVNLDGDDASLIHGKIPSEMSSPNFGKNIYRKQSGSPTLDTAPNGRYGIGYLMADMPDMPESDL

SEQ ID NO: 7630 - DNA, 2573 bp, Rattus norvegicus
  ref <308>: DATABASE ACCESSION NUMBER: EMBL / S56508
  ref <309>: DATABASE ENTRY DATE: 2000-06-09
gccttccatcaagatgtggtaacctctttccctgagcgccacaggctctagaaagagaggctggttctagcaggatcaactccactcctcagtgcccggaggctgctggaaagagattgccctgtcacttctggagaagatgcagacccaggagatcctgaggatcctgcggctgcccgagctatcggacttgggccagtttttccgcagcctctcagccaccacccttgtgagtatgggtgcactggctgccatccttgcatactggctcactcaccggccaaaggccttgcaaccaccatgcaacctcctgatgcagtcggaagaagtagaggacagtggtggagcccggcgatctgtgattggggattgcactcagttgcttacccactactatgacgatgcccggacgatgtaccaggtgttccgacgtgggcttagcatctcagggaatggaccctgtcttggcttccggaagccagagcaaccttaccagtggctgtcctatcaagaggtggccaaaagggctgaattcctggggtcaggacttctccagcatgactgtaaagtgggcacagagcagttcattggcgtttttgcacaaaatcggccagagtggatcattgctgagctggcctgctacacatattccatggtggtggtaccgctctatgacacactgggcccagggtctatccgctacatcatcaatacagcggacatctgcactgtaatcgtggataagccgcataaggctatactcctgctagaacacgtggagaggaaggagactccgggcctcaagctggtcatcctcatggagccatttgacgatgccctgagagagaggggaaagaagtgcggggtggacatcaagtccatgcaggctatagaggactccggccaagagaatcatcgtgtccccgtgcccccacggcccgatgacctctccattgtgtgtttcacgagcggtacaacagggaaccccaaaggtgcgatgctcacccacgggaacgtggtggccgatttctcgggctttctgaaagtcacagagagtcagtgggcccccacttgtgcggatgtacacttttcctatttgcctttagcacacatgtttgagcgaatggtgcagtctgttgtctactgccatggagggcgtgtgggcttcttccagggagacatccgcctcctctcagacgacatgaaagctctccgccccaccatcttccctgtggtcccacggctgctgaatcggatgtatgacaagatcttccaccaggcagacacctcactgaagcgctggctcctggagtttgcagcaaagcgcaagcaggctgaggtccggagcggaatcatcagaaacaatagtatctgggatgaactcttctttaataagattcaggccagtcttggagggcacgtgagaatgattgttaccggagcagcccccgcatcaccaacagtcctgggattcctacgagcagctctggggtgccaggtctatgaaggttatgggcaaactgaatgcacagctgggtgtaccttcacaacgccaggggactggacatcagggcacgtgggagcccctctgccctgcaaccacatcaagctggtcgacgcagaggaactcaactactggaccagcaaaggagaaggagagatctgtgtgaaaggaccaaatgtgttcaaaggctacttaaaagacgaggacaggacaaaggaggccctggacagtgacggctggcttcacacgggagacattggaaaatggctgccggagggaacgcttaaaatcatcgatcggaaaaaggacatatttaaacttgctcagggggaatacgttgcgcccgagaagattgagaacatctacatccgaagtgagcctgtggcgcaaatctacgtccatggggacagcttaaaggcctttctggttggcattgttgtgcctgaccctgaagtcatgccttgctgggctcagaagaaaggaatcgaagggaactaccaggaactctgcaaaagtaaggaattgaagaaagccattctggatgacatggtgatgttggggaaagaaagtggactgcattcttttgaacaggttaaagccatttacatccattgtgacatgttctcagttcaaaatggcttgctgacaccaacactaaaggctaagaggcccgagctgagagagtacttcaaaaagcaaatagaagagctgtactcaatctccatgtgaagctcaaggaggcccttctcagcccagcaaagtttgcagcaatattctaattattcttgagagaaaaggagtcagaatgccacagctcagagtgaacgagcacctgatttttttttttttttgcaactgagcctttcctgacctgagaagtctctaacaatattttctctaccatcaccaagtaccactttatttttattaaatgatattgtagcaagctgctaaaaaaaattattgcaaacggtaatgtaaaaacaaatcaagacctttctcaagaactgtgtaccactaaagtaatatattcgcgatgttcacagaattccattaaacataaaaaaaa

SEQ ID NO: 7631 - protein, 697 aa, Rattus norvegicus
  ref <308>: DATABASE ACCESSION NUMBER: SWISS-Prot / AAB19809
  ref <309>: DATABASE ENTRY DATE: 2002-06-15
MQTQEILRILRLPELSDLGQFFRSLSATTLVSMGALAAILAYWLTHRPKALQPPCNLLMQSEEVEDSGGARRSVIGDCTQLLTHYYDDARTMYQVFRRGLSISGNGPCLGFRKPEQPYQWLSYQEVAKRAEFLGSGLLQHDCKVGTEQFIGVFAQNRPEWIIAELACYTYSMVVVPLYDTLGPGSIRYIINTADICTVIVDKPHKAILLLEHVERKETPGLKLVILMEPFDDALRERGKKCGVDIKSMQAIEDSGQENHRVPVPPRPDDLSIVCFTSGTTGNPKGAMLTHGNVVADFSGFLKVTESQWAPTCADVHFSYLPLAHMFERMVQSVVYCHGGRVGFFQGDIRLLSDDMKALRPTIFPVVPRLLNRMYDKIFHQADTSLKRWLLEFAAKRKQAEVRSGIIRNNSIWDELFFNKIQASLGGHVRMIVTGAAPASPTVLGFLRAALGCQVYEGYGQTECTAGCTFTTPGDWTSGHVGAPLPCNHIKLVDAEELNYWTSKGEGEICVKGPNVFKGYLKDEDRTKEALDSDGWLHTGDIGKWLPEGTLKIIDRKKHIFKLAQGEYVAPEKIENIYIRSEPVAQIYVHGDSLKAFLVGIVVPDPEVMPCWAQKKGIEGNYQELCKSKELKKAILDDMVMLGKESGLHSFEQVKAIYIHCDMFSVQNGLLTPTLKAKRPELREYFKKQIEELYSISM

SEQ ID NO: 7632 - DNA, 603 bp, Rattus norvegicus
  ref <308>: DATABASE ACCESSION NUMBER: EMBL / S56937
  ref <309>: DATABASE ENTRY DATE: 2000-03-04
gcatctgtgtggctgttccgaggggactttgtgtttgactacccgaggcccatcatgcctaatatggtcttcattggaggcataaactgtgtcatcaagaagcccctctctcaggaatttgaagcctatgtcaacgcctccggagaacatggcatcgtggttttctctttgggatccatggtctcagagattccagagaagaaagcgatggaaatcgctgaggctttgggcagaattcctcagacgctcctgtggcgctacaccggaactagaccatcgaaccttgcaaagaacactattcttgtcaaatggctaccccaaaacgatctgcttggtcatccaaaggctcgggcgttcatcacacactccggttcccatggtatttatgaaggaatatgcaatggggttccaatggtgatgatgcccttgtttggtgatcagatggacaacgccaagcgcatggaaactcggggagctggggtgaccctgaatgtcctggaaatgactgccgatgatttggaaaacgcccttaaaactgtcatcaataacaagagttacaaggagaacatcatgcgcctctccagccttcacaaggaccgtcct

SEQ ID NO: 7633 - protein, 533 aa, Rattus norvegicus
  ref <308>: DATABASE ACCESSION NUMBER: SWISS-Prot / AAA42312
  ref <309>: DATABASE ENTRY DATE: 2001-10-16
MDTGLCAPLRGLSGLLLLLCALPWAEGGKVLVFPMEGSHWLSMRDVVRELHARGHQAVVLAPEVTVHMKGEDFFTLQTYAFPYTKEEYQREILGNAKKGFEPQHFVKTFFETMASIKKFFDLYANSCAALLHNKTLIQQLNSSSFDVVLTDPVFPCGALLAKYLQIPAVFFLRSVPCGIDYEATQCPKPSSYIPNLLTMLSDHMTFLQRVKNMLYPLTLKYICHLSITPYESLASELLQREMSLVEVLSHASVWLFRGDFVFDYPRPIMPNMVFIGGINCVIKKPLSQEFEAYVNASGEHGIVVFSLGSMVSEIPEKKAMEIAEALGRIPQTLLWRYTGTRPSNLAKNTILVKWLPQNDLLGHPKARAFITHSGSHGIYEGICNGVPMVMMPLFGDQMDNAKRMETRGAGVTLNVLEMTADDLENALKTVINNKSYKENIMRLSSLHKDRPIEPLDLAVFWVEYVMRHKGAPHLRPAAHDLTWYQYHSLDVIGFLLAIVLTVVFIVYKSCAYGCRKCFGGKGRVKKSHKSKTH

SEQ ID NO: 7634 - DNA, 1605 bp, Homo sapiens
  ref <308>: DATABASE ACCESSION NUMBER: Refseq / NM_019093
  ref <309>: DATABASE ENTRY DATE: 2001-11-02
atggccacaggactccaggttcccctgccgtggctggccacaggactgctgcttctcctcagtgtccagccctgggctgagagtggaaaggtgttggtggtgcccattgatggcagccactggctcagcatgcgggaggtcttgcgggagctccatgccagaggccaccaggcagtggtcctcaccccagaggtgaatatgcacatcaaagaagagaactttttcaccctgacaacctatgccatttcgtggacccaggatgaatttgatcgccatgtgctgggccacactcaactgtactttgaaacagaacattttctgaagaaatttttcagaagtatggcaatgttgaacaatatgtctttggtctatcataggtcttgtgtggagctactacataatgaggccctgatcaggcacctgaatgctacttcctttgatgtggttttaacagaccccgttaacctctgcgcggcagtgctggctaagtacctgtcgattcctactgtgttttttttgaggaacattccatgtgatttagactttaagggcacacagtgtccaaacccttcctcctatattcctagattactaacaaccaattcagaccacatgacattcatgcaaagggtcaagaacatgctctaccctctggccctgtcctacatttgccatgctttttctgctccttatgcaagccttgcctctgagctttttcagagagaggtgtcagtggtggatattctcagtcatgcatctgtgtggctgttccgaggggactttgtgatggactaccccaggccaatcatgcccaacatggtcttcattgggggcatcaactgtgccaacaggaagccactatctcaggaatttgaagcctacattaatgcttctggagaacatggaattgtggttttctctttgggatcaatggtctcagaaattccagagaagaaagctatggcaattgctgatgctttgggcaaaatccctcagacagtcctgtggcggtacactggaacccgaccatcgaatcttgcgaacaacacgatacttgttaagtggctaccccaaaacgatctgcttggtcacccgatgacccgtgcctttatcacccatgctggttcccatggtgtttatgaaagcatatgcaatggcgttcccatggtgatgatgcccttgtttggtgatcagatggacaatgcaaagcgcatggagactaagggagctggagtgaccctgaatgttctggaaatgacttctgaagatttagaaaatgctctaaaagcagtcatcaatgacaaaagttacaaggagaacatcatgcgcctctccagccttcacaaggaccgcccggtggagccgctggacctggccgtgttctgggtggagtttgtgatgaggcacaagggcgcgccacacctgcgccccgcagcccacgacctcacctggtaccagtaccattccttggacgtgattggtttcctcttggccgtcgtgctgacagtggccttcatcacctttaaatgttgtgcttatggctaccggaaatgcttggggaaaaaagggcgagttaagaaagcccacaaatccaagacccattga

SEQ ID NO: 7635 - protein, 534 aa, Homo sapiens
  ref <308>: DATABASE ACCESSION NUMBER: Refseq / NP_061966
  ref <309>: DATABASE ENTRY DATE: 2001-11-02
MATGLQVPLPWLATGLLLLLSVQPWAESGKVLVVPIDGSHWLSMREVLRELHARGHQAVVLTPEVNMHIKEENFFTLTTYAISWTQDEFDRHVLGHTQLYFETEHFLKKFFRSMAMLNNMSLVYHRSCVELLHNEALIRHLNATSFDVVLTDPVNLCAAVLAKYLSIPTVFFLRNIPCDLDFKGTQCPNPSSYIPRLLTTNSDHMTFMQRVKNMLYPLALSYICHAFSAPYASLASELFQREVSVVDILSHASVWLFRGDFVMDYPRPIMPNMVFIGGINCANRKPLSQEFEAYINASGEHGIVVFSLGSMVSEIPEKKAMAIADALGKIPQTVLWRYTGTRPSNLANNTILVKWLPQNDLLGHPMTRAFITHAGSHGVYESICNGVPMVMMPLFGDQMDNAKRMETKGAGVTLNVLEMTSEDLENALKAVINDKSYKENIMRLSSLHKDRPVEPLDLAVFWVEFVMRHKGAPHLRPAAHDLTWYQYHSLDVIGFLLAVVLTVAFITFKCCAYGYRKCLGKKGRVKKAHKSKTH

SEQ ID NO: 7636 - DNA, 603 bp, Rattus norvegicus
  ref <308>: DATABASE ACCESSION NUMBER: EMBL / S58644
  ref <309>: DATABASE ENTRY DATE: 2000-06-09
ttcttttcctgtgcctggttcttgggcgtcctttgctctggccttggcgtgtgtctctgcggtgtttgcttgtgcctcgtcggtttctttggggtcttttgtttctgctcttctgtcttctgctcgtgctgggccttggttgggctgttctgctgcgtccgtggccgttgcgtctgtgggctgtgcctgtgctctgtgcctggtgcctttggggtgtcgtgtgtgttgtgcccttcctgccctgttgcttgctgctccttgtgtgtctgtgtggtttgctcgctgcttctcctggggtttcctgtcttcctgtcctgcctcctcctgtgctttgttgtggtgttctcgtgggttgtctgcttcgtctttgtcgtcctggttgctgtgctttgcttcttcttttctgctttggtctgcgttttgttgttctgcttctctgttctgccctttggtttgtctttcttgtccgtcctctgggtgcctgtgtgtggttgtgccccctttgccttgtccttcctgctggctgtggttggctgcttcctcctggttggtttggctctcctggctttctggtttcttctcgtctccttcctcgtccgttgt

SEQ ID NO: 7637 - protein, 200 aa, Rattus norvegicus
  ref <308>: DATABASE ACCESSION NUMBER: SWISS-Prot / AAB26278
  ref <309>: DATABASE ENTRY DATE: 2003-02-01
LFLCLVLGRPLLWPWRVSLRCLLVPRRFLWGLLFLLFCLLLVLGLGWAVLLRPWPLRLWAVPVLCAWCLWGVVCVVPFLPCCLLLLVCLCGLLAASPGVSCLPVLPPPVLCCGVLVGCLLRLCRPGCCALLLLFCFGLRFVVLLLCSALWFVFLVRPLGACVWLCPLCLVLPAGCGWLLPPGWFGSPGFLVSSRLLPRPL

SEQ ID NO: 7638 - DNA, 2256 bp, Rattus norvegicus
  ref <308>: DATABASE ACCESSION NUMBER: EMBL / S59525
  ref <309>: DATABASE ENTRY DATE: 2000-03-04
aagagactcgactcttgaagcccgtccttggagaaatatggctaacaatgcgtctcttgagcaggaccaaaatcactgctcagccatcaacaacagcatccccctgacacagggcaagctcccgactctaaccttatctggaaagatccgagtgacggtgactttcttccttttcctactctctactgccttcaatgcctctttcttggtaaagctgcagaggtggacccagaagaggaagaaaggaaaaaagctctcaaggatgaaggtgcttttaaagcatttgaccttagccaacctccttgagactctaatcgtcatgccgctggatgggatgtggaacatcactgttcagtggtatgctggagagttcctttgcaaagttctcagctatctgaagctcttctctatgtatgccccagccttcatgatggtggtgattagcctggatcgctccctggccgtcactcagcccttagctgtccaaagcaagagcaagcttgaacggtctatgaccagcctggcctggattctcagcattgtctttgcgggaccacagttatatatcttcaggatgatctacctagtcgacggctctgggccagcagttttctcgcaatgtgtgacccactgcagctttccgcaatggtggcatgaagccttctacaactttttcaccttcagctgcctgttcatcatccctcttctcatcatgctaatctgcaatgccaaaatcatcttcgccctcacacgagtccttcatcaggacccacgcaaactacagctgaatcaatccaagaataatatcccaagagcacggctgagaactctaaagatgacagtggcatttggcacctcctttgtcatctgctggactccctactacgtcctaggaatctggtactggtttgatccggaaatgttaaacagggtgtcagagccagtcaatcacttcttctttctctttggttttctaaacccgtgcttcgacccacttatatatgggtatttctctttgtaattgggagactacccaagcacttgtgctgaaacccatatacgggataacttatgtcaccggttgagaataagctcaaagcttgcaacatacctatgtgcaagcaaggcagggtttgggctcaggttagcagccttgtccatatacagagtttgttgttagcgcttcggaagaccttccaaaataactgaaatctgtccttaatcataagcttctaaactagcctcagccttgtctcatgttttattgcatcccatttgggattctttacttcctccttacataataatgtatagatactttaaatgactacatcctaaggtaaaaagtaccaaaaagtaagaccgggaaagcccaacatattcacaacatcagcttagtttggggagttggtttttttttctcaaagggggctgagcatctataacaccccatcccaacacctagagcccacagagagcagaatcgctgcccatagatcatcagcaaaaccagatgctgctccaagacctaaagcccagagacagaaggatccctgtccagaggttagcaggaaatactggctgacactatcccagcctaaggcacagagatattacgctccctcactgcccataggtcagcagcagtagcagctgatgttatctatcccagcctagagcacagacagaagagaatcactgtccatgggtcaaattttaactgcaatgactgaaagacttaattttctattttactttaaaagcctttctgattcttattcagcaacaaatccaccagcccaccaggattatttacatgatacaaattaatcccatttacatgctacattgcgacacatccctacatagtgggggtatttaaaagggataggttttttttcatgggctgttagaatatttcacagactatacaacatgtggggtttatgtcaactgactgccatgaatagtgttttaatataattcagaaaatgcctataataattatcttgcaagcataatatacaatccactttaacaatatggtggaacgtttgtctatcttatcttgccgagtcatgccccacagataaatgaggaaagtcaataaaacagtaagcaaatatataaacaccaagaggggctttgatgtattaaaggagctcaaggcaggaagccatacaatttcccctatatagaccaacagcacagaatattagggaggagaataataaaactgtacatgtgaaaaaaaaa

SEQ ID NO: 7639 - protein, 327 aa, Rattus norvegicus
  ref <308>: DATABASE ACCESSION NUMBER: SWISS-Prot / AAB26420
  ref <309>: DATABASE ENTRY DATE: 2000-05-30
MANNASLEQDQNHCSAINNSIPLTQGKLPTLTLSGKIRVTVTFFLFLLSTAFNASFLVKLQRWTQKRKKGKKLSRMKVLLKHLTLANLLETLIVMPLDGMWNITVQWYAGEFLCKVLSYLKLFSMYAPAFMMVVISLDRSLAVTQPLAVQSKSKLERSMTSLAWILSIVFAGPQLYIFRMIYLADGSGPAVFSQCVTHCSFPQWWHEAFYNFFTFSCLFIIPLLIMLICNAKIIFALTRVLHQDPRKLQLNQSKNNIPRARLRTLKMTVAFGTSFVICWTPYYVLGIWYWFDPEMLNRVSEPVNHFFFLFAFLNPCFDPLIYGYFSL

SEQ ID NO: 7640 - DNA, 2735 bp, Homo sapiens
  ref <308>: DATABASE ACCESSION NUMBER: Refseq / NM_000406
  ref <309>: DATABASE ENTRY DATE: 2002-11-05
ttggttgctggtccacttacaaacacttttcatatttgtatgtctttccaatggttatcctgttttgttcatttcaggcatatggccctgatcagattaactgacatgatgtatatgcaaagccttttgagttcttcagaaaaataaattatcttattcaagactgattgcttataaggaacttattatagctaatatagtaggcacaattttttttgtaattctcctagatgagtcagaacttagttttgatgtaggtaaaaattttatggtcacaaatctcaggtgtgagaaaatctctttccttgatactctatataaatagaggatataaatatttcaagtctggaagtagtgagagaagctggtaattctggacatatagtgacagtcaaaaaggagctcaggtacaggactggtctaagctgctcaagattcaggagacagccagtacacagagaagctgaggaaataatacagatatatctaaaacacttatctaaccttctgtggtaacaagctccttaaaggggctggatgatgttgtgttcactttttatcaccagcaaaggctaagataatgtatatagtaaatatttagtaaccatttattaaataaataaatatttaagacagaataaacaagtataataaatgaaccaataagaatgcaccatctaagtcaaaatagccacttttatccttaacattgtacctgctttggctgctgcagaagcaaacttgttggcattagacaaatcaagctggtgatttaataaattccaatgtaagtcttaccagtattgatgaataactatccagcactcaccatgaaagttaaagaagcaacacagaaaaagttcctaagtggtcccaatttgaaatgatcagataacctataaaagaacatattcatattatactaacataaacacatataaatgcacttacagcagttacacagtattctcttcaataactagtttccttatgcattaatgtgtaataacagcaactacaatatttagataattataaaaaccaaggcaataatttaaaaactgattaaccgttttactctaacttaagcatggattggatcagtaagattgattaataaatttgaatgcagtcagttggattgattctaatttaaagttttaatttgttgtagaataattttaagtgaatatatttgtccagtgttcgagtgctcaacagtgtgtttgaaaaggaaaacaaagaatgttttgagaatgtgttaattccttaagacaatggattttaattggatctgttgttttcatttttcttcattatcattatacatctgtatgttggacagaacactaacactaaatagtttttagaaagtgttttttgaagttatttaaatcataatatcatgactgacttttgaattcaaaattaggctgtgactatccttcttcacttaggaagagtgttgtgaaagccagaccatctgctgaggtgctacagttacatgtggccctcagaatgcgtttggcctgctctgttttagcactctgttggattaccaatacacaaaacaagttaacctttgatctttcacattaagtatctcagggacaaaatttgacatacgtctaaacctgtgacgtttccatctaaagaaggcagaaataaaacatggactttagattcggttacaataaaatatcagatgcaccagagacacaaggcttgaagctctgtcctgggaaaatatggcaaacagtgcctctcctgaacagaatcaaaatcactgttcagccatcaacaacagcatcccactgatgcagggcaacctccccactctgaccttgtctggaaagatccgagtgacggttactttcttcctttttctgctctctgcgacctttaatgcttctttcttgttgaaacttcagaagtggacacagaagaaagagaaagggaaaaagctctcaagaatgaagctgctcttaaaacatctgaccttagccaacctgttggagactctgattgtcatgccactggatgggatgtggaacattacagtccaatggtatgctggagagttactctgcaaagttctcagttatctaaagcttttctccatgtatgccccagccttcatgatggtggtgatcagcctggaccgctccctggctatcacgaggcccctagctttgaaaagcaacagcaaagtcggacagtccatggttggcctggcctggatcctcagtagtgtctttgcaggaccacagttatacatcttcaggatgattcatctagcagacagctctggacagacaaaagttttctctcaatgtgtaacacactgcagtttttcacaatggtggcatcaagcattttataactttttcaccttcagctgcctcttcatcatccctcttttcatcatgctgatctgcaatgcaaaaatcatcttcaccctgacacgggtccttcatcaggacccccacgaactacaactgaatcagtccaagaacaatataccaagagcacggctgaagactctaaaaatgacggttgcatttgccacttcatttactgtctgctggactccctactatgtcctaggaatttggtattggtttgatcctgaaatgttaaacaggttgtcagacccagtaaatcacttcttctttctctttgcctttttaaacccatgctttgatccacttatctatggatatttttctctgtga

SEQ ID NO: 7641 - protein, 328 aa, Homo sapiens
  ref <308>: DATABASE ACCESSION NUMBER: SWISS-Prot / P30968
  ref <309>: DATABASE ENTRY DATE: 2002-06-15
MANSASPEQNQNHCSAINNSIPLMQGNLPTLTLSGKIRVTVTFFLFLLSATFNASFLLKLQKWTQKKEKGKKLSRMKLLLKHLTLANLLETLIVMPLDGMWNITVQWYAGELLCKVLSYLKLFSMYAPAFMMVVISLDRSLAITRPLALKSNSKVGQSMVGLAWILSSVFAGPQLYIFRMIHLADSSGQTKVFSQCVTHCSFSQWWHQAFYNFFTFSCLFIIPLFIMLICNAKIIFTLTRVLHQDPHELQLNQSKNNIPRARLKTLKMTVAFATSFTVCWTPYYVLGIWYWFDPEMLNRLSDPVNHFFFLFAFLNPCFDPLIYGYFSL

SEQ ID NO: 7642 - DNA, 2672 bp, Rattus norvegicus
  ref <308>: DATABASE ACCESSION NUMBER: EMBL / S62096
  ref <309>: DATABASE ENTRY DATE: 2000-03-04
ccggactacctctggaccccctcccctgtccccaacgctgagccgaaaccatgcatgggcgcctgaaggtgaagacgtcggaagagcaggcagaggccaaaaggctagaacgagagcagaagctaaagctctaccagtcagccactcaagctgtcttccagaagcgtcaggctggtgagctggatgaatcagtgctagaactgacaagccagattctgggagccaaccctgattttgccaccctctggaactgtcgaagagaagtactccagcacctggaaaccgagaagtcccctgaggagtcagctgctcttgtgaaggcagaactgggcttcctagagagctgtcttcgtgtgaaccctaagtcctatggcacttggcaccaccgctgctggctgctgagtcgcctgcctgagcccaactgggcccgggagctggagctatgcgctcgcttcctcgaggccgatgagcggaactttcattgctgggactatcggcgatttgtagccgcacaggctgctgttgcccctgcagaggaactagccttcactgacagcctcatcacccgtaacttctccaactattcctcctggcattatcgctcctgcctcttgccacagctgcacccccagccagactctggcccacagggtcggctccctgaaaatgtactgctgaaagagctggagttggtgcagaatgccttctttactgaccccaacgatcagagtgcctggttctatcaccgctggctcctgggtcgggcggagccccacgatgttctatgctgtgtgcatgtgagccgggaggaggcctgtctgtcggtctgcttttctcgtcccctgacagtgggctccagaatggggaccttgctactcatggttgatgaggcacctttgagtgtggagtggaggactccagatggcaggaaccggcccagccatgtctggctctgtgacctgcctgctgcctctctcaatgaccagttgccccagcacacgtttcgtgtcatctggacaggaagtgatagccagaaggagtgtgtgcttttaaaagaccgcccagaatgctggtgccgagactcagccactgatgaacagctattcaggtgtgagctgtcagtggaaaagtccacagtgctgcagtctgagcttgaatcctgtaaggagctgcaggaactagagcctgagaataaatggtgcctgctgaccatcatcctgctgatgcgagcactggaccccctcctctatgagaaggaaacactgcagtacttcagtaccctcaaagctgtggacccaatgagagcagcttacttggatgacctgcgcagcaagttcttgctggagaacagtgttctcaagatggagtacgctgatgtacgcgtgctgcacctggctcacaaggatctcacagtgctctgccacctggaacaactgctcttggtcactcatcttgacctgtcccataatcgactccgagccttacccccagccctggctgctctgcgctgtcttgaggtgctgcaggccagtgacaatgccctggagaacgtggatggtgtggctaaccttccccggctacaagagctgttactatgtaataaccgcctccaacagtctgcagcaatccagcctcttgtctcctgccccaggctagtcctcctcaacctgcagggcaactcgctgtgccaagaagagggcatccaggagcgtttggctgagatgctaccgtctgtcagcagcatcctcacctaggaggccctgcctcatcctcacctttaacttactgggactgaataaagtgtggagaggcccctctaccacttgaccgctgccatgacaacactacctccattaccaccactgttttgaagaaaggaagggaggggctctgtggtgagggtctactgccctgtgatactctctacccagagcctctgtgttcatgtctggtcaggaccacagctggatttgagttcatcatcagttttggggctgtcatgggagcctagcttgagactgggatagaaatcgggctcgggttatgatttgggctgagcctcagaacagctgtctctagctggaagagactgtgaacctttctctcgtgagtctgccaacttcagactttgtgtcctgacccctgcttcattcacaacggaataggctcaggacctcagtgtttgagaaagaatgtgtcagggcatcttgccccacctggttaagatgacaatattggtccttgtggattacattctatggttgaaaagcccttgggaacccttggtcccgtttgatcctcatacactcagggatgggatgattagaacatttgaactgatgaagagactgttctgacccgcccagggttactgagctctgcatgcggaagccagatactaaccacgttgcttcagtgatttagcccttttcctgtttctgtattaatgtagaatgattaaacagaggcccggcctcaactcgccaaggtatttagataggagcctactcctgagttgcatccacaccccaccactcggtgttgtgactttgaaagctgcagggaacaaggcctccagggagtggctcaagggtttgggcactgagtcaaacttggcatagtgagggaagatggtgactgattaaaacgagaagagtgtaaaaaaaaaaaaa

SEQ ID NO: 7643 - protein, 567 aa, Rattus norvegicus
  ref <308>: DATABASE ACCESSION NUMBER: SWISS-Prot / AAB27018
  ref <309>: DATABASE ENTRY DATE: 2001-10-16
MHGRLKVKTSEEQAEAKRLEREQKLKLYQSATQAVFQKRQAGELDESVLELTSQILGANPDFATLWNCRREVLQHLETEKSPEESAALVKAELGFLESCLRVNPKSYGTWHHRCWLLSRLPEPNWARELELCARFLEADERNFHCWDYRRFVAAQAAVAPAEELAFTDSLITRNFSNYSSWHYRSCLLPQLHPQPDSGPQGRLPENVLLKELELVQNAFFTDPNDQSAWFYHRWLLGRAEPHDVLCCVHVSREEACLSVCFSRPLTVGSRMGTLLLMVDEAPLSVEWRTPDGRNRPSHVWLCDLPAASLNDQLPQHTFRVIWTGSDSQKECVLLKDRPECWCRDSATDEQLFRCELSVEKSTVLQSELESCKELQELEPENKWCLLTIILLMRALDPLLYEKETLQYFSTLKAVDPMRAAYLDDLRSKFLLENSVLKMEYADVRVLHLAHKDLTVLCHLEQLLLVTHLDLSHNRLRALPPALAALRCLEVLQASDNALENVDGVANLPRLQELLLCNNRLQQSAAIQPLVSCPRLVLLNLQGNSLCQEEGIQERLAEMLPSVSSILT

SEQ ID NO: 7644 - DNA, 2067 bp, Homo sapiens
  misc_feature (1)..(2067): n=a, c, g or t
  ref <308>: DATABASE ACCESSION NUMBER: Refseq / NM_004581
  ref <309>: DATABASE ENTRY DATE: 2000-11-01
gaattccctcgcgctctggnccgggcgaatcgggntataggaagggccacacggatggaagtcctagtccgggtgctcacctcttgtggaacgtgcaaagcctgtcccaggacctctctacactctgggggtctctgcccaggcacgcttgctgcttccggacacagctgtgggcggagctagtaggggcgggctacgtgattgacacttctctcctcagacttcaagggctaccactggacccttcccctgtcttgaaccctgagccggcaccatgcacggacgcctgaaggtgaagacgtcagaagagcaggcggaggccaaaaggctagagcgagagcagaagctgaagctataccagtcagccacccaggccgtattccagaagcgccaggctggtgagctggatgagtccgtgctggaactgacaagccagattctgggagccaaccctgattttgccaccctctggaactgccgacgagaggtgctccagcagctggagactcagaagtctcctgaagagttggctgctctggtgaaggcagaactgggcttcctggagagctgcctgcgggtgaaccccaagtcttatggtacctggcaccaccgatgctggctgctaggccgcctgcctgagcccaactggacccgagagctggagctctgtgcccgtttcctggaggtggatgagcggaactttcactgctgggactatcggcggtttgtggccacacaggcagccgtgccccctgcagaagagctagccttcactgacagcctcatcacccgaaacttctccaactactcttcctggcattaccgctcctgtctcttgccccagttgcacccccagccggattctggaccacaggggcgcctccctgaggatgtgctgctcaaagagctggagctggtgcagaatgccttcttcactgaccccaatgaccagagtgcctggttttatcaccggtggctcctaggtcgagctgacccccaggatgcactgcgctgtctgcatgtgagccgggacgaggcctgtctgactgtctccttctctcggcccctcttagtgggctccaggatggagatcttgctgctcatggttgatgattctcccctgattgtggagtggaggaccccagatggcaggaaccggcccagccatgtctggctctgtgacctgcctgctgcctccctcaacgaccagttgccccaacatacatttcgcgtcatttggacagcaggcgatgtccagaaagaatgcgtgcttttaaaaggccgccaggagggctggtgccgggactccacgacagacgagcagctattcaggtgtgagctgtcagtggagaagtccacagtgctgcagtctgagctggaatcctgtaaggagctgcaggagctggagcctgagaataaatggtgcctgcttaccatcatcctgctgatgcgggcactggaccccctgctgtatgagaaggagaccctgcagtacttccagaccctcaaggccgtggaccccatgcgggcaacgtatctggatgacctgcgcagcaagttcttgctggagaatagcgtgctcaagatggagtatgccgaggtgcgtgtgctgcacctggctcacaaggatctgacagtgctctgccatctggaacagctgctcttggtcacccatcttgacttgtcacacaatcgcctccgaaccctgccacctgcactggctgccctgcgctgccttgaggtgctgcaggccagtgataatgcaatagagtccctggacggcgtcaccaacctaccccggctgcaggagctgctactgtgcaacaaccgcctccagcagcctgcagtgctccagcctcttgcctcctgccccaggctggtcctcctcaacctgcagggtaacccgctgtgccaagcggtgggcatcttggagcaactggctgaactgctgccttcagttagcagcgtcctcacctaagaggccctgccccctacccttgccctttaacttattgggactgaataaagaatggagaggcccctctcaggctaccaaaaaaaaaaaaa

SEQ ID NO: 7645 - protein, 567 aa, Homo sapiens
  ref <308>: DATABASE ACCESSION NUMBER: SWISS-Prot / Q92696
  ref <309>: DATABASE ENTRY DATE: 2002-06-15
MHGRLKVKTSEEQAEAKRLEREQKLKLYQSATQAVFQKRQAGELDESVLELTSQILGANPDFATLWNCRREVLQQLETQKSPEELAALVKAELGFLESCLRVNPKSYGTWHHRCWLLGRLPEPNWTRELELCARFLEVDERNFHCWDYRRFVATQAAVPPAEELAFTDSLITRNFSNYSSWHYRSCLLPQLHPQPDSGPQGRLPEDVLLKELELVQNAFFTDPNDQSAWFYHRWLLGRADPQDALRCLHVSRDEACLTVSFSRPLLVGSRMEILLLMVDDSPLIVEWRTPDGRNRPSHVWLCDLPAASLNDQLPQHTFRVIWTAGDVQKECVLLKGRQEGWCRDSTTDEQLFRCELSVEKSTVLQSELESCKELQELEPENKWCLLTIILLMRALDPLLYEKETLQYFQTLKAVDPMRATYLDDLRSKFLLENSVLKMEYAEVRVLHLAHKDLTVLCHLEQLLLVTHLDLSHNRLRTLPPALAALRCLEVLQASDNAIESLDGVTNLPRLQELLLCNNRLQQPAVLQPLASCPRLVLLNLQGNPLCQAVGILEQLAELLPSVSSVLT

SEQ ID NO: 7646 - DNA, 1344 bp, Rattus norvegicus
  ref <308>: DATABASE ACCESSION NUMBER: EMBL / S62097
  ref <309>: DATABASE ENTRY DATE: 2000-03-04
cggcacgaggacatgggcacacagcagaaggacgtcaccatcaagtcagatgcgcctgacaccctgctgctcgagaagcatgctgattatatcgcctcgtacggctcaaagaaagatgattatgaatactgcatgtccgaatacttgagaatgagcggcgtctactggggcctgacagtgatggacctcatggggcagcttcatcggatgaataaagaggagatactggtgtttatcaagtcgtgccagcatgagtgtgggggagtcagtgccagcatcgggcacgacccccaccttctctacacgctcagtgctgtccagattctcactctgtatgatagcatccatgtaatcaacgtagacaaagtggtagcctatgttcagagtctacagaaagaagatggttcctttgctggagacatctggggagaaatcgatacaagattctcattttgtgcagtggcaactttggctctcttgggcaaacttgatgctattaatgtggaaaaggccattgaatttgttttgtcctgtatgaactttgatggtggatttgggtgcagaccaggctctgaatctcacgccggacagatctattgttgcacaggattcctggccataactagtcagttgcatcaagtgaactccgacctacttggttggtggctttgtgaacgacagttgccctctggcggactcaatggaagacccgagaagttaccagatgtgtgctattcctggtgggtgttggcctccttaaagataatcgggaggcttcattggattgacagagaaaagcttcgaagcttcatcttggcatgtcaagatgaagagacaggagggtttgcagacaggccaggagacatggtggatccctttcacaccttgtttggcattgctggattgtcacttctgggggaagagcagatcaagcctgtcagccctgtcttttgcatgcctgaagaagtgctacagagggtgaatgtccagcctgaactagtgagctagtccgaggggaagagccttcggtgtgcagtatcagttactgtggttatcaaacccagaagtgacttaatattttgtatatcatatgtcaatgataaattatataagtattgtaaaataaatgtcatatttagatctttagtgttctgagtacagtttctgtcaatactgtttgttaatgtctaacagcagcaaacttaaaaagctagtatttaactgccatctccctgtgtccttttgacctgtaacaatgacgggaaatgatttctgttaataaagatgatcaaagtgagtgaaactcatgatttaaataaaagatgcataaaatcgagctcgtcc

SEQ ID NO: 7647 - protein, 331 aa, Rattus norvegicus
  ref <308>: DATABASE ACCESSION NUMBER: SWISS-Prot / AAB27019
  ref <309>: DATABASE ENTRY DATE: 2001-10-16
MGTQQKDVTIKSDAPDTLLLEKHADYIASYGSKKDDYEYCMSEYLRMSGVYWGLTVMDLMGQLHRMNKEEILVFIKSCQHECGGVSASIGHDPHLLYTLSAVQILTLYDSIHVINVDKVVAYVQSLQKEDGSFAGDIWGEIDTRFSFCAVATLALLGKLDAINVEKAIEFVLSCMNFDGGFGCRPGSESHAGQIYCCTGFLAITSQLHQVNSDLLGWWLCERQLPSGGLNGRPEKLPDVCYSWWVLASLKIIGRLHWIDREKLRSFILACQDEETGGFADRPGDMVDPFHTLFGIAGLSLLGEEQIKPVSPVFCMPEEVLQRVNVQPELVS

SEQ ID NO: 7648 - DNA, 1179 bp, Homo sapiens
  ref <308>: DATABASE ACCESSION NUMBER: EMBL / X98001
  ref <309>: DATABASE ENTRY DATE: 1996-11-25
gaattcggcacgaggcggttagacatgggcactccacagaaggatgttattatcaagtcagatgcaccggacactttgttattggagaaacatgcagattatatcgcatcctatggctcaaagaaagatgattatgaatactgtatgtctgagtatttgagaatgagtggcatctattggggtctgacagtaatggatctcatgggacaacttcatcgcatgaatagagaagagattctggcatttattaagtcttgccaacatgaatgtggtggaataagtgctagtatcggacatgatcctcatcttttatacactcttagtgctgtccagattcttacgctgtatgacagtattaatgttattgacgtaaataaagttgtggaatatgttaaaggtctacagaaagaagatggttcttttgctggagatatttggggagaaattgacacaagattctctttttgtgcggtggcaactttggctttgttggggaagcttgatgctattaatgtggaaaaggcaatcgaatttgttttatcctgtatgaactttgacggtggatttggttgcagaccaggttctgaatcccatgctgggcagatctattgttgcacaggatttctggctattacaagtcagttgcatcaagtaaattctgatttacttggctggtggctttgtgaacgacaattaccctcaggcgggctcaatggaaggccggagaagttaccagatgtatgctactcatggtgggtcctggcttccctaaagataattggaagacttcattggattgatagagagaaactgcgtaatttcattttagcatgtcaagatgaagaaacggggggatttgcagacaggccaggagatatggtggatccttttcataccttatttggaattgctggattgtcacttttgggagaagaacagattaaacctgttaatcctgtcttttgcatgcctgaagaagtgcttcagagagtgaatgttcagcctgagctagtgagctagattcattgaattgaaagttgcatagtatagttttgccattttaacatttctgtatttgaagtgcttatcgaatctaaaagtgactactgttaatattttgtatattgtgttaaattaattttaataaattatataattatgcatattgtaaaataaaaa

SEQ ID NO: 7649 - protein, 331 aa, Homo sapiens
  ref <308>: DATABASE ACCESSION NUMBER: SWISS-Prot / P53611
  ref <309>: DATABASE ENTRY DATE: 2002-06-15
MGTPQKDVIIKSDAPDTLLLEKHADYIASYGSKKDDYEYCMSEYLRMSGIYWGLTVMDLMGQLHRMNREEILAFIKSCQHECGGISASIGHDPHLLYTLSAVQILTLYDSINVIDVNKVVEYVKGLQKEDGSFAGDIWGEIDTRFSFCAVATLALLGKLDAINVEKAIEFVLSCMNFDGGFGCRPGSESHAGQIYCCTGFLAITSQLHQVNSDLLGWWLCERQLPSGGLNGRPEKLPDVCYSWWVLASLKIIGRLHWIDREKLRNFILACQDEETGGFADRPGDMVDPFHTLFGIAGLSLLGEEQIKPVNPVFCMPEEVLQRVNVQPELVS

SEQ ID NO: 7650 - DNA, 1343 bp, Rattus norvegicus
  ref <308>: DATABASE ACCESSION NUMBER: EMBL / S63521
  ref <309>: DATABASE ENTRY DATE: 2000-03-04
gaattccaaagattcagcagttggtgaaagagttcttcaatggcaaggagccgtcccgtggcatcaacccagatgaggctgtagcatatggtgccgctgtccaggctggtgtcctctctggtgatcaagatacaggtgacctggttctgcttgatgtgtgtcctcttacacttggtattgaaactgtgggaggtgtcatgacaaaactgattccgaggaacactgtggtgcccaccaagaagtctcagatcttctccacagcttctgataatcagcccaccgtaacaatcaaggtctacgaaggtgaacgacccctgacaaaagacaatcaccttctgggtacatttgatctgactggaatccctcctgctccccgtggggtaccccagattgaagtcacctttgagatagatgtgaatggtattcttcgagtgacagctgaagacaaagggacaggaaacaaaaacaaaatcaccatcaccaatgaccaaaaccgcctgacccctgaagaaattgaaaggatggtcaatgacgccgagaagtttgctgaggaagacaaaaagctcaaagagcgcattgacacgaggaatgaattggaaagctatgcttactctcttaagaaccagatcggagataaagagaagctgggaggtaagctgtctcctgaagataaagagaccatggagaaagctgtagaggaaaagatcgaatggctggaaagccaccaggatgcagacattgaagactttaaagctaaaaagaaggaactagaagaaattgttcagccaattatcagcaaactctatggaagtggaggccctcccccaactggtgaagaggatacatcagaaaaagatgagttgtaggtgcactgatctgctagagctgtaatattgtaaatactggactcaggaactttcgttgggagaaaattgagagaacttaagtctcgaatgtaattggaatcttcacctcagagtggagttgaaaatgctatagcccaagtggctgtttactgcttttcattagcagttgctcacgtgtcttggggtcagggagaggaggaattggctattttaaaattggggaaaagctgggtcagggtgtgtgttcaccttggatatgttctatttaacggttgggtcatgcacatctggtgtaggaacttttttctaccataagtgacaccaataaatgtttgttatttacactggtctagtttttgtgaaaagcttgtaattatatccatcttttattttagataactaaaatttaagactggaaaaaaaaaaaaaaaaaaaaaaaaaaaaaaaaaaaaaaaaaaaaaaaaaaaaaaaaaaaaa

SEQ ID NO: 7651 - DNA, 1343 bp, Rattus norvegicus; identical to SEQ ID NO: 7650
  ref <308>: DATABASE ACCESSION NUMBER: EMBL / S63521
  ref <309>: DATABASE ENTRY DATE: 2000-03-04

SEQ ID NO: 7652 - DNA, 2018 bp, Rattus norvegicus
  ref <308>: DATABASE ACCESSION NUMBER: EMBL / S65355
  ref <309>: DATABASE ENTRY DATE: 2000-03-04
ccccgagcgaactgctgaggatccgctgtctggcattctctcagccttttgtccgagccagagctgcattcagaggagagaggcccgctaaggagcagctggactcctgctgcgagccgaaagccccctaaggcagttgaggacctgggaaggaggctccctgctggtggcgcttctcctggtgcttccaatccgtgcgagactgaaaacggcggagcggctacgggactctcacaggagcaagctgcaacatgcaatcgtccgcaagccggtgcggacgcgccttggtggcgctgctgctggcctgtggcttgttgggggtatggggagagaaaagaggattcccacctgcccaggccacaccatctcttctcgggactaaagaagttatgacgccacccactaagacctcctggactagaggttccaactccagtctgatgcgttcctccgcacctgcggaggtgaccaaaggagggagggtggctggagtcccgccaagatccttccctcctccgtgccaacgaaaaattgagatcaacaagacttttaaatacatcaacacgattgtatcatgcctcgtgttcgtgctaggcatcatcgggaactccacactgctaagaatcatctacaagaacaagtgcatgagaaatggtcccaatatcttgatcgccagcctggctctgggagatctgctacacatcatcatcgacattcccattaatgcctacaagctgctggcaggggactggccatttggagctgagatgtgcaagctggtgcccttcatacagaaggcttctgtggggatcacagtgttgagtctatgtgctctaagtattgacagatatcgagctgttgcttcttggagtcgaattaaaggaattggggttccaaaatggacagcagtagaaattgttttaatttgggtggtctctgtggttctggctgtccctgaagccataggttttgatgtgattacgtcggactacaaaggaaagcccctaagggtctgcatgcttaatccctttcagaaaacagccttcatgcagttttacaagacagccaaagactggtggctgttcagtttctacttctgcttgccgctagccatcactgcgatcttttacaccctaatgacctgtgagatgctcagaaagaaaagtggtatgcagattgccttgaatgaccacttaaagcagagacgagaagtggccaagacagtattctgcctggtcctcgtgtttgccctctgttggcttccccttcacctcagcaggattctgaagctcaccctttatgaccagagcaatcctcagaggtgtgaacttctgagttttttgctggttttggactacattggtatcaacatggcttctttgaattcctgcattaatccaatcgctctgtatttggtgagcaagagattcaaaaactgctttaagtcgtgtttgtgctgctggtgccaaacgtttgaggaaaaacagtccttagaggagaagcaatcctgcttgaagttcaaagctaacgatcacggatacgacaacttccgctccagcaataaatacagctcatcttgaaggaaggaacactcactgaatctcattgtcctcatcgtggacagatagcattaaaacaaaatgaaacctttgccaaacccaaacggaaaaccgtgcttgcggaaaggtgtgcacgcatgggagagggattgttttttaaccgttctaactttccacacctgatatttcacgggctgtttacaacctaagaaagccatgggaatgaatgaagcctcgggaaagcacttagattcttagtcagcacttcagcacggctcttaaaagccctcactgcactcacagcccacttacatttaaaaacaagaactcaaactctattcaggggtttattatccagtcctatgaatctggatacaggaatgcatgacattgcaaaacaattcttaaagcaaagtttcaattgctcgatttgagacaaaaaacaaaacaaaaaaaaaa

SEQ ID NO: 7653 - protein, 442 aa, Rattus norvegicus
  ref <308>: DATABASE ACCESSION NUMBER: SWISS-Prot / AAB28172
  ref <309>: DATABASE ENTRY DATE: 1998-07-15
MQSSASRCGRALVALLLACGLLGVWGEKRGFPPAQATPSLLGTKEVMTPPTKTSWTRGSNSSLMRSSAPAEVTKGGRVAGVPPRSFPPPCQRKIEINKTFKYINTIVSCLVFVLGIIGNSTLLRIIYKNKCMRNGPNILIASLALGDLLHIIIDIPINAYKLLAGDWPFGAEMCKLVPFIQKASVGITVLSLCALSIDRYRAVASWSRIKGIGVPKWTAVEIVLIWVVSVVLAVPEAIGFDVITSDYKGKPLRVCMLNPFQKTAFMQFYKTAKDWWLFSFYFCLPLAITAIFYTLMTCEMLRKKSGMQIALNDHLKQRREVAKTVFCLVLVFALCWLPLHLSRILKLTLYDQSNPQRCELLSFLLVLDYIGINMASLNSCINPIALYLVSKRFKNCFKSCLCCWCQTFEEKQSLEEKQSCLKFKANDHGYDNFRSSNKYSSS

SEQ ID NO: 7654 - DNA, 4286 bp, Homo sapiens
  ref <308>: DATABASE ACCESSION NUMBER: Refseq / NM_000115
  ref <309>: DATABASE ENTRY DATE: 2001-02-03
gagacattccggtgggggactctggccagcccgagcaacgtggatcctgagagcactcccaggtaggcatttgccccggtgggacgccttgccagagcagtgtgtggcaggcccccgtggaggatcaacacagtggctgaacactgggaaggaactggtacttggagtctggacatctgaaacttggctctgaaactgcgcagcggccaccggacgccttctggagcaggtagcagcatgcagccgcctccaagtctgtgcggacgcgccctggttgcgctggttcttgcctgcggcctgtcgcggatctggggagaggagagaggcttcccgcctgacagggccactccgcttttgcaaaccgcagagataatgacgccacccactaagaccttatggcccaagggttccaacgccagtctggcgcggtcgttggcacctgcggaggtgcctaaaggagacaggacggcaggatctccgccacgcaccatctcccctcccccgtgccaaggacccatcgagatcaaggagactttcaaatacatcaacacggttgtgtcctgccttgtgttcgtgctggggatcatcgggaactccacacttctgagaattatctacaagaacaagtgcatgcgaaacggtcccaatatcttgatcgccagcttggctctgggagacctgctgcacatcgtcattgacatccctatcaatgtctacaagctgctggcagaggactggccatttggagctgagatgtgtaagctggtgcctttcatacagaaagcctccgtgggaatcactgtgctgagtctatgtgctctgagtattgacagatatcgagctgttgcttcttggagtagaattaaaggaattggggttccaaaatggacagcagtagaaattgttttgatttgggtggtctctgtggttctggctgtccctgaagccataggttttgatataattacgatggactacaaaggaagttatctgcgaatctgcttgcttcatcccgttcagaagacagctttcatgcagttttacaagacagcaaaagattggtggctgttcagtttctatttctgcttgccattggccatcactgcatttttttatacactaatgacctgtgaaatgttgagaaagaaaagtggcatgcagattgctttaaatgatcacctaaagcagagacgggaagtggccaaaaccgtcttttgcctggtccttgtctttgccctctgctggcttccccttcacctcagcaggattctgaagctcactctttataatcagaatgatcccaatagatgtgaacttttgagctttctgttggtattggactatattggtatcaacatggcttcactgaattcctgcattaacccaattgctctgtatttggtgagcaaaagattcaaaaactgctttaagtcatgcttatgctgctggtgccagtcatttgaagaaaaacagtccttggaggaaaagcagtcgtgcttaaagttcaaagctaatgatcacggatatgacaacttccgttccagtaataaatacagctcatcttgaaagaagaactattcactgtatttcattttctttatattggaccgaagtcattaaaacaaaatgaaacatttgccaaaacaaaacaaaaaactatgtatttgcacagcacactattaaaatattaagtgtaattattttaacactcacagctacatatgacattttatgagctgtttacggcatggaaagaaaatcagtgggaattaagaaagcctcgtcgtgaaagcacttaattttttacagttagcacttcaacatagctcttaacaacttccaggatattcacacaacacttaggcttaaaaatgagctcactcagaatttctattctttctaaaaagagatttatttttaaatcaatgggactctgatataaaggaagaataagtcactgtaaaacagaacttttaaatgaagcttaaattactcaatttaaaattttaaaatcctttaaaacaacttttcaattaatattatcacactattatcagattgtaattagatgcaaatgagagagcagtttagttgttgcatttttcggacactggaaacatttaaatgatcaggagggagtaacagaaagagcaaggctgtttttgaaaatcattacactttcactagaagcccaaacctcagcattctgcaatatgtaaccaacatgtcacaaacaagcagcatgtaacagactggcacatgtgccagctgaatttaaaatataatacttttaaaaagaaaattattacatcctttacattcagttaagatcaaacctcacaaagagaaatagaatgtttgaaaggctatcccaaaagacttttttgaatctgtcattcacataccctgtgaagacaatactatctacaattttttcaggattattaaaatcttcttttttcactatcgtagcttaaactctgtttggttttgtcatctgtaaatacttacctacatacactgcatgtagatgattaaatgagggcaggccctgtgctcatagctttacgatggagagatgccagtgacctcataataaagactgtgaactgcctggtgcagtgtccacatgacaaaggggcaggtagcaccctctctcacccatgctgtggttaaaatggtttctagcatatgtataatgctatagttaaaatactatttttcaaaatcatacagattagtacatttaacagctacctgtaaagcttattactaatttttgtattatttttgtaaatagccaatagaaaagtttgcttgacatggtgcttttctttcatctagaggcaaaactgctttttgagaccgtaagaacctcttagctttgtgcgttcctgcctaatttttatatcttctaagcaaagtgccttaggatagcttgggatgagatgtgtgtgaaagtatgtacaagagaaaacggaagagagaggaaatgaggtggggttggaggaaacccatggggacagattcccattcttagcctaacgttcgtcattgcctcgtcacatcaatgcaaaaggtcctgattttgttccagcaaaacacagtgcaatgttctcagagtgactttcgaaataaattgggcccaagagctttaactcggtcttaaaatatgcccaaatttttactttgtttttcttttaataggctgggccacatgttggaaataagctagtaatgttgttttctgtcaatattgaatgtgatggtacagtaaaccaaaacccaacaatgtggccagaaagaaagagcaataataattaattcacacaccatatggattctatttataaatcacccacaaacttgttctttaatttcatcccaatcactttttcagaggcctgttatcatagaagtcattttagactctcaattttaaattaattttgaatcactaatattttcacagtttattaatatatttaatttctatttaaattttagattatttttattaccatgtactgaatttttacatcctgataccctttccttctccatgtcagtatcatgttctctaattatcttgccaaattttgaaactacacacaaaaagcatacttgcattatttataataaaattgcattcagtggctttttaaaaaaaatgtttgattcaaaactttaacatactgataagtaagaaacaattataatttctttacatactcaaaaccaagatagaaaaaggtgctatcgttcaacttcaaaacatgtttcctagtattaaggactttaatatagcaacagacaaaattattgttaacatggatgttacagctcaaaagatttataaaagattttaacctattttctcccttattatccactgctaatgtggatgtatgttcaaacaccttttagtattgatagcttacatatggccaaaggaatacagtttatagcaaaacatgggtatgctgtagctaactttataaaagtgtaatataacaatgtaaaaaattatatatctgggaggattttttggttgcctaaagtggctatagttactgattttttattatgtaagcaaaaccaataaaaatttaagtttttttaacaactaccttatttttcactgtacagacactaattcattaaatactaattgattgtttaaaagaaatataaatgtgacaagtggacattatttatgttaaatatacaattatcaagcaagtatgaagttattcaattaaaatgccacatttctggtctctggg

SEQ ID NO: 7655 - protein, 442 aa, Homo sapiens
  ref <308>: DATABASE ACCESSION NUMBER: SWISS-Prot / P24530
  ref <309>: DATABASE ENTRY DATE: 2002-06-15
MQPPPSLCGRALVALVLACGLSRIWGEERGFPPDRATPLLQTAEIMTPPTKTLWPKGSNASLARSLAPAEVPKGDRTAGSPPRTISPPPCQGPIEIKETFKYINTVVSCLVFVLGIIGNSTLLRIIYKNKCMRNGPNILIASLALGDLLHIVIDIPINVYKLLAEDWPFGAEMCKLVPFIQKASVGITVLSLCALSIDRYRAVASWSRIKGIGVPKWTAVEIVLIWVVSVVLAVPEAIGFDIITMDYKGSYLRICLLHPVQKTAFMQFYKTAKDWWLFSFYFCLPLAITAFFYTLMTCEMLRKKSGMQIALNDHLKQRREVAKTVFCLVLVFALCWLPLHLSRILKLTLYNQNDPNRCELLSFLLVLDYIGINMASLNSCINPIALYLVSKRFKNCFKSCLCCWCQSFEEKQSLEEKQSCLKFKANDHGYDNFRSSNKYSSS

SEQ ID NO: 7656 - DNA, 2018 bp, Rattus norvegicus; identical to SEQ ID NO: 7652
  ref <308>: DATABASE ACCESSION NUMBER: EMBL / S65355
  ref <309>: DATABASE ENTRY DATE: 2000-03-04

SEQ ID NO: 7657 - protein, 442 aa, Rattus norvegicus; identical to SEQ ID NO: 7653
  ref <308>: DATABASE ACCESSION NUMBER: SWISS-Prot / AAB28172
  ref <309>: DATABASE ENTRY DATE: 1998-07-15

SEQ ID NO: 7658 - DNA, 4286 bp, Homo sapiens; identical to SEQ ID NO: 7654
  ref <308>: DATABASE ACCESSION NUMBER: Refseq / NM_000115
  ref <309>: DATABASE ENTRY DATE: 2001-02-03

SEQ ID NO: 7659 - protein, 442 aa, Homo sapiens; identical to SEQ ID NO: 7655
  ref <308>: DATABASE ACCESSION NUMBER: SWISS-Prot / P24530
  ref <309>: DATABASE ENTRY DATE: 2002-06-15

SEQ ID NO: 7660 - DNA, 1380 bp, Rattus norvegicus
  ref <308>: DATABASE ACCESSION NUMBER: EMBL / S65555
  ref <309>: DATABASE ENTRY DATE: 2000-03-04
gaattccggccttccctccgtggctccggcgctgcccggtcccctcgggcggcagctgccatgggcaccgacagccgcgcggccggagcacttctggcgcgggccagcaccctgcacctgcagaccgggaacctgctcaactggggccgcctgcggaaaaagtgtccgtccacgcacagcgaggagcttcgagactgtatccaaaagaccttgaatgaatggagctcccaaatcagccctgatttggtcagggagtttccagatgttttggaatgtaccatgtcccatgcagtggaaaagataaaccctgatgaaagagaagaaatgaaagtttctgctaaactgttcattgtaggatcgaattcttcatcatcaactagaaatgcagttgacatggcatgctcagtccttggagttgcacagctggactctgtcatcatggcttcccctccaattgaagatggagttaatctttccttggagcatttgcagccttactgggaggaattagaaaacttagttcagagcaagaagattgttgctataggcacctcggatctagacaaaacacagttggagcagctgtaccagtgggcacaggtaaaacccaatagtaatcaagttaatcttgcctcctgctgtgtgatgccaccagatttgactgcatttgctaaacagtttgacatacagctactgactcacaatgacccaaaagaactgctctctgaggcaagtttccaggaagctcttcaagaaagcatccctgacattgaagcccaggagtgggtgccactgtggctgctgaggtactcggtcatcgtgaaaagcagaggaatcatcaagtcaaaaggatacattttgcaagccaaaagaaagggttcttaactacagctcaagctcacaactcaggggccttgtatttatctggaacataagataaaaattcatgataaaattgagatgtgtaaaaaaaaatctagctctcgcctacaaaaagcgtcactgaggcgtgaatgtggtggtttggcaatgtgttgagtttaagtacctccctggcgtctgcagcagcgcactcacaggaagcattgtattctcttcattaaactcttggtttctaactgaaatcgtctataaagaaaaatacttgcaatatatttcctttatttttatgagtaatagaaatcaagaaaatttgttttaagatatattttggcttaggcatcagggtgatgtatatacatattttttatttctaaaattcagtaactgcttcttactctatacttctataactaagcaattacattacagttgttaagacatactggaagagatttttttcctgtcgtttgacaaaataatctatctcagagtcggaat

SEQ ID NO: 7661 - protein, 274 aa, Rattus norvegicus; identical to SEQ ID NO: 7271
  ref <308>: DATABASE ACCESSION NUMBER: SWISS-Prot / AAB28225
  ref <309>: DATABASE ENTRY DATE: 2002-06-15

SEQ ID NO: 7662 - DNA, 1610 bp, Homo sapiens; identical to SEQ ID NO: 7272
  ref <308>: DATABASE ACCESSION NUMBER: Refseq / NM_002061
  ref <309>: DATABASE ENTRY DATE: 2002-11-05

SEQ ID NO: 7663 - protein, 274 aa, Homo sapiens; identical to SEQ ID NO: 7273
  ref <308>: DATABASE ACCESSION NUMBER: SWISS-Prot / P48507
  ref <309>: DATABASE ENTRY DATE: 2002-06-15

SEQ ID NO: 7664 - DNA, 1380 bp, Rattus norvegicus; identical to SEQ ID NO: 7660
  ref <308>: DATABASE ACCESSION NUMBER: EMBL / S65555
  ref <309>: DATABASE ENTRY DATE: 2000-03-04

SEQ ID NO: 7665 - protein, 274 aa, Rattus norvegicus; identical to SEQ ID NO: 7271
  ref <308>: DATABASE ACCESSION NUMBER: SWISS-Prot / AAB28225
  ref <309>: DATABASE ENTRY DATE: 2002-06-15

SEQ ID NO: 7666 - DNA, 1610 bp, Homo sapiens; identical to SEQ ID NO: 7272
  ref <308>: DATABASE ACCESSION NUMBER: Refseq / NM_002061
  ref <309>: DATABASE ENTRY DATE: 2002-11-05

SEQ ID NO: 7667 - protein, 274 aa, Homo sapiens; identical to SEQ ID NO: 7273
  ref <308>: DATABASE ACCESSION NUMBER: SWISS-Prot / P48507
  ref <309>: DATABASE ENTRY DATE: 2002-06-15

SEQ ID NO: 7668 - DNA, 1380 bp, Rattus norvegicus; identical to SEQ ID NO: 7660
  ref <308>: DATABASE ACCESSION NUMBER: EMBL / S65555
  ref <309>: DATABASE ENTRY DATE: 2000-03-04

SEQ ID NO: 7669 - protein, 274 aa, Rattus norvegicus; identical to SEQ ID NO: 7271
  ref <308>: DATABASE ACCESSION NUMBER: SWISS-Prot / AAB28225
  ref <309>: DATABASE ENTRY DATE: 2002-06-15

SEQ ID NO: 7670 - DNA, 1610 bp, Homo sapiens; identical to SEQ ID NO: 7272
  ref <308>: DATABASE ACCESSION NUMBER: Refseq / NM_002061
  ref <309>: DATABASE ENTRY DATE: 2002-11-05

SEQ ID NO: 7671 - protein, 274 aa, Homo sapiens; identical to SEQ ID NO: 7273
  ref <308>: DATABASE ACCESSION NUMBER: SWISS-Prot / P48507
  ref <309>: DATABASE ENTRY DATE: 2002-06-15

SEQ ID NO: 7672 - DNA, 1380 bp, Rattus norvegicus; identical to SEQ ID NO: 7660
  ref <308>: DATABASE ACCESSION NUMBER: EMBL / S65555
  ref <309>: DATABASE ENTRY DATE: 2000-03-04

SEQ ID NO: 7673 - protein, 274 aa, Rattus norvegicus; identical to SEQ ID NO: 7271
  ref <308>: DATABASE ACCESSION NUMBER: SWISS-Prot / AAB28225
  ref <309>: DATABASE ENTRY DATE: 2002-06-15

SEQ ID NO: 7674 - DNA, 1610 bp, Homo sapiens; identical to SEQ ID NO: 7272
  ref <308>: DATABASE ACCESSION NUMBER: Refseq / NM_002061
  ref <309>: DATABASE ENTRY DATE: 2002-11-05

SEQ ID NO: 7675 - protein, 274 aa, Homo sapiens; identical to SEQ ID NO: 7273
  ref <308>: DATABASE ACCESSION NUMBER: SWISS-Prot / P48507
  ref <309>: DATABASE ENTRY DATE: 2002-06-15

SEQ ID NO: 7676 - DNA, 436 bp, Rattus norvegicus
  ref <308>: DATABASE ACCESSION NUMBER: EMBL / S66024
  ref <309>: DATABASE ENTRY DATE: 2000-03-04
actttattttggactgtggtacggccaacaagaccactctgtatgcaaaagcccaacatggctgtaactggagatgaaactgatgaggagactgaccttgccccaagtcacatggctgctgccacaggtgacatgccaacttaccagatccgagctcctactactgctttgccacaaggtgtggtgatggctgcctcaccaggaagcctgcacagtccccagcaactagcagaagaagcaactcgcaagcgggagctgaggctgatgaaaaacagggaagctgctaaagaatgtcgacgtcgaaagaaagagtatgtcaagtgtcttgagagtcgagtcgcagtgctggaagttcagaacaagaagcttatagaggagcttgaaactttgaaagacatttgctctcccaaaacagattagtagaaatatttaacta

SEQ ID NO: 7677 - protein, 120 aa, Rattus norvegicus
  ref <308>: DATABASE ACCESSION NUMBER: SWISS-Prot / AAB28273
  ref <309>: DATABASE ENTRY DATE: 2003-02-01
MAVTGDETDEETDLAPSHMAAATGDMPTYQIRAPTTALPQGVVMAASPGSLHSPQQLAEEATRKRELRLMKNREAAKECRRRKKEYVKCLESRVAVLEVQNKKLIEELETLKDICSPKTD

SEQ ID NO: 7678 - DNA, 363 bp, Homo sapiens
  ref <308>: DATABASE ACCESSION NUMBER: EMBL / U44836
  ref <309>: DATABASE ENTRY DATE: 1999-07-02
atggctgtaactggagatgaaactgatgaggaaactgaacttgccccaagtcacatggctgctgccactggtgacatgccaacttaccggatccgagctcctactgctgctttgccacagggagtggtgatggctgcatcgcccggaagtttgcacagtccccagcagctggcagaagaagcaacacgcaaacgagagctgaggctaatgaaaaacagggaagctgccaaagaatgtcgacgtcgaaagaaagaatatgtaaaatgtctggagagccgagttgcagtgctggaagtccagaacaagaagcttatagaggaacttgaaaccttgaaagacatttgctctcccaaaacagattag

SEQ ID NO: 7679 - protein, 120 aa, Homo sapiens [sequence omitted]

SEQ ID NO: 7680 - DNA, 436 bp, Rattus norvegicus; identical to SEQ ID NO: 7676
  ref <308>: DATABASE ACCESSION NUMBER: EMBL / S66024
  ref <309>: DATABASE ENTRY DATE: 2000-03-04

SEQ ID NO: 7681 - protein, 120 aa, Rattus norvegicus; identical to SEQ ID NO: 7677
  ref <308>: DATABASE ACCESSION NUMBER: SWISS-Prot / AAB28273
  ref <309>: DATABASE ENTRY DATE: 2003-02-01

SEQ ID NO: 7682 - DNA, 363 bp, Homo sapiens; identical to SEQ ID NO: 7678
  ref <308>: DATABASE ACCESSION NUMBER: EMBL / U44836
  ref <309>: DATABASE ENTRY DATE: 1999-07-02

SEQ ID NO: 7683 - protein, 120 aa, Homo sapiens [sequence omitted]

SEQ ID NO: 7684 - DNA, 253 bp, Rattus norvegicus
  misc_feature (1)..(253): n=a, c, g or t
  ref <308>: DATABASE ACCESSION NUMBER: EMBL / S66184
  ref <309>: DATABASE ENTRY DATE: 2000-03-04
agatttggtttgataattgttgacaattccccccatgctactttttctgaggncagaaacgtctaatgtgacgatcttcacattaccattacgaggantcncaacacagcaaaatcattccgatgacaggtgtgatagatggagagctaacatgcaactgccgagtgtttcactgttagccagaactaagtcactgcccacacagcaattacaccatgaatctctaacatcacaaccttctttcaaatactgt

SEQ ID NO: 7685 - protein, 411 aa, Rattus norvegicus
  ref <308>: DATABASE ACCESSION NUMBER: Refseq / NP_058757
  ref <309>: DATABASE ENTRY DATE: 2002-11-05
MRFAWTVLFLGQLQFCPLLRCAPQAPREPPAAPGAWRQTIQWENNGQVFSLLSLGAQYQPQRRRDSSATAPRADGNAAAQPRTPILLLRDNRTASARARTPSPSGVAAGRPRPAARHWFQVGFSPSGAGDGASRRAANRTASPQPPQLSNLRPPSHVDRMVGDDPYNPYKYSDDNPYYNYYDTYERPRSGSRHRPGYGTGYFQYGLPDLVPDPYYIQASTYVQKMSMYNLRCAAEENCLASSAYRADVRDYDHRVLLRFPQRVKNQGTSDFLPSRPRYSWEWHSCHQHYHSMDEFSHYDLLDASTQRRVAEGHKASFCLEDTSCDYGYHRRFACTAHTQGLSPGCYDTYAADIDCQWIDITDVQPGNYILKVSVNPSYLVPESDYSNNVVRCEIRYTGHHAYASGCTISPY

SEQ ID NO: 7686 - DNA, 1946 bp, Homo sapiens
  ref <308>: DATABASE ACCESSION NUMBER: Refseq / NM_002317
  ref <309>: DATABASE ENTRY DATE: 2002-11-05
agacactgcccgctctccgggactccgcgccgctccccgttgccttccaggactgagaaaggggaaagggaagggtgccacgtccgagcagccgccttgactggggaagggtctgaatcccacccttggcattgcttggtggagactgagatacccgtgctccgctcgcctccttggttgaagatttctccttccctcacgtgatttgagccccgtttttattttctgtgagccacgtcctcctcgagcggggtcaatctggcaaaaggagtgatgcgcttcgcctggaccgtgctcctgctcgggcctttgcagctctgcgcgctagtgcactgcgcccctcccgccgccggccaacagcagcccccgcgcgagccgccggcggctccgggcgcctggcgccagcagatccaatgggagaacaacgggcaggtgttcagcttgctgagcctgggctcacagtaccagcctcagcgccgccgggacccgggcgccgccgtccctggtgcagccaacgcctccgcccagcagccccgcactccgatcctgctgatccgcgacaaccgcaccgccgcggcgcgaacgcggacggccggctcatctggagtcaccgctggccgccccaggcccaccgcccgtcactggttccaagctggctactcgacatctagagcccgcgaagctggcgcctcgcgcgcggagaaccagacagcgccgggagaagttcctgcgctcagtaacctgcggccgcccagccgcgtggacggcatggtgggcgacgacccttacaacccctacaagtactctgacgacaacccttattacaactactacgatacttatgaaaggcccagacctgggggcaggtaccggcccggatacggcactggctacttccagtacggtctcccagacctggtggccgacccctactacatccaggcgtccacgtacgtgcagaagatgtccatgtacaacctgagatgcgcggcggaggaaaactgtctggccagtacagcatacagggcagatgtcagagattatgatcacagggtgctgctcagatttccccaaagagtgaaaaaccaagggacatcagatttcttacccagccgaccaagatattcctgggaatggcacagttgtcatcaacattaccacagtatggatgagtttagccactatgacctgcttgatgccaacacccagaggagagtggctgaaggccacaaagcaagtttctgtcttgaagacacatcctgtgactatggctaccacaggcgatttgcatgtactgcacacacacagggattgagtcctggctgttatgatacctatggtgcagacatagactgccagtggattgatattacagatgtaaaacctggaaactatatcctaaaggtcagtgtaaaccccagctacctggttcctgaatctgactataccaacaatgttgtgcgctgtgacattcgctacacaggacatcatgcgtatgcctcaggctgcacaatttcaccgtattagaaggcaaagcaaaactcccaatggataaatcagtgcctggtgttctgaagtgggaaaaaatagactaacttcagtaggatttatgtattttgaaaaagagaacagaaaacaacaaaagaatttttgtttggactgttttcaataacaaagcacataactggattttgaacgcttaagtcatcattacttgggaaatttttaatgtttattatttacatcactttgtgaattaacacagtgtttcaattctgtaattacatatttgactctttcaaagaaatccaaatttctcatgttccttttgaaattgtagtgcaaaatggtcagtattatctaaatgaatgagccaaaatgactttgaactgaaacttttctaaagtgctggaactttagtgaaacataataataatgggtttata

SEQ ID NO: 7687 - protein, 417 aa, Homo sapiens
  ref <308>: DATABASE ACCESSION NUMBER: SWISS-Prot / P28300
  ref <309>: DATABASE ENTRY DATE: 2002-06-15
MRFAWTVLLLGPLQLCALVHCAPPAAGQQQPPREPPAAPGAWRQQIQWENNGQVFSLLSLGSQYQPQRRRDPGAAVPGAANASAQQPRTPILLIRDNRTAAARTRTAGSSGVTAGRPRPTARHWFQAGYSTSRAREAGASRAENQTAPGEVPALSNLRPPSRVDGMVGDDPYNPYKYSDDNPYYNYYDTYERPRPGGRYRPGYGTGYFQYGLPDLVADPYYIQASTYVQKMSMYNLRCAAEENCLASTAYRADVRDYDHRVLLRFPQRVKNQGTSDFLPSRPRYSWEWHSCHQHYHSMDEFSHYDLLDANTQRRVAEGHKASFCLEDTSCDYGYHRRFACTAHTQGLSPGCYDTYGADIDCQWIDITDVKPGNYILKVSVNPSYLVPESDYTNNVVRCDIRYTGHHAYASGCTISPY

SEQ ID NO: 7688 - DNA, 433 bp, Rattus norvegicus
  ref <308>: DATABASE ACCESSION NUMBER: EMBL / S68809
  ref <309>: DATABASE ENTRY DATE: 2000-06-14
accctcatccatgtgttccatgcccactcgggcaaggaaggggacaaatataagctgagcaagaaggagctgaaagacctgctacaaactgaactctccagcttcctggatgtccagaaggatgcagatgctgtggacaggatcatgaaggaactggatgagaatggagatggggaagtggacttccaggagtttgttgtgctggtggctgctctcacggtggcttgtaacaacttcttctgggagaacagttgagcacagtctcagtaggcagcgccctccctcttttgctcctcatcccacctgtatctccctatgtacccatccttgcccaggctcaacatgcaccaaaggcgcaacagtagcagtcctgccactagttttaataaagcttctctctcccgaaaaaaaaaaaaaaaaaaaaaaaaaaaaa

SEQ ID NO: 7689 - protein, 93 aa, Rattus norvegicus
  ref <308>: DATABASE ACCESSION NUMBER: SWISS-Prot / AAB20539
  ref <309>: DATABASE ENTRY DATE: 2001-10-16
GSELETAMETLINVFHAHSGKEGDKYKLSKKELKDLLQTELSSFLDVQKDADAVDKIMKELDENGDGEVDFQEFVVLVAALTVACNNFFWENS

SEQ ID NO: 7690 - DNA, 607 bp, Homo sapiens
  ref <308>: DATABASE ACCESSION NUMBER: Refseq / NM_006271
  ref <309>: DATABASE ENTRY DATE: 2002-11-05
ggactgttgaagacaggtctccacacacagctccagcagccacatttgcaaccttggccatctgtccagaacctgctcccacctcaggcccaggccaaccgtgcactgctgcaatgggctctgagctggagacggcgatggagaccctcatcaacgtgttccacgcccactcgggcaaagagggggacaagtacaagctgagcaagaaggagctgaaagagctgctgcagacggagctctctggcttcctggatgcccagaaggatgtggatgctgtggacaaggtgatgaaggagctagacgagaatggagacggggaggtggacttccaggagtatgtggtgcttgtggctgctctcacagtggcctgtaacaatttcttctgggagaacagttgagcagacagccacattgggcagcgcccttcctctccaccctcccagacctgcctcttccccctgcttccacctcaccccacttatccctctccataaccccacccttgcccaccccacccccacccccaccaagggcgcaagagtagcggtccaagcctgcaactcatctttcattaaaggcttctctctcaccagcaaaaaaaaaaaaa

SEQ ID NO: 7691 - protein, 93 aa, Homo sapiens
  ref <308>: DATABASE ACCESSION NUMBER: SWISS-Prot / P23297
  ref <309>: DATABASE ENTRY DATE: 2002-06-15
GSELETAMETLINVFHAHSGKEGDKYKLSKKELKELLQTELSGFLDAQKDVDAVDKVMKELDENGDGEVDFQEYVVLVAALTVACNNFFWENS

SEQ ID NO: 7692 - DNA, 195 bp, Rattus norvegicus
  ref <308>: DATABASE ACCESSION NUMBER: EMBL / S69316
  ref <309>: DATABASE ENTRY DATE: 2000-06-28
actctcactatgaatcctgtgtggagagggaatgtgacattttaaagttatttcttttgagagacttgttttggatgctcccccaagcctccctctcccctgcactgtaaaatgttgggattatgggtcacaggaagaagtggtttttttagttgaatttttttttttaacattcctcctgaatgtaaatttgta

SEQ ID NO: 7693 - protein, 802 aa, Rattus norvegicus
  ref <308>: DATABASE ACCESSION NUMBER: SWISS-Prot / AAH10445
  ref <309>: DATABASE ENTRY DATE: 2003-02-01
MRVLWVLGLCCVLLTFGFVRADDEVDVDGTVEEDLGKSREGSRTDDEVVQREEEAIQLDGLNASQIRELREKSEKFAFQAEVNRMMKLIINSLYKNKEIFLRELISNASDALDKIRLISLTDENALAGNEELTVKIKCDKEKNLLHVTDTGVGMTREELVKNLGTIAKSGTSEFLNKMTEAQEDGQSTSELIGQFGVGFYSAFLVADKVIVTSKHNNDTQHIWESDSNEFSVIADPRGNTLGRGTTITLVLKEEASDYLELDTIKNLVRKYSQFINFPIYVWSSKTETVEEPLEEDEAAKEEKEESDDEAAVEEEEEEKKPKTKKVEKTVWDWELMNDIKPIWQRPSKEVEEDEYKAFYKSFSKESDDPMAYIHFTAEGEVTFKSILFVPTSAPRGLFDEYGSKKSDYIKLYVRRVFITDDFHDMMPKYLNFVKGVVDSDDLPLNVSRETLQQHKLLKVIRKKLVRKTLDMIKKIADEKYNDTFWKEFGTNIKLGVIEDHSNRTRLAKLLRFQSSHHSTDITSLDQYVERMKEKQDKIYFMAGSSRKEAESSPFVERLLKKGYEVIYLTEPVDEYCIQALPEFDGKRFQNVAKEGVKFDESEKTKESREATEKEFEPLLNWMKDKALKDKIEKAVVSQRLTESPCALVASQYGWSGNMERIMKAQAYQTGKDISTNYYASQKKTFEINPRHPLIRDMLRRIKEDEDDKTVMDLAVVLFETATLRSGYLLPDTKAYGDRIERMLRLSLNIDPEAQVEEEPEEEPEDTSEEAEDSEQDEGEEMDAGTEEEEEETEKESTEKDEL

SEQ ID NO: 7694 - DNA, 1060 bp, Rattus norvegicus
  ref <308>: DATABASE ACCESSION NUMBER: EMBL / S69329
  ref <309>: DATABASE ENTRY DATE: 2000-03-04
cagatatgggagacatgggcgatccaccaaaaaaaaaacgtctgatttccctatgtgttggttgcggtaatcaaattcacgatcagtatattctgagggtttctccggatttggaatggcatgcggcatgtttgaaatgtgcggagtgtaatcagtatttggacgaaagctgtacctgctttgttagggacgggaaaacctactgtaaaagagattatatcaggttgtacgggatcaaatgcgccaagtgcagcataggcttcagcaagaacgacttcgtgatgcgcgcccgctctaaggtgtaccacatcgaatgtttccgctgtgtagcatgcagccgacagctcatcccgggagacgaattcgcgctgcgggaggatgggcttttctgccgcgcggaccacgatgtagtggagagggccagcctaggagctggagaccctctcagtcccttgcatccagcgcggcctctgcaaatggcagccgagcccatctccgctaggcagccagctctgcggccgcacgtccacaaacagcccgagaagaccacccgagtgcggactgtgctcaacgaaaagcagctgcacaccttgcggacctgctacgcagccaaccctcggccagatgcgctcatgaaggagcaactagtggagatgaccggcctcagtccccgagtcatccgggtctggtttcaaaacaagaggtgcaaggacaagaaacgcagcatcatgatgaagcagctccagcagcagcaacccaacgacaaaactaatatccaggggatgacaggaactcccatggtggctgctagtccggagagacatgatggtggtttacaggctaacccagttgaggtgcaaagttaccagccgccctggaaagtactgagtgacttcgccttgcaaagtgacatagatcagcctgcttttcagcaactggtcaatttttcagaaggaggaccaggctctaattccactggcagtgaagtagcatcgatgtcctctcagctcccagatacacccaacagcatggtagccagtcctatagaggcatgaggaac

SEQ ID NO: 7695 - protein, 349 aa, Rattus norvegicus
  ref <308>: DATABASE ACCESSION NUMBER: SWISS-Prot / AAB30128
  ref <309>: DATABASE ENTRY DATE: 2002-06-15
MGDMGDPPKKKRLISLCVGCGNQIHDQYILRVSPDLEWHAACLKCAECNQYLDESCTCFVRDGKTYCKRDYIRLYGIKCAKCSIGFSKNDFVMRARSKVYHIECFRCVACSRQLIPGDEFALREDGLFCRADHDVVERASLGAGDPLSPLHPARPLQMAAEPISARQPALRPHVHKQPEKTTRVRTVLNEKQLHTLRTCYAANPRPDALMKEQLVEMTGLSPRVIRVWFQNKRCKDKKRSIMMKQLQQQQPNDKTNIQGMTGTPMVAASPERHDGGLQANPVEVQSYQPPWKVLSDFALQSDIDQPAFQQLVNFSEGGPGSNSTGSEVASMSSQLPDTPNSMVASPIEA

SEQ ID NO: 7696 - DNA, 1060 bp, Rattus norvegicus; identical to SEQ ID NO: 7694
  ref <308>: DATABASE ACCESSION NUMBER: EMBL / S69329
  ref <309>: DATABASE ENTRY DATE: 2000-03-04

SEQ ID NO: 7697 - protein, 349 aa, Rattus norvegicus; identical to SEQ ID NO: 7695
  ref <308>: DATABASE ACCESSION NUMBER: SWISS-Prot / AAB30128
  ref <309>: DATABASE ENTRY DATE: 2002-06-15

SEQ ID NO: 7698 - DNA, 2986 bp, Rattus norvegicus
  ref <308>: DATABASE ACCESSION NUMBER: EMBL / S70011
  ref <309>: DATABASE ENTRY DATE: 2000-07-11
gtgctcctgggggcggcgcgcgggaccgtggcgcttccggcagcgggaggcggcacggagcgggaccgagaggcgcgggtggcggccggggaggcggatctgggacaatgtctggggaagtgccacccaacattaacatcaaggagcctcgatgggaccagagcacgttcattggccgagccagtcacttcttcacggttactgatcccaaaaacatccttttaacgaacgaacagctagagaatgcgaggaaagtggtacacgattacaggcaaggaatcgttcctgccggcctcacggaaaatgagttatggagagcgaagtacgcgtatgactcggccttccatcccgacacgggtgaaaagatgactctgataggaagaatgtcggctcaggtcccgatgaacatgaccatcacgggctgcatgatgaccttctaccggaccacaccggctgtgcttttctggcagtggataaaccagtccttcaatgccgtggtcaactacaccaatagaagtggtgacgctccccttactgtaaatgagctgggaacggcttatgtttctgcaacaaccggcgccgtggcgacagcccttggactcaatgccctaaccaagcatgtgtcgccgctgataggacgttttgttcccttcgctgctgtagctgctgctaactgcattaacatcccgctgatgagacaaagggaactcaaggttggtattcctgtcactgatgagaatggcacacgcttgggagaatcgaccaacgcagcaaagcaagccatcacgcaggtggtcatctccaggatcctcatggcggcccctggcatggccatccctccgtttatcatgaacaccttggagaagaaagcctttttgaagaggttcccgtggatgagcgcaccaattcaagtcacgctggttggcttttgtttggtgttcgccacccccctgtgctgtgctctgtttcctcagaagagttccatgtctgtgacaagcttggaggatgatttgcaagccagcatccaaaagagtcatcctgaattacggcgtgtgtactttaacaagggcctgtgaagccaagatcaagtgctggaggcacctcctgccatctgtgaacctcctgaagccaagcagtgaggaaatacgtgtgctgggcactccccgctacaaaagcctctgcaaaatctgtgttagagtcaagctgcctgtcaggagcctgacatttgaatcatgttgtaatttacaaaaaatacccttctggtagattttaatgatgccgttttttccaaagcccccaccttgagctttcaaaagctctggtgggcatagcatatatgctccagttacacactcagcaaacactggttatcaatcattggaaaggttaccagctcaactatcacattctgtttctacttctctccactgggtctcagcaatgaattggaaacacaaaggtctaagacaaatatccaaatttaaatactaaggaaactatatctccagtttggcaatggaccagtccaaagtagaacctcaattaaaaaaattgaggttcagagcataaacactccatacaccttcctgaagtcagccatagaccagggtaggatgccttccctgccatcctggattcttcaactcttcaatgtgtttagtgttcttaaaatattaattgtacctcacaggtactttatatcatgaatttccatcaaatacttaactgaaatggtctattcagtaccagtacaatgtgacattgactgggtgaccggtttttcagaagtgaaaccatagtccctatatgcctttttccccccatccttgtagaatttctttggctttcaggaagatatacagaaaccacacaaactagtccagcaactgtgcacattgtgctgcgttccaccctgtttgaagaccatgaagtcttgtggcatgtcaacatttctatggtgattttacatgtgacatattgggtgtagctgaggttgctttggaagtctgtggctattccacgtcatagacaagccacttgttacgctgagtgaaaaatcattgttaattcagatatttgtacgtggaaaaaaaccccacaaaaatagagactatctagtttctgtagattctttttcccaatgtttccagattgaatttcctcataaagaaaatatggtgtgccttgtgtctgtgcttctccttcctctgaaaggatggatggatctgaagcccccagccctcccccatgctgctagaatcttctgtggcgatgaccgccaaaccacctgaaatgcagtggctccctgtggcactctggcctcggacgagcctcactgccttcagtgcttctgttttaaacggtggtgagagcctggagctcaaggcagagtccacaggtgcttaaagaacactttcagaagaagctgaaggcctcgaggtctgttcatcaagccaatctcagagtccttgccccagtgcgtgtgtagctctgagaatgtgaagactcagttggaagatggtccaactcaccaagtgtcggcccagttagtgagaaacgcgcagtagacatggagctgggctcttttgaatttgttttgtgaagtgtcggcctcttactgcttttgtatagtgatactcactgtgtggtttaatcatgatttataaaaaaaaaagaagcaaatgaatgaaaattggcaatctttgctgatcttctaaaaatacttttttttcctgaagaaaaaagccacatgaagtgcaataatgttgtgcggtgacttgctgatagttctctgacgagagatagttatgtgtgtgtgactggctggcagatatcagtattagcgaggtctcttgccaatatcagagtcagtgtgtcatttcagtttaactggatgaactgtcaaataaatgcagaatgaaaataaacgactcttatttgtccgtgaaaaaaaaaaaaaaaaaaaaaaaaaaaaaaaaaaaaaaaa

SEQ ID NO: 7699 - protein, 322 aa, Rattus norvegicus
  ref <308>: DATABASE ACCESSION NUMBER: SWISS-Prot / AAB30258
  ref <309>: DATABASE ENTRY DATE: 2002-06-15
MSGEVPPNINIKEPRWDQSTFIGRASHFFTVTDPKNILLTNEQLENARKVVHDYRQGIVPAGLTENELWRAKYAYDSAFHPDTGEKMTLIGRMSAQVPMNMTITGCMMTFYRTTPAVLFWQWINQSFNAVVNYTNRSGDAPLTVNELGTAYVSATTGAVATALGLNALTKHVSPLIGRFVPFAAVAAANCINIPLMRQRELKVGIPVTDENGTRLGESTNAAKQAITQVVISRILMAAPGMAIPPFIMNTLEKKAFLKRFPWMSAPIQVTLVGFCLVFATPLCCALFPQKSSMSVTSLEDDLQASIQKSHPELRRVYFNKGL

SEQ ID NO: 7700 - DNA, 2735 bp, Homo sapiens; identical to SEQ ID NO: 5639
  ref <308>: DATABASE ACCESSION NUMBER: Refseq / NM_030971
  ref <309>: DATABASE ENTRY DATE: 2002-05-14

SEQ ID NO: 7701 - protein, 321 aa, Homo sapiens; identical to SEQ ID NO: 5640
  ref <308>: DATABASE ACCESSION NUMBER: SWISS-Prot / Q9BWM7
  ref <309>: DATABASE ENTRY DATE: 2002-06-15

SEQ ID NO: 7702 - DNA, 2986 bp, Rattus norvegicus; identical to SEQ ID NO: 7698
  ref <308>: DATABASE ACCESSION NUMBER: EMBL / S70011
  ref <309>: DATABASE ENTRY DATE: 2000-07-11

SEQ ID NO: 7703 - protein, 322 aa, Rattus norvegicus; identical to SEQ ID NO: 7699
  ref <308>: DATABASE ACCESSION NUMBER: SWISS-Prot / AAB30258
  ref <309>: DATABASE ENTRY DATE: 2002-06-15

SEQ ID NO: 7704 - DNA, 2735 bp, Homo sapiens; identical to SEQ ID NO: 5639
  ref <308>: DATABASE ACCESSION NUMBER: Refseq / NM_030971
  ref <309>: DATABASE ENTRY DATE: 2002-05-14

SEQ ID NO: 7705 - protein, 321 aa, Homo sapiens; identical to SEQ ID NO: 5640
  ref <308>: DATABASE ACCESSION NUMBER: SWISS-Prot / Q9BWM7
  ref <309>: DATABASE ENTRY DATE: 2002-06-15

SEQ ID NO: 7706 - DNA, 737 bp, Rattus norvegicus
  ref <308>: DATABASE ACCESSION NUMBER: EMBL / S70803
  ref <309>: DATABASE ENTRY DATE: 2000-03-04
cgtcagccagcaacccccgggtctgcaccttcgtctggattcttaacacagacctcaagggccgcctgcctcggtaccccatccaccagagccttgggccaccatgtttgaatttgccttttacctgcggcacgtgttggagagcctgggcgcccgagctgaccatgttccctcgccaccctgcggccagggtcctgtccacagcctctggagccagaaagtggaaatgtttgggtttctgctgcccatgaaggactttgtgctaagcaggcccgtgcgacctccttccatggctgtagcttccactaagccacactgctcggaacagggccctgagcggttgtggggttgagtacctggactcggggttccatactggaggagccgggactgtcttgcctatgctgacctacagctcctgccttctggagaggagacccccgccatgcctcactgggcaccttagacttggtcacagaggactgggcctgggtagggcaggagaccatcccgttgcaacgtgaaggtgaggaagccctctagtccaggttttgtaccattagggaaggggtctgggactgttccatacacactgtggggatgtaaggcagggggacagcattgccttcctgcctctcctcgccttctcgggaacctttgtaataaattgagccaattaaaaacacaaaataaagaatcaaaatgcaaaaaaaaaaacaaaaaaaaaaaaaaaaaaa

SEQ ID NO: 7707 - protein, 101 aa, Rattus norvegicus
  ref <308>: DATABASE ACCESSION NUMBER: SWISS-Prot / AAB30888
  ref <309>: DATABASE ENTRY DATE: 2001-12-01
HRPQGPPASVPHPPEPWATMFEFAFYLRHVLESLGARADHVPSPPCGQGPVHSLWSQKVEMFGFLLPMKDFVLSRPVRPPSMAVASTKPHCSEQGPERLWG

SEQ ID NO: 7708 - DNA, 737 bp, Rattus norvegicus; identical to SEQ ID NO: 7706
  ref <308>: DATABASE ACCESSION NUMBER: EMBL / S70803
  ref <309>: DATABASE ENTRY DATE: 2000-03-04

SEQ ID NO: 7709 - protein, 101 aa, Rattus norvegicus; identical to SEQ ID NO: 7707
  ref <308>: DATABASE ACCESSION NUMBER: SWISS-Prot / AAB30888
  ref <309>: DATABASE ENTRY DATE: 2001-12-01

SEQ ID NO: 7710 - DNA, 737 bp, Rattus norvegicus; identical to SEQ ID NO: 7706
  ref <308>: DATABASE ACCESSION NUMBER: EMBL / S70803
  ref <309>: DATABASE ENTRY DATE: 2000-03-04

SEQ ID NO: 7711 - protein, 101 aa, Rattus norvegicus; identical to SEQ ID NO: 7707
  ref <308>: DATABASE ACCESSION NUMBER: SWISS-Prot / AAB30888
  ref <309>: DATABASE ENTRY DATE: 2001-12-01

SEQ ID NO: 7712 - DNA, 737 bp, Rattus norvegicus; identical to SEQ ID NO: 7706
  ref <308>: DATABASE ACCESSION NUMBER: EMBL / S70803
  ref <309>: DATABASE ENTRY DATE: 2000-03-04

SEQ ID NO: 7713 - protein, 101 aa, Rattus norvegicus; identical to SEQ ID NO: 7707
  ref <308>: DATABASE ACCESSION NUMBER: SWISS-Prot / AAB30888
  ref <309>: DATABASE ENTRY DATE: 2001-12-01

SEQ ID NO: 7714 - DNA, 1764 bp, Rattus norvegicus
  ref <308>: DATABASE ACCESSION NUMBER: EMBL / S71570
  ref <309>: DATABASE ENTRY DATE: 2000-03-04
atggagaccaccgccacctgcacccgcttcaccgacgactaccagcttttcgaggagctcggcaagggtgccttctcggtggtccggaggtgcgtgaagaaaacgtcgacgcaggagtatgcagcaaaaatcatcaataccaagaagttgtctgcccgagatcatcagaaactagaacgagaggcccggatatgccgacttctgaaacatccaaacatcgtgcgtctccatgacagtatttctgaagaagggtttcactacctcgtgtttgaccttgttacgggaggggagttgtttgaagacatcgtggccagagaatactacagcgaagctgatgccagccactgtatacatcagatcctggagagcgtcaaccacatccaccagcatgacatcgtccaccgggacctgaagcccgagaacttgctgctggcgagtaaatgcaagggtgctgcggtcaagctagctgattttggcctggccatcgaagtgcagggagagcagcaggcttggtttggttttgctggcaccccaggttacttgtcccctgaggtcttgaggaaagatccctatggaaaacctgtggatatctgggcctgcggggtcatcctgtatatcctcctggtgggctaccctcccttctgggatgaggatcagcacaagctctatcagcagatcaaagctggagcctacgatttcccatcaccagaatgggacacagtcactcctgaagctaagaacttgatcaaccagatgttgaccataaaccctgcaaagcgtatcacagctgaccaggctctcaagcacccatgggtctgtcaacggtcaacagtggcatccatgatgcatcgccaagagacagtggagtgcttacgcaagttcaacgcccggagaaaactgaagggtgccatcctcacaaccatgcttgtctccaggaacttttcagctgccaagagcctattgaacaagaagtcagatggcggcgtcaagccagagcaacaacaaaaacagtctcgtaagcccagcccaagagcccgcgatcccttgcagacggccatggagccacaaaccaccgtggtacataatgctacagatgggatcaagggctccacagagagctgcaacaccaccacagaagacgaagatctcaaagtgcgaaaacaggagatcattaagatcacagaacagctgatagaagccatcaacaatggggactttgaggcctacacgaagatttgtgacccaggcctcacttcctttgagccagaagcccttggtaacctcgtggaggggatggatttccataagttttactttgagaatctcctgtccaagaacagcaagcctatccacaccaccatcctaaacccacatgtccatgtcatcggcgaggacgcagcttgcatcgcctacatccggctcacccagtacatcgatgggcagggtcggcctcgcaccagtcagtcagaggagacccgggtgtggcaccgccgggatggcaagtggctcaatgtccactatcactgctcaggagcccctgctgcaccgctgcagtgagctcaggcacaggggcattaggagattccagctggaggctgaaccttcgaagtcagtgactctggagggcctgagtgacagccgcggtcctgtccatttgaggtttaaacaattacattacaaagcgcagcagccaatgacgcccctgcatgcagccctcccgcccgcccttcgtgtctgtctctgctgtactgaggtgttttttac

SEQ ID NO: 7715 - protein, 527 aa, Rattus norvegicus; identical to SEQ ID NO: 2527
  ref <308>: DATABASE ACCESSION NUMBER: SWISS-Prot / AAB30670
  ref <309>: DATABASE ENTRY DATE: 2002-06-15

SEQ ID NO: 7716 - DNA, 1764 bp, Rattus norvegicus; identical to SEQ ID NO: 7714
  ref <308>: DATABASE ACCESSION NUMBER: EMBL / S71570
  ref <309>: DATABASE ENTRY DATE: 2000-03-04

SEQ ID NO: 7717 - protein, 527 aa, Rattus norvegicus; identical to SEQ ID NO: 2527
  ref <308>: DATABASE ACCESSION NUMBER: SWISS-Prot / AAB30670
  ref <309>: DATABASE ENTRY DATE: 2002-06-15

SEQ ID NO: 7718 - DNA, 444 bp, Rattus norvegicus
  ref <308>: DATABASE ACCESSION NUMBER: EMBL / S72407
  ref <309>: DATABASE ENTRY DATE: 2000-03-03
aaagtatctgtgtcttcagaggtgactgtattcgaacatacaagccagaaatcaagaaaggaagctacaataatatcgttgtccatgtcaagaccgctgttgctgacaacctccttttctaccttgggagtgcaaaatttattgactttctggctatagaaatgcgtaaagggaaagtcagcttcctctgggatgttggctctggagttggccgagtagagtatccggacttgaccatcgacgactcatattggtaccgtattgaagcatcaagaaccgggagaaatggacttatttctgtgagagctttggatgggcccaaagccagtatggtgcccagcacccaccattcagattctcctcctgggtacactatcctagatgtggatgcaaatgcaatgctgtttgttggcggcctgactggaaaattaaagaaggctgacg

SEQ ID NO: 7719 - protein, 3106 aa, Rattus norvegicus
  ref <308>: DATABASE ACCESSION NUMBER: SWISS-Prot / AAC52165
  ref <309>: DATABASE ENTRY DATE: 2002-06-15
MPAATAGILLLLLLGTLEGSQTQRRQSQAHQQRGLFPAVLNLASNALITTNATCGEKGPEMYCKLVEHVPGQPVRNPQCRICNQNSSNPYQRHPITNAIDGKNTWWQSPSIKNGVEYHYVTITLDLQQVFQIAYVIVKAANSPRPGNWILERSLDDVEYKPWQYHAVTDTECLTLYNIYPRTGPPSYAKDDEVICTSFYSKIHPLENGEIHISLINGRPSADDPSPELLEFTSARYIRLRFQRIRTLNADLMMFAHKDPREIDPIVTRRYYYSVKDISVGGMCICYGHARACPLDPATNKSRCECEHNTCGESCDRCCPGFHQKPWRAGTFLTKSECEACNCHGKAEECYYDETVASRNLSLNIHGKYIGGGVCINCTHNTAGINCETCVDGFFRPKGVSPNYPRPCQPCHCDPTGSLSEVCVKDEKYAQRGLKPGSCHCKTGFGGVNCDRCVRGYHGYPDCQPCNCSGLGSTNEDPCVGPCSCKENVEGEDCSRCKSGFFNLQEDNQKGCEECFCSGVSNRCQSSYWTYGNIQDMRGWYLTDLSGRIRMAPQLDNPDSPQQISISNSEARKSLLDGYYWSAPPPYLGNRLPAVGGQLSFTISYDLEEEEDDTEKLLQLMIIFEGNDLRISTAYKEVYLEPSEEHVEEVSLKEEAFTIHGTNLPVTRKDFMIVLTNLGEILIQITYNLGMDAIFRLSSVNLESPVPYPTDRRIATDVEVCQCPPGYSGSSCETCWPRHRRVNGTIFGGICEPCQCFAHAEACDDITGECLNCKDHTGGPYCNECLPGFYGDPTRGSPEDCQPCACPLNIPSNNFSPTCHLDRSLGLICDECPIGYTGPRCERCAEGYFGQPSVPGGSCQPCQCNDNLDYSIPGSCDSLSGSCLICKPGTTGRYCELCADGYFGDAVNTKNCQPCRCDINGSFSEDCHTRTGQCECRPNVQGRHCDECKPETFGLQLGRGCLPCNCNSFGSKSFDCEASGQCWCQPGVAGKKCDRCAHGYFNFQEGGCIACDCSHLGNNCDPKTGQCICPPNTTGEKCSECLPNTWGHSIVTGCKVCNCSTVGSLASQCNVNTGQCSCHPKFSGMKCSECSRGHWNYPLCTLCDCFLPGTDATTCDLETRKCSCSDQTGQCSCKVNVEGVHCDRCRPGKFGLDAKNPLGCSSCYCFGVTSQCSEAKGLIRTWVTLSDEQTILPLVDEALQHTTTKGIAFQKPEIVAKMDEVRQELHLEPFYWKLPQQFEGKKLMAYGGKLKYAIYFEARDETGFATYKPQVIIRGGTPTHARIITRHMAAPLIGQLTRHEIEMTEKEWKYYGDDPRISRTVTREDFLDILYDIHYILIKATYGNVVRQSRISEISMEVAEPGHVLAGSPPAHLIERCDCPPGYSGLSCETCAPGFYRLRSEPGGRTPGPTLGTCVPCQCNGHSSQCDPETSVCQNCQHHTAGDFCERCALGYYGIVRGLPNDCQPCACPLISPSNNFSPSCVLEGLEDYRCTACPRGYEGQYCERCAPGYTGSPSSPGGSCQECECDPYGSLPVPCDRVTGLCTCRPGATGRKCDGCEHWHAREGAECVFCGDECTGLLLGDLARLEQMTMNINLTGPLPAPYKILYGLENTTQELKHLLSPQRAPERLIQLAEGNVNTLVMETNELLTRATKVTADGEQTGQDAERTNSRAESLEEFIKGLVQDAEAINEKAVKLNETLGNQDKTAERNLEELQKEIDRMLKELRSKDLQTQKEVAEDELVAAEGLLKRVNKLFGEPRAQNEDMEKDLQQKLAEYKNKLDDAWDLLREATDKTRDANRLSAANQKNMTILETKKEAIEGSKRQIENTLKEGNDILDEANQLLGEINSVIDYVDDIKTKLPPMSEELSDKIDDLAQEIKDRRLAEKVFQAESHAAQLNDSSAVLDGILDEAKNISFNATAAFRAYSNIKDYIDEAEKVAREAKELAQGATKLATSPQGLLKEDAKGSLQKSFRILNEAKKLANDVKGNHNDLNDLKTRLETADLRNSGLLGALNDTMDKLSAITNDTAAKLQAVKEKAREANDTAKAVLAQVKDLHQNLDGLKQNYNKLADSVAKTNAVVKDPSKNKIIADAGTSVRNLEQEADRLIDKLKPIKELEDNLKKNISEIKELINQARKQANSIKVSVSSGGDCVRTYRPEIKKGSYNNIVVHVKTAVADNLLFYLGSAKFIDFLAIEMRKGKVSFLWIVGSGVGRVGFPDLTIDDSYWYRIEASRTGRNGSISVRALDGPKASMVPSTYHSVSPPGYTILDVDANAMLFVGGLTGKIKKADAVRVITFTGCMGETYFDNKPIGLWNFREKEGDCKGCTVSPQVEDSEGTIQFDGEGYALVSRPIRWYPNISTVMFKFRTFSSSALLMYLATRDLKDFMSVELSDGHVKVSYDLGSGMTSVVSNQNHNDGKWKAFTLSRIQKQANISIVDIDSNQEENVATSSSGNNFGLDLKADDKIYFGGLPTLRNLSMKARPEVNVKKYSGCLKDIEISRTPYNILSSPDYVGVTKGCSLENVNTVSFPKPGFVELAAVSIDVGTEINLSFSTRNESGIILLGSGGTLTPPRRKRRQTTQAYYAIFLNKGRLEVHLSSGTRTMRKIVIKPEPNLFHDGREHSVHVERTRGIFTVQIDEDRRHIQNLTEEQPIEVKKLFVGGAPPEFQPSPLRNIPAFQGCVWNLVINSIPMDFAQPIAFKNADIGRCTYQKPREDESEAVPAEVIVQPQSVPTPAFPFPVPTMVHGPCVAESEPALLTGSKQFGLSRNSHIAIVFDDTKVKNRLTIELEVRTEAESGLLFYMGRINHADFGTVQLRNGFPFFSYDLGSGSTRTMIPTKINDGQWHKIKIVRVKQEGILYVDDASSQTISPKKADILDVGGILYVGGLPINYTTRRIGPVTYSLDGCVRNLHMEQAPVDLDQPTSSFHVGTCFANAESGTYFDGTGFGKAVGGFIVGLDLLVEFEFRTTRPTGVLLGISSQKMDGMGIEMIDEKLMFHVDNGAGRFTAIYDAEIPGHMCNGQWYKVTAKKIKNRLELVVDGNQVDAQSPNSASTSADTNDPVFVGGFPGGLNQFGLTTNIRFRGCIRSLKLTKGTANRWRLILPRPWN

SEQ ID NO: 7720 - DNA, 9535 bp, Homo sapiens
cagcgactcctctggctcccgagaagtggatccggtcgcggccactacgatgccgggagccgccggggtcctcctccttctgctgctctccggaggcctcgggggcgtacaggcgcagcggccgcagcagcagcggcagtcacaggcacatcagcaaagaggtttattccctgctgtcctgaatcttgcttctaatgctcttatcacgaccaatgcaacatgtggagaaaaaggacctgaaatgtactgcaaattggtagaacatgtccctgggcagcctgtgaggaacccgcagtgtcgaatctgcaatcaaaacagcagcaatccaaaccagagacacccgattacaaatgctattgatggaaagaacacttggtggcagagtcccagtattaagaatggaatcgaataccattatgtgacaattaccctggatttacagcaggtgttccagatcgcgtatgtgattgtgaaggcagctaactccccccggcctggaaactggattttggaacgctctcttgatgatgttgaatacaagccctggcagtatcatgctgtgacagacacggagtgcctaacgctttacaatatttatccccgcactgggccaccgtcatatgccaaagatgatgaggtcatctgcacttcattttactccaagatacaccccttagaaaatggagagattcacatctctttaatcaatgggagaccaagtgccgatgatccttctccagaactgctagaatttacctccgctcgctatattcgcctgagatttcagaggatccgcacactgaatgctgacttgatgatgtttgctcacaaagacccaagagaaattgaccccattgtcaccagaagatattactactcggtcaaggatatttcagttggagggatgtgcatctgctatggtcatgccagggcttgtccacttgatccagcgacaaataaatctcgctgtgagtgtgagcataacacatgtggcgatagctgtgatcagtgctgtccaggattccatcagaaaccctggagagctggaacttttctaactaaaactgaatgtgaagcatgcaattgtcatggaaaagctgaagaatgctattatgatgaaaatgttgccagaagaaatctgagtttgaatatacgtggaaagtacattggagggggtgtctgcattaattgtacccaaaacactgctggtataaactgcgagacatgtactgatggcttcttcagacccaaaggggtatctccaaattatccaaggccatgccagccatgtcattgcgatccaattggttccttaaatgaagtctgtgtcaaggatgagaaacatgctcgacgaggtttggcacctggatcctgtcattgcaaaactggttttggaggtgtgagctgtgatcggtgtgccaggggctacactggctacccggactgcaaagcctgtaactgcagtgggttagggagcaaaaatgaggatccttgttttggcccctgtatctgcaaggaaaatgttgaaggaggagactgtagtcgttgcaaatccggcttcttcaatttgcaagaggataattggaaaggctgcgatgagtgtttctgttcaggggtttcaaacagatgtcagagttcctactggacctatggcaaaatacaagatatgagtggctggtatctgactgaccttcctggccgcattcgagtggctccccagcaggacgacttggactcacctcagcagatcagcatcagtaacgcggaggcccggcaagccctgccgcacagctactactggagcgcgccggctccctatctgggaaacaaactcccagcagtaggaggacagttgacatttaccatatcatatgaccttgaagaagaggaagaagatacagaacgtgttctccagcttatgattatcttagagggtaatgacttgagcatcagcacagcccaagatgaggtgtacctgcacccatctgaagaacatactaatgtattgttacttaaagaagaatcatttaccatacatggcacacattttccagtccgtagaaaggaatttatgacagtgcttgcgaatttgaagagagtcctcctacaaatcacatacagctttgggatggatgccatcttcaggttgagctctgttaaccttgaatccgctgtctcctatcctactgatggaagcattgcagcagctgtagaagtgtgtcagtgcccaccagggtatactggctcctcttgtgaatcttgttggcctaggcacaggcgagttaacggcactatttttggtggcatctgtgagccatgtcagtgctttggtcatgcggagtcctgtgatgacgtcactggagaatgcctgaactgtaaggatcacacaggtggcccatattgtgataaatgtcttcctggtttctatggcgagcctactaaaggaacctctgaagactgtcaaccctgtgcctgtccactcaatatcccatccaataactttagcccaacgtgccatttagaccggagtcttggattgatctgtgatggatgccctgtcgggtacacaggaccacgctgtgagaggtgtgcagaaggctattttggacaaccctctgtacctggaggatcatgtcagccatgccaatgcaatgacaaccttgacttctccatccctggcagctgtgacagcttgtctggctcctgtctgatatgtaaaccaggtacaacaggccggtactgtgagctctgtgctgatggatattttggagatgcagttgatgcgaagaactgtcagccctgtcgctgtaatgccggtggctctttctctgaggtttgccacagtcaaactggacagtgtgagtgcagagccaacgttcagggtcagagatgtgacaaatgcaaggctgggacctttggcctacaatcagcaaggggctgtgttccctgcaactgcaattcttttgggtctaagtcattcgactgtgaagagagtggacaatgttggtgccaacctggagtcacagggaagaaatgtgaccgctgtgcccacggctatttcaacttccaagaaggaggctgcacagcttgtgaatgttctcatctgggtaataattgtgacccaaagactgggcgatgcatttgccctcccaataccattggagagaaatgttctaaatgtgcacccaatacctggggccacagcattaccactggttgtaaggcttgtaactgcagcacagtgggatccttggatttccaatgcaatgtaaatacaggccaatgcaactgtcatccaaaattctctggtgcaaaatgtacagagtgcagtcgaggtcactggaactaccctcgctgcaatctctgtgactgcttcctccctgggacagatgccacaacctgtgattcagagactaaaaaatgctcctgtagtgatcaaactgggcagtgcacttgtaaggtgaatgtggaaggcatccactgtgacagatgccggcctggcaaattcggactcgatgccaagaatccacttggctgcagcagctgctattgcttcggcactactacccagtgctctgaagcaaaaggactgatccggacgtgggtgactctgaaggctgagcagaccattctacccctggtagatgaggctctgcagcacacgaccaccaagggcattgtttttcaacatccagagattgttgcccacatggacctgatgagagaagatctccatttggaacctttttattggaaacttccagaacaatttgaaggaaagaagttgatggcctatgggggcaaactcaagtatgcaatctatttcgaggctcgggaagaaacaggtttctctacatataatcctcaagtgatcattcgaggtgggacacctactcatgctagaattatcgtcaggcatatggctgctcctctgattggccaattgacaaggcatgaaattgaaatgacagagaaagaatggaaatattatggggatgatcctcgagtccatagaactgtgacccgagaagacttcttggatatactatatgatattcattacattcttatcaaagctacttatggaaatttcatgcgacaaagcaggatttctgaaatctcaatggaggtagctgaacaaggacgtggaacaacaatgactcctccagctgacttgattgaaaaatgtgattgtcccctgggctattctggcctgtcctgtgaggcatgcttgccgggattttatcgactgcgttctcaaccaggtggccgcacccctggaccaaccctgggcacctgtgttccatgtcaatgtaatggacacagcagcctgtgtgaccctgaaacatcgatatgccagaattgtcaacatcacactgctggtgacttctgtgaacgatgtgctcttggatactatggaattgtcaagggattgccaaatgactgtcagcaatgtgcctgccctctgatttcttccagtaacaatttcagcccctcttgtgtcgcagaaggacttgacgactaccgctgcacggcttgtccacggggatatgaaggccagtactgtgaaaggtgtgcccctggctatactggcagtccaggcaaccctggaggctcctgccaagaatgtgagtgtgatccctatggctcactgcctgtgccctgtgaccctgtcacaggattctgcacgtgccgacctggagccacgggaaggaagtgtgacggctgcaagcactggcatgcacgcgagggctgggagtgtgttttttgtggagatgagtgcactggccttcttctcggtgacttggctcgcctggagcagatggtcatgagcatcaacctcactggtccgctgcctgcgccatataaaatgctgtatggtcttgaaaatatgactcaggagctaaagcacttgctgtcacctcagcgggccccagagaggcttattcagctggcagagggcaatctgaatacactcgtgaccgaaatgaacgagctgctgaccagggctaccaaagtgacagcagatggcgagcagaccggacaggatgctgagaggaccaacacaagagcaaagtccctgggagaattcattaaggagcttgcccgggatgcagaagctgtaaatgaaaaagctataaaactaaatgaaactctaggaactcgagacgaggcctttgagagaaatttggaagggcttcagaaagagattgaccagatgattaaagaactgaggaggaaaaatctagagacacaaaaggaaattgctgaagatgagttggtagctgcagaagcccttctgaaaaaagtgaagaagctgtttggagagtcccggggggaaaatgaagaaatggagaaggatctccgggaaaaactggctgactacaaaaacaaagttgatgatgcttgggaccttttgagagaagccacagataaaatcagagaagctaatcgcctatttgcagtaaatcagaaaaacatgactgcattggagaaaaagaaggaggctgttgaaagcggcaaacgacaaattgagaacactttaaaagagggcaatgacatactcgatgaagccaaccgtcttgcagatgaaatcaactccatcatagactatgttgaagacatccaaactaaattgccacctatgtctgaggagcttaatgataaaatagatgacctctcccaagaaataaaggacaggaagcttgctgagaaggtgtcccaggctgagagccacgcagctcagttgaatgactcatctgctgtccttgatggaatccttgatgaggctaaaaacatctccttcaatgccactgcagccttcaaagcttacagcaatattaaggactatattgatgaagctgagaaagttgccaaagaagccaaagatcttgcacatgaagctacaaaactggcaacaggtcctcggggtttattaaaggaagatgccaaaggctgtcttcagaaaagcttcaggattcttaacgaagccaagaagttagcaaatgatgtaaaagaaaatgaagaccatctaaatggcttaaaaaccaggatagaaaatgctgatgctagaaatggggatctcttgagaactttgaatgacactttgggaaagttatcagctattccaaatgatacagctgctaaactgcaagctgttaaggacaaagccagacaagccaacgacacagctaaagatgtactggcacagattacagagctccaccagaacctcgatggcctgaagaagaattacaataaactagcagacagcgtcgccaaaacgaatgctgtggttaaagatccttccaagaacagtaagattgccgatgcagatgccactgtcaaaaatttagaacaggaagctgaccggctaatagataaactcaaacccatcaaggaacttgaggataacctaaagaaaaacatctctgagataaaggaattgataaaccaagctcggaaacaagccaattctatcaaagtatctgtgtcttcaggaggtgactgcattcgaacatacaaaccagaaatcaagaaaggaagttacaataatattgttgtcaacgtaaagacagctgttgctgataacctcctcttttatcttggaagtgccaaatttattgactttctggctatagaaatgcgtaaaggcaaagtcagcttcctctgggatgttggatctggagttggacgtgtagagtacccagatttgactattgatgactcatattggtaccgtatcgtagcatcaagaactgggagaaatggaactatttctgtgagagccctggatggacccaaagccagcattgtgcccagcacacaccattcgacgtctcctccagggtacacgattctagatgtggatgcaaatgcaatgctgtttgttggtggcctgactgggaaattaaagaaggctgatgctgtacgtgtgattacattcactggctgcatgggagaaacatactttgacaacaaacctataggtttgtggaatttccgagaaaaagaaggtgactgcaaaggatgcactgtcagtcctcaggtggaagatagtgaggggactattcaatttgatggagaaggttatgcattggtcagccgtcccattcgctggtaccccaacatctccactgtcatgttcaagttcagaacattttcttcgagtgctcttctgatgtatcttgccacacgagacctgagagatttcatgagtgtggagctcactgatgggcacataaaagtcagttacgatctgggctcaggaatggcttccgttgtcagcaatcaaaaccataatgatgggaaatggaaatcattcactctgtcaagaattcaaaaacaagccaatatatcaattgtagatatagatactaatcaggaggagaatatagcaacttcgtcttctggaaacaactttggtcttgacttgaaagcagatgacaaaatatattttggtggcctgccaacgctgagaaacttgagtatgaaagcaaggccagaagtaaatctgaagaaatattccggctgcctcaaagatattgaaatttcaagaactccgtacaatatactcagtagtcccgattatgttggtgttaccaaaggatgttccctggagaatgtttacacagttagctttcctaagcctggttttgtggagctctcccctgtgccaattgatgtaggaacagaaatcaacctgtcattcagcaccaagaatgagtccggcatcattcttttgggaagtggagggacaccagcaccacctaggagaaaacgaaggcagactggacaggcctattatgcaatactcctcaacaggggccgtctggaagtgcatctctccacaggggcacgaacaatgaggaaaattgtgatcagaccagagccgaatctgtttcatgatggaagagaacattccgttcatgtagagcgaactagaggcatctttacagttcaagtggatgaaaacagaagatacatgcaaaacctgacagttgaacagcctatcgaagttaaaaagcttttcgttgggggtgctccacctgaatttcaaccttccccactcagaaatattcctccttttgaaggctgcatatggaatcttgttattaactctgtccccatggactttgcaaggcctgtgtccttcaaaaatgctgacattggtcgctgtgcccatcagaaactccgtgaagatgaagatggagcagctccagctgaaatagttatccagcctgagccagttcccaccccagcctttcctacgcccaccccagttctgacacatggtccttgtgctgcagaatcagaaccagctcttttgatagggagcaagcagttcgggctttcaagaaacagtcacattgcaattgcatttgatgacaccaaagttaaaaaccgtctcacaattgagttggaagtaagaaccgaagctgaatccggcttgcttttttacatggctcgcatcaatcatgctgattttgcaacagttcagctgagaaatggattgccctacttcagctatgacttggggagtggggacacccacaccatgatccccaccaaaatcaatgatggccagtggcacaagattaagataatgagaagtaagcaagaaggaattctttatgtagatggggcttccaacagaaccatcagtcccaaaaaagccgacatcctggatgtcgtgggaatgctgtatgttggtgggttacccatcaactacactacccgaagaattggtccagtgacctatagcattgatggctgcgtcaggaatctccacatggcagaggcccctgccgatctggaacaacccacctccagcttccatgttgggacatgttttgcaaatgctcagaggggaacatattttgacggaaccggttttgccaaagcagttggtggattcaaagtgggattggaccttcttgtagaatttgaattccgcacaactacaacgactggagttcttctggggatcagtagtcaaaaaatggatggaatgggtattgaaatgattgatgaaaagttgatgtttcatgtggacaatggtgcgggcagattcactgctgtctatgatgctggggttccagggcatttgtgtgatggacaatggcataaagtcactgccaacaagatcaaacaccgcattgagctcacagtcgatgggaaccaggtggaagcccaaagcccaaacccagcatctacatcagctgacacaaatgaccctgtgtttgttggaggcttcccagatgacctcaagcagtttggcctaacaaccagtattccgttccgaggttgcatcagatccctgaagctcaccaaaggcacaggcaagccactggaggttaattttgccaaggccctggaactgaggggcgttcaacctgtatcatgcccagccaactaataaaaataagtgtaaccccaggaagagtctgtcaaaacaagtatatcaagtaaaacaaacaaatatattttacctatatatgttaattaaactaatttgtgcatgtacatagaattc

SEQ ID NO: 7721 - protein, 3122 aa, Homo sapiens
MPGAAGVLLLLLLSGGLGGVQAQRPQQQRQSQAHQQRGLFPAVLNLASNALITTNATCGEKGPEMYCKLVEHVPGQPVRNPQCRICNQNSSNPNQRHPITNAIDGKNTWWQSPSIKNGIEYHYVTITLDLQQVFQIAYVIVKAANSPRPGNWILERSLDDVEYKPWQYHAVTDTECLTLYNIYPRTGPPSYAKDDEVICTSFYSKIHPLENGEIHISLINGRPSADDPSPELLEFTSARYIRLRFQRIRTLNADLMMFAHKDPREIDPIVTRRYYYSVKDISVGGMCICYGHARACPLDPATNKSRCECEHNTCGDSCDQCCPGFHQKPWRAGTFLTKTECEACNCHGKAEECYYDENVARRNLSLNIRGKYIGGGVCINCTQNTAGINCETCTDGFFRPKGVSPNYPRPCQPCHCDPIGSLNEVCVKDEKHARRGLAPGSCHCKTGFGGVSCDRCARGYTGYPDCKACNCSGLGSKNEDPCFGPCICKENVEGGDCSRCKSGFFNLQEDNWKGCDECFCSGVSNRCQSSYWTYGKIQDMSGWYLTDLPGRIRVAPQQDDLDSPQQISISNAEARQALPHSYYWSAPAPYLGNKLPAVGGQLTFTISYDLEEEEEDTERVLQLMIILEGNDLSISTAQDEVYLHPSEEHTNVLLLKEESFTIHGTHFPVRRKEFMTVLANLKRVLLQITYSFGMDAIFRLSSVNLESAVSYPTDGSIAAAVEVCQCPPGYTGSSCESCWPRHRRVNGTIFGGICEPCQCFGHAESCDDVTGECLNCKDHTGGPYCDKCLPGFYGEPTKGTSEDCQPCACPLNIPSNNFSPTCHLDRSLGLICDGCPVGYTGPRCERCAEGYFGQPSVPGGSCQPCQCNDNLDFSIPGSCDSLSGSCLICKPGTTGRYCELCADGYFGDAVDAKNCQPCRCNAGGSFSEVCHSQTGQCECRANVQGQRCDKCKAGTFGLQSARGCVPCNCNSFGSKSFDCEESGQCWCQPGVTGKKCDRCAHGYFNFQEGGCTACECSHLGNNCDPKTGRCICPPNTIGEKCSKCAPNTWGHSITTGCKACNCSTVGSLDFQCNVNTGQCNCHPKFSGAKCTECSRGHWNYPRCNLCDCFLPGTDATTCDSETKKCSCSDQTGQCTCKVNVEGIHCDRCRPGKFGLDAKNPLGCSSCYCFGTTTQCSEAKGLIRTWVTLKAEQTILPLVDEALQHTTTKGIVFQHPEIVAHMDLMREDLHLEPFYWKLPEQFEGKKLMAYGGKLKYAIYFEAREETGFSTYNPQVIIRGGTPTHARIIVRHMAAPLIGQLTRHEIEMTEKEWKYYGDDPRVHRTVTREDFLDILYDIHYILIKATYGNFMRQSRISEISMEVAEQGRGTTMTPPADLIEKCDCPLGYSGLSCEACLPGFYRLRSQPGGRTPGPTLGTCVPCQCNGHSSLCDPETSICQNCQHHTAGDFCERCALGYYGIVKGLPNDCQQCACPLISSSNNFSPSCVAEGLDDYRCTACPRGYEGQYCERCAPGYTGSPGNPGGSCQECECDPYGSLPVPCDPVTGFCTCRPGATGRKCDGCKHWHAREGWECVFCGDECTGLLLGDLARLEQMVMSINLTGPLPAPYKMLYGLENMTQELKHLLSPQRAPERLIQLAEGNLNTLVTEMNELLTRATKVTADGEQTGQDAERTNTRAKSLGEFIKELARDAEAVNEKAIKLNETLGTRDEAFERNLEGLQKEIDQMIKELRRKNLETQKEIAEDELVAAEALLKKVKKLFGESRGENEEMEKDLREKLADYKNKVDDAWDLLREATDKIREANRLFAVNQKNMTALEKKKEAVESGKRQIENTLKEGNDILDEANRLADEINSIIDYVEDIQTKLPPMSEELNDKIDDLSQEIKDRKLAEKVSQAESHAAQLNDSSAVLDGILDEAKNISFNATAAFKAYSNIKDYIDEAEKVAKEAKDLAHEATKLATGPRGLLKEDAKGCLQKSFRILNEAKKLANDVKENEDHLNGLKTRIENADARNGDLLRTLNDTLGKLSAIPNDTAAKLQAVKDKARQANDTAKDVLAQITELHQNLDGLKKNYNKLADSVAKTNAVVKDPSKNSKIADADATVKNLEQEADRLIDKLKPIKELEDNLKKNISEIKELINQARKQANSIKVSVSSGGDCIRTYKPEIKKGSYNNIVVNVKTAVADNLLFYLGSAKFIDFLAIEMRKGKVSFLWDVGSGVGRVEYPDLTIDDSYWYRIVASRTGRNGTISVRALDGPKASIVPSTHHSTSPPGYTILDVDANAMLFVGGLTGKLKKADAVRVITFTGCMGETYFDNKPIGLWNFREKEGDCKGCTVSPQVEDSEGTIQFDGEGYALVSRPIRWYPNISTVMFKFRTFSSSALLMYLATRDLRDFMSVELTDGHIKVSYDLGSGMASVVSNQNHNDGKWKSFTLSRIQKQANISIVDIDTNQEENIATSSSGNNFGLDLKADDKIYFGGLPTLRNLSMKARPEVNLKKYSGCLKDIEISRTPYNILSSPDYVGVTKGCSLENVYTVSFPKPGFVELSPVPIDVGTEINLSFSTKNESGIILLGSGGTPAPPRRKRRQTGQAYYAILLNRGRLEVHLSTGARTMRKIVIRPEPNLFHDGREHSVHVERTRGIFTVQVDENRRYMQNLTVEQPIEVKKLFVGGAPPEFQPSPLRNIPPFEGCIWNLVINSVPMDFARPVSFKNADIGRCAHQKLREDEDGAAPAEIVIQPEPVPTPAFPTPTPVLTHGPCAAESEPALLIGSKQFGLSRNSHIAIAFDDTKVKNRLTIELEVRTEAESGLLFYMARINHADFATVQLRNGLPYFSYDLGSGDTHTMIPTKINDGQWHKIKIMRSKQEGILYVDGASNRTISPKKADILDVVGMLYVGGLPINYTTRRIGPVTYSIDGCVRNLHMAEAPADLEQPTSSFHVGTCFANAQRGTYFDGTGFAKAVGGFKVGLDLLVEFEFRTTTTTGVLLGISSQKMDGMGIEMIDEKLMFHVDNGAGRFTAVYDAGVPGHLCDGQWHKVTANKIKHRIELTVDGNQVEAQSPNPASTSADTNDPVFVGGFPDDLKQFGLTTSIPFRGCIRSLKLTKGTGKPLEVNFAKALELRGVQPVSCPAN

SEQ ID NO: 7722 - DNA, 695 bp, Rattus norvegicus
  ref <308>: DATABASE ACCESSION NUMBER: EMBL / S73007
  ref <309>: DATABASE ENTRY DATE: 2000-03-04
accccagtccacgaaattagattggggaaaacaggaggaatcagagttctgcggaagcctagagagccgtgtggagcaaagatacatctttagccatggatgtgttcatgaaaggactttcaaaggccaaggagggagttgtggctgctgctgagaaaaccaagcagggtgtggcagaggcagctgggaagacaaaagagggcgtcctctatgtaggttccaaaactaaggagggagtcgttcatggagtgacaacagtggctgagaagaccaaagagcaagtgacaaatgttggaggggcagtggtgactggtgtgacagcagtcgctcagaagacagtggagggagctgggaacattgctgctgccactggttttgtcaagaaggaccagatgggcaagggtgaagaagggtacccacaagagggaatcctggaagacatgcctgtggaccctagcagtgaggcttatgaaatgccttcagaggaaggctaccaagactatgagcctgaagcctaagaatgtcgttgcacctactgtcctaagatctgcccaggtgttcttccatggcgtacaagtgctcagttccaacgtgctgatgtttcaaagcgtttagattgtacagattataaaaactggaggaggaaacgatgccatcccacttcaccttagtttaccagttgttcttgttacatt

SEQ ID NO: 7723 - protein, 140 aa, Rattus norvegicus; identical to SEQ ID NO: 433
  ref <308>: DATABASE ACCESSION NUMBER: SWISS-Prot / AAB20688
  ref <309>: DATABASE ENTRY DATE: 2001-10-16

SEQ ID NO: 7724 - DNA, 1543 bp, Homo sapiens
  ref <308>: DATABASE ACCESSION NUMBER: Refseq / NM_000345
  ref <309>: DATABASE ENTRY DATE: 2002-11-05
ggagtggccattcgacgacagtgtggtgtaaaggaattcattagccatggatgtattcatgaaaggactttcaaaggccaaggagggagttgtggctgctgctgagaaaaccaaacagggtgtggcagaagcagcaggaaagacaaaagagggtgttctctatgtaggctccaaaaccaaggagggagtggtgcatggtgtggcaacagtggctgagaagaccaaagagcaagtgacaaatgttggaggagcagtggtgacgggtgtgacagcagtagcccagaagacagtggagggagcagggagcattgcagcagccactggctttgtcaaaaaggaccagttgggcaagaatgaagaaggagccccacaggaaggaattctggaagatatgcctgtggatcctgacaatgaggcttatgaaatgccttctgaggaagggtatcaagactacgaacctgaagcctaagaaatatctttgctcccagtttcttgagatctgctgacagatgttccatcctgtacaagtgctcagttccaatgtgcccagtcatgacatttctcaaagtttttacagtgtatctcgaagtcttccatcagcagtgattgaagtatctgtacctgcccccactcagcatttcggtgcttccctttcactgaagtgaatacatggtagcagggtctttgtgtgctgtggattttgtggcttcaatctacgatgttaaaacaaattaaaaacacctaagtgactaccacttatttctaaatcctcactatttttttgttgctgttgttcagaagttgttagtgatttgctatcatatattataagatttttaggtgtcttttaatgatactgtctaagaataatgacgtattgtgaaatttgttaatatatataatacttaaaaatatgtgagcatgaaactatgcacctataaatactaaatatgaaattttaccattttgcgatgtgttttattcacttgtgtttgtatataaatggtgagaattaaaataaaacgttatctcattgcaaaaatattttatttttatcccatctcactttaataataaaaatcatgcttataagcaacatgaattaagaactgacacaaaggacaaaaatataaagttattaatagccatttgaagaaggaggaattttagaagaggtagagaaaatggaacattaaccctacactcggaattccctgaagcaacactgccagaagtgtgttttggtatgcactggttccttaagtggctgtgattaattattgaaagtggggtgttgaagaccccaactactattgtagagtggtctatttctcccttcaatcctgtcaatgtttgctttatgtattttggggaactgttgtttgatgtgtatgtgtttataattgttatacatttttaattgagccttttattaacatatattgttatttttgtctcgaaataattttttagttaaaatctattttgtctgatattggtgtgaatgctgtacctttctgacaataaataatattcgaccatg

SEQ ID NO: 7725 - protein, 140 aa, Homo sapiens; identical to SEQ ID NO: 435
  ref <308>: DATABASE ACCESSION NUMBER: SWISS-Prot / P37840
  ref <309>: DATABASE ENTRY DATE: 2001-10-16

SEQ ID NO: 7726 - DNA, 525 bp, Rattus norvegicus
  ref <308>: DATABASE ACCESSION NUMBER: EMBL / S73424
  ref <309>: DATABASE ENTRY DATE: 2000-03-04
cgcgctttacaccgtcctccggccgtcgctcgcagtctctccgccaccatgcctatgttcatcgtgaacaccaatgttccccgcgcctccgtgccagaggggtttctctccgagctcacccagcagctggcgcaggccaccggcaagccggcacagtacatcgcagtgcacgtggtcccggaccagctcatgacttttagtggcacgagcgacccctgcgccctctgcagcctgcacagcatcggcaagatcggtggcgcccagaaccgcaactacagcaagctgctgtgcggcctgctgtccgatcgcctgcacatcagcccggaccgggtctacatcaactattacgacatgaacgcagccaacgtgggctggaacggttccaccttcgcttgagcccgggcctcacttacctgcaccgctgttcttcgagtcttgctgcacgccccgttctgtgtttatccacccgtaatgatggccaccttccggtcgggagaaataaatggtttgagaccaaaaaaaaaa

SEQ ID NO: 7727 - protein, 114 aa, Rattus norvegicus; identical to SEQ ID NO: 6529
  ref <308>: DATABASE ACCESSION NUMBER: SWISS-Prot / AAB32392
  ref <309>: DATABASE ENTRY DATE: 2002-06-15

SEQ ID NO: 7728 - DNA, 561 bp, Homo sapiens; identical to SEQ ID NO: 6530
  ref <308>: DATABASE ACCESSION NUMBER: Refseq / NM_002415
  ref <309>: DATABASE ENTRY DATE: 2002-11-05

SEQ ID NO: 7729 - protein, 114 aa, Homo sapiens; identical to SEQ ID NO: 6531
  ref <308>: DATABASE ACCESSION NUMBER: SWISS-Prot / P14174
  ref <309>: DATABASE ENTRY DATE: 2002-06-15

SEQ ID NO: 7730 - DNA, 1503 bp, Rattus norvegicus
  ref <308>: DATABASE ACCESSION NUMBER: EMBL / S74572
  ref <309>: DATABASE ENTRY DATE: 2000-03-04
ctaaacatgggtgcatttttggataaacccaaaactgaaaagcacaatgctcacggtgcagggaacggtctgcgttacggtctgagcagtatgcaaggatggagagtagaaatggaagacgcacacactgctgttgtgggaattcctcacggcttggaggactggtcgttttttgcagtctatgatggtcatgctggatcccgagtggcaaattactgttcaacacatctattagaacacatcactaccaatgaagactttagggctgctgacaaatcaggctttgctcttgagccgtcagtggaaaatgttaagactggtatccgaactggctttttgaaaattgatgaatatatgcgtaacttttcagacctgaggaacgggatggacaggagcggctctaccgcagtgggcgtgatgatttcaccgacacacatctactttatcaactgcggtgactcgagagctgttctatgtaggaatggacaagtctgcttttcaacccaggatcacaaaccttgtaatccaatggaaaaggagcgcatccaaaatgcaggaggcagtgtaatgatacagcgtgtgaatgggtcgttagcagtgtctcgtgctctgggggactatgattacaagtgtgttgatggcaagggccccacagagcagcttgtttctccagagcctgaggtttatgagattctaagagcagaagaggatgaatttgtcgtcctggcttgtgatgggatctgggatgtgatgagcaatgaggagctctgtgagtttgttaactctaggcttgaggtgtcagacgacctggagaatgtgtgcaattgggtagtggacacttgtttacataagggaagtcgagataacatgagtattgtgttagtttgctttgcaaatgcccccaaggtctcagatgaagccgtgaaaagagatttagagttggacaagcacttggaatcacgggtggaagaaatcatgcagaagtctggagaggaaggaatgcctgatcttgcccatgtgatgcgcattttgtctgcagaaaatatcccaaatttacctcccgggggaggcctcgctggcaagcgcaatgttattgaagctgtttatagtagacttaatccaaacaaagacaatgatgggttttaccaaccttcaactccatacagtgacaatgtttcctattatgaatggcagacttgagcacgtctatttgtaaagccagctgagaactctggtgacacagcagaggctgatcaacctaccaagagcccggaagtacaaagaagaacaaaagttttgttttgtttttgtaaactcgaaagaaaaaaacaagtccagcattacgtcagtgcggtatctgttcgctgtgagcggtaaccttctagcccatcagcgaaggaggaggagagctcccaccttgccttacaaaccttgcttttccatgttcatgcaataaacacgtttggcttcttggtaaaaaaccgaattgggctgcaggaattc

SEQ ID NO: 7731 - protein, 390 aa, Rattus norvegicus; identical to SEQ ID NO: 4559
  ref <308>: DATABASE ACCESSION NUMBER: SWISS-Prot / AAB33430
  ref <309>: DATABASE ENTRY DATE: 2002-06-15

SEQ ID NO: 7732 - DNA, 1503 bp, Rattus norvegicus; identical to SEQ ID NO: 7730
  ref <308>: DATABASE ACCESSION NUMBER: EMBL / S74572
  ref <309>: DATABASE ENTRY DATE: 2000-03-04

SEQ ID NO: 7733 - protein, 390 aa, Rattus norvegicus; identical to SEQ ID NO: 4559
  ref <308>: DATABASE ACCESSION NUMBER: SWISS-Prot / AAB33430
  ref <309>: DATABASE ENTRY DATE: 2002-06-15

SEQ ID NO: 7734 - DNA, 1503 bp, Rattus norvegicus; identical to SEQ ID NO: 7730
  ref <308>: DATABASE ACCESSION NUMBER: EMBL / S74572
  ref <309>: DATABASE ENTRY DATE: 2000-03-04

SEQ ID NO: 7735 - protein, 390 aa, Rattus norvegicus; identical to SEQ ID NO: 4559
  ref <308>: DATABASE ACCESSION NUMBER: SWISS-Prot / AAB33430
  ref <309>: DATABASE ENTRY DATE: 2002-06-15

SEQ ID NO: 7736 - DNA, 1503 bp, Rattus norvegicus; identical to SEQ ID NO: 7730
  ref <308>: DATABASE ACCESSION NUMBER: EMBL / S74572
  ref <309>: DATABASE ENTRY DATE: 2000-03-04

SEQ ID NO: 7737 - protein, 390 aa, Rattus norvegicus; identical to SEQ ID NO: 4559
  ref <308>: DATABASE ACCESSION NUMBER: SWISS-Prot / AAB33430
  ref <309>: DATABASE ENTRY DATE: 2002-06-15

SEQ ID NO: 7738 - DNA, 3300 bp, Rattus norvegicus
  ref <308>: DATABASE ACCESSION NUMBER: EMBL / S74907
  ref <309>: DATABASE ENTRY DATE: 2000-03-04
cggtcgcacaccccccggtgtcccctcgcctccctcgccgccgcccccttcccccgctcgcgataagaagagccggcggcaggagaggggatgaagatggcggacgcgaagcagaagcggaacgagcagctgaagcgctggatcggctccgagacggacctcgagcctcccgtggtgaagcgccagaagaccaaggtgaagttcgacgatggcgccgtcttcctcgccgcctgctccagcggcgacacggacgaggtcctcaagctgctgcaccgcggcgccgacatcaattacgccaatgtggacggactcaccgccctgcaccaggcttgcattgatgacaatgttgatatggtgaagtttctggtagaaaatggagcaaatatcaatcaacctgacaatgaaggctggattccactccatgcagccgcttcctgtggatatctggatattgcagaatttttgattggtcaaggagcacatgtaggagctgtcaacagtgaaggtgacacacctttagatattgcagaggaggaagcaatggaagagctacttcaaaatgaggttaatcggcaaggtgttgatatagaagcagctcgaaaagaagaggaacgcataatgcttagagacgcgaggcagtggttgaacagtggtcacatcagtgacgtccggcatgcaaagtccggaggcacagcactccacgtggcagcggccaaagggtatacagaagttttaaaacttttaatacaggcaggctatgatgttaatattaaagattatgatggctggacacctcttcatgctgcagctcactggggtaaagaagaagcatgtcggattttagtggacaatctgtgtgatatggagacggtcaacaaagtgggccaaacagcctttgatgtagcagatgaagacattttgggatatctagaggagttgcaaaaaaaacaaaatctgctccatagtgaaaagcgggataagaaatctccactgattgaatcaacagcaaatatggaaaataatcaaccacagaagacttttaaaaacaaggaaacgttgattattgagccagagaaaaatgcatctcgaatcgagtctctggagcaagaaaaggctgatgaggaggaggaaggcaagaaggatgagtccagctgctccagtgaggaggatgaggaggatgactccgagtccgaagcggagacagataagacaaaacccatggcttctgtaactaatgctcacactgccagcactcaggcagctcctgccgctgtgacaacacctactctgtcttccaaccaggggacccctacatcacctgttaaaaagtttcctacatcaactacaaaaatttctcccaaagaagaagaaagaaaagatgaatctcctgcatcctggaggttaggacttagaaagactggcagttatggtgccctggctgagatcactgcatctaaagaagctcagaaggagaaagacactgcaggcgtgatacgttcagcttcgagtcccagactctcgtcctctttggataataaagaaaaggagaaagacaataaaggaacaagacttgcatatgtcgcccctacaatcccaaggcgactaggcagtacgtctgacattgaagagaaggaaaacagagagtcttcaaatttgcgaacaagtagttcttacacaagaagaaaatgggaagatgatcttaaaaaaaatagttcaatcaatgaaggatctacttaccatagaagtacctcaaatcgtttgtgggctgaggatagtactgagaaagagaaggacagtgctcctaccgcagcgaccattcttgttgctccaactgttgtaagtgctgcagcttcttctaccacagccctgaccacaactactgctggcactctttcctccacatcagaggtcagggagagacgcaggtcatacctcactcctgttagggatgaagagtctgaatcccaaaggaaagcaagatctagacaagcaagacagtctagacggtcaacacagggggtgacactgactgacctccaggaagccgaaaagacaataggaagaagccgttctacgagaaccagagaacaagaaaacgaagaaaaagacaaagaagaaaaggaaaagcaggataaagagaaacaagaagaaaagaaggagtcagaagtatctagagaagatgaatataagcaaaagtattccagaacatacgatgagacttatgcacgttacagaccagtgtcaacttcaagttcaagcactccgtcgtcctcctcactttctactctaggcagttcactctatgcctcaagtcagctcaacaggccaaacagccttgtaggtataacctctgcctactcccggggattaaccaaagacaatgaaagagagggagagaaaaaagaagaggaaaaagaaggggaagataagtcacaacctaaatcaatcagagaacgacggcgaccaagagaaaaacggaggtctactggagtctccttctggacacaagatagtgatgaaaatgagcaagagcggcagtcagacaccgaggatggctccagcaagagggacactcagacggattctgtttccaggtatgacagcagttccacgtcatcaagcgatcggtatgactccttgctgggtcgttctgcctcatacagttacttagaagaaaggaaaccatatggtagccgactagaaaaggatgactcaactgacttcaaaaagctttatgaacaaatcttagctgaaaatgaaaaactaaaggcacagctacatgacacaaatatggaactaacggatctaaagttgcagttggaaaaagctacccagagacaagaacgatttgctgacaggtcactattggagatggaaaaaagggaacgaagagctctagaaagaagaatatctgagatggaagaggagctcaaaatgttaccagacttaaaagcagacaaccagaggctaaaggatgaaaatggggccttgatcagagttataagcaaactttccaagtaggacagaaaacacacaagcgaagcagcgggacttgcacacactccccagtggaccacattggcagtcactggacgccagaaagaacccctggagactgtcattttccgatatcctgccaaacgccctcttatctaggagttttgtttcgtttaatcttctgccccacccccttggttatcaagaccattgtttcatgttaaagccgctgctgagaagattttttttcaatgactgagaaaacttgtttacagctccagcaaataaagaaagtgttcaagg

SEQ ID NO: 7739 - protein, 976 aa, Rattus norvegicus
  ref <308>: DATABASE ACCESSION NUMBER: SWISS-Prot / AAB32731
  ref <309>: DATABASE ENTRY DATE: 2003-02-01
MKMADAKQKRNEQLKRWIGSETDLEPPVVKRQKTKVKFDDGAVFLAACSSGDTDEVLKLLHRGADINYANVDGLTALHQACIDDNVDMVKFLVENGANINQPDNEGWIPLHAAASCGYLDIAEFLIGQGAHVGAVNSEGDTPLDIAEEEAMEELLQNEVNRQGVDIEAARKEEERIMLRDARQWLNSGHISDVRHAKSGGTALHVAAAKGYTEVLKLLIQAGYDVNIKDYDGWTPLHAAAHWGKEEACRILVDNLCDMETVNKVGQTAFDVADEDILGYLEELQKKQNLLHSEKRDKKSPLIESTANMENNQPQKTFKNKETLIIEPEKNASRIESLEQEKADEEEEGKKDESSCSSEEDEEDDSESEAETDKTKPMASVTNAHTASTQAAPAAVTTPTLSSNQGTPTSPVKKFPTSTTKISPKEEERKDESPASWRLGLRKTGSYGALAEITASKEAQKEKDTAGVIRSASSPRLSSSLDNKEKEKDNKGTRLAYVAPTIPRRLGSTSDIEEKENRESSNLRTSSSYTRRKWEDDLKKNSSINEGSTYHRSTSNRLWAEDSTEKEKDSAPTAATILVAPTVVSAAASSTTALTTTTAGTLSSTSEVRERRRSYLTPVRDEESESQRKARSRQARQSRRSTQGVTLTDLQEAEKTIGRSRSTRTREQENEEKDKEEKEKQDKEKQEEKKESEVSREDEYKQKYSRTYDETYARYRPVSTSSSSTPSSSSLSTLGSSLYASSQLNRPNSLVGITSAYSRGLTKDNEREGEKKEEEKEGEDKSQPKSIRERRRPREKRRSTGVSFWTQDSDENEQERQSDTEDGSSKRDTQTDSVSRYDSSSTSSSDRYDSLLGRSASYSYLEERKPYGSRLEKDDSTDFKKLYEQILAENEKLKAQLHDTNMELTDLKLQLEKATQRQERFADRSLLEMEKRERRALERRISEMEEELKMLPDLKADNQRLKDENGALIRVISKLSK

SEQ ID NO: 7740 - DNA, 4616 bp, Homo sapiens
atgaagatggcggacgcgaagcagaagcggaacgagcagctgaaacgctggatcggctccgagacggacctcgagcctccggtggtgaagcgccagaagaccaaggtgaagttcgacgatggcgccgtcttcctggctgcttgctccagcggcgacacggacgaggtcctcaagctgctgcaccgcggcgccgacatcaattacgccaatgtggacggactcactgccctgcaccaggcttgcattgatgacaatgttgatatggtgaagtttctggtagaaaatggagcaaatattaatcaacctgataatgaaggctggataccactacatgcagcagcttcctgtggatatcttgatattgcagagtttttgattggtcaaggagcacatgtaggggctgtcaacagtgaaggagatacacctttagatattgcggaggaggaggcaatggaagagctacttcaaaatgaagttaatcggcaaggggttgatatagaagcagctcgaaaggaagaagaacggatcatgcttagagatgccaggcagtggctaaatagtggtcatataaatgatgtccggcatgcaaaatctggaggtacagcacttcacgttgcagctgctaaaggctatacggaagttttaaaacttttaatacaggcaggctatgatgttaatattaaagactatgatggctggacacctcttcatgctgcagctcattggggtaaagaagaagcatgtcgaattttagtggacaatctgtgtgatatggagatggtcaacaaagtgggccaaacagcctttgatgtagcagatgaagacattttaggatatttagaagagttgcaaaagaaacaaaatctgctccatagtgaaaaacgggacaagaaatctccactaattgaatcaacagcaaatatggacaataatcagtcacagaagacctttaaaaacaaagagacgttgattattgaaccagagaaaaatgcatcccgtattgaatctctggaacaagaaaaggttgatgaagaagaagaaggaaagaaggatgagtctagctgctctagtgaagaagatgaggaagatgactcggaatcagaagctgaaacagataagacaaaacccctggcttctgtaactaatgccaacacttctagtacacaagcagctcctgtagctgttacaacacctactgtgtcatcaggtcaagcaacacctacatcacctattaaaaagtttccaaccacagctacaaaaatttctcccaaagaagaagagagaaaagatgagtctcctgcaacttggaggttaggacttagaaagacgggcagctatggtgcacttgctgaaatcacagcatctaaagagggtcagaaagaaaaagatactgcaggtgttacacgttcagcttcaagtcccagactttcctcctctttggataataaagaaaaggagaaagatagtaaaggaactaggcttgcatatgttgcacctacaataccaagacgactagccagtacatctgacattgaagagaaagaaaacagagattcttcaagtttgcgaacaagtagttcatatacaaggagaaaatgggaagatgatcttaaaaaaaatagctcagttaatgaaggatcaacgtatcataaaagttgctcctttggtagaagacaagatgatttgattagttctagtgttccaagcaccacatcaacaccaacagttacctctgcagctgggcttcagaaaagcctgctttccagcacaagcactactacaaagattacaacgggttcttcctcagcaggcacacaaagcagtacctcaaatcgtttgtgggctgaggatagtactgagaaagaaaaggacagtgttcctacggcagtgaccattcctgttgctccaactgttgtaaatgctgcagcttctaccacaaccctgactacaactactgctggcactgtctcctccacaacagaggtcagggagagacgcagatcatacctcactcctgttagggatgaagagtctgaatcccaaagaaaagcaagatctagacaagcaagacaatctagaagatcaacacagggagtgacattaactgatcttcaagaagctgagaaaacaataggaagaagtcgttctacccgaaccagagaacaagaaaatgaagaaaaagaaaaagaggaaaaagagaaacaagataaagagaaacaagaagaaaagaaggagtcagaaacatctagagaagatgaatataaacaaaagtactccagaacgtatgatgagacttaccagcgttataggccagtatcaacttcaagttcaaccactccatcctcttcactttctactatgagcagttcactgtatgcttcaagtcaactaaacaggccaaatagtcttgtaggcataacttctgcttactccagaggaataacaaaagaaaatgaaagagagggagaaaaaagagaagaggagaaagaaggagaagataaatcacaacctaaatcaatcagagaacgacgacgaccaagagagaaaagaagatctacaggagtttcattttggacacaagatagtgatgaaaatgaacaagaacaacaatcagacacagaagagggatccaataagaaagaaactcagacggattccatttctagatatgaaaccagttctacatcagctggtgatcgatatgattccttgctgggtcgctctggatcatacagttacttagaagaaagaaaaccttacagcagcaggctagaaaaggatgactcaactgactttaaaaagctttatgaacaaattctagctgaaaatgaaaagctgaaggcacagctacatgatacaaatatggaactaacagatcttaaattacagttggaaaaggccacccagagacaagaaagatttgctgatagatcactgttggaaatggaaaaaagggaacgaagagctctagaaagaagaatatctgaaatggaagaagagctcaaaatgttaccagacctaaaagcagacaaccagaggctaaaggatgaaaatggggccttgatcagagttataagcaaactttccaaataaaaaaaaaaaaagcagcaagtaatggaattgcacatattagtaacccagtggaccataattggcagtcactggaagtctgggaagaatccttggagactgtcattttcggatatcctgccaaatgccctcttatctagaatttttgtttcattttgtttaattttctggggtgtttttgttgttgttggtttgttttttgttttttttttttaatcaagaccattgtttcatgttaatgcagctgctgagaagatttttttttaatgactgagaaaacttgtttacagctccagcatataaggaaagtgttcaaggccagatatgcctcagatatttaaccagtaagccttagttgtacataaatacttttgtgtcaacaaaaactttcagctctcacagaagacagttactcaacattttttgatgtgccacagtttcgagtttttcgatatttaaattttttggcttttcatctaagtttgggtttgtattttttccttctaaactcttcatgtggcagagtcttctatgttttcacagctttttcattacagaaaagaacacttgctcttctgtgattattgtcatgtattaggctaatgctgtgttgtctcccacctggaactgaattgcttggtggaacatatgctttcactgtttgtgcaatatgcatttatttcttatatgaatgctttaaagtcatttgaggttagatcttttaattcctattttctgcttcattggtcactttttttttattgtagtataagatgttagattctgtaatcttcacattcattttagcaggtactgagtgatgctgtatatacaaataagtgtattgttttgatttttagaccaccacatggcatgcttgactatttcttatttcaaatgtctgctaatgcagagtaggctactccatgatagtgttaaaaaacaaaatttgctaacaatgtgatataaagactttaaaagttacacattatgtggagccctatctttacaaaagtttcctactgtaaagtgcttttattttcagttttcacttgatagtactcaaccataattaaagttgcataagataattgctttacatttcacatacctatatttatctgagtgctgtctaaaactgttgtgctagccaaagtaatgctatgaaatcatttgcagaattaacccgtgagttaatgttaaatgcactgttattgccatgtgaagaggcatcgactttgataccaccatcatgttcagaccattttatacatttcagtggcctttttttttttttaaggaaaaaaaagcgcaaaaccaagtacatagtgacgatggcttttatttggacaaatagcttttatattttcattaaaccatgcaaaaaatactacatctttctggcacataactgtctccttaaccactgaacagttcagccatttgaataaattgtacattgtaaagcttatagtagctgattgtattattgattgtattgtatactatattaaatgtgaatttgt

SEQ ID NO: 7741 - protein, 1030 aa, Homo sapiens
MKMADAKQKRNEQLKRWIGSETDLEPPVVKRQKTKVKFDDGAVFLAACSSGDTDEVLKLLHRGADINYANVDGLTALHQACIDDNVDMVKFLVENGANINQPDNEGWIPLHAAASCGYLDIAEFLIGQGAHVGAVNSEGDTPLDIAEEEAMEELLQNEVNRQGVDIEAARKEEERIMLRDARQWLNSGHINDVRHAKSGGTALHVAAAKGYTEVLKLLIQAGYDVNIKDYDGWTPLHAAAHWGKEEACRILVDNLCDMEMVNKVGQTAFDVADEDILGYLEELQKKQNLLHSEKRDKKSPLIESTANMDNNQSQKTFKNKETLIIEPEKNASRIESLEQEKVDEEEEGKKDESSCSSEEDEEDDSESEAETDKTKPLASVTNANTSSTQAAPVAVTTPTVSSGQATPTSPIKKFPTTATKISPKEEERKDESPATWRLGLRKTGSYGALAEITASKEGQKEKDTAGVTRSASSPRLSSSLDNKEKEKDSKGTRLAYVAPTIPRRLASTSDIEEKENRDSSSLRTSSSYTRRKWEDDLKKNSSVNEGSTYHKSCSFGRRQDDLISSSVPSTTSTPTVTSAAGLQKSLLSSTSTTTKITTGSSSAGTQSSTSNRLWAEDSTEKEKDSVPTAVTIPVAPTVVNAAASTTTLTTTTAGTVSSTTEVRERRRSYLTPVRDEESESQRKARSRQARQSRRSTQGVTLTDLQEAEKTIGRSRSTRTREQENEEKEKEEKEKQDKEKQEEKKESETSREDEYKQKYSRTYDETYQRYRPVSTSSSTTPSSSLSTMSSSLYASSQLNRPNSLVGITSAYSRGITKENEREGEKREEEKEGEDKSQPKSIRERRRPREKRRSTGVSFWTQDSDENEQEQQSDTEEGSNKKETQTDSISRYETSSTSAGDRYDSLLGRSGSYSYLEERKPYSSRLEKDDSTDFKKLYEQILAENEKLKAQLHDTNMELTDLKLQLEKATQRQERFADRSLLEMEKRERRALERRISEMEEELKMLPDLKADNQRLKDENGALIRVISKLSK

SEQ ID NO: 7742 - DNA, 3167 bp, Rattus norvegicus
  ref <308>: DATABASE ACCESSION NUMBER: EMBL / S75359
  ref <309>: DATABASE ENTRY DATE: 2000-03-04
gaattcatgagatggaaacataggtcaaagctgtttggagaaattggaactacagttttatctagccacatctctgagaagtctgaagaaagcagcaggtgaaagtcattgtcaagtgattttgttcttctgtaaggaaacctcgttcagtaaggccgtttacttcagtgaaacagcaggaccagtaatcaaggtggcccggacaggacacgtgcgaattggacaatgactcagctatacacttacatcagattactgggagcctgtctgttcatcatttctcatgttcaagggcagaatctagatagtatgctccatggtactggtatgaaatcagacgtggaccagaagaagccggaaaatggagtgacgttagcaccagaggacaccttacctttcttaaaatgctattgctcaggacactgcccagatgacgctattaataacacatgcataactaatggccattgctttgccattatagaagaagatgatcagggagaaaccacgttaacttctgggtgtatgaagtatgaaggctctgattttcaatgcaaggattcaccaaaagcccagctacgcaggacaatagaatgttgtcggaccaatttgtgcaaccaatatttgcagcctacactgccccctgtcgttataggcccattctttgatggcagcgtccgatggctggctgtgctcatctctatggctgtctgtattgtcgccatgatcgtcttctccagctgcttctgttacaaacattactgtaagagtatctcaagcagaggtcgttacaaccgtgacttggaacaggatgaagcatttattccagtaggagaatcactgaaagacctgattgaccagtcacaaagctctggtagtggatctggattacctttattggttcagcgaactattgccaaacagattcagatggttcggcaggttggtaaaggccggtatggagaagtatggatgggtaaatggcgtggtgaaaaagtggctgtcaaagtattttttaccactgaagaagctagctggtttagagaaacagaaatctaccagacggtgttaatgcgtcatgaaaatatacttggttttatagctgcagacattaaaggcaccggttcctggactcagctgtatttgattactgattaccatgagaatgggtctctctatgacttcctgaaatgtgccaccctggacaccagagccctactcaagttagcttattctgctgcctgtggtctgtgccacctccacacagaaatttatggcacgcaaggcaagcctgcaattgctcatcgagacctgaagagcaaaaacatccttattaagaaaaatggtagttgctgtattgctgacctgggcctagctgttaaattcaacagtgacacaaatgaagttgacatacccttgaacaccagggtgggcaccaggcggtacatggctccagaagtgctggacgagagcctgagtaaaaaccatttccagccctacatcatggctgacatctacagctttggtttgatcatttgggagatggcccgtcgctgtattacaggaggaatcgtggaggaatatcaattaccatattacaacatggtgcctagtgacccatcttatgaagacatgcgtgaggtcgtgtgtgtgaaacgcttgcggccaatcgtctctaaccgctggaacagtgatgaatgtcttcgagccgttttgaagctgatgtcagaatgctgggcccataatccagcatccagactcacagctttgagaatcaagaagacgctcgcaaagatggttgaatcccaggatgtaaagatttgacaaacagttttgagaaagaatttagactgcaagaaattcacccgaggaagggtggagttagcatggactaggatgtcggcttggtttccagactctctcctctacatcttcacaggctgctaacagtaaactttcaggactctgcagaatgcagggttggagcttcagacataggacttcagacatgctgttctttgcgtatggacagctttgttttaaatgtgggcttttgatgcctttttggtttttatgaattgcatcaagactccaatcctgataagaagtctctggtcaaactctggttactcactatcctgtccataaagtggtgctttctgtgaaagccttaaggaaattagtgagctcagcagagatggagaaaggcatatttgccctctacagagaaaatatctgtctgtgttctgtctctgtaaacagcctggactatgatctctttgggatgctgcctggttgatgatggtgcatcatgcctctgatatgcataccagacttcctctgctgccatgggcttacaagacaagaatgtgaaggttgcacaggacggtatttgtggccagtggtttaaatatgcaatatctaatcgacattcgccaatctcataaaagccatctaccttgtaactgaagtaacttctctaccaactttatttttagcataatagttgtaaaggccaaactatgtataaagtgtccatagactcgaactgttttcctccagtcaccattttgttttccttttggtaattatttttgttatataattcctcctatccagaattggcgctcactgtcttgaaccatactttgaaagaaatgcctcttcctggagtctgccttactgcatctgatcaccatgtgcatacctctgatcaaattctggagtctttgttctcggtacctcttaaaaagggaaattgtgtatcatgtgtagtgtgcttttattttcaaaatcttcatagcctttattctagccatttttacctacatactcattctgtacaaaacagctcactcggtctcacggctgatcctcagtggaaatgatttaaagtagagctgtgtacgaatttcagaattcatgtatttaaaaacttcacactaacactttactaagatattgtctcatatcttttatgaggatgtcagctgattttcaatgactataaatgtatcttagctatctaaatcttttgaaatttggttttataatttctggtccctaacttgtgaagacaaagaggcagaagtacccagtctaccacatttacactgtacattattaaataaaaaaatgtatattttaaaaaaaaaaaaaaaaaaaaa

SEQ ID NO: 7743 - protein, 532 aa, Rattus norvegicus
  ref <308>: DATABASE ACCESSION NUMBER: SWISS-Prot / AAB33865
  ref <309>: DATABASE ENTRY DATE: 2003-02-01
MTQLYTYIRLLGACLFIISHVQGQNLDSMLHGTGMKSDVDQKKPENGVTLAPEDTLPFLKCYCSGHCPDDAINNTCITNGHCFAIIEEDDQGETTLTSGCMKYEGSDFQCKDSPKAQLRRTIECCRTNLCNQYLQPTLPPVVIGPFFDGSVRWLAVLISMAVCIVAMIVFSSCFCYKHYCKSISSRGRYNRDLEQDEAFIPVGESLKDLIDQSQSSGSGSGLPLLVQRTIAKQIQMVRQVGKGRYGEVWMGKWRGEKVAVKVFFTTEEASWFRETEIYQTVLMRHENILGFIAADIKGTGSWTQLYLITDYHENGSLYDFLKCATLDTRALLKLAYSAACGLCHLHTEIYGTQGKPAIAHRDLKSKNILIKKNGSCCIADLGLAVKFNSDTNEVDIPLNTRVGTRRYMAPEVLDESLSKNHFQPYIMADIYSFGLIIWEMARRCITGGIVEEYQLPYYNMVPSDPSYEDMREVVCVKRLRPIVSNRWNSDECLRAVLKLMSECWAHNPASRLTALRIKKTLAKMVESQDVKI

SEQ ID NO: 7744 - DNA, 2932 bp, Homo sapiens
  ref <308>: DATABASE ACCESSION NUMBER: Refseq / NM_004329
  ref <309>: DATABASE ENTRY DATE: 2002-11-05
gctccgcgccgagggctggaggatgcgttccctggggtccggacttatgaaaatatgcatcagtttaatactgtcttggaattcatgagatggaagcataggtcaaagctgtttggagaaaatcagaagtacagttttatctagccacatcttggaggagtcgtaagaaagcagtgggagttgaagtcattgtcaagtgcttgcgatcttttacaagaaaatctcactgaatgatagtcatttaaattggtgaagtagcaagaccaattattaaaggtgacagtacacaggaaacattacaattgaacaatgactcagctatacatttacatcagattattgggagcctatttgttcatcatttctcgtgttcaaggacagaatctggatagtatgcttcatggcactgggatgaaatcagactccgaccagaaaaagtcagaaaatggagtaaccttagcaccagaggataccttgccttttttaaagtgctattgctcagggcactgtccagatgatgctattaataacacatgcataactaatggacattgctttgccatcatagaagaagatgaccagggagaaaccacattagcttcagggtgtatgaaatatgaaggatctgattttcagtgcaaagattctccaaaagcccagctacgccggacaatagaatgttgtcggaccaatttatgtaaccagtatttgcaacccacactgccccctgttgtcataggtccgttttttgatggcagcattcgatggctggttttgctcatttctatggctgtctgcataattgctatgatcatcttctccagctgcttttgttacaaacattattgcaagagcatctcaagcagacgtcgttacaatcgtgatttggaacaggatgaagcatttattccagttggagaatcactaaaagaccttattgaccagtcacaaagttctggtagtgggtctggactacctttattggttcagcgaactattgccaaacagattcagatggtccggcaagttggtaaaggccgatatggagaagtatggatgggcaaatggcgtggcgaaaaagtggcggtgaaagtattctttaccactgaagaagccagctggtttcgagaaacagaaatctaccaaactgtgctaatgcgccatgaaaacatacttggtttcatagcggcagacattaaaggtacaggttcctggactcagctctatttgattactgattaccatgaaaatggatctctctatgacttcctgaaatgtgctacactggacaccagagccctgcttaaattggcttattcagctgcctgtggtctgtgccacctgcacacagaaatttatggcacccaaggaaagcccgcaattgctcatcgagacctaaagagcaaaaacatcctcatcaagaaaaatgggagttgctgcattgctgacctgggccttgctgttaaattcaacagtgacacaaatgaagttgatgtgcccttgaataccagggtgggcaccaaacgctacatggctcccgaagtgctggacgaaagcctgaacaaaaaccacttccagccctacatcatggctgacatctacagcttcggcctaatcatttgggagatggctcgtcgttgtatcacaggagggatcgtggaagaataccaattgccatattacaacatggtaccgagtgatccgtcatacgaagatatgcgtgaggttgtgtgtgtcaaacgtttgcggccaattgtgtctaatcggtggaacagtgatgaatgtctacgagcagttttgaagctaatgtcagaatgctgggcccacaatccagcctccagactcacagcattgagaattaagaagacgcttgccaagatggttgaatcccaagatgtaaaaatctgatggttaaaccatcggaggagaaactctagactgcaagaactgtttttacccatggcatgggtggaattagagtggaataaggatgttaacttggttctcagactctttcttcactacgtgttcacaggctgctaatattaaacctttcagtactcttattaggatacaagctgggaacttctaaacacttcattctttatatatggacagctttattttaaatgtggtttttgatgcctttttttaagtgggtttttatgaactgcatcaagacttcaatcctgattagtgtctccagtcaagctctgggtactgaattgcctgttcataaaacggtgctttctgtgaaagccttaagaagataaatgagcgcagcagagatggagaaatagactttgccttttacctgagacattcagttcgtttgtattctacctttgtaaaacagcctatagatgatgatgtgtttgggatactgcttattttatgatagtttgtcctgtgtccttagtgatgtgtgtgtgtctccatgcacatgcacgccgggattcctctgctgccatttgaattagaagaaaataatttatatgcatgcacaggaagatattggtggccggtggttttgtgctttaaaaatgcaatatctgaccaagattcgccaatctcatacaagccatttactttgcaagtgagatagcttccccaccagctttattttttaacatgaaagctgatgccaaggccaaaagaagtttaaagcatctgtaaatttggactgttttccttcaaccaccattttttttgtggttattatttttgtcacggaaagcatcctctccaaagttggagcttctattgccatgaaccatgcttacaaagaaagcacttcttattgaagtgaattcctgcatttgatagcaatgtaagtgcctataaccatgttctatattctttattctcagtaacttttaaaagggaagttatttatattttgtgtataatgtgctttatttgcaaatcaccc

SEQ ID NO: 7745 - protein, 532 aa, Homo sapiens
  ref <308>: DATABASE ACCESSION NUMBER: SWISS-Prot / P36894
  ref <309>: DATABASE ENTRY DATE: 2002-06-15
MTQLYIYIRLLGAYLFIISRVQGQNLDSMLHGTGMKSDSDQKKSENGVTLAPEDTLPFLKCYCSGHCPDDAINNTCITNGHCFAIIEEDDQGETTLASGCMKYEGSDFQCKDSPKAQLRRTIECCRTNLCNQYLQPTLPPVVIGPFFDGSIRWLVLLISMAVCIIAMIIFSSCFCYKHYCKSISSRRRYNRDLEQDEAFIPVGESLKDLIDQSQSSGSGSGLPLLVQRTIAKQIQMVRQVGKGRYGEVWMGKWRGEKVAVKVFFTTEEASWFRETEIYQTVLMRHENILGFIAADIKGTGSWTQLYLITDYHENGSLYDFLKCATLDTRALLKLAYSAACGLCHLHTEIYGTQGKPAIAHRDLKSKNILIKKNGSCCIADLGLAVKFNSDTNEVDVPLNTRVGTKRYMAPEVLDESLNKNHFQPYIMADIYSFGLIIWEMARRCITGGIVEEYQLPYYNMVPSDPSYEDMREVVCVKRLRPIVSNRWNSDECLRAVLKLMSECWAHNPASRLTALRIKKTLAKMVESQDVKI

SEQ ID NO: 7746 - DNA, 3167 bp, Rattus norvegicus; identical to SEQ ID NO: 7742
  ref <308>: DATABASE ACCESSION NUMBER: EMBL / S75359
  ref <309>: DATABASE ENTRY DATE: 2000-03-04

SEQ ID NO: 7747 - protein, 532 aa, Rattus norvegicus; identical to SEQ ID NO: 7743
  ref <308>: DATABASE ACCESSION NUMBER: SWISS-Prot / AAB33865
  ref <309>: DATABASE ENTRY DATE: 2003-02-01

SEQ ID NO: 7748 - DNA, 2932 bp, Homo sapiens; identical to SEQ ID NO: 7744
  ref <308>: DATABASE ACCESSION NUMBER: Refseq / NM_004329
  ref <309>: DATABASE ENTRY DATE: 2002-11-05

SEQ ID NO: 7749 - protein, 532 aa, Homo sapiens; identical to SEQ ID NO: 7745
  ref <308>: DATABASE ACCESSION NUMBER: SWISS-Prot / P36894
  ref <309>: DATABASE ENTRY DATE: 2002-06-15

SEQ ID NO: 7750 - DNA, 1483 bp, Rattus norvegicus
  ref <308>: DATABASE ACCESSION NUMBER: EMBL / S75435
  ref <309>: DATABASE ENTRY DATE: 2000-03-04
ggaagaacagccacaacttacgacactgatctgaccaacttgtgttggccaggaaactcagaaccgctcataactacagcagaccatgaagaaccctggctcacaagccctctttcctttacatcttccctggaaagccagcctggcagatgggaatccactcctgaaagtagtcatattttcatgcctcttgacctttggacgtgggaagttggagcaacctgaaatatcaatatccagagccagagatgagactgctgaaatatcctgtaaaggttttgttgaaagctttcaaagtgtagccatacactggtaccggcagaaaccaaaccaaggtttagagtttctattatatgtcctcgcaactcctactgagactttcttaaataagaagtacaaaaaaatgaaggcaagtaaaaattctagtgcttctacgtcgatattgacaatatattccttggaggaagaagacgaagctatctactactgttcctacggctatagctcgggctggagcaaagtatttgcagaaggaactaaactcatagtagttcctgctgacaaaagctttaatgcagacatttcccccaagcccaccatttttcttccttcttctgctgaaacaaatctccacaagactgggacatacctttgcctccttgaaaagttcttccccgatgtcataagggtgtattggaaagaaaaggacagcaatacgatcctggactcccaggaaggggagacgctgaagactaacgatacatacatgaagtttagctggcttactgtgcctgaagggtcaatgggtaaagagcacagatgtattgtcaaacacgagaacaacaaaggaggagcagaccaagagattttctttccttcaataaagaaagttgctctgagtacccagcctacaacttgctggcaagataaaaacgatgtgctgcagctccagttcacgggcacctctgcctactatacttacctgctcctgctcctcaagagcgtgctctacttggccatcatcagcttctttctgcttagaagaacagcttcctgtggcaataagaagagatcctaaggaaataaacggtggaccagcaagtccattgattttcatccttactgtcataaaggtgacttatgggggtccagctgccttctcttgctggctttgacttctgtaaagtcacatgcacagcattctgttattgtgcaaacatttttctcacatttgtaagcaatttcagcaacttctctctaactgagctcaccttcctgattccatcctctccagcagtcccctcccccagaagcccaaagtatcaaagctctggtacgcataggctgcaggatttcccttgttgctcttgaaccagtcaactctctgaaagcctccgctctagacaacctgaagagccttctttattgttggattctgtgccttgtatttcatattagagacaataaatattttttaaaaatc

SEQ ID NO: 7751 - protein, 331 aa, Rattus norvegicus
  misc_feature (1)..(331): Xaa=Unknown amino acid
MKNPGSQALFPLHLPWKASLADGNPLLKVVIFSCLLTFGRGKLEQPEISISRARDETAEISCKGFVESFQSVAIHWYRQKPNQGLEFLLYVLATPTETFLNKKYKKMKASKNSSASTSILTIYSLEEEDEAIYYCSYGYSSGWSKVFAEGTKLIVVPADKSFNADISPKPTIFLPSSAETNLHKTGTYLCLLEKFFPDVIRVYWKEKDSNTILDSQEGETLKTNDTYMKFSWLTVPEGSMGKEHRCIVKHENNKGGADQEIFFPSIKKVALSTQPTTCWQDKNDVLQLQFTGTSAYYTYLLLLLKSVLYLAIISFFLLRRTASCGNKKRSX

SEQ ID NO: 7752 - DNA, 1530 bp, Homo sapiens
  ref <308>: DATABASE ACCESSION NUMBER: EMBL / M16768
  ref <309>: DATABASE ENTRY DATE: 2000-03-04
gtgaggacaccgctttacaacgatgcagggggccccatgtcaccctcacccatgggaagtttgacttggtggactcagccaagccacagaggtctaacgcttctctgcggtgatttcaggctgccctggcagaaagcacagtgcctgcagacatgctgtcactgctccacgcatcaacgctggcagtccttggggctctgtgtgtatatggtgcaggtcacctagagcaacctcaaatttccagtactaaaacgctgtcaaaaacagcccgcctggaatgtgtggtgtctggaataacaatttctgcaacatctgtatattggtatcgagagagacctggtgaagtcatacagttcctggtgtccatttcatatgacggcactgtcagaaaggaatccggcattccgtcaggcaaatttgaggtggataggatacctgaaacgtctacatccactctcaccattcacaatgtagagaaacaggacatagctacctactactgtgccttgttggagggaaattataagaaactctttggcagtggaacaacacttgttgtcacagataaacaacttgatgcagatgtttcccccaagcccactatttttcttccttcaattgctgaaacaaagctccagaaggctggaacatacctttgtcttcttgagaaatttttccctgatgttattaagatacattggcaagaaaagaagagcaacacgattctgggatcccaggaggggaacaccatgaagactaacgacacatacatgaaatttagctggttaacggtgccagaaaagtcactggacaaagaacacagatgtatcgtcagacatgagaataataaaaacggagttgatcaagaaattatctttcctccaataaagacagatgtcatcacaatggatcccaaagacaattgttcaaaagatgcaaatgatacactactgctgcagctcacaaacacctctgcatattacatgtacctcctcctgctcctcaagagtgtggtctattttgccatcatcacctgctgtctgcttagaagaacggctttctgctgcaatggagagaaatcataacagacggtggcacaaggaggccatcttttcctcatcggttattgtccctagaagcgtcttctgaggatctagttgggctttctttctgggtttgggccatttcagttctcatgtgtgtactattctatcattattgtataacggttttcaaaccagtgggcacacagagaacctcactctgtaataacaatgaggaatagccacggcgatctccagcaccaatctctccatgttttccacagctcctccagccaacccaaatagcgcctgctatagtgtagacatcctgcggcttctagccttgtccctctcttagtgttctttaatcagataactgcctggaagcctttcattttacacgccctgaagcagtcttctttgctagttgaattatgtggtgtgtttttccgtaataagcaaaataaatttaaaaaaatgaaaagtt

SEQ ID NO: 7753 - protein, 311 aa, Homo sapiens
  misc_feature (1)..(311): Xaa=Unknown amino acid
MLSLLHASTLAVLGALCVYGAGHLEQPQISSTKTLSKTARLECVVSGITISATSVYWYRERPGEVIQFLVSISYDGTVRKESGIPSGKFEVDRIPETSTSTLTIHNVEKQDIATYYCALLEGNYKKLFGSGTTLVVTDKQLDADVSPKPTIFLPSIAETKLQKAGTYLCLLEKFFPDVIKIHWQEKKSNTILGSQEGNTMKTNDTYMKFSWLTVPEKSLDKEHRCIVRHENNKNGVDQEIIFPPIKTDVITMDPKDNCSKDANDTLLLQLTNTSAYYMYLLLLLKSVVYFAIITCCLLRRTAFCCNGEKSX

SEQ ID NO: 7754 - DNA, 1483 bp, Rattus norvegicus; identical to SEQ ID NO: 7750
  ref <308>: DATABASE ACCESSION NUMBER: EMBL / S75435
  ref <309>: DATABASE ENTRY DATE: 2000-03-04

SEQ ID NO: 7755 - protein, 331 aa, Rattus norvegicus; identical to SEQ ID NO: 7751
  misc_feature (1)..(331): Xaa=Unknown amino acid

SEQ ID NO: 7756 - DNA, 825 bp, Homo sapiens
  ref <308>: DATABASE ACCESSION NUMBER: EMBL / X72500
  ref <309>: DATABASE ENTRY DATE: 1993-09-09
atgctgtcactgctccacgcatcaacgctggcagtccttggggctctgtgtgtatatggtgcaggtcacctagagcaacctcaaatttccagtactaaaacgctgtcaaaaacagcccgcctggaatgtgtggtgtctggaataacaatttctgcaacatctgtatattggtatcgagagagacctggtgaagtcatacagttcctggtgtccatttcatatgacggcactgtcagaaaggaatccggcattccgtcaggcaaatttgaggtggataggatacctgaaacgtctacatccactctcaccattcacaatgtagagaaacaggacatagctacctactactgtgccttgtgggaggcccagcaagagttgggcaaaaaaatcaaggtatttggtcccggaacaaagcttatcattacagataaacaacttgatgcagatgtttcccccaagcccactatttttcttccttcaattgctgaaacaaagctccagaaggctggaacatacctttgtcttcttgagaaatttttccctgatgttattaagatacattgggaagaaaagaagagcaacacgattctgggatcccaggaggggaacaccatgaagactaatgacacatacatgaaatttagctggttaacggtgccagaaaagtcactggacaaagaacacagatgtatcgtcagacatgagaataataaaaacggagttgatcaagaaattatctttcctccaataaagacagatgtcatcacaatggatcccaaagacaattgttcaaaagatgcaaatgatacactactgctgcagtaa

SEQ ID NO: 7757 - protein, 275 aa, Homo sapiens
  misc_feature (1)..(275): Xaa=Unknown amino acid
MLSLLHASTLAVLGALCVYGAGHLEQPQISSTKTLSKTARLECVVSGITISATSVYWYRERPGEVIQFLVSISYDGTVRKESGIPSGKFEVDRIPETSTSTLTIHNVEKQDIATYYCALWEAQQELGKKIKVFGPGTKLIITDKQLDADVSPKPTIFLPSIAETKLQKAGTYLCLLEKFFPDVIKIHWEEKKSNTILGSQEGNTMKTNDTYMKFSWLTVPEKSLDKEHRCIVRHENNKNGVDQEIIFPPIKTDVITMDPKDNCSKDANDTLLLQX

SEQ ID NO: 7758 - DNA, 1134 bp, Rattus norvegicus
  ref <308>: DATABASE ACCESSION NUMBER: EMBL / S75997
  ref <309>: DATABASE ENTRY DATE: 2000-03-04
caagcggaggaagagctaccagcagctgcgacgaagactgcctttcttcctccttgcctttctcactcagtggccctgttaaacaagattgtgagtttctggaaaaaaaaaaaaaaaaaaaaaaaaaaaaaaaaaaaaaaaaaaaaaaaaaaaaaaaaaaaaaaaaaaaaacaggtgacaatgccaagtctgtgagcagacagtattctctgaaggtaacgaagctggagcatgaggctgagcaggcaaaggtggagctggactttatcctgtcacagcagaaggagctggaagaccttctgagcccgttagaggagtcagtgaaggagcaaagtggcaccatctaccttcagcatgctgatgaggagcgtgagaagacctacaagctggctgagaacatcgatgctcagctcaagcgcatggcccaggacctcaaggacattattgagcacctgaacatggctggtggccctgcagacaccagtgacccactgcagcagatctgcaagatcctcaatgcacacatggactcccttcagtgggtggaccagagctctgccctgctgcagaggagggtggaggaggccagccgtgtgtgtgagagccggcgcaaggaacaggaacgcagcctgcgcattgcctttgactagccatacatgagttgggggtgggggtacctcttttgttgtagggctgctggctttggggtggttgtattgttgagaaaaatgctctttggtttggttccctgttatcagaagtggtttgcgaaggcatgatgtcatggatgtaataacctgtgtgctctggagacaggtgtgaaggtcactgaactctaggccagcatttaaagaacaagggcaaactcatcctttagccactccaatacaactgtgacagtgggtcactggtgtctgcagggccaccagccatgttcaggtgctcaataatgtccttgaggtcctgggccatgcgcttgagctgagcatcgatgttctcagccagcttgtaggtcttctcacgctcctcatcagcatgctgaaggtagatggtgccactttgctccttcactgactcctctaacgggctcagaaggtcttccagctcctgcagctgctttcgggtttcgtgccg

SEQ ID NO: 7759 - protein, 215 aa, Rattus norvegicus
  ref <308>: DATABASE ACCESSION NUMBER: SWISS-Prot / AAB33384
  ref <309>: DATABASE ENTRY DATE: 2002-10-01
SGGRATSSCDEDCLSSSLPFSLSGPVKQDCEFLEKKKKKKKKKKKKKKKKKKKKKKTGDNAKSVSRQYSLKVTKLEHEAEQAKVELDFILSQQKELEDLLSPLEESVKEQSGTIYLQHADEEREKTYKLAENIDAQLKRMAQDLKDIIEHLNMAGGPADTSDPLQQICKILNAHMDSLQWVDQSSALLQRRVEEASRVCESRRKEQERSLRIAFD

SEQ ID NO: 7760 - DNA, 3200 bp, Homo sapiens
  ref <308>: DATABASE ACCESSION NUMBER: Refseq / NM_016553
  ref <309>: DATABASE ENTRY DATE: 2002-11-05
gagctgcgaaagggcgggaaaggcagttggagaagaggtaagcggttactcactccatggctgcagcaaggagaggcggcggcggcctcggctgaagaaagaaggtgggagcggagagcgcaggcgtgaaatcttcccaaggctgcagacaccgacggatttgctttgggagccagagtagctgccgccaccagagtccggagccatgagcgggtttaattttggaggcactggggcccctacaggcgggttcacgtttggcactgcaaagacggcaacaaccacacctgctacagggttttctttctccacctctggcactggagggtttaattttggggctcccttccaaccagccacaagtaccccttccaccggcctgttctcacttgccacccagactccggccacacagacgacaggcttcacttttggaacagcgactcttgcttcggggggaactggattttctttggggatcggtgcttcaaagctcaacttgagcaacacagctgccaccccagccatggcaaaccccagcggctttgggctgggcagcagcaacctcactaatgccatatcgagcaccgtcacctccagccagggcacagcacccaccggctttgtgtttggcccctccaccacctctgtggctccagctaccacatctggaggcttctcattcactggtggaagcacggcccaaccctccggtttcaacattggctcagcagggaattcagcccagcccacggcacctgccacgttgcccttcactccggccacgccagcagccaccacagcaggtgccacacagccagctgctcccacacccacagccaccatcaccagtactgggcccagcctctttgcgtcaatagcaactgctccaacctcatctgccaccactggactctccctctgtacccctgtgaccacagcgggcgcccccactgctgggacacagggcttcagcttaaaggcacctggagcagcttccggcacctccacaacaacatccaccgctgccaccgccaccgccaccaccaccaccagcagcagcaccaccggctttgccttgaatttaaaaccactggcgccagccgggatccccagcaatacagcagctgccgtgaccgctccacctggccctggcgcagctgcaggggcggctgccagctccgccatgacctacgcgcagctggagagcctgatcaacaaatggagcctggagctagaggaccaggagcggcacttcctccagcaggccacccaggtcaacgcctgggaccgcacgctgatcgagaatggagaaaagatcaccagcctgcaccgcgaggtggagaaggtgaagctggaccagaagaggctggaccaggagctcgacttcatcctgtcccagcagaaggagctggaagacctgctgagcccactggaggagttggtcaaggagcagagcgggaccatctacctgcagcacgcggatgaggagcgtgagaaaacctacaagctggctgagaacatcgacgcacagctcaagcgcatggcccaggatctcaaggacatcatcgagcacctgaacacgtccggggcccccgccgacaccagtgacccactgcagcagatctgcaagatcctcaatgcgcacatggactcactgcagtggatcgaccagaactcggccctgctgcagaggaaggtggaggaggtgaccaaggtgtgcgagggccggcgcaaggagcaggagcgcagcttccggatcacctttgactgagcgacagcagccctggggcccgcaggtccctagggagttcatgaggggaatgcgccctgttgtctgtagtttggggttgtggcaagatacttgtttgtttgtttctttctttcacatgactgcccttgacatgatcgctgtgtgctttgcgtttttccatttaggagggtattctgggccttctgcccaggcagcagcctcatgggtgtggcttctgtggctttcatttgagtatctttggccccttttcacctactgcgaccacccacctcatcctggctcagcctggtgatggagaagtgctgatggtcttggtcccagccagggtcgtgggggcagccactctctccaaagcatagtcatgggtgtcatgaaaaaataccaaatgtaagagaacctccaagtcagggcgcagtggctcacccctgtaatctcagcactttgggtggccaaggcgggcagatgacttgaggtcaggagttcgagaccagcctggccaacatggtgaaaccccgtctctactaaaaatacaaaaattagtcaggtgtggtggacgcctgtgatctcaatctcagctactcgggaggctgaggcaggagaatcacttgaacccaggaggtgttgcagtgaaccaagatcacaccactgcactccagcctaggcaacagagactctgtctcaaaaaaaaaaaaaaaaaaaagaaactcccaggagacagcagcctagttttcgagtgtgagcttgtgcttgtgaaagctaaccatgctaaccaccaaggcaaagcagcacagtgtgaatagaacagagcgggatcaagaatttcacagaagacaggtcagctgaggggcctgcacacacagggtgttgaggaaccacagatgggcgccgagaggcctgccttttgcctggcccaggctcacccccaccttgggcctcacctcctctaggaagccttcccagctacccgaagctcaggtggccttcttgcaggtccccgtagcaccctgagcctgtaccttgggtggcacttgttatgctatcctgtgctagccgtttgtgcctcgtctcgctgttagattgtgagttcccatgggcagagacccactgtcgttccccgtgtgtccccagcccggtccctgtcacatttgttaaatgaaagaacaatgaagcccagtgtaacgtcagtccacagaaatagccacagcttccagtggtggccgtagacttggctcggaacttagtggcaccagagtaactctagtcagttacagtaaaatccactgtgtgtggaaggcagaagctagcggttgtatcccaagcatcttttgtatttgtctttatactttgctgaattctctgaaatacctattactgtatgtggcttttctaaataaatgtattgtgaaactaaaaaaaaaaaaaaaaa

SEQ ID NO: 7761 - protein, 522 aa, Homo sapiens [sequence omitted]

SEQ ID NO: 7762 - DNA, 1950 bp, Rattus norvegicus
  ref <308>: DATABASE ACCESSION NUMBER: EMBL / S76742
  ref <309>: DATABASE ENTRY DATE: 2000-03-04
ggcagggtggggctcaccgctccccacttaccggcctcgcccctctcgtgcgcgttaatgagattagcaattaaaaggcgggcgagccgcggccagagaccaggccctgacgagaagcgagcgcgggacatggagaaggcacggcctcaatggggcaatccgctgcagttcgttttcgcctgtatctcctacgccgtgggtttgggcaatgtgtggcgcttcccctacctgtgccagatgtacggcggagggagtttcctggtcccctacctcatcatgctcattgtggaggggatgccactcttgtacctggagctggctgtggggcagcgcatgcggcagggcagcattggtgcctggaggaccatcagcccctaccttagtggtgtcggtgttgccagtgtggtggtctccttcttcctctccatgtactacaatgtcatcaatgcctggggcttctggtacctcttccactccttccaggatcccctgccgtggtctgtctgcccactgaatagtaaccgcacaggctatgatgaggagtgtgagaaggcttcgtcgacacagtacttctggtacaggaaaacactcaacatctcaccgtccatccaggagaatggaggagtgcagtgggagccagccctgtgcctcaccctggcctggctgatggtatatctgtgcatcctgagaggcaccgaatctactggcaaggtggtctacttcaccgcattgatgccttactgtgttcttattatctacttggtccgtggcctcacactccatggagccaccaatggcctgatgtacatgttcacacctaagattgagcagctagccaaccccaaggcctggatcaatgcagccacgcagatcttcttctcactgggcttgggttttggcagcctgatcgcttttgccagctacaatgaaccctccaacgactgccagaagcatgctgtcattgtgtctgtcatcaacagctccacctccatatttgccagcattgtcaccttctccatctatggcttcaaggccaccttcaactatgaaaactgcttaaacaaggtgattctgctgctgaccaattcttttgaccttgaagatggctttctgacagccagcaacctggaggaggtgaaggactacctggcatctacttacccaaacaagtacagtgaagtgttcccacacattagaaactgcagcttggaatcagagctgaacacggctgtccaaggcacaggcctggccttcatcgtctacgctgaggccattaaaaacatggaagtgtcccagctctggtcagtgctctacttcttcatgctgctgatgctgggaatggggagcatgcttggaaatacagcggccatcctcacccctctgactgacagcaaggtcatctccagctacctgcccaaggaggccatttcaggtctggtgtgcctcattaactgtgctgttggcatggtgttcaccatggaggctgggaactactggtttgacatattcaatgactatgcagccacgctgtctctgctgctcattgtgctggtggagactatagctgtgtgctacgtgtatgggctgaggagatttgaaagtgatcttcgggccatgactggccggcccctcaactggtactggaaggccatgtgggcttttgtgagcccactgctcatcatcggcctctttatcttctacctgagtgactacatcctcacgggaacgctgcagtaccaagcctgggatgctactcaggggcagctggtgaccaaggattaccctccacatgcactagctgtcatcggtttgctggtggcttcatctactatgtgcatccccctggtggccctggggactttcatcaggaatcgcctcaagaggggaggctcttccccagtggcctaagaatggacctcccaaagaccgaagtcagccactctgtttcac

SEQ ID NO: 7763 - protein, 616 aa, Rattus norvegicus
  ref <308>: DATABASE ACCESSION NUMBER: SWISS-Prot / AAB32806
  ref <309>: DATABASE ENTRY DATE: 2002-06-01
MRLAIKRRASRGQRPGPDEKRARDMEKARPQWGNPLQFVFACISYAVGLGNVWRFPYLCQMYGGGSFLVPYLIMLIVEGMPLLYLELAVGQRMRQGSIGAWRTISPYLSGVGVASVVVSFFLSMYYNVINAWGFWYLFHSFQDPLPWSVCPLNSNRTGYDEECEKASSTQYFWYRKTLNISPSIQENGGVQWEPALCLTLAWLMVYLCILRGTESTGKVVYFTALMPYCVLIIYLVRGLTLHGATNGLMYMFTPKIEQLANPKAWINAATQIFFSLGLGFGSLIAFASYNEPSNDCQKHAVIVSVINSSTSIFASIVTFSIYGFKATFNYENCLNKVILLLTNSFDLEDGFLTASNLEEVKDYLASTYPNKYSEVFPHIRNCSLESELNTAVQGTGLAFIVYAEAIKNMEVSQLWSVLYFFMLLMLGMGSMLGNTAAILTPLTDSKVISSYLPKEAISGLVCLINCAVGMVFTMEAGNYWFDIFNDYAATLSLLLIVLVETIAVCYVYGLRRFESDLRAMTGRPLNWYWKAMWAFVSPLLIIGLFIFYLSDYILTGTLQYQAWDATQGQLVTKDYPPHALAVIGLLVASSTMCIPLVALGTFIRNRLKRGGSSPVA

SEQ ID NO: 7764 - DNA, 5350 bp, Homo sapiens
  ref <308>: DATABASE ACCESSION NUMBER: Refseq / NM_020208
  ref <309>: DATABASE ENTRY DATE: 2001-02-03
actgccgtgccggacccccgagccggagccgagcgcgccgaggccggggccatggagaaagcgcggccgctgtgggccaactcgctacagttcgtgttcgcctgcatctcgtacgccgtgggcctgggcaacgtgtggcgattcccgtacctgtgccagatgtacggcggaggtagtttcctggtcccctacatcatcatgcttatcgtggagggaatgccgctcttgtacctggaactggctgtggggcagcgcatgcggcagggcagcatcggcgcctggaggaccatcagcccgtacctcagtggtgtcggggtcgccagcgtggtggtctctttcttcctctccatgtactacaacgtcatcaacgcctgggccttctggtacctcttccactccttccaggatcccctgccgtggtctgtctgcccactgaatggtaaccacacgggctacgatgaggagtgcgagaaggcgtcctccacacagtacttctggtacaggaaaaccctcaatatctcgccgtccctccaggagaacgggggtgtgcagtgggagccggcgctgtgcctcctcctggcctggctggtggtgtacctgtgcatcctgcgtggcaccgagtccactggcaaggtggtgtatttcacggcgtcactgccctattgcgtgctcatcatctacctcatcaggggcctcacgctccacggagccaccaatggcctcatgtacatgttcactcccaagatagagcagctggccaaccccaaggcctggatcaatgcagccacccagatcttcttctcacttggcctgggcttcggcagcctgatcgccttcgccagctacaatgagccatccaacaactgccagaagcacgccatcatcgtgtccctcatcaacagcttcacctccatatttgccagcattgtcaccttctccatctatggcttcaaggccaccttcaattatgaaaactgcttgaagaaggtgagtctgctgctgaccaacacttttgaccttgaagatggctttttgacagccagcaacctggagcaggtgaagggctacctcgcatctgcctacccaagcaaatacagcgagatgttcccgcaaatcaaaaactgcagcttggaatcggagctagacacggccgtccagggcactggcctggcattcatcgtctacacagaggccattaaaaacatggaggtgtcccagctgtggtcggtgctctacttcttcatgctgctgatgctgggcattgggagcatgctggggaacacagcggccatcctcacccctctgacagacagcaagatcatctccagccacctgcccaaggaggccatctcaggtctggtgtgccttgtcaactgtgccattggcatggtgttcacgatggaggctgggaactactggtttgacatattcaacgactacgcggccacactgtccctgctgctcatcgtgctggtggagacgattgccgtgtgctacgtgtacgggctgaggagatttgaaagtgaccttaaggccatgaccggccgagctgtgagctggtactggaaggtgatgtgggctggcgtaagcccactgctgattgtcagcctctttgtcttctacctgagcgactacatcctcacggggaccctgaagtatcaagcctgggacgcctcccagggccagctcgtgaccaaagattacccggcctatgcactggctgtcatcgggctgcttgtggcctcctccaccatgtgcatccccctggcggccctggggacttttgttcagcgtcgcctcaagaggggagacgcagaccccgtggcctgagatgtgggcttcccagccgctcacggttttacagatactatttacaggcggaaactcctcggctgctttttcaaatgcttaagccaggagtgctcagcccatcaacttcctgagtgtctaaagaagatgaggaaggtgtgcaggaagaaaactcccttgggagaacgcacaccctcccgtggtggctgttcctccctgtcacctgcctcctcatcatggaagggggtgggctatgaaagccggtctcaaagataactgcatccttcattccaggaaagccctagaattagggcacattgcaaactgaaatatgactataattcttatgggaccaaatttaagcaatttttgtttttggctgaagagacaccaaaatattagaggacaaatatttttagatccatttaaggagttttgaagtgcctaagatgacctatttgtcagtggtgcaaaattaattctcttcttttttgagttgtagtgaatatgcaatttctgtgttccccttccaccctttaaatcttaggatgacaagttataaagaaagaagatctttgtctgggacccccaaagggatcctttctctaaggtctctgacagtgggtccaggaccagacctctctacaaaaaattgccccaactacagtttgcaaccccaaaccacattagaagtctgtgcagacatccctccgtggtgtgtgtcttggtgcattggaaaaggagtcaggagccactgtgaggtgagaatgaaagtggatctcagctgggcacggtggctcacgcctgtaatcctagcaccttgggggtcaaggtgggtggatcacttgaggtcaggagtttgaggccagcctggccaacatggcgaaaccccatttctactaaaaatacaaaaaaattagctgggagtggtggcataggcctgtaattccagctactctggctgctgaggcacaagaatcatttgaacctaggaggtggcggttgctgtgagccaagatcatgccactccactccagtctgggcgacagagcaagactctgactcaaaaaaaaaaaaaagtggctctgactttcccataggcttaatattacatttggacatcgtggccaactctatcaagaccacaaataccacttacaattaattttaaattattcatctgtacatagttttctaaaatgtatataattcaaacagagcatcttgtaactgaagacacaccatatctatgatatcgcattagtccatgtggggaaaagaaagatcagattgttactgtgtctgtgtagaaaaggaagacataagaaactccattttgatctgtactaagaaaaattgtttctgctttgagatgttgttagcctataactttagccccaactctgtgctcacagaaacatgcgctgtaatgaatcaaagtttaatggatttagggctgtgcaggatgtgccttgttaacaatatgtttgcaggctgtatgcttggtagaagtcatcgccattctccattctcgattaaccagggacacaatgcacagcagaaagctgcagggacctctgcccaagaaagcctgggtattgtccaaggtttcccccccactgagacagcctgagatatggcctcatgggaagggaaagacctgactgtcccccagcccgacacctgtaaagggtcggtgctgaggaggaatagtgaaggagggaggcctctttgcagttgagataagaggaaggcttctgtctcctgcttgtccctggtaatggaatgtctcggtgtaaagctgaccattcccattcgttctattctgagataggagaaaaccgccctgtggctggaggtgagatatgctggcagcaatactgctctgttactccttgctacactgagatgtttgggtaaagagaaacataaatctagcctacgtgcacatctgggcacagtacctttccttgaacttattcgtgatacagattcctttgctcacatgtttccctgctgaccttcttcccacctgttgccctgctacactcccctcgctaagacagtaaaaataatgatcaataaatactgagggaactcagaggccagcgccggtgcgggtcctccacatgctgagcgccggtcctgggcccactgttctttctctatactttgtctctgtgtcttatttcttttctcaaaaaaatttttctttttttaactgcaataaagtaggtcgttacccctaaagtgagcgagtcccttcctgctctaacgtccagtgcttccttgagatcatggaattctggagagtttctgtggatatatttgcacagatatctttgaagacacaaacactcacctgggacgttggccggagatgtctttttatttttgtgctgtaaaattctcttacagcaaaaataggctttagaaaggtcttctactgtcttcagcaaccatctcatcttccagcttcacctgattgtccagttatcatacatttgactttcaaatgtatgaaccagcatgtaccccatggatttaatcttatctaccccgtggattcaatcttcttatcagaaggttcttttatgtcaaaaaacctgctgtcaaggcttgaagagccggcacactcaatggcaaacacagcaccgagtctgctctgaatcctggaggatctggccctcctctcaacccccactcacagtcaccgtcttacaactcagggccacctgggatcagtcatcagtcagggtgcgtaagccttgaataccaggtagccgcaggagtgaaaagataaatgtcctagatcattaccttattcagtgtccccaccttgcagcgcattccaaccacctgggagcatttaaaactccagatgcccacaccacaccctggggccacccatcagaccttctggaagcaagacctgggcctccatggccccaaaaactccctaggtgatccgatgtgcagccaaatttgagaggccccatttaaaaaagaaagaacatgggtggtacattgaggagtatttacattttataaaatgacttaaaaatttgaaggcatttttgagcatttccaattatatggaagagttacttctacggaatagtttttgctcatggaactcaaacagatgaagcaccactgttacagaataatgtgctccagatgaaaatgtctcgtttctgtgaatttcatgaagagcagaacatttctcaagaatcctcttgagccagtaatcaatcctgtctcaaaaaatgttctttgccatttcctagatactgcacaaaagtggccatgtcgacatttgtccacccaccctccaataagctggagcgacaaagggacattccatccctgtacccttagtggtagccatgacacgatggccagatcatggactccggaaagctttctgtttttactggaaacatagcaaaccttgatttagctccaagaaattgagtagggaaatatttgttttttagcaattgtcatagtaaataaaactctaagcaaatgtgtgtac

SEQ ID NO: 7765 - protein, 592 aa, Homo sapiens
  ref <308>: DATABASE ACCESSION NUMBER: Refseq / NP_064593
  ref <309>: DATABASE ENTRY DATE: 2001-02-03
MEKARPLWANSLQFVFACISYAVGLGNVWRFPYLCQMYGGGSFLVPYIIMLIVEGMPLLYLELAVGQRMRQGSIGAWRTISPYLSGVGVASVVVSFFLSMYYNVINAWAFWYLFHSFQDPLPWSVCPLNGNHTGYDEECEKASSTQYFWYRKTLNISPSLQENGGVQWEPALCLLLAWLVVYLCILRGTESTGKVVYFTASLPYCVLIIYLIRGLTLHGATNGLMYMFTPKIEQLANPKAWINAATQIFFSLGLGFGSLIAFASYNEPSNNCQKHAIIVSLINSFTSIFASIVTFSIYGFKATFNYENCLKKVSLLLTNTFDLEDGFLTASNLEQVKGYLASAYPSKYSEMFPQIKNCSLESELDTAVQGTGLAFIVYTEAIKNMEVSQLWSVLYFFMLLMLGIGSMLGNTAAILTPLTDSKIISSHLPKEAISGLVCLVNCAIGMVFTMEAGNYWFDIFNDYAATLSLLLIVLVETIAVCYVYGLRRFESDLKAMTGRAVSWYWKVMWAGVSPLLIVSLFVFYLSDYILTGTLKYQAWDASQGQLVTKDYPAYALAVIGLLVASSTMCIPLAALGTFVQRRLKRGDADPVA

SEQ ID NO: 7766 - DNA, 711 bp, Rattus norvegicus
  ref <308>: DATABASE ACCESSION NUMBER: EMBL / S76758
  ref <309>: DATABASE ENTRY DATE: 2000-03-03
taaagcggtagccggctggtgcaggaaagcaacaagttccccagcggtcttcccgccctagcctgacaagccgaagcttttcttacctggcgacagggaaatctcctgagccgagctcatctttgccacagccccaggtgtgacctgagcagtgggcaaaggagcggcgtgcaaattggattatttgtatgggggtactctgaaactccctcactttttctgggaactttttgtgctagggcgcagtgacaggcgttgagaaagctgcttcaggaaacgcccgctatatagcagggcagttggacagtcattggtaacctcgctcattcattagaatcacgtaagaactcaaagggaaacgtgtctctcagaatgagggcgtttgcgtaaatctataggtttttcaacatcgatgccagttgctttgtcttctgtaatcgccaaggtggatgagagttgaagcttgcgatattgctttgggttattagattcataagtcacaccaagtggtgggcgatccactgagcaaagccaacttctcacatgatgacttcaaacaagacacattaccttccagcatctgttggggagacgagattttaagacactgagtctccaggacagcaaagccacaatgttccaccaggtgagaagggtgatgaccatccttttccttactatggttatttcatacttcggttgcatgaaggc

SEQ ID NO: 7767 - DNA, 479 bp, Homo sapiens
  ref <308>: DATABASE ACCESSION NUMBER: EMBL / AB038670
  ref <309>: DATABASE ENTRY DATE: 2001-05-16
tcattcattagaatcacgtaagaactcaaaaggaaacgtgtctctcggagtgagggcgtttgcgtaaatctataggtttttcgacatcgatgccagttgctttgtcttctgtagtcgccaaggtggttgagagtttaagcttgcggatattgcaaagggttattagattcataagtcacaccaagtggtgggcgatccactgagcaaagccgaacttctcacatgatgacttcaaacaagacacattaccttccagcatctgttggggagacgagattttaagacacttgagtctccaggacagcaaaggcacaatgttccaccaggtgagaagagtgatgaccatccttttccttactatggttatttcatactttggttgcatgaaggctgcccccatgaaagaagcaaacatccgaggacaaggtggcttggcctacccaggtgtgcggacccatgggactctggagagcgtgaat

SEQ ID NO: 7768 - protein, 47 aa, Homo sapiens
  ref <308>: DATABASE ACCESSION NUMBER: SWISS-Prot / BAB55545
  ref <309>: DATABASE ENTRY DATE: 2001-12-01
MTILFLTMVISYFGCMKAAPMKEANIRGQGGLAYPGVRTHGTLESVN

SEQ ID NO: 7769 - DNA, 960 bp, Rattus norvegicus
  ref <308>: DATABASE ACCESSION NUMBER: EMBL / S77532
  ref <309>: DATABASE ENTRY DATE: 2000-03-04
cggccatgtcactgggcgggcggcatgcaggcctggtcagcggaagccaccctgaggatggcctcacaagtggtgccagtcttttgcataaccatgccagccttcccagccagcccagctccctccctgacctctcacagaggccacccgactcctttagtggactcgggagggcaggggtgactgcaggcgccagtgagatcaagcgggaggagaaagaggacgaggaggtcacatcagtggcagaccacgctgaggaagacaagaaggacctgaaggtcccacgcacacgtaccagcccagacgaggacgaggacgaccttctccccccagagcagaaggccgagcgggagaaggagcgccgggtggccaataacgcccgagagcgcctgcgtgtccgcgacatcaatgaggcctttaaggagctcggccgcatgtgccagctgcacctcaacagcgagaagccgcagaccaaactgctcatcctgcaccaggccgtggccgtcatcctcagcctggagcagcaggtgcgagaacgcaacctgaaccccaaagcagcctgcttgaagcggcgggaggaggagaaggtatctggcgtggtcggggatccgcagctggcgctgtcagccgcccacaccggcctgggtgaggcccacaatccagccggacacctgtgaccgtcacagggtcttcgttgaccaggaccaccacatctctgccgggtgcacccagatggtcctgatgatacatctccatcgaggcatgggcagagggctctgggacacttcagggcctgggggagttggcacggagcagcccacctgtcttggcccagtaaccaagctgaagagcggctcctcctctcgattagcgggaactggaaacaaagcagcatgcccacttatcagaaaggaaaaaagatgccttaactatgtcagacggaagagtcggaccgaattc

SEQ ID NO: 7770 - protein, 649 aa, Rattus norvegicus
  ref <308>: DATABASE ACCESSION NUMBER: SWISS-Prot / AAB21103
  ref <309>: DATABASE ENTRY DATE: 2001-10-16
MMNQSQRMAPVGSDKELSDLLDFSMMFPLPVANGKGRPASLAGTQFAGSGLEDRPSSESWGNSEQNSSSFDPSRAYSEGAHFSDSHSSLPPSTFLGAGLGGKGSERNAYATFGRDTSVGTLSQAGFLPGELGLSSPGPLSPSGVKSSSQYYTSFPSNPRRRAADGGLDTQPKKVRKVPPGLPSSVYPSSSGDNYSRDATAYPSAKTPSSAYPSPFYVADGSLHPSAELWSPPGQVGFGPMLGDGSAPLPLAPGSSSVSSGAFGGLQQQDRMGYQLHGSEVNGTLPAVSSFSAAPGTYSGTSGHTPPVSGADSLLGTRGTTASSSGDALGKALASIYSPDHSSNNFSPSPSTPVGSPQGLPGTSQWPRAGAPSALSPNYDAGLHGLSKMEDRLDEAIHVLRSHAVGTASELHGLLPGHSTLTTSFAGPMSLGGRHAGLVSGSHPEDGLTSGASLLHNHASLPSQPSSLPDLSQRPPDSFSGLGRAGVTAGASEIKREEKEDEEVTSVADAEEDKKDLKVPRTRTSPDEDEDDLLPPEQKAEREKERRVANNARERLRVRDINEAFKELGRMCQLHLSTEKPQTKLLILHQAVAVILSLEQQVRERNLNPKAACLKRREEEKVSGVVGDPQLALSAAHPGLGEAHNPAGHL

SEQ ID NO: 7771 - DNA, 2954 bp, Homo sapiens
  misc_feature (1)..(2954): n=a, c, g or t
  ref <308>: DATABASE ACCESSION NUMBER: EMBL / M31222
  ref <309>: DATABASE ENTRY DATE: 2000-03-04
acgcgccgcgtgcccggccgcgcccagcagggtttccaggcctgaggtgcccgccctggccccaggagaatgaaccagccgcagaggatggcgcctgtgggcacagacaaggagctcagtgacctcctggacttcagcatgatgttcccgctgcctgtcaccaacgggaagggccggcccgcctccctggccggggcgcagttcggaggttcaggtcttgaggaccggcccagctcaggctcctggggcagcggcgaccagagcagctcctcctttgaccccagccggaccttcagcgagggcacccacttcactgagtcgcacagcagcctctcttcatccacattcctgggaccgggactcggaggcaagagcggtgagcggggcgcctatgcctccttcgggagagacgcaggcgtgggcggcctgactcaggctggcttcctgtcaggcgagctggccctcaacagccccgggcccctgtccccttcgggcatgaaggggacctcccagtactacccctcctactccggcagctcccggcggagagcggcagacggcagcctagacacgcagcccaagaaggtccggaaggtcccgccgggtcttccatcctcggtgtacccacccagctcaggtgaggactacggcagggatgccaccgcctacccgtccgccaagacccccagcagcacctatcccgcccccttctacgtggcagatggcagcctgcacccctcagccgagctctggagtcccccgggccaggcgggcttcgggcccatgctgggtgggggctcatccccgctgcccctcccgcccggtagcggcccggtgggcagcagtggaagcagcagcacgtttggtggcctgcaccagcacgagcgtatgggctaccagctgcatggagcagaggtgaacggtgggctcccatctgcatcctccttctcctcagcccccggagccacgtacggcggcgtctccagccacacgccgcctgtcagcggggccgacagcctcctgggctcccgagggaccacagctggcagctccggggatgccctcggcaaagcactggcctcgatctactccccggatcactcaagcaataacttctcgtccagcccttctacccccgtgggctccccccagggcctggcaggaacgtcacagtggcctcgagcaggagcccccggtgccttatcgcccagctacgacgggggtctccacggcctgcagagtaagatagaagaccacctggacgaggccatccacgtgctccgcagccacgccgtgggcacagccggcgacatgcacacgctgctgcctggccacggggcgctggcctcaggtttcaccggccccatgtcactgggcgggcggcacgcaggcctggttggaggcagccaccccgaggacggcctcgcaggcagcaccagcctcatgcacaaccacgcggccctccccagccagccaggcaccctccctgacctgtctcggcctcccgactcctacagtgggctagggcgagcaggtgccacggcggccgccagcgagatcaagcgggaggagaaggaggacgaggagaacacgtcagcggctgaccactcggaggaggagaagaaggagctgaaggccccccgggcccggaccagcccagacgaggacgaggacgaccttctccccccagagcagaaggccgagcgggagaaggagcgccgggtggccaataacgcccgggagcggctgcgggtccgtgacatcaacgaggcctttaaggagctggggcgcatgtgccaactgcacctcaacagcgagaagccccagaccaaactgctcatcctgcaccaggctgtctcggtcatcctgaacttggagcagcaagtgcgagagcggaacctgaatcccaaagcagcctgtttgaaacggcgagaagaggaaaaggtgtcaggtgtggttggagacccccagatggtgctttcagctccccacccaggcctgagcgaagcccacaaccccgccgggcacatgtgaaaggtatgcctccgtgggacgagccaccccgtttcagccctgtgctctggccccagaacggccactcgagaccccgggattcatccacatccacacctcacacacctgttgtcagcatcgagccaacaccaacctgacaaggttcggagtgatgggggcggccaaggtgacactgggtccaggagctccctgggccctggcctaccactcactggcctcgctccccctgtccccgaatctcagccaccgttgcactctgtgacctgtcccatggatccnnnnactnnatcttggccctgttgcctgggctgacaggagnnnnnnntttttttccagtaaacaaaacctgaaagcaagcaacaaaacatacactttgtcagagaagaaaaaatgccttaactataaaaagcggagaaatggaaacatatcactcaagggggatgctgtggaaacctggcttattcttctaaagccaccagcaaattgtgcctaagcgaaatattttttttaaggaaaataaaaacattagttacaagattttttttcttaatgtgagatgaaaattagcaaggatgctgcctttggtctctggtttttttaagctttttttgcatatgttttgtaagcaacaaatttttttgtataaaagtcccgtgtctctcgctatttctgctgctgttcctagactgagcattgcatttcttgatcaaccagatgattaaacgttgtattaaaaaaaaaaaggagaaggagcgccgggtggccaataacgcccgggagcggctgcgggtccgtgacatcaacgaggccttaaggagctggggcgcatgtgccaactgcacctcaacagcgagaagccccagaccaaactgctcatcctgcaccaggctgtctcggtcatcctgaacttggagcagcaa

SEQ ID NO: 7772 - protein, 654 aa, Homo sapiens
  ref <308>: DATABASE ACCESSION NUMBER: SWISS-Prot / P15923
  ref <309>: DATABASE ENTRY DATE: 2002-06-15
MNQPQRMAPVGTDKELSDLLDFSMMFPLPVTNGKGRPASLAGAQFGGSGLEDRPSSGSWGSGDQSSSSFDPSRTFSEGTHFTESHSSLSSSTFLGPGLGGKSGERGAYASFGRDAGVGGLTQAGFLSGELALNSPGPLSPSGMKGTSQYYPSYSGSSRRRAADGSLDTQPKKVRKVPPGLPSSVYPPSSGEDYGRDATAYPSAKTPSSTYPAPFYVADGSLHPSAELWSPPGQAGFGPMLGGGSSPLPLPPGSGPVGSSGSSSTFGGLHQHERMGYQLHGAEVNGGLPSASSFSSAPGATYGGVSSHTPPVSGADSLLGSRGTTAGSSGDALGKALASIYSPDHSSNNFSSSPSTPVGSPQGLAGTSQWPRAGAPGALSPSYDGGLHGLQSKIEDHLDEAIHVLRSHAVGTAGDMHTLLPGHGALASGFTGPMSLGGRHAGLVGGSHPEDGLAGSTSLMHNHAALPSQPGTLPDLSRPPDSYSGLGRAGATAAASEIKREEKEDEENTSAADHSEEEKKELKAPRARTSPDEDEDDLLPPEQKAEREKERRVANNARERLRVRDINEAFKELGRMCQLHLNSEKPQTKLLILHQAVSVILNLEQQVRERNLNPKAACLKRREEEKVSGVVGDPQMVLSAPHPGLSEAHNPAGHM

SEQ ID NO: 7773 - DNA, 613 bp, Rattus norvegicus
  ref <308>: DATABASE ACCESSION NUMBER: EMBL / S77858
  ref <309>: DATABASE ENTRY DATE: 2000-03-04
gcagcagccaagatgtgtgacttcaccgaggaccagaccgcagaattcaaggaggctttccagctgtttgaccgaacaggcgatggcaagatcctgtacagccagtgtggggatgtgatgcgggccctgggccagaaccctaccaacgccgaggtgctcaaggtcctggggaaccccaagagcgatgagatgaatgtgaaggtgctggactttgagcacttcctgcccatgctgcagactgtggccaagaacaaggaccaaggaacctacgaggattatgttgaaggccttcgtgtgtttgacaaagaagggaatggcactgtcatgggtgctgaaatccgtcatgtcctagtcacactgggggagaagatgacagaggaagaagtcgagatgctagtggcggggcatgaggacagcaacggttgcattaactatgaagagcttctccggatggtgctgaatggctgaggacatttacgtgtctcgagcctgctccttgcccagtgtgagattcctgtgtggccccagaggctccctaatcacagcaccttgcctgtctggtttcttttggatgatgtttgccttcaccaaataaaacttgctctctgtgctc

SEQ ID NO: 7774 - protein, 150 aa, Rattus norvegicus
  ref <308>: DATABASE ACCESSION NUMBER: SWISS-Prot / AAB34126
  ref <309>: DATABASE ENTRY DATE: 2002-06-15
CDFTEDQTAEFKEAFQLFDRTGDGKILYSQCGDVMRALGQNPTNAEVLKVLGNPKSDEMNVKVLDFEHFLPMLQTVAKNKDQGTYEDYVEGLRVFDKEGNGTVMGAEIRHVLVTLGEKMTEEEVEMLVAGHEDSNGCINYEELLRMVLNG

SEQ ID NO: 7775 - DNA, 4039 bp, Homo sapiens
  misc_feature (1)..(4039): n=a, c, g or t
  ref <308>: DATABASE ACCESSION NUMBER: EMBL / M22919
  ref <309>: DATABASE ENTRY DATE: 1999-07-02
ctgcaggtagggccctcccaccccttcgccgcgccttacgaggcaagtctcccgcccttctctcagccaacatagaaaagcagcggagttcattctgctgtccggttgctgcacgggctccagcgcttcgcaactttggtttttttccacagatccagtggggtccggacatgggccccgcaggcgaaacgaacgttccagccaccaggaggccacctnattgtttcaaaaataaagactggttcctctcttggtttcagactgctatttttttcatggttggggatcagcgggagacggggaggtgctaggaggagagggcgggaaaagagggctctctcctcttccaatcctctgatcttcctgtgttgggagggtcagattactgtgccccagcccacgtccccccacgacccccgcacccccacctccccccacgaccccccccacctccgagcgggttctgtgcccaggtggcgctggagaaaggaacagcggaccccgcccaagtcattactaatgtagcaatcgtcttgcataaacccaggccacggttcctattggctgaagtcctctgaggtgacgtcatcgggacgtactaagactagggttgggccgagagtcggagccattactgcaggaaaaggtcccggagagctgagcagtcaagatggtggggcccaggtcttgggagacgggcaggattggggacgagaggcaggaagagacgggtcggggggcgaggagaaggcaggggtaggaggcaaagggaatctgaggacccgaaagttggaggtggggttggaaagactggggccctgcggggcaagcgagtctgcagcctgaaacaggagctttgtgggtcagagtttgtgggtcagagtttgtggggctgggatagaaactgggggattggcgttcagatgctgaccacttccctcttctctgagcagtgtgacttcaccgaagaccagaccgcaggtaggttatctctgatccctaccgaggtccacccttagggagagggacaccctccccccagcacctatcctctaatcttaatctgtcatctctttagcacccccatgagattaccccctggattattttctcttcttctggatcctccattttcttttctcactttcttcctccctccccttccactctagatctgatcccaagcactgggtgagttttaggtggtgtgggtatgaaaaaacttggtcacttaatgcctgctgtgtgtggggtctgggagggtgtataaagctgcctgctttcctttgtcctttaatcagctacttctgcctcttttctcctcttgtgataactgtccccgccctcccagcttcgagcacgttgtgaagattgtagagcagtgacctgatattgtgtcagatggggcacagacaggggagtttgctaaggataatgactgtagctatacctctggaagttctcttatatactggaggggtgcgaagtggctggttgggatgtccctagtcccaggctgctgctcccacttccttataaggacaggactgagactgggcggtggcgaattccagccctgagaagtgtagtagcagcagtggagattggcaggcctccgcgcaggaagtgcgagttgtgtaaatggatgttaccaggctgccagaaggggaggaagcctctatatagaacactttgagttgggaggaagagaaatagagccctcttaagtagactttggtgtacagtttggtgcagatatctcgtttcctcagcatgatcaaagttgaatgggcacgagagctctgaggtagggtttggattaaccctcaaatcctgtgttgacattcatctgaatcctagagttcaaggaggccttccagctgtttgaccgaacaggtgatggcaagatcctgtacagccagtgtggggatgtgatgagggccctgggccagaaccctaccaacgcggaggtgctcaaggtcctggggaaccccaagagtgatggtgaggggcctaaagaacaactcctcattgtcatgggcccacattcttcagctaagagcttccctttatcttcataggccccaaactcaagcaagtctggattacgaaatcccatggatttccttgcttttagtggggagtcatctgtcatctctctgttcagttgaggtctctataatcccctgtcctgagaacttgtgttacttctctggcctgacacttcacctcctttatggcagagatgaatgtgaaggtgctggactttgagcactttctgcccatgctgcagacagtggccaagaacaaggaccagggcacctatgaggattatgtcgaaggacttcgggtgtttgacaaggaaggaaatggcaccgtcatgggtgctgaaatccggcatgttcttgtcacactgggtaaggttctgtgtccttgtccttgagctgagatggcaccctaggtacctcacttgtcacccaattccaaaaatgctttctttccccctgcaggtgagaagatgacagaggaagaagtagagatgctggtggcagggcatgaggacagcaatggttgtatcaactatgaaggtaagaggtgaactgcgctttctcagagaaagcagccatatggggcaggtcaagtatagtgtctggggctttccctatccctggacttgggctccaaaaagagccaggaggcaaggtgcagggccctgccagcccagcccaggagtgggaggtcagggcggtataacaggaaaggaagggggtagtagtgtagagggtgggaaggaatgagaagtgaaataatggaatgtctgtcccactgcctgacccctcaccccatgtctttgtacttgtcttcaaccattaatgtctcttccttcctgcagcgtttgtgaggcatatcctgtcggggtgacgggcccatggggcggtacggctcctcccagcctctcctctagttgatctccccagtgtttcttttttccccaacctgtgctctttatcccctgcccttaccctactacnatctgacttcntcctggcatgtttctgcatggagctgactagggaggggagggattctcaaagaggaagaccaacctgggggtacagtacctccttactctagaatgggccctgaggttttacttatgcggccctgggtgctggtgtctgggaacctcaccagcctgtataccagtcttgctttagggtgaccttctggccctggagcatgggtagctggcatagaggggtatgggttgcctgccccattctgctgctatagctgaacagtcctttccccttccctcgctgggcagcttggcaggtaccctaacccaaaactctgtcctctcctcccgccagtggctgacagtagctgtaggtgtagtggagaacttttctgcctctgctgtgttcttgctgcttaggtttgggtgggggactaacagctgctgggaggggagctaggggcatggagaactggtcagactcaaggtggctcctctgcaaactgaccccagggttggttgctgtgggcatgttcccgcttatgctacctttgcagtctggtagtcccctggcccttggcgtacccctccacagccctgttccctggctcatcccacctttcctttccacagagctcgtccgcatggtgctgaatggctgaggaccttcccagtctccccagagtccgtgcctttccctgtgtgaattttgtatctagcctaaagtttccctaggctttcttgtctcagcaactttcccatcttgtctctcttggatgatgtttgccgtcagcattcaccaaataaacttgctctctgggccctcggttcggttctttctttcctgaacagggtaaaggggaagaaggtgagatggtgatgatttctgccctgaggcagagtccaaggtcaatcaatggtgcaggggttgaggaaagctgggggaggccctgtactagccatctgggcttcatttaaaaactactggccccattcatccatcttacacagctacctctt

SEQ ID NO: 7776 - protein, 150 aa, Homo sapiens
  ref <308>: DATABASE ACCESSION NUMBER: SWISS-Prot / AAA59893
  ref <309>: DATABASE ENTRY DATE: 2002-06-15
CDFTEDQTAEFKEAFQLFDRTGDGKILYSQCGDVMRALGQNPTNAEVLKVLGNPKSDEMNVKVLDFEHFLPMLQTVAKNKDQGTYEDYVEGLRVFDKEGNGTVMGAEIRHVLVTLGEKMTEEEVEMLVAGHEDSNGCINYEELVRMVLNG

SEQ ID NO: 7777 - DNA, 1008 bp, Rattus norvegicus
  misc_feature (1)..(1008): n=a, c, g or t
  ref <308>: DATABASE ACCESSION NUMBER: EMBL / S77900
  ref <309>: DATABASE ENTRY DATE: 2000-03-04
acacccaaagccaagatgtccagcaagagagccaaggccaagaccaccaagaagaggccccagagcgctacgtccaatgtcttcgctatgtttgaccagtcccagatccaggagtttaaggaggccttcaacatgattgatcagaaccgtgatggcttcattgacaaggaggacctacatgacatgctggcctccctggggaagaaccccacggatgagnacctggagggtatgatgaacgaggccccgggacctatcaacttcaccatgttcctcactatgtttggggagaagctgaacggcacagaccccgaggacgtgatccgcaatgcctttgcctgctttgatgaggaagcctcagggttcatccacgaggaccacctgcgggagctgctcaccaccatgggcgaccgattcacggatgaggaggtggacgagatgtaccgtgagcgcattgataagaagggcaacttcaactatgtggagttcactcgcatcctcaagcacggcgccaaggacaaagacgactaggctcttcttagctgtcccaatgcctacaccccatcccagtcacctcctcaacaacacatacactctaccctccccatgaggagttagggtcccggctcccagggcaggaaatgagccattaagacgcacagggtgaggctaggggttccaccacggacccaggcactagaggaagggccacagtggggaggtgagccaagggtggggccagctagcaccaaagtgaaggaagccactgaagatggccaccctcagccatgccctcccattccagggctaccctgaggaagaaaacacccatgttctggtgttggacactaattcccagcatccccacaaaggtacacacccattcaccatgtcccttcagaggatgacagtctgcacttcacctatggagttgtcccagcacacccagaatgcatagagggacgctgcctgagggacaaattctctaatacaaggctgagcacaaaa

SEQ ID NO: 7778 - protein, 170 aa, Rattus norvegicus
  misc_feature (1)..(170): Xaa=Unknown amino acid
  ref <308>: DATABASE ACCESSION NUMBER: SWISS-Prot / AAB34127
  ref <309>: DATABASE ENTRY DATE: 2002-06-15
SSKRAKAKTTKKRPQSATSNVFAMFDQSQIQEFKEAFNMIDQNRDGFIDKEDLHDMLASLGKNPTDEXLEGMMNEAPGPINFTMFLTMFGEKLNGTDPEDVIRNAFACFDEEASGFIHEDHLRELLTTMGDRFTDEEVDEMYRERIDKKGNFNYVEFTRILKHGAKDKDD

SEQ ID NO: 7779 - DNA, 1116 bp, Homo sapiens
  ref <308>: DATABASE ACCESSION NUMBER: Refseq / XM_009501
  ref <309>: DATABASE ENTRY DATE: 2002-08-01
ggaagccccacccaccagaagccaagatgtccagcaagcgggccaaagccaagaccaccaagaagcggccacagcgggccacatccaatgtcttcgcaatgtttgaccagtcccagatccaggagtttaaggaggctttcaacatgattgaccagaaccgtgatggcttcattgacaaggaggacctgcacgacatgctggcctcgctggggaagaaccccacagacgaatacctggagggcatgatgagcgaggccccggggcccatcaacttcaccatgttcctcaccatgtttggggagaagctgaacggcacggaccccgaggatgtgattcgcaacgcctttgcctgcttcgacgaggaagcctcaggtttcatccatgaggaccacctccgggagctgctcaccaccatgggtgaccgcttcacagatgaggaagtggacgagatgtaccgggaggcacccattgataagaaaggcaacttcaactacgtggagttcacccgcatcctcaaacatggcgccaaggataaagacgactaggccaccccagccccctgacaccccagcccccgccagtcacccctccccgcacacacccgtccataccagctccctgcccatgaccctcgctcagggatccccctttgaggggttagggtcccagttcccagtggaagaaacaggccaggagaagtgcgtgccgagctgaggcagatgttcccacagtgaccccagagccctgggctatagtctctgacccctccaaggaaagaccaccttctggggacatgggctggagggcaggacctagaggcaccaagggaaggccccattccggggctgttccccgaggaggaagggaaggggctctgtgtgccccccaggaggaagaggccctgagtcctgggatcagacaccccttcacgtgtatccccacacaaatgcaagctcaccaaggtcccctctcagtccccttccctacaccctgaccggccactgccgcacacccacccagagcacgccacccgccatgggagtgtgctcaggagtcgcgggcagcgtggacatctgtcccagagggggcagaatctccaatagaggactgagcact

SEQ ID NO: 7780 - protein, 172 aa, Homo sapiens
  ref <308>: DATABASE ACCESSION NUMBER: Refseq / XP_009501
  ref <309>: DATABASE ENTRY DATE: 2002-08-01
MSSKRAKAKTTKKRPQRATSNVFAMFDQSQIQEFKEAFNMIDQNRDGFIDKEDLHDMLASLGKNPTDEYLEGMMSEAPGPINFTMFLTMFGEKLNGTDPEDVIRNAFACFDEEASGFIHEDHLRELLTTMGDRFTDEEVDEMYREAPIDKKGNFNYVEFTRILKHGAKDKDD

SEQ ID NO: 7781 - DNA, 1008 bp, Rattus norvegicus; identical to SEQ ID NO: 7777
  misc_feature (1)..(1008): n=a, c, g or t
  ref <308>: DATABASE ACCESSION NUMBER: EMBL / S77900
  ref <309>: DATABASE ENTRY DATE: 2000-03-04

SEQ ID NO: 7782 - protein, 170 aa, Rattus norvegicus; identical to SEQ ID NO: 7778
  misc_feature (1)..(170): Xaa=Unknown amino acid
  ref <308>: DATABASE ACCESSION NUMBER: SWISS-Prot / AAB34127
  ref <309>: DATABASE ENTRY DATE: 2002-06-15

SEQ ID NO: 7783 - DNA, 1116 bp, Homo sapiens; identical to SEQ ID NO: 7779
  ref <308>: DATABASE ACCESSION NUMBER: Refseq / XM_009501
  ref <309>: DATABASE ENTRY DATE: 2002-08-01

SEQ ID NO: 7784 - protein, 172 aa, Homo sapiens; identical to SEQ ID NO: 7780
  ref <308>: DATABASE ACCESSION NUMBER: Refseq / XP_009501
  ref <309>: DATABASE ENTRY DATE: 2002-08-01

SEQ ID NO: 7785 - DNA, 1508 bp, Rattus norvegicus
  ref <308>: DATABASE ACCESSION NUMBER: EMBL / S78217
  ref <309>: DATABASE ENTRY DATE: 1995-09-27
aaagatgtcttaggctggggtgaaaatgacagaggagtgtccttcacatttggtgcagaagtggttgcaaaatttctccataagcatgatttggatcttatatgtagagcccatcaggtggttgaagatggatatgagttttttgcaaagaggcagttagtcactctgttttctgcacccaactactgtggcgagtttgacaatgcgggcgccatgatgagtgtggatgagaccctcatgtgctccttccagattttaaagcctgcagagaaaaagaagcccaatgccacgagacctgtcacaccgccacggggtatgatcacaaagcaagcaaagaaatagatgtcacttgacactgcctagtgggacttgtaacatagcgtacataaccttcctttttaaactgtatgtgtgctggtcagcttgcccaggtagacctgtcgggccctcccttctccattttgattattgctggcacttgctggttatagcagcaagtgaagcatttcattctcaagaaagcgtttgtttttgtttgtttttaacctctgttccctttgtggacagctctgatgatggtgttaagctgtacaccttggcagtttatcctgtcccaagtgaagcatttcattctcaagaaagcgtttgtttttgtttgtttttaacctctgttccctttgtggacagctcggatataaagagagccctagggtgcgtgagtctgtacatgtaattgtcataaatgcattctgttgatacaaaccactgtgaacagtttttccaagtttgtttgacagggactgctttccctcactgtctcatcctgtacaaactagtgtctgcagctgtggcagcaggagcaacctgccaccctgccacccacactgcccaggctgtctgaagcacactccctcccactgcacacttaactgacgattaaagccattcttttcaatgtctgtgattccttcctaaagccaaagtttctgttggactgtattggcacaccctggacatgaggtggccagggcaccaaggctgctggcacaggccgcctccgtggggactcagaaagaagcaggttattttaactagcaatagtgatgtagtgctgggtaagctattaatggtggaagttaatgagacattgtacagtgcccatatagtctattcactgagtaatctttttacagttggatcaggcctgaacccgtccattcagaaagcttcaaattatagaaacaacactgtcctatacgagtgatcgataatgctttctttggctacattctttattctgcggtgacattgaggcttataaatcaaaaggaactaacttgccgtccaccggtttatacagaactcacagtatctatgacttttttaaactacgacctgttaaaatgaatctgtttccacagatgccgtgtacaatgccatgtgctaagaatgatttcagacttattaaatgcgagcttgttaacctgtcaaaaaaaaaaaaaaaaaaa

SEQ ID NO: 7786 - protein, 113 aa, Rattus norvegicus
  ref <308>: DATABASE ACCESSION NUMBER: SWISS-Prot / AAB34334
  ref <309>: DATABASE ENTRY DATE: 2000-07-04
KDVLGWGENDRGVSFTFGAEVVAKFLHKHDLDLICRAHQVVEDGYEFFAKRQLVTLFSAPNYCGEFDNAGAMMSVDETLMCSFQILKPAEKKKPNATRPVTPPRGMITKQAKK

SEQ ID NO: 7787 - DNA, 2263 bp, Homo sapiens
  ref <308>: DATABASE ACCESSION NUMBER: Refseq / NM_002710
  ref <309>: DATABASE ENTRY DATE: 2000-10-31
aggaagtagggagcggggtggcaggggggggacccgccgcggctgctgccaccgccgccaccaccgcctctgctcgtggcgtgggaaaggaggtgtgagtcccgggcgcgagccgcggcggcgccgctgcgggagggtcggcggtgggaaggcgatggcggatttagataaactcaacatcgacagcattatccaacggctgctggaagtgagagggtccaagcctggtaagaatgtccagcttcaggagaatgaaatcagaggactgtgcttaaagtctcgtgaaatctttctcagtcagcctatcctactagaacttgaagcaccactcaaaatatgtggtgacatccatggacaatactatgatttgctgcgactttttgagtacggtggtttcccaccagaaagcaactacctgtttcttggggactatgtggacaggggaaagcagtcattggagacgatctgcctcttactggcctacaaaataaaatatcctgagaatttttttcttctcagagggaaccatgaatgtgccagcatcaacagaatttatggattttatgatgaatgtaaaagaagatacaacattaaactatggaaaactttcacagactgttttaactgtttaccgatagcagccatcgtggatgagaagatattctgctgtcatggaggtttatcaccagatcttcaatctatggagcagattcggcgaattatgcgaccaactgatgtaccagatcaaggtcttctttgtgatcttttgtggtctgaccccgataaagatgtcttaggctggggtgaaaatgacagaggagtgtccttcacatttggtgcagaagtggttgcaaaatttctccataagcatgatttggatcttatatgtagagcccatcaggtggttgaagatggatatgaattttttgcaaagaggcagttggtcactctgttttctgcgcccaattattgcggagagtttgacaatgcaggtgccatgatgagtgtggatgaaacactaatgtgttcttttcagattttaaagcctgcagagaaaaagaagccaaatgccacgagacctgtaacgcctccaaggggtatgatcacaaagcaagcaaagaaatagatgtcgttttgacactgcctagtcgggacttgtaacatagagtatataaccttcatttttaagactgtaatgtgtactggtcagcttgctcagatagatctgtgtttgtgggggcccttccttccatttttgatttagtgaatggcatttgctggttataacagcaaatgaaagactcttcactccaaaaagaaaagtgttttgttttttaattctctgttccttttgcaaacaattttaatgatggtgttaaagctgtacaccccaggacagtttatcctgtctgaggagtaagtgtacaattgatcttttttaattcagtacaacccataatcatgtaaatgctcattttctttaggacataaagagagccctagggtgctctgaatctgtacatgttcttgtcataaaatgcatactgttgatacaaaccactgtgaacattttttatttgagaattttgtttcaaagggattgctttttcctctcattgtcttgttatgtacaaactagtttttatagctatcaacattaggagtaactttcaaccttgccagcatcactggtatgatgtatatttaattaaagcacacttttccccgaccgtatacttaaaatgacaaagccattcttttaaatatttgtgactctttcctaaagccaaagtttctgttgaattatgttttgacacacccctaagtacaaggtggtatggttgtatacacatgctgccttcttggggattcaaaaacaggtttttgattttgaatagcaattagtgatatagtgctgtttaagctactaacgataaaaggtaataacattttatacaatttccatatagtctattcattaagtaatctttttacagttgcatcaggcctgaacccgtccattcagaaagcttcaaattatagaaacaatactgttctatacgagtgaccgattatgctttctttggcctacattctttattctgcggtgaagttgaggcttataagttaaaacaaaggaactaacttactgtccaccagtttatacagaactcacagtacctatgacttttttaaactaagatctgttaaaaaagaaatctgtttcaacagatgaccgtgtacaataccgtgtggtgaaaat

SEQ ID NO: 7788 - protein, 323 aa, Homo sapiens
  ref <308>: DATABASE ACCESSION NUMBER: SWISS-Prot / P36873
  ref <309>: DATABASE ENTRY DATE: 2002-06-15
MADLDKLNIDSIIQRLLEVRGSKPGKNVQLQENEIRGLCLKSREIFLSQPILLELEAPLKICGDIHGQYYDLLRLFEYGGFPPESNYLFLGDYVDRGKQSLETICLLLAYKIKYPENFFLLRGNHECASINRIYGFYDECKRRYNIKLWKTFTDCFNCLPIAAIVDEKIFCCHGGLSPDLQSMEQIRRIMRPTDVPDQGLLCDLLWSDPDKDVLGWGENDRGVSFTFGAEVVAKFLHKHDLDLICRAHQVVEDGYEFFAKRQLVTLFSAPNYCGEFDNAGAMMSVDETLMCSFQILKPAEKKKPNATRPVTPPRGMITKQAKK

SEQ ID NO: 7789 - DNA, 2668 bp, Rattus norvegicus
  ref <308>: DATABASE ACCESSION NUMBER: EMBL / S78218
  ref <309>: DATABASE ENTRY DATE: 1995-09-27
gctgcggggaggagagtctggtgcctacaagatggcggacggggagctgaacgtggacagcctcatcacccgcctgctggaggtacgaggatgtcgtccgggaaaaattgtgcagatgactgaagcagaagtccgaggactgtgtatcaagtctcgtgaaatctttcttagccagcctattcttttggaattggaagcgccactgaagatttgtggagatattcatggacagtatacagacttactgagattatttgaatatggaggttttccaccagaagccaactatcttttcttaggagattatgtggacagaggaaagcagtctttggaaaccatctgtttgctattggcttacaaaatcaaatacccagagaacttctttcttctacgaggaaaccatgagtgtgctagcatcaaccgcatttatggattctatgatgagtgcaaacgaagatttaatattaaattgtggaagacattcactgattgttttaattgtctgcctatagctgctattgttgatgagaaaatcttctgctgtcatggaggactgtcaccagacctacagtctatggaacagattcggagaattatgagacccactgacgtacctgatacaggtttgctttgtgatttactgtggtccgacccagataaggatgtacaaggctggggagaaaatgatcgtggtgtttcttttacttttggagctgatgtagtcagtaaatttctgaatcgtcatgatttggacttgatttgtcgagcccatcaggtggtagaagatggatatgaattttttgctaaacgacaattggtaactttattttctgccccaaattactgcggcgagtttgacaatgctggtggtatgatgagtgtggatgaaactttgatgtgttcattccagatattgaaaccatctgaaaagaaagctaagtaccagtatggtgggctgaattctggacgtcctgtcactccgcctcgaacagctaatccaccgaagaaaaggtgaagacaggaattccggaaagagaaaccatcagatttgttaaggacatacttcataatatataagtgtgcactgtaaaaccatccagccattcgacaccctttatgatgtcacacctttaacttaaggagacgggtaaaggatcttaaatttttttctaatagaaagatgtgctacactgtattgtaataagtatactctgttataatattcaacaaagttaaatccaaattcaaaagtatccattaaagttctatcttctcatatcacagtttttaaagttgaaagcatcccagttaaactagctgcgttagttacccagatgagagcatgaagatccatctgtgtaatgtggctttagtgttgcttggttgtttctttattttgggcttgttttgttttgtttgtttttgctagaataatggcatctacttttcctatttttccctaaccattttaaaaagtgaaaatgggaagagctttaaagacattcaccaactattcttttccttcacttatctacttaaggaactgttggatcttactaagaaaacttacgcctcataataaaaaggaactttagaggccgataggttttaaaaatatacaaactatttgatccaatgattttaatcaaacagtttgactgggcaaactttgcagctgataatgactatttcgctttttacaaattgccactgatttggatttgtgcactctaacctttaatttattgatgctctattgtgcagtagcatttcatttaagataaggctcatatagtactatccaaaattagttggtaatgtgattatgtggtaccttggctttaggttttaattcgcacgaaacaccttttggcatgcttaactttctggtattatcctcacctgcattggttttgttttttggggtttttgttgttgtttgtttgtttgtttttagatccacagaacatgagaatcctttttgacaagccttggaaagctggctcttctttccctctctatgtgaaggatgtatttaaatgaacactggtcagtgggacattgtcagctctgagtattgggtgcttcactgtctaataattgccatgtgaatgttgtttttgactgtaaggctatgtcactaaagatttttactctgcgttttcataatcaaaggtcatgatgtgtatagacatgctttgtagtgaagtatagtagcaataatttctgcacatgatcaagagtttattgcagcatttctttccctgttctctcttttttaagggttagcattaacaaatgtcaaggaatagcaaagtcaacaaagactttaggaggtggaattaagaacacacagatttgtgatctttggatgtgacacttattggatgttattctaaagtcttattgaacattgtcaaatttgtaagcttcatggggatggacataatgtttatataatgcccttcttatgtgttaccatagatgtgaaaccttatattgtctttgaaaatgttaaattgagaactctgttaacattttatggattggcacattatattactgcaagaaacatttgattttgagcacagtgcaaaagttctttaaaatgcatatgtctttttttctaattcaattttgtttaaagcacattttaaatgtagttttc

SEQ ID NO: 7790 - protein, 327 aa, Rattus norvegicus
  ref <308>: DATABASE ACCESSION NUMBER: SWISS-Prot / AAB34335
  ref <309>: DATABASE ENTRY DATE: 2002-06-15
MADGELNVDSLITRLLEVRGCRPGKIVQMTEAEVRGLCIKSREIFLSQPILLELEAPLKICGDIHGQYTDLLRLFEYGGFPPEANYLFLGDYVDRGKQSLETICLLLAYKIKYPENFFLLRGNHECASINRIYGFYDECKRRFNIKLWKTFTDCFNCLPIAAIVDEKIFCCHGGLSPDLQSMEQIRRIMRPTDVPDTGLLCDLLWSDPDKDVQGWGENDRGVSFTFGADVVSKFLNRHDLDLICRAHQVVEDGYEFFAKRQLVTLFSAPNYCGEFDNAGGMMSVDETLMCSFQILKPSEKKAKYQYGGLNSGRPVTPPRTANPPKKR

SEQ ID NO: 7791 - DNA, 3590 bp, Homo sapiens
  ref <308>: DATABASE ACCESSION NUMBER: Refseq / NM_002709
  ref <309>: DATABASE ENTRY DATE: 2000-10-31
cctgggtctgacgcggccctgttcgagggggcctctcttgtttatttatttattttccgtgggtgcctccgagtgtgcgcgcgctctcgctacccggcggggagggggtggggggagggcccgggaaaagggggagttggagccggggtcgaaacgccgcgtgacttgtaggtgagagaacgccgagccgtcgccgcagcctccgccgccgagaagcccttgttcccgctgctgggaaggagagtctgtgccgacaagatggcggacggggagctgaacgtggacagcctcatcacccggctgctggaggtacgaggatgtcgtccaggaaagattgtgcagatgactgaagcagaagttcgaggcttatgtatcaagtctcgggagatctttctcagccagcctattcttttggaattggaagcaccgctgaaaatttgtggagatattcatggacaatatacagatttactgagattatttgaatatggaggtttcccaccagaagccaactatcttttcttaggagattatgtggacagaggaaagcagtctttggaaaccatttgtttgctattggcttataaaatcaaatatccagagaacttctttctcttaagaggaaaccatgagtgtgctagcatcaatcgcatttatggattctatgatgaatgcaaacgaagatttaatattaaattgtggaagaccttcactgattgttttaactgtctgcctatagcagccattgtggatgagaagatcttctgttgtcatggaggattgtcaccagacctgcaatctatggagcagattcggagaattatgagacctactgatgtccctgatacaggtttgctctgtgatttgctatggtctgatccagataaggatgtgcaaggctggggagaaaatgatcgtggtgtttcctttacttttggagctgatgtagtcagtaaatttctgaatcgtcatgatttagatttgatttgtcgagctcatcaggtggtggaagatggatatgaattttttgctaaacgacagttggtaaccttattttcagccccaaattactgtggcgagtttgataatgctggtggaatgatgagtgtggatgaaactttgatgtgttcatttcagatattgaaaccatctgaaaagaaagctaaataccagtatggtggactgaattctggacgtcctgtcactccacctcgaacagctaatccgccgaagaaaaggtgaagaaaggaattctgtaaagaaaccatcagatttgttaaggacatacttcataatatataagtgtgcactgtaaaaccatccagccatttgacaccctttatgatgtcacacctttaacttaaggagacgggtaaaggatcttaaatttttttctaatagaaagatgtgctacactgtattgtaataagtatactctgttatagtcaacaaagttaaatccaaattcaaaattatccattaaagttacatcttcatgtatcacaatttttaaagttgaaaagcatcccagttaaactagatgtgatagttaaaccagatgaaagcatgatgatccatctgtgtaatgtggttttagtgttgcttggttgtttaattattttgagcttgttttgtttttgtttgttttcactagaataatggcaaatacttctaatttttttccctaaacatttttaaaagtgaaatatgggaagagctttacagacattcaccaactattattttcccttgtttatctacttagatatctgtttaatcttactaagaaaactttcgcctcattacattaaaaaggaattttagagattgattgttttaaaaaaaaatacgcacattgtccaatccagtgattttaatcatacagtttgactgggcaaactttacagctgatagtgaatattttgctttatacaggaattgacactgatttggatttgtgcactctaatttttaacttattgatgctctattgtgcagtagcatttcatttaagataaggctcatatagtattacccaactagttggtaatgtgattatgtggtaccttggctttaggttttcattcgcacggaacaccttttggcatgcttaacttcctggtaacaccttcacctgcattggttttctttttcttttttctttctttttttttttttttttttttttgagttgttgtttgtttttagatccacagtacatgagaatccttttttgacaagccttggaaagctgacactgtctctttttcctccctctatacgaaggatgtatttaaatgaatgctggtcagtgggacattttgtcaactatgggtattgggtgcttaactgtctaatattgccatgtgaatgttgtatacgattgtaaggcttatgtcactaaagatttttattctgattttttcataatcaaaggtcatatgatactgtatagacaagctttgtagtgaagtatagtagcaataatttctgtacctgatcaagtttattgcagcctttcttttcctatttcttttttttaagggttagtattaacaaatggcaatgagtagaaaagttaacatgaagattttagaaggagagaacttacaggacacagatttgtgattctttgactgtgacactattggatgtgattctaaaagcttttattgagcattgtcaaatttgtaagcttcatagggatggacatcatatctataatgcccttctatatgtgctaccatagatgtgacatttttgaccttaatatcgtctttgaaaatgttaaattgagaaacctgttaacttacattttatgaattggcacattgtattacttactgcaagagatatttcattttcagcacagtgcaaaagttctttaaaatgcatatgtctttttttctaattccgttttgttttaaagcacattttaaatgtagttttctcatttagtaaaagttgtctaattgatatgaagcctgactgattttttttttccttacagtgagacatttaagcacacattttattcacatagatactatgtccttgacatattgaaatgattcttttctgaaagtattcatgatctgcatatgatgtattaggttaggtcacaaaggttttatctgaggtgatttaaataacttcctgattggagtgtgtaagctgagcgatttctaataaaattttagttgtacacttttagtagtcatagtgaagcaggtctagaaaataagcctttggcagggaaaaagggcaatgttgattaatctcagtattaaaccacattaatctgtatcccattgtctggcttttgtaaattcatccaggtcaagactaagtatgttggttaataggaatccttttttttttttaaagactaaatgtgaaaaaataatcactacttaagctaattaatattggtcattaaatttaaaggatggaaatttatcatgtttaaaaattattcaagcactcttaaaaccacttaaacagcctccagtcataaaaatgtgttctttacaaatatttgcttggcaacacgacttgaaataaataaaactttgtttcttaggagaaaa

SEQ ID NO: 7792 - protein, 327 aa, Homo sapiens; identical to SEQ ID NO: 7790
  ref <308>: DATABASE ACCESSION NUMBER: SWISS-Prot / P37140
  ref <309>: DATABASE ENTRY DATE: 2002-06-15

SEQ ID NO: 7793 - DNA, 2668 bp, Rattus norvegicus; identical to SEQ ID NO: 7789
  ref <308>: DATABASE ACCESSION NUMBER: EMBL / S78218
  ref <309>: DATABASE ENTRY DATE: 1995-09-27

SEQ ID NO: 7794 - protein, 327 aa, Rattus norvegicus; identical to SEQ ID NO: 7790
  ref <308>: DATABASE ACCESSION NUMBER: SWISS-Prot / AAB34335
  ref <309>: DATABASE ENTRY DATE: 2002-06-15

SEQ ID NO: 7795 - DNA, 3590 bp, Homo sapiens; identical to SEQ ID NO: 7791
  ref <308>: DATABASE ACCESSION NUMBER: Refseq / NM_002709
  ref <309>: DATABASE ENTRY DATE: 2000-10-31

SEQ ID NO: 7796 - protein, 327 aa, Homo sapiens; identical to SEQ ID NO: 7790
  ref <308>: DATABASE ACCESSION NUMBER: SWISS-Prot / P37140
  ref <309>: DATABASE ENTRY DATE: 2002-06-15

SEQ ID NO: 7797 - DNA, 2668 bp, Rattus norvegicus; identical to SEQ ID NO: 7789
  ref <308>: DATABASE ACCESSION NUMBER: EMBL / S78218
  ref <309>: DATABASE ENTRY DATE: 1995-09-27

SEQ ID NO: 7798 - protein, 327 aa, Rattus norvegicus; identical to SEQ ID NO: 7790
  ref <308>: DATABASE ACCESSION NUMBER: SWISS-Prot / AAB34335
  ref <309>: DATABASE ENTRY DATE: 2002-06-15

SEQ ID NO: 7799 - DNA, 3590 bp, Homo sapiens; identical to SEQ ID NO: 7791
  ref <308>: DATABASE ACCESSION NUMBER: Refseq / NM_002709
  ref <309>: DATABASE ENTRY DATE: 2000-10-31

SEQ ID NO: 7800 - protein, 327 aa, Homo sapiens; identical to SEQ ID NO: 7790
  ref <308>: DATABASE ACCESSION NUMBER: SWISS-Prot / P37140
  ref <309>: DATABASE ENTRY DATE: 2002-06-15

SEQ ID NO: 7801 - DNA, 2668 bp, Rattus norvegicus; identical to SEQ ID NO: 7789
  ref <308>: DATABASE ACCESSION NUMBER: EMBL / S78218
  ref <309>: DATABASE ENTRY DATE: 1995-09-27

SEQ ID NO: 7802 - protein, 327 aa, Rattus norvegicus; identical to SEQ ID NO: 7790
  ref <308>: DATABASE ACCESSION NUMBER: SWISS-Prot / AAB34335
  ref <309>: DATABASE ENTRY DATE: 2002-06-15

SEQ ID NO: 7803 - DNA, 3590 bp, Homo sapiens; identical to SEQ ID NO: 7791
  ref <308>: DATABASE ACCESSION NUMBER: Refseq / NM_002709
  ref <309>: DATABASE ENTRY DATE: 2000-10-31

SEQ ID NO: 7804 - protein, 327 aa, Homo sapiens; identical to SEQ ID NO: 7790
  ref <308>: DATABASE ACCESSION NUMBER: SWISS-Prot / P37140
  ref <309>: DATABASE ENTRY DATE: 2002-06-15

SEQ ID NO: 7805 - DNA, 3001 bp, Rattus norvegicus
  ref <308>: DATABASE ACCESSION NUMBER: EMBL / S78556
  ref <309>: DATABASE ENTRY DATE: 2000-03-04
cggcacgagtgttcttgccctcgtagccctctgtccagccgccatgataagcgccagcagagccgcggccgcgcgtctcgtgggcaccacagcgtcccggagtcccgccgccgcccgtcaccaggatggctggaatggccttagtcatgaggcttttagatttgtttcaagaagggattatgcgtcagaagcaatcaagggtgcagttgttggaattgatttgggtactactaactcctgtgtggctgttatggagggcaaacaagccaaggtcctggagaacgccgaaggtgccagaactaccccttctgtggttgcctttacaccagatggggagcgacttgttggtatgccagcaaaacgacaagctgtcaccaatccaaacaataccttctatgctacaaagcgtcttattggacgacgatatgatgaccctgaagtacagaaagacactaagaatgttccctttaaaattgtccgtgcctccaatggtgatgcctgggtggaggctcatggaaaactctattctccgagtcagattggagcgtttgtgttgatgaagatgaaagagactgcagaaaattacttgggccatacagcaaaaaatgctgtgatcacagtccctgcttatttcaatgactcacagcgacaggccactaaggatgctggccagatatctgggctaaatgtgctccgagtgatcaacgagcctacagctgcagctctggcttacggtctggacaaatccgaagacaaagtcattgctgtatatgatttaggtggaggaacctttgacatttctatcctggaaattcagaaaggagtgtttgaggtgaaatccaccaatggggacactttcttaggaggtgaagactttgaccaagctttgttacggcacattgtcaaggagttcaagagggagacaggggttgatttgaccaaagacaacatggcgcttcagagggttcgggaagctgctgagaaggctaaatgtgagctctcctcatctgtacagactgacatcaacttgccataccttacaatggatgcttctggaccaaagcatttgaatatgaagttgactcgagctcagtttgaaggcattgtcacagatctaatcaagagaactattgctccgtgtcagaaagctatgcaggatgcagaagtcagcaagagtgacataggagaagtgatcctggttggtggcatgacgaggatgcccaaggttcagcagactgtgcaagatctttttggcagagccccaagtaaagctgttaatcctgatgaggctgtagccattggagctgccattcaaggaggtgtgttggctggtgatgttacagatgtgctactcttggatgtcactcccctctctctaggtattgagacacttggaggtgtctttaccaagcttattaataggaacaccactattccaaccaaaaagagccaggtattttctactgctgctgatggacaaactcaagtagagattaaagtgtgtcagggggaaagagagatggccggagacaacaaacttctaggacagttcactttgattggaattcccccagcccctcgtggagtgcctcagattgaagttacatttgacattgatgccaatgggattgtgcacgtttctgccaaagataaagggacaggacgtgagcaacagattgtaatccagtcttctggtggattaagcaaagatgatattgaaaacatggttaaaaatgcagagaagtacgctgaagaagaccggaggaagaaggaacgtgttgaagcagttaatatggctgaaggaattattcatgacacagaaaccaagatggaagaattcaaggaccagttgcctgctgacgagtgcaacaagctaaaggaagagatttccaaaatgagagaactccttgctcgaaaggacagtgaaacaggagaaaacattaggcaggcggcatcttcccttcagcaggcatcattgaaactctttgaaatggcatataaaaagatggcatctgaacgggaaggttctggaagttctagcactggggaacagaaggaagatcagaaggaagagaaacagtaatagtggcagtgcattgtggagctaggacgacatactatgaagcttgggagtaaaggaacttcctgagcagaaaaggggcaaacttcagtctttttactgtatttttgcagtattctatatataatttccttaatatataaatccagtgacaatatataaatccagtgacaatagctataactcatttaatggtaataaagtcagcaatagcaggttcacacttctataactagcctgctgttttcagctgcacgtaaaggggtgggatggggctgtgtaccaatcattattaggtaaatctggtttgtgctgaagtagctatgttttcgagatggaagcccatttcacatgcagtagaggtaatctgtcatggaccttgaattgaggttcatatgcagatgcttgttgaccaagagcactgctataaatgacctgtgtgtacatttgctccttcaactgatgccttgcaagactaagctctctgtgtcatggtctataggtacagaagttaggtcaatggataacagctgtgttagccatagcttaaagtgatctatcaagaattatacaagcctctcatgggcctaaggcatacttctccagctaccctcttgggtggccaatgtctgacatctatattcttgatgattgttcctttttcatccattctggattttttttttttttaataaaattctgaaagcctcttgatctcctttgtgaatggtagtagctcaaggactatgactgtaccatcaggtttgtgagtagaggtaaaaaatcaacactggctaaaaggttgaacaaattaaacatggtgagggactaaataacatgttggcatgtatgctggatgtggaagcccactcaggaagcagtgtgaagccaggcggggctacacaatgagacaccccgtct

SEQ ID NO: 7806 - protein, 679 aa, Rattus norvegicus
  ref <308>: DATABASE ACCESSION NUMBER: SWISS-Prot / AAB34982
  ref <309>: DATABASE ENTRY DATE: 2001-10-16
MISASRAAAARLVGTTASRSPAAARHQDGWNGLSHEVFRFVSRRDYASEAIKGAVVGIDLGTTNSCVAVMEGKQAKVLENSEGARTTPSVVAFTPDGERLVGMPAKRQAVTNPNNTFYATKRLIGRRYDDPEVQKDTKNVPFKIVRASNGDAWVEAHGKLYSPSQIGAFVLMKMKETAENYLGHTAKNAVITVPAYFNDSQRQATKDAGQISGLNVLRVINEPTAAALAYGLDKSEDKVIAVYDLGGGTFDISILEIQKGVFEVKSTNGDTFLGGEDFDQALLRHIVKEFKRETGVDLTKDNMALQRVREAAEKAKCELSSSVQTDINLPYLTMDASGPKHLNMKLTRAQFEGIVTDLIKRTIAPCQKAMQDREVSKSDIGEVILVGGMTRMPKVQQTVQDLFGRAPSKAVNPDEAVAIGAAIQGGVLAGDVTDVLLLDVTPLSLGIETLGGVFTKLINRNTTIPTKKSQVFSTAADGQTQVEIKVCQGEREMAGDNKLLGQFTLIGIPPAPRGVPQIEVTFDIDANGIVHVSAKDKGTGREQQIVIQSSGGLSKDDIENMVKNAEKYAEEDRRKKERVEAVNMAEGIVHDTETKMEEFKDQLPADECNKLKEEISKMRELLARKDSETGENIRQAASSLQQASLKLFEMAYKKMASEREGSGSSSTGEQKEDQKEEKQ

SEQ ID NO: 7807 - DNA, 2811 bp, Homo sapiens
  ref <308>: DATABASE ACCESSION NUMBER: Refseq / NM_004134
  ref <309>: DATABASE ENTRY DATE: 2002-10-22
ggcacgaggggagcgcttgtttgctgcctcgtactcctccatttatccgccatgataagtgccagccgagctgcagcagcccgtctcgtgggcgccgcagcctcccggggccctacggccgcccgccaccaggatagctggaatggccttagtcatgaggcttttagacttgtttcaaggcgggattatgcatcagaagcaatcaagggagcagttgttggtattgatttgggtactaccaactcctgcgtggcagttatggaaggtaaacgagcaaaggtgctggagaatgccgaaggtgccagaaccaccccttcagttgtggcctttacagcagatggtgagcgacttgttggaatgccggccaagcgacaggctgtcaccaacccaaacaatacattttatgctaccaagcgtctcattggccggcgatatgatgatcctgaagtacagaaagacattaaaaatgttccctttaaaattgtccgtgcctccaatggtgatgcctgggttgaggctcatgggaaattgtattctccgagtcagattggagcatttgtgttgatgaagatgaaagagactgcagaaaattacttggggcgcacagcaaaaaatgctgtgatcacagtcccagcttatttcaatgactcgcagagacaggccactaaagatgctggccagatatctggactgaatgtgcttcgggtgattaatgagcccacagctgctgctcttgcctatggtctagacaaatcagaagacaaagtcattgctgtatatgatttaggtggtggaacttttgatatttctatcctggaaattcagaaaggagtatttgaggtgaaatccacaaatggggataccttcttaggtggggaagactttgaccaggccttgctacggcacattgtgaaggagttcaagagagagacaggggttgatttgactaaagacaacatggcacttcagagggtacgggaagctgctgaaaaggctaagtgtgaactctcctcatctgtgcagactgacatcaatttgccctatcttacaatggattcttctggacccaagcatttgaatatgaagttgacccgtgctcaatttgaagggattgtcactgatctaatcagaaggactatcgctccatgccaaaaagctatgcaagatgcagaagtcagcaagagtgacataggagaagtgattcttgtgggtggcatgactaggatgcccaaggttcagcagactgtacaggatctttttggcagagccccaagtaaagctgtcaatcctgatgaggctgtggccattggagctgccattcagggaggtgtgttggccggcgatgtcacggatgtgctgctccttgatgtcactcccctgtctctgggtattgaaactctaggaggtgtctttaccaaacttattaataggaataccactattccaaccaagaagagccaggtattctctactgccgctgatggtcaaacgcaagtggaaattaaagtgtgtcagggtgaaagagagatggctggagacaacaaactccttggacagtttactttgattggaattccaccagcccctcgtggagttcctcagattgaagttacatttgacattgatgccaatgggatagtacatgtttctgctaaagataaaggcacaggacgtgagcagcagattgtaatccagtcttctggtggattaagcaaagatgatattgaaaatatggttaaaaatgcagagaaatatgctgaagaagaccggcgaaagaaggaacgagttgaagcagttaatatggctgaaggaatcattcacgacacagaaaccaagatggaagaattcaaggaccaattacctgctgatgagtgcaacaagctgaaagaagagatttccaaaatgagggagctcctggctagaaaagacagcgaaacaggagaaaatattagacaggcagcatcctctcttcagcaggcatcattgaagctgttcgaaatggcatacaaaaagatggcatctgagcgagaaggctctggaagttctggcactggggaacaaaaggaagatcaaaaggaggaaaaacagtaataatagcagaaattttgaagccagaaggacaacatatgaagcttaggagtgaagagacttcctgagcagaaatgggcgaacttcagtctttttactgtgtttttgcagtattctatatataatttccttaatttgtaaatttagtgaccattagctagtgatcatttaatggacagtgattctaacagtataaagttcacaatattctatgtccctagcctgtcatttttcagctgcatgtaaaaggaggtaggatgaattgatcattataaagatttaactattttatgctgaagtgaccatattttcaaggggtgaaaccatctcgcacacagcaatgaaggtagtcatccatagacttgaaatgagaccacatatggggatgagatccttctagttagcctagtactgctgtactggcctgtatgtacatggggtccttcaactgaggccttgcaagtcaagctggctgtgccatgtttgtagatggggcagaggaatctagaacaatgggaaacttagctatttatattaggtacagctattaaaacaaggtaggaatgaggctagacctttaacttccctaaggcatacttttctagctaccttctgccctgtgtctggcacctacatccttgatgattgttctcttacccattctggaattttttttttttttaaataaatacagaaagcatcttgaaaaaaaaaaaaaaaaaa

SEQ ID NO: 7808 - protein, 679 aa, Homo sapiens
  ref <308>: DATABASE ACCESSION NUMBER: SWISS-Prot / P38646
  ref <309>: DATABASE ENTRY DATE: 2002-06-15
MISASRAAAARLVGAAASRGPTAARHQDSWNGLSHEAFRLVSRRDYASEAIKGAVVGIDLGTTNSCVAVMEGKQAKVLENAEGARTTPSVVAFTADGERLVGMPAKRQAVTNPNNTFYATKRLIGRRYDDPEVQKDIKNVPFKIVRASNGDAWVEAHGKLYSPSQIGAFVLMKMKETAENYLGHTAKNAVITVPAYFNDSQRQATKDAGQISGLNVLRVINEPTAAALAYGLDKSEDKVIAVYDLGGGTFDISILEIQKGVFEVKSTNGDTFLGGEDFDQALLRHIVKEFKRETGVDLTKDNMALQRVREAAEKAKCELSSSVQTDINLPYLTMDSSGPKHLNMKLTRAQFEGIVTDLIRRTIAPCQKAMQDAEVSKSDIGEVILVGGMTRMPKVQQTVQDLFGRAPSKAVNPDEAVAIGAAIQGGVLAGDVTDVLLLDVTPLSLGIETLGGVFTKLINRNTTIPTKKSQVFSTAADGQTQVEIKVCQGEREMAGDNKLLGQFTLIGIPPAPRGVPQIEVTFDIDANGIVHVSAKDKGTGREQQIVIQSSGGLSKDDIENMVKNAEKYAEEDRRKKERVEAVNMAEGIIHDTETKMEEFKDQLPADECNKLKEEISKMRELLARKDSETGENIRQAASSLQQASLKLFEMAYKKMASEREGSGSSGTGEQKEDQKEEKQ

SEQ ID NO: 7809 - DNA, 3001 bp, Rattus norvegicus; identical to SEQ ID NO: 7805
  ref <308>: DATABASE ACCESSION NUMBER: EMBL / S78556
  ref <309>: DATABASE ENTRY DATE: 2000-03-04

SEQ ID NO: 7810 - protein, 679 aa, Rattus norvegicus; identical to SEQ ID NO: 7806
  ref <308>: DATABASE ACCESSION NUMBER: SWISS-Prot / AAB34982
  ref <309>: DATABASE ENTRY DATE: 2001-10-16

SEQ ID NO: 7811 - DNA, 2811 bp, Homo sapiens; identical to SEQ ID NO: 7807
  ref <308>: DATABASE ACCESSION NUMBER: Refseq / NM_004134
  ref <309>: DATABASE ENTRY DATE: 2002-10-22

SEQ ID NO: 7812 - protein, 679 aa, Homo sapiens; identical to SEQ ID NO: 7808
  ref <308>: DATABASE ACCESSION NUMBER: SWISS-Prot / P38646
  ref <309>: DATABASE ENTRY DATE: 2002-06-15

SEQ ID NO: 7813 - DNA, 3001 bp, Rattus norvegicus; identical to SEQ ID NO: 7805
  ref <308>: DATABASE ACCESSION NUMBER: EMBL / S78556
  ref <309>: DATABASE ENTRY DATE: 2000-03-04

SEQ ID NO: 7814 - protein, 679 aa, Rattus norvegicus; identical to SEQ ID NO: 7806
  ref <308>: DATABASE ACCESSION NUMBER: SWISS-Prot / AAB34982
  ref <309>: DATABASE ENTRY DATE: 2001-10-16

SEQ ID NO: 7815 - DNA, 2811 bp, Homo sapiens; identical to SEQ ID NO: 7807
  ref <308>: DATABASE ACCESSION NUMBER: Refseq / NM_004134
  ref <309>: DATABASE ENTRY DATE: 2002-10-22

SEQ ID NO: 7816 - protein, 679 aa, Homo sapiens; identical to SEQ ID NO: 7808
  ref <308>: DATABASE ACCESSION NUMBER: SWISS-Prot / P38646
  ref <309>: DATABASE ENTRY DATE: 2002-06-15

SEQ ID NO: 7817 - DNA, 3001 bp, Rattus norvegicus; identical to SEQ ID NO: 7805
  ref <308>: DATABASE ACCESSION NUMBER: EMBL / S78556
  ref <309>: DATABASE ENTRY DATE: 2000-03-04

SEQ ID NO: 7818 - protein, 679 aa, Rattus norvegicus; identical to SEQ ID NO: 7806
  ref <308>: DATABASE ACCESSION NUMBER: SWISS-Prot / AAB34982
  ref <309>: DATABASE ENTRY DATE: 2001-10-16

SEQ ID NO: 7819 - DNA, 2811 bp, Homo sapiens; identical to SEQ ID NO: 7807
  ref <308>: DATABASE ACCESSION NUMBER: Refseq / NM_004134
  ref <309>: DATABASE ENTRY DATE: 2002-10-22

SEQ ID NO: 7820 - protein, 679 aa, Homo sapiens; identical to SEQ ID NO: 7808
  ref <308>: DATABASE ACCESSION NUMBER: SWISS-Prot / P38646
  ref <309>: DATABASE ENTRY DATE: 2002-06-15

SEQ ID NO: 7821 - DNA, 3001 bp, Rattus norvegicus; identical to SEQ ID NO: 7805
  ref <308>: DATABASE ACCESSION NUMBER: EMBL / S78556
  ref <309>: DATABASE ENTRY DATE: 2000-03-04

SEQ ID NO: 7822 - protein, 679 aa, Rattus norvegicus; identical to SEQ ID NO: 7806
  ref <308>: DATABASE ACCESSION NUMBER: SWISS-Prot / AAB34982
  ref <309>: DATABASE ENTRY DATE: 2001-10-16

SEQ ID NO: 7823 - DNA, 2811 bp, Homo sapiens; identical to SEQ ID NO: 7807
  ref <308>: DATABASE ACCESSION NUMBER: Refseq / NM_004134
  ref <309>: DATABASE ENTRY DATE: 2002-10-22

SEQ ID NO: 7824 - protein, 679 aa, Homo sapiens; identical to SEQ ID NO: 7808
  ref <308>: DATABASE ACCESSION NUMBER: SWISS-Prot / P38646
  ref <309>: DATABASE ENTRY DATE: 2002-06-15

SEQ ID NO: 7825 - DNA, 3001 bp, Rattus norvegicus; identical to SEQ ID NO: 7805
  ref <308>: DATABASE ACCESSION NUMBER: EMBL / S78556
  ref <309>: DATABASE ENTRY DATE: 2000-03-04

SEQ ID NO: 7826 - protein, 679 aa, Rattus norvegicus; identical to SEQ ID NO: 7806
  ref <308>: DATABASE ACCESSION NUMBER: SWISS-Prot / AAB34982
  ref <309>: DATABASE ENTRY DATE: 2001-10-16

SEQ ID NO: 7827 - DNA, 2811 bp, Homo sapiens; identical to SEQ ID NO: 7807
  ref <308>: DATABASE ACCESSION NUMBER: Refseq / NM_004134
  ref <309>: DATABASE ENTRY DATE: 2002-10-22

SEQ ID NO: 7828 - protein, 679 aa, Homo sapiens; identical to SEQ ID NO: 7808
  ref <308>: DATABASE ACCESSION NUMBER: SWISS-Prot / P38646
  ref <309>: DATABASE ENTRY DATE: 2002-06-15

SEQ ID NO: 7829 - DNA, 987 bp, Rattus norvegicus
  ref <308>: DATABASE ACCESSION NUMBER: EMBL / S79304
  ref <309>: DATABASE ENTRY DATE: 2001-06-09
gaattccctttcttcgaccccgctggaggtggagacccaattctttatcaacacctattctgattcttcggccacccagaagtgtacatcttaattcttccagggtttggaattatttcacatgtagttacctattactctggaaaaaaagaacccttcggatatataggtatggtatgagccataatatctattggcttcctaggatttattgtatgagcacatcacatattcacagtaggcctagatgtagacacccgagcctactttacatctgccactataattatcgcaattcctacaggcgtaaaagtattcagctgactcgctacactacatggaggaaatatcaaatgatcccccgccatattatgagccttagggtttatcttcttattcacagtagggggcctaacagggatcgtactatctaactcatcccttgacattgtacttcatgatacatactacgtagtagctcacttccactatgtcttatctataggagcagtattcgccatcatagcttgcttcgtccactgattcccactattctcaggctataccctaaatgacacatgagcaaaagcccactttgccattatatttgtaggtgtaaacataacattttttcctcaacacttcctaggattagcagggatacctcgtcgttactctgattatccagatgcttataccacatgaaatacagtctcctctataggctcattcatctcacttacggccgtccttgtaatgatcttcatgatttgagaagccttcgcatcaaaacgagaagtgctctcaatttcctactcttcaactaacctagaatgactgcatggatgccccccaccttaccacacattcgaagaaccttcctatgtaaaagttaaataagaaaggaaggattcgaaccccctacaactggtttcaagccaatttcataaccattatgtctttctcaataaaaaaaaaaaggaattc

SEQ ID NO: 7830 - protein, 514 aa, Rattus norvegicus
  ref <308>: DATABASE ACCESSION NUMBER: SWISS-Prot / AAB21298
  ref <309>: DATABASE ENTRY DATE: 2002-06-15
MFVNRWLFSTNHKDIGTLYLLFGAWAGMVGTALSILIRAELGQPGALLGDDQIYNVIVTAHAFVMIFFMVMPMMIGGFGNWLVPLMIGAPDMAFPRMNNMSFWLLPPSFLLLLASSMVEAGAGTGWTVYPPLAGNLAHAGVSVDLTIFSLHLAGVSSILGAINFITTIINMKPPAMTQYQTPLFVWSVLITAVLLLLSLPVLAAGITMLLTDRNLNTTFFDPAGGGDPILYQHLFWFFGHPEVYILILPGFGIISHVVTYYSGKKEPFGYMGMVWTMMSIGFLGFIVWAHHMFTVGLDVDTRAYFTSATMIIAIPTGVKVFSWLATLHGGNIKWSPAMLWALGFIFLFTVGGLTGIVLSNSSLDIVLHDTYYVVAHFHYVLSMGAVFAIMAGFVHWFPLFSGYTLNDTWAKAHFAIMFVGVNMTFFPQHFLGLAGMPRRYSDYPDAYTTWNTVSSMGSFISLTAVLVMIFMIWEAFASKREVLSISYSSTNLEWLHGCPPPYHTFEEPSYVKVK

SEQ ID NO: 7831 - DNA, 1580 bp, Rattus norvegicus
  ref <308>: DATABASE ACCESSION NUMBER: EMBL / S79523
  ref <309>: DATABASE ENTRY DATE: 2000-07-30
acattcttcctgagtgcagcacaccctccttgtgcaagagcacagcgccccaggtgcagaagactgaggcccgcagaaggacttacagaagagacccagcaagccatggtgtttccatggagatgtcagagtgctcagcggggctcctggagcttcctgaagctgtggatctggacactgctgtgttgtgatctcctgccacaccatggaactcactgttggacttaccattattctgaaagatccatgaactgggaaaatgctagaaagttctgcaagcacaattacacagatttagttgctatacaaaataagagagaaattgagtatttggaaaagacattacccaaaaaccctacctactactggataggaatcaggaaaatcgggaaaacgtggacatgggtgggaaccaacaaaaccctcaccaaagaagcagagaactggggtactggggagcccaacaacaagaagtctaaggaagactgcgtggagatctatatcaagagggaacgagactctgggaagtggaatgacgatgcctgccacaaacgaaaggcagctctctgctacacagcctcctgccaaccagaatcttgcaaccgccatggagaatgtgtggaaactatcaacaataacacctgcatctgtgacccagggtattatgggccccagtgtcagtatgtgatccaatgtgagcctttgaaggcccctgagctgggtaccatgaactgtattcaccccttgggagacttcagcttccagtcacagtgtgctttcaactgttctgagggaagcgagctacttgggaatgcaaaaacagagtgtggagcatctggaaactggacatatctagagccaatctgtcaagtgattcagtgcatgcctctagcagcaccggatctgggcactatggaatgcagtcaccccctcgccaacttcagttttacttctgcttgtaccttcacctgctcagaagaaactgacttaattggggagagaaaaactgtctgcagatcatctggctcctggtctagtcctagtccaatatgtcaaaagacaaagagaagtttctcaaagatcaaggaaggcgactataaccccctcttcattccagtagctgtcatggtcactgcattctcagggctggcatttatcatttggctggcaaggcggctaaaaaaaggcaagaaatcgcaggaaaggatggatgatccttactgattgatcctttgtgagaggaaagtcataaggtactaacaaccgccaccaaaaaccattggaagacaacttcaacacctcctgttaagattttgcacacgggcatctcccacgttagagatgcagtgtttgctcagtgtaactgagtacggatttcaacacgaccaacagctcctcctaatttcctctcactcactcatcctataaatctattccataacttgtgcttatacagatcggtattttatcatcttttctgtgaaagaacaaataagacaattgagcaaaagagttactgtaggatataaagatacctgcttttactcttccccaactctcgtttcctctttcagtgccaa

SEQ ID NO: 7832 - protein, 372 aa, Rattus norvegicus
  ref <308>: DATABASE ACCESSION NUMBER: SWISS-Prot / P30836
  ref <309>: DATABASE ENTRY DATE: 2002-06-15
MVFPWRCQSAQRGSWSFLKLWIRTLLCCDLLPHHGTHCWTYHYSERSMNWENARKFCKHNYTDLVAIQNKREIEYLEKTLPKNPTYYWIGIRKIGKTWTWVGTNKTLTKEAENWGTGEPNNKKSKEDCVEIYIKRERDSGKWNDDACHKRKAALCYTASCQPESCNRHGECVETINNNTCICDPGYYGPQCQYVIQCEPLKAPELGTMNCIHPLGDFSFQSQCAFNCSEGSELLGNAKTECGASGNWTYLEPICQVIQCMPLAAPDLGTMECSHPLANFSFTSACTFTCSEETDLIGERKTVCRSSGSWSSPSPICQKTKRSFSKIKEGDYNPLFIPVAVMVTAFSGLAFIIWLARRLKKGKKSQERMDDPY

SEQ ID NO: 7833 - DNA, 1924 bp, Rattus norvegicus
  ref <308>: DATABASE ACCESSION NUMBER: EMBL / S80376
  ref <309>: DATABASE ENTRY DATE: 2000-03-03
gagcctcctagagtacctcctccctgatagaatatgcgtgatccgagtcctcactcgcctgggagcctggaggtcgtcggagctgtgcgaggagcgcgtacccatacgcactggggcgcggggtgcaagaaagccacgcgggtcagcgtgtaagcaagcgccccttgtccctcctctgactcatcaggttagggaaacgctcctctgagcccccaagccaacccctaccccagttcccatctccttccaggagagcgggacccgcaaggggcgcgcacatcagacagcaaagcaacgagtcggcccacagtcgccttgttgggactctttggtacgaactctggcccttggtgctgtgcttagccactaggaggggcaggaccctgcttttggttgcgcaccaactccccctcagcatctccgtggggcggtgctgagccaggagctggctgagcccgggcacagcgccaccccgctgtctccagcagaacccggcgccaggggggttccgtcgctgtgcgctgtttccccagcaggttcctaagacgacctgcctttaaggagcgtttccctgggcgcgcctcgctcccggcgccgttagccgggagcgtgcggtgggcaagggagggagaagccggtgcgatcgtagatccccgggagacctggccgtctctttcagtatcagacagcggagaagccgtcgcgggagccacttatcggggtctcgctggctctggtgcgccttcctacttgcctgatcggagtgcgagccagcaggcatggggtgtttgggcaacagcagcaagaccgcggaagatcagggcgtggatgaaaaggaacgccgggaggccaacaaaaagatcgagaagcagttgcagaaagagcgcctggcttacaaagcgacccaccgcctgctgcttctgggggctggtgagtccgggaaaagcactatagtcaaacagatgaggatcctacacgtcaatggctccaaccccgaggaaaagaagcagaaaattctggacatcaggaaaaatgtcaaagatgctattgtgacaatcgtttcagcaatgagtaccataatacctccagttccactggccaaccctgagaaccagtttcggtcagattacatcaagagcatagcccctatcactgactttgaatattcccaggagttctttgaccacgtgaagaagctgtgggatgatgaaggagtgaaggcctgctttgagagatccaacgagtaccagctgatcgactgtgcacaatacttcctggaaaggattgacagcgtgagtctggttgactacacacccacagaccaggacctactcagatgcagagtgctgacatcagggatctttgagacacgattccaagtggacaaagtgaactttcacatgtttgacgttggaggccagagggatgagagaagaaaatggatccagtgttttaacgatgtcactgccatcatctatgtggcagcctgcagcagctacaacatggtgatccgggaagataacaacaccaacagactccgggagtcgctggacctgtttgaaagcatctggaataacaggtggttacgaaccatttccatcatcctgttcttgaacaaacaagatatgctggcagaaaaagtcttggccgggaagtcaaaaattgaagactatttcccggagtatgccaactatactgtccctgaagatgcaacaccagatgcaggagaagatcccaaagttacaagagccaagttctttatccgggatctgttcttgaggatcagcacagccacgggtgatggcaaacattactgctaccctcacttcacctgcgccgtggacacagagaacatccgcagagtgttcaacgattgtcgtgacatcatccagagaatgcacctcaagcagtacgaactcttgtg

SEQ ID NO: 7834 - protein, 381 aa, Rattus norvegicus
  ref <308>: DATABASE ACCESSION NUMBER: SWISS-Prot / P38406
  ref <309>: DATABASE ENTRY DATE: 2002-06-15
MGCLGNSSKTAEDQGVDEKERREANKKIEKQLQKERLAYKATHRLLLLGAGESGKSTIVKQMRILHVNGSNPEEKKQKILDIRKNVKDAIVTIVSAMSTIIPPVPLANPENQFRSDYIKSIAPITDFEYSQEFFDHVKKLWDDEGVKACFERSNEYQLIDCAQYFLERIDSVSLVDYTPTDQDLLRCRVLTSGIFETRFQVDKVNFHMFDVGGQRDERRKWIQCFNDVTAIIYVAACSSYNMVIREDNNTNRLRESLDLFESIWNNRWLRTISIILFLNKQDMLAEKVLAGKSKIEDYFPEYANYTVPEDATPDAGEDPKVTRAKFFIRDLFLRISTATGDGKHYCYPHFTCAVDTENIRRVFNDCRDIIQRMHLKQYELL

SEQ ID NO: 7835 - DNA, 2092 bp, Homo sapiens
  ref <308>: DATABASE ACCESSION NUMBER: EMBL / L10665
  ref <309>: DATABASE ENTRY DATE: 1999-07-01
ctctaaagcaattctcgtgtaaaaaggcattttactccgcgcgtcttccttacagccatttagttgggagtttgcggtgggcagggggagggagaagaaacgcctgctctgaatcggaaaacaccgaagagaccagaccatctctttcagcagcaggaaagagaggagccgtcgcaggagccgcacacgtctccaactctctattgctttttgcgcacattcctaacttcctgacgtccatcccagcgggcaggcatggggtgtttgggcggcaacagcaagacgacggaagaccagggcgtcgatgaaaaagaacgacgcgaggccaacaaaaagatcgagaagcagttgcagaaagagcgcctggcttacaaggctacccaccgcctgctgctcctgggggctggtgagtctgggaaaagcaccatcgtcaaacagatgaggatcctgcacgtcaatgggtttaatcccgaggaaaagaaacagaaaattctggacatccggaaaaatgttaaagatgctatcgtgacaattgtttcagcaatgagtactataatacctccagttccgctggccaaccctgaaaaccaatttcgatcagactacatcaagagcatagcccctatcactgactttgaatattcccaggaattctttgaccatgtgaaaaaactttgggacgatgaaggcgtgaaggcatgctttgagagatccaacgaataccagctgattgactgtgcacaatacttcctggaaagaatcgacagcgtcagcttggttgactacacacccacagaccaggacctcctcagatgcagagttctgacatctgggatttttgagacacgattccaagtggacaaagtaaacttccacatgtttgatgttggtggccagagggatgagaggagaaaatggatccagtgctttaacgatgtcacagctatcatttacgtcgcagcctgcagtagctacaacatggtgattcgagaagataacaacaccaacaggctgagagagtccctggatctttttgaaagcatctggaacaacaggtggttacggaccatttctatcatcttgttcttgaacaaacaagatatgctggcagaaaaagtcttggcagggaaatcaaaaattgaagactatttcccagaatatgcaaattatactgttcctgaagacgcaacaccagatgcaggagaagatcccaaagttacaagagccaagttctttatccgggacctgtttttgaggatcagcacggccaccggtgacggcaaacattactgctacccgcacttcacctgcgccgtggacacagagaacatccgcagggtgttcaacgactgccgcgacatcatccagcggatgcacctcaagcagtatgagctcttgtgaggacttggccgccaccctgcgacggagcggcgcccccggactgcctgactgccagccccatgccatggtaggaggcagagtctctagttccatctcgctgccgtctgtcccgttctgtgtcgaccaccaagcctctggctacctctgtcccctcaggtttggttgtgtagcttctgttgtcattgaatacggcttcccgcagcatcccacccccaaaccaccgactctcattgccgacactgcagcagaatctctccgggtgggagcccaattattcattctccctttattgattcatcgaggagaacttggtagatggggagaaaaacacagttggtttttttttccacgttatcaaccgtgactgcaagagcgttcgtgcatgccctgagccacggccgtctctgattctccctttatgaagctgcaggctgacgagagatggtcccttcccattgccttagcccaagacttggagtcgaccccaagcgacagagtgaccagaaacccttttacagtcacattcagagtcgctgctggcctcaggcatttgaattagagctactttgagcctcttaggcagaaaacctaccacattcactactgcaaaatgtgtcctgtctaaaaatgattctctaaactttccctatacttaggcatagtcttctttcttagattctctttgttgttg

SEQ ID NO: 7836 - protein, 381 aa, Homo sapiens
  ref <308>: DATABASE ACCESSION NUMBER: SWISS-Prot / P38405
  ref <309>: DATABASE ENTRY DATE: 2002-06-15
MGCLGGNSKTTEDQGVDEKERREANKKIEKQLQKERLAYKATHRLLLLGAGESGKSTIVKQMRILHVNGFNPEEKKQKILDIRKNVKDAIVTIVSAMSTIIPPVPLANPENQFRSDYIKSIAPITDFEYSQEFFDHVKKLWDDEGVKACFERSNEYQLIDCAQYFLERIDSVSLVDYTPTDQDLLRCRVLTSGIFETRFQVDKVNFHMFDVGGQRDERRKWIQCFNDVTAIIYVAACSSYNMVIREDNNTNRLRESLDLFESIWNNRWLRTISIILFLNKQDMLAEKVLAGKSKIEDYFPEYANYTVPEDATPDAGEDPKVTRAKFFIRDLFLRISTATGDGKHYCYPHFTCAVDTENIRRVFNDCRDIIQRMHLKQYELL

SEQ ID NO: 7837 - DNA, 3144 bp, Rattus norvegicus
  ref <308>: DATABASE ACCESSION NUMBER: EMBL / S81497
  ref <309>: DATABASE ENTRY DATE: 2000-08-03
ccgtgactgaagaagccattgccaagggtatcgcaggattgttgctgtcacaggtgctgtagactgaggttgaaggactaccccggagacggctgcagtcgttcggttcctgtctcttccgtgtaggatttgatttctcctaaacttggtttaagacttttaaagaaggccctaatttatcgaggcctgtttgtgaagtaaaattcggctggctactctcaacggaagaaagatgcaactgctaggccgggtgatctgtttcgtcgttgggatcctgctttctgggggcccaacggggaccatatcagctgtggaccctgaagcaaacatgaatgtgactgagataatcatgcactggggatatccagagcactcagtacagacaggagatggctacattctgggtgttcaccgaatcccgcatgggcggaagaaccagtttgataaaggtcccaaaccagttgtgtatcttcagtggcgacatggcttcctggcagattctagtaactgggtcacaaacattgacaacaacagcctgggcttcatcctggcagatgctggctttgatgtgtggatgggaaacagcagaggaaacacctggtctcggaagcacaagactctgtcagtttctcaggatgaatactgggccttcagttttgatgagatggcaaaatatgacctccctgcttcaattaactacattttgaataaaactggccaagaacagctgtataatgtgggccactctcaaggctgcaccataggttttatagcattttcacagatgcctgaactggcaaagaaggttaaaatgttttttgccctggctcctgtgttgtctctcaattttgcttcgggcccgatggtcaaattgggacggttgccggatctgcttcttgaggacttgtttgggcagaagcaatttcttcctcagagtgcaatggtgaaatggctaagcactcacatttgcacgcacgtcatcatgaaggagctttgcgccaacatcttctttctgatatgtggcttcaatgagaagaatttaaacatgtctagagtggatgtgtatacaacacactgtcctgcgggaacctctgtgcaaaacatggtacactggacccaggttgttaaataccataagcttcaagcttttgactggggaagcagtgacaagaattattttcattacaatcagagttatccacccttgtacagcataaaagacatgcaactacccactgctttatggagcgggggcaaggactggctggcagacaccagtgacatcaatatcttactgactgaaatccccacgttagtgtaccacaagaacattcccgagtgggaccatctggattttatctggggtttggatgccccctggaggctgtataatgaagtagtcagtctaatgaagaaataccagtgagtgccaagacttgagatgcttccccttcactaggggaaaaaaggacagatgtttgcttaattcctgcaaaatactgtgttttcctggtctagatcatttgtattttttatgtgcaagaaaacgatgatgttgaagacatacatgggtctggtcagtaagaagcacgctggctgtcttctgcttcattctgactgacaagccagagtcacaaccagtgatgcctttgaagtttttagaaagtatgggtgttacgtgaaagaagccattgcaacctcttgtttactttttacggtcgttttcggtgtctgcatgctgtgcatatacatgcctatgtgtgtgccctgtgctggccagagcctccttgtgtggaggtaatggctcacatcagggtatcttccctcagacactggtctctcgacgaaccagtcagtagcttgctattccagttagactggctgaccagggagcctccagaatctgtccgtctctaccttccctcaccaggtctacggagggtgatgtcccagccagcattttacactggttctagggacaggaactcaggttctcatgcttgatagcaagccctttcttcaccaaaccattgcctcaaaccctctgtgatcgaaaagctgctcaattacctttatgttcccacccaatgcaagtgaacgagcacaagacatttcaagctgttgtttgtgagctaaaaatcaatctgccagtgacttgaacatgctagggagaaactcctggccctgagcttgacaaacctgcagtccaggttctccagagattgagacagggaggctgctgttacatttagggttcatttggagagtgagactttgtctctacaaaaccaaagacaaaggagaagaagaaaaaaaaaaccctaaagtactcagttctcatctgttagcctcagagggcttagagagttcctgtgtttacctatccgaacaacattttcatgtctttatgcagtagctacctagtgaaatccagtgttatcccagcttctccaggcgtaaacattctctcttcaatctcatcagacctcagtagcaagcatttagtgaatatttagatttttcaggccaagccaagacaaaaatgaatagaataaaagaaaaaagagcccagactcttgaaagcggtttgcactgatttaaaaataaaaaaaaagaatcttgaagaatgacatgataaactgtgttggttccgcatgtgtagtcggatcccttttctgtggagaacgttctgtggagggacaaaccactaatttgccccaagtgaatgtggctgtagtgacagcgacagtgcctctgatcctgagaagcagggctggctgccggtgacaagcatcccagttcctttccccagagatgaagaggatgttttcagacagagctcggctcagggaatttcgcttggagaatcagtggtttatgtgcacaatgttttagtgagcctgctctgcgcctgatatggggaagccctcgactgttcaccgggctcgtgggcgacggctgccgtcagctggacagtggataagttttctgagtagtcaccacagattcagggatatcgctttgtgtcgactcctaaggaaggcaggacgatatgacttggtaacattgtaaaggttcacatttaaacttttcaataaatctcagcctcacaggcctgaacatcaaaaaaaaaaaaaaaaaaaa

SEQ ID NO: 7838 - protein, 397 aa, Rattus norvegicus
  ref <308>: DATABASE ACCESSION NUMBER: SWISS-Prot / AAB36043
  ref <309>: DATABASE ENTRY DATE: 2002-06-15
MQLLGRVICFVVGILLSGGPTGTISAVDPEANMNVTEIIMHWGYPEHSVQTGDGYILGVHRIPHGRKNQFDKGPKPVVYLQWRHGFLADSSNWVTNIDNNSLGFILADAGFDVWMGNSRGNTWSRKHKTLSVSQDEYWAFSFDEMAKYDLPASINYILNKTGQEQLYNVGHSQGCTIGFIAFSQMPELAKKVKMFFALAPVLSLNFASGPMVKLGRLPDLLLEDLFGQKQFLPQSAMVKWLSTHICTHVIMKELCANIFFLICGFNEKNLNMSRVDVYTTHCPAGTSVQNMVHWTQVVKYHKLQAFDWGSSDKNYFHYNQSYPPLYSIKDMQLPTALWSGGKDWLADTSDINILLTEIPTLVYHKNIPEWDHLDFIWGLDAPWRLYNEVVSLMKKYQ

SEQ ID NO: 7839 - DNA, 2481 bp, Homo sapiens
  ref <308>: DATABASE ACCESSION NUMBER: EMBL / U08464
  ref <309>: DATABASE ENTRY DATE: 1999-07-02
ggcacgagagcggcccggcaggacagctccagaatgaaaatgcggttcttggggttggtggtctgtttggttctctggaccctgcattctgaggggtctagagggaaactgacagctgtggatcctgaaacaaacatgaatgtgagtgaaattatctcttactggggattccctagtgaggaatacctagttgagacagaagatggatatattctgtgccttaaccgaattcctcatgggaggaagaaccattctgacaaaggtcccaaaccagttgtcttcctgcaacatggcttgctggcagattctagtaactgggtcacaaaccttgccaacagcagcctgggcttcattcttgctgatgctggttttgacgtgtggatgggcaacagcagaggaaatacctggtctcggaaacataagacactctcagtttctcaggatgaattctgggctttcagttatgatgagatggcaaaatatgacctaccagcttccattaacttcattctgaataaaactggccaagaacaagtgtattatgtgggtcattctcaaggcaccactataggttttatagcattttcacagatccctgagctggctaaaaggattaaaatgttttttgccctgggtcctgtggcttccgtcgccttctgtactagccctatggccaaattaggacgattaccagatcatctcattaaggacttatttggagacaaagaatttcttccccagagtgcgtttttgaagtggctgggtacccacgtttgcactcatgtcatactgaaggagctctgtggaaatctctgttttcttctgtgtggatttaatgagagaaatttaaatatgtctagagtggatgtatatacaacacattctcctgctggaacttctgtgcaaaacatgttacactggagccaggctgttaaattccaaaagtttcaagcctttgactggggaagcagtgccaagaattattttcattacaaccagagttatcctcccacatacaatgtgaaggacatgcttgtgccgactgcagtctggagcgggggtcacgactggcttgcagatgtctacgacgtcaatatcttactgactcagatcaccaacttggtgttccatgagagcattccggaatgggagcatcttgacttcatttggggcctggatgccccttggaggctttataataaaattattaatctaatgaggaaatatcagtgaaagctggacttgagctgtgtaccaccaagtcaatgattatgtcatgtgaaaatgtgtttgcttcatttctgtaaaacacttgtttttctttcccaggtcttttgtttttttatatccaagaaaatgataactttgaagatgcccagttcactctagtttcaattagaaacatactagctattttttctttaattagggctggaataggaagccagtgtctcaaccatagtattgtctctttaagtcttttaaatatcactgatgtgtaaaaaggtcattatatccattctgtttttaaaatttaaaatatattgactttttgcccttcataggacaaagtaatatatgtgttggaattttaaaattgtgttgtcattggtaaatctgtcactgacttaagcgaggtataaaagtacgcagttttcatgtccttgccttaaagagctctctagtctaacggtcttgtagttagagatctaaatgacattttatcatgttttcctgcagcaggtgcatagtcaaatccagaaatatcacagctgtgccagtaataaggatgctaacaattaattttatcaaacctaactgtgacagctgtgatttgacacgttttaattgctcaggttaaatgaaatagttttccggcgtcttcaaaaacaaattgcactgataaaacaaaaacaaaagtatgttttaaatgctttgaagactgatacactcaaccatctatattcatgagctctcaatttcatggcaggccatagttctacttatctgagaagcaaatccctgtggagactataccactattttttctgagattaatgtactcttggagcccgctactgtcgttattgatcacatctgtgtgaagccaaagccccgtggttgcccatgagaagtgtccttgttcattttcacccaaatgaagtgtgaacgtgatgttttcggatgcaaactcagctcagggattcattttgtgtcttagttttatatgcatccttatttttaatacacctgcttcacgtccctatgttgggaagtccatatttgtctgcttttcttgcagcatcatttccttacaatactgtccggtggacaaaatgacaattgatatgtttttctgatataattactttagctgcactaacagtacaatgcttgttaatggttaatataggcagggcgaatactactttgtaacttttaaagtcttaaacttttcaataaaattgagtgagacttata

SEQ ID NO: 7840 - protein, 399 aa, Homo sapiens
  ref <308>: DATABASE ACCESSION NUMBER: SWISS-Prot / P38571
  ref <309>: DATABASE ENTRY DATE: 2002-06-15
MKMRFLGLVVCLVLWPLHSEGSGGKLTAVDPETNMNVSEIISYWGFPSEEYLVETEDGYILCLNRIPHGRKNHSDKGPKPVVFLQHGLLADSSNWVTNLANSSLGFILADAGFDVWMGNSRGNTWSRKHKTLSVSQDEFWAFSYDEMAKYDLPASINFILNKTGQEQVYYVGHSQGTTIGFIAFSQIPELAKRIKMFFALGPVASVAFCTSPMAKLGRLPDHLIKDLFGDKEFLPQSAFLKWLGTHVCTHVILKELCGNLCFLLCGFNERNLNMSRVDVYTTHSPAGTSVQNMLHWSQAVKFQKFQAFDWGSSAKNYFHYNQSYPPTYNVKDMLVPTAVWSGGHDWLADVYDVNILLTQITNLVFHESIPEWEHLDFIWGLDAPWRLYNKIINLMRKYQ

SEQ ID NO: 7841 - DNA, 3144 bp, Rattus norvegicus; identical to SEQ ID NO: 7837
  ref <308>: DATABASE ACCESSION NUMBER: EMBL / S81497
  ref <309>: DATABASE ENTRY DATE: 2000-08-03

SEQ ID NO: 7842 - protein, 397 aa, Rattus norvegicus; identical to SEQ ID NO: 7838
  ref <308>: DATABASE ACCESSION NUMBER: SWISS-Prot / AAB36043
  ref <309>: DATABASE ENTRY DATE: 2002-06-15

SEQ ID NO: 7843 - DNA, 2481 bp, Homo sapiens; identical to SEQ ID NO: 7839
  ref <308>: DATABASE ACCESSION NUMBER: EMBL / U08464
  ref <309>: DATABASE ENTRY DATE: 1999-07-02

SEQ ID NO: 7844 - protein, 399 aa, Homo sapiens; identical to SEQ ID NO: 7840
  ref <308>: DATABASE ACCESSION NUMBER: SWISS-Prot / P38571
  ref <309>: DATABASE ENTRY DATE: 2002-06-15

SEQ ID NO: 7845 - DNA, 3144 bp, Rattus norvegicus; identical to SEQ ID NO: 7837
  ref <308>: DATABASE ACCESSION NUMBER: EMBL / S81497
  ref <309>: DATABASE ENTRY DATE: 2000-08-03

SEQ ID NO: 7846 - protein, 397 aa, Rattus norvegicus; identical to SEQ ID NO: 7838
  ref <308>: DATABASE ACCESSION NUMBER: SWISS-Prot / AAB36043
  ref <309>: DATABASE ENTRY DATE: 2002-06-15

SEQ ID NO: 7847 - DNA, 2481 bp, Homo sapiens; identical to SEQ ID NO: 7839
  ref <308>: DATABASE ACCESSION NUMBER: EMBL / U08464
  ref <309>: DATABASE ENTRY DATE: 1999-07-02

SEQ ID NO: 7848 - protein, 399 aa, Homo sapiens; identical to SEQ ID NO: 7840
  ref <308>: DATABASE ACCESSION NUMBER: SWISS-Prot / P38571
  ref <309>: DATABASE ENTRY DATE: 2002-06-15

SEQ ID NO: 7849 - DNA, 3144 bp, Rattus norvegicus; identical to SEQ ID NO: 7837
  ref <308>: DATABASE ACCESSION NUMBER: EMBL / S81497
  ref <309>: DATABASE ENTRY DATE: 2000-08-03

SEQ ID NO: 7850 - protein, 397 aa, Rattus norvegicus; identical to SEQ ID NO: 7838
  ref <308>: DATABASE ACCESSION NUMBER: SWISS-Prot / AAB36043
  ref <309>: DATABASE ENTRY DATE: 2002-06-15

SEQ ID NO: 7851 - DNA, 2481 bp, Homo sapiens; identical to SEQ ID NO: 7839
  ref <308>: DATABASE ACCESSION NUMBER: EMBL / U08464
  ref <309>: DATABASE ENTRY DATE: 1999-07-02

SEQ ID NO: 7852 - protein, 399 aa, Homo sapiens; identical to SEQ ID NO: 7840
  ref <308>: DATABASE ACCESSION NUMBER: SWISS-Prot / P38571
  ref <309>: DATABASE ENTRY DATE: 2002-06-15

SEQ ID NO: 7853 - DNA, 3144 bp, Rattus norvegicus; identical to SEQ ID NO: 7837
  ref <308>: DATABASE ACCESSION NUMBER: EMBL / S81497
  ref <309>: DATABASE ENTRY DATE: 2000-08-03

SEQ ID NO: 7854 - protein, 397 aa, Rattus norvegicus; identical to SEQ ID NO: 7838
  ref <308>: DATABASE ACCESSION NUMBER: SWISS-Prot / AAB36043
  ref <309>: DATABASE ENTRY DATE: 2002-06-15

SEQ ID NO: 7855 - DNA, 2481 bp, Homo sapiens; identical to SEQ ID NO: 7839
  ref <308>: DATABASE ACCESSION NUMBER: EMBL / U08464
  ref <309>: DATABASE ENTRY DATE: 1999-07-02

SEQ ID NO: 7856 - protein, 399 aa, Homo sapiens; identical to SEQ ID NO: 7840
  ref <308>: DATABASE ACCESSION NUMBER: SWISS-Prot / P38571
  ref <309>: DATABASE ENTRY DATE: 2002-06-15

SEQ ID NO: 7857 - DNA, 3144 bp, Rattus norvegicus; identical to SEQ ID NO: 7837
  ref <308>: DATABASE ACCESSION NUMBER: EMBL / S81497
  ref <309>: DATABASE ENTRY DATE: 2000-08-03

SEQ ID NO: 7858 - protein, 397 aa, Rattus norvegicus; identical to SEQ ID NO: 7838
  ref <308>: DATABASE ACCESSION NUMBER: SWISS-Prot / AAB36043
  ref <309>: DATABASE ENTRY DATE: 2002-06-15

SEQ ID NO: 7859 - DNA, 2481 bp, Homo sapiens; identical to SEQ ID NO: 7839
  ref <308>: DATABASE ACCESSION NUMBER: EMBL / U08464
  ref <309>: DATABASE ENTRY DATE: 1999-07-02

SEQ ID NO: 7860 - protein, 399 aa, Homo sapiens; identical to SEQ ID NO: 7840
  ref <308>: DATABASE ACCESSION NUMBER: SWISS-Prot / P38571
  ref <309>: DATABASE ENTRY DATE: 2002-06-15

SEQ ID NO: 7861 - DNA, 1375 bp, Rattus norvegicus
  ref <308>: DATABASE ACCESSION NUMBER: EMBL / S82911
  ref <309>: DATABASE ENTRY DATE: 2000-03-04
ctttttttttttttctttctgatttaagcttagcgtgtttgtttgtttggtttggtttttaaactttttttggtgtggattatctctctggaccacgccggacttggcttcagcgaacgaaccgaagctgggagaaagttacttgagctgaaagttctgcacttcagaagggggtttctctctctctctctctctctctctctctctctctctctcctccactcccccctctttcttccccactcggctcctctcccccctcacgcccacagcgtttggtgttgattcgagcgttaagaggggggtgggtgggattggagggaagaccatgacctccagctacgggcacgttctggagcggcaaccggctctgggcggccgcttggatagccctggcaacctcgacaccctgcaggcgaaaaagaacttctccgtcagtcacctgctagacctggaggaggccggggacatggtggcggcacaggcggacgaaagcgtgggcgaggcgggccggagcctgctggagtcaccgggactgaccagtggcagcgacacccctcagcaggacaatgatcagctgaactctgaggagaagaagaagagaaagcaacggagaaacaggacaaccttcaatagcagccagctgcaggccttggagcgtgtcttcgagaggacccattacccggatgcttttgtacgggaagatcttgcacgtcgggtgaacctcacggaggccagagtgcaggtgtggtttcagaaccgaagagccaagttccgcaggaatgagcgagccatgctggccaataaaaacgcttctctcctcaagtcctactcaggagacgtgactgccgtggaacaacccattgtacctcgtcctgctcccagacccaccgattatctctcctgggggacagcctctccgtacagcgccatggctacttattctgccacatgtgccaacaatagccctgcgcagggtatcaacatggccaacagcattgccaacctgagactgaaggccaaggaatatagtttacagaggaaccaggtgccaacagtcaactgaggaaaaaaataattaaacaggcctaagaagaaatcaaaaaccataagacacctatcctgttctgtcatttcttcatccgctggaaaaaaaagataaaagcaaacaaacaaagccagaactaaaatattgggaccatggcggagaaaagcaggagaggaacaaaatgaaaattagttaacaaatgtttcttcttcctcttggataccatcaccatttgttgtgtgtgtattttttttccttctacccatgctttgctaagtatacttcaggcttcttctattaggctcaacccacccattcctataattg

SEQ ID NO: 7862 - protein, 245 aa, Rattus norvegicus
  ref <308>: DATABASE ACCESSION NUMBER: SWISS-Prot / AAB46839
  ref <309>: DATABASE ENTRY DATE: 2002-06-15
MTSSYGHVLERQPALGGRLDSPGNLDTLQAKKNFSVSHLLDLEEAGDMVAAQADESVGEAGRSLLESPGLTSGSDTPQQDNDQLNSEEKKKRKQRRNRTTFNSSQLQALERVFERTHYPDAFVREDLARRVNLTEARVQVWFQNRRAKFRRNERAMLANKNASLLKSYSGDVTAVEQPIVPRPAPRPTDYLSWGTASPYSAMATYSATCANNSPAQGINMANSIANLRLKAKEYSLQRNQVPTVN

SEQ ID NO: 7863 - DNA, 3428 bp, Homo sapiens
  ref <308>: DATABASE ACCESSION NUMBER: Refseq / NM_022716
  ref <309>: DATABASE ENTRY DATE: 2002-11-05
ggaaaggaggaagaaggagattgtgatggagaaagggggtctgtgaaacgtcaggcacagcacaaaggctttgccacgtaattacaggctcctattaagtcgagatctgccctcccaggggtctccaattttcttgtattccctacaaagcctcctctgcatgccagtttgtgccttttgaagtgccagagagcttcttgatccaactgagaaggaaaaaggagcccagcaagaagagggggagagagagaaggggaaaggggggaacccaccagcaccctccgtcggactcttgaagccttttttttttaattcttaatttttttttttactctttacaaaaagtaaagtgagaatcctgctctctaatacatctgcaagacatcaccctctcctcctgaaactttagtcactcctgagaatccacaggagtgcagagaggggggaacacgttttcttgaagatgttttaaagctggaacaagccttcttctgttggtgcttgaactcttgcctgggaataacttttttaacctttaaaaaaaccattcactttgattcttctctcccaccccttcttctctcttcttctgtttgcctaactcccccgccctgctggcctccgctttcctctctcccccttgttattatttttagtctgtgcgtgtggacacttttggagagttggaagggatttttttctcctgacttgaacatagggtgactttttaatattgtattttactgtggattatctctttggaccgcgccggacttggcctcaggaaatcaaccaatgctgcggaaggcggctggtgcacaacgctctgctctacagaagggggtcccccaccctcttttccaattttttttttttggccttcctctccttccctccctcttcctccctctctctctctctctctccactacccccctctttcttccccactcggctcctctcccccctcgcgcccacagcgtttggtgttgattcgagcgggaagaggggggtgggtgggatcggtgggggagaccatgacctccagctacgggcacgttctggagcggcaaccggcgctgggcggccgcttggacagcccgggcaacctcgacaccctgcaggcgaaaaagaacttctccgtcagtcacctgctagacctggaggaagccggggacatggtggcggcacaggcggatgagaacgtgggcgaggctggccggagcctgctggagtcgccgggactcaccagcggcagcgacaccccgcagcaggacaatgaccagctgaactcagaagaaaaaaagaagagaaagcagcgaaggaataggacaaccttcaatagcagccagctgcaggctttggagcgtgtctttgagcggacacactatcctgatgcttttgtgcgagaagaccttgcccgccgggtgaacctcaccgaggcgagagtgcaggtgtggtttcagaaccgaagagccaagttccgcaggaatgagagagccatgctagccaataaaaacgcttccctcctcaaatcctactcaggagacgtgactgctgtggagcagcccatcgtacctcgtcctgctccgagacccaccgattatctctcctgggggacagcgtctccgtacagcgccatggctacttattctgccacatgtgccaacaatagccctgcacagggcatcaacatggccaacagcattgccaacctgagactgaaggccaaggaatatagtttacagaggaaccaggtgccaacagtcaactgaggaaaaaaaataattaaacaggcctaagaagaaatcaaaaaccataagacacctatcctgctctgttatttcttcatctgctggggggaaaaagtaaattacaaacaaacaaacaaagcagaactaaaatattgggaccatggcagagaaaagcaggagaggagcaaaatgaaaattagttaacaaatgttcctcctccctctgggataccaccaccacttgtttctgtgtgtgtttattttgtttttctttcattcatgctttgcttaatgtactccaggcttcttcagataggttcagcccacccacccccatgattgtatgaagttttaaaaaaaactacagcagccaaagaaactatatatatatatatatatatatatatccagaatgattgcctctactgtcctcattgacttgtttgaaccttagtgccttaccctgtcctcttcccagttctctttatagaagctctaggagctttcgaaaagccaaagtctttctgaagaatctgtgctggacagacataattccctttctcattgtctccatctttgttggtcatggtaaggtttttccatcagcctctgaaaaaatagttgtgcacaacatctgctcactggactgtctgatccaatgtaattggctgcgtctggctaattctaagcactaaagtctacatctaagctatagatttaagcttgaagctacagattatatcactatcaccaccacccctcaccctatgcaatcaatcaatcaatcatcttaagttaaagatatttgttgtctttgaatgatttgctgtcacagactatttggtagaagaaatatttttcacctgagagaggaagagaaatttctctagtaacacaaagagtgagttctaaaaggcatgcccacatctctttcgtgccttaaggatagtgagatgcacacttatatatatactgtatatatttatatatttatatatatatttcatatatatatataatattgcaagcttaagtttgcaatttcccaaacaatacaaaaagcaaattacacaccctcaccactgttcttatctctatagtgatgaaacattaattagggatcttgctgcttttctttttctacacgaagttttcattaaagccacagaataattgatagggcagctgtttgagaacaggtcccattttcacattagggctttaaatgaattagaaactatttgaggctataaaaatgtccttgagtttggagcctgagctctggtgaaatgctgatacatctgatctatcatgggaattgcagttagagagagtaaggaataccatttagtcatctatccgttcttcacttagcaggaatatgaaagaaaggcacatgtttaagaggaatacctaaaggtttttctaaattccaacatttaaaaggcaattgtgggctatttttattttttaatattttgaaataaagtttagtgtctagggctgggagccaggactgatcttccatttctttttctttgttcccagccatgcttttgtaacttgccaggtggacttgaccaactacattaccatgctgtgcctcagtttacccatttgtaaaatgggattaataatacttacctacctcacaggggtgttgtgaggctctatt

SEQ ID NO: 7864 - protein, 245 aa, Homo sapiens
  ref <308>: DATABASE ACCESSION NUMBER: SWISS-Prot / P54821
  ref <309>: DATABASE ENTRY DATE: 2002-06-15
MTSSYGHVLERQPALGGRLDSPGNLDTLQAKKNFSVSHLLDLEEAGDMVAAQADENVGEAGRSLLESPGLTSGSDTPQQDNDQLNSEEKKKRKQRRNRTTFNSSQLQALERVFERTHYPDAFVREDLARRVNLTEARVQVWFQNRRAKFRRNERAMLANKNASLLKSYSGDVTAVEQPIVPRPAPRPTDYLSWGTASPYSAMATYSATCANNSPAQGINMANSIANLRLKAKEYSLQRNQVPTVN

SEQ ID NO: 7865 - DNA, 3429 bp, Rattus norvegicus
  ref <308>: DATABASE ACCESSION NUMBER: EMBL / S83194
  ref <309>: DATABASE ENTRY DATE: 2000-03-04
aagcgggcagggcggggcgcgcccagcgggagcgagcccggcgcccaccgcagagactgtcgcctggtgcctaggttcccaacaggaatatccacggactgaagtgatggagcgcagtccagccgtctgctgccaagaccctcgagcggaactggtagagcgggtggcagccatcagtgtggcccacctagaagaggcagaggagggcccagagcctgccagcaatggtgtggaccccccaccccgggccagagctgcctctgtgatccctggcagtgcttcaagacccacaccagtgcgtcccagcctctctgctagaaagttctccctgcaggaaagaccagcgggaagctgtctagaggctcaggttgggccttactctacaggacctgccagtcacatgtctcctcgggcttggcggagacccaccatcgagtcccaccatgtggccatctcagacacagaggactgtgtgcaactgaaccagtacaagctgcagagtgagattggcaagggtgcctatggtgtggtgaggctggcctacaatgaaagggaagacagacactatgcaatgaaagttctttccaaaaagaagttactgaagcagtatggctttcctcgccgtcctcccccgagagggtcccaagctcctcagggagggccagccaaacagctgctgcccctggagcgtgtataccaggagattgccattttaaagaaactggaccacgtgaatgtagtcaagttgatcgaggtcctggatgatcctgctgaagacaatctctatttggtgtttgacctcctgagaaagggaccagtcatggaagtgccctgcgacaagcccttcccagaggagcaagctcgcctctacctccgggacatcatcctgggcctcgagtacttgcactgccagaagattgtgcacagggacatcaagccgtccaatctgctccttggggacgatgggcacgtgaagatcgccgactttggtgtcagcaaccagtttgaggggaatgatgctcagctgtccagtacggcagggaccccagcattcatggccccggaggccatttctgacaccggccagagcttcagtgggaaggccttggatgtatgggccactggggttacactgtattgttttgtctacgggaagtgcccattcattgatgagtacatcctggccctgcacagaaagatcaagaatgaggccgtggtgttccctgaggagccggaggtcagcgaggaactcaaagacctgatcctgaagatgctagacaagaatcctgaaacaagaattggggtgtctgatatcaagttacacccttgggtgaccaagcatggagaggagcccctcccttcagaggaggaacactgcagtgtggtagaggtgactgaggaggaggtgaagaactcagtcaagctcatccccagctggaccactgtgatcctggtcaagtctatgctgagaaagcgttcctttggaaacccatttgagccccaagcacgcagggaagaaagatctatgtctgcgccaggaaacttactgttgaaagaaggatgtggagaagggggcaaaagcccagagcttcccggagtccaggaagatgaggctgcatcctgagtccctgcatgtgcccagggccatcggcagcatgctcattccgctcctccagaggcccaccgccctcatgcaatcatcgcccctgcaggcagggggctggggactgcagcccctctcctggcccccctcacccattgtgctgcatgacctgcgcacaggcatatccagggacaggattggaatgtgtatcatttggggctcgggggtcccggttggttctctctgttctgatctatcttgtggggaatattagaaaccctacctgactggctggtgaggcccagggcagaaggcaagagaccaaaatagcaggtggagacctggtgggctgcttctcagagaactcccatagtgatcggtggcctgcccagctgctgcacacgaggagtgattgtgtcacttctgtgtggaaggtgctgagtgctggagtcctcagatctctagtgtggatgctacaagtaatgaggcgtgcctgggagaagactgatcttggagaatccagattcctctcattgtcttttacctgagggcttgggtgggagcggctgttatggagagcatcttctggctttgggtagtccgtggtacactgtacggcagtcacgaggatctgacattcatagactgtgttttacacttggcactcgctggagaaaggaccaaagtgaatccagcttagagcatagacctgagcctggagcagtgtacttctcctgccaacctcccttcctctctcacggatctccagaatgaaggttacagaacaccaggagtgacaaggagggccacggactctcagcactgtggccctgcagatgtggaagtaactgggatctaggcgctgagccgacactggcttactcactacatgctctgatggaggaggctcagccagatgagggaccgtacaagacgcactcctgtcaggctggtggcccttctgtcagttgcttcagtacaggacatcagacagtcagcccacacaggtcagagctgcacagttgggacacacgtggacactgccctttcagaacagatgtcagctctctggattctgtggtcgtctggctattctaatgtttactgataatgctcatagggattggtccccaaagggagatgagcaggactcaggtagccctctctgaaagcctcccataagagatcctggctgcccacatgggtttcaagaatgcaggagggctaggctagaaaagagagaggctgtgcgggagcgctggttcccactcttatctctgtgcccatgggtgtacattgctccttcatgtgcacatgcgtgtgtgtgcccatctgctgtatacagcacacttgcatgtctcatactggcacatgcatctgtaatatagtttctatgtcaacttatgcctaggagcagaaggtagcccattgtcaaagggctcccatttcaacccaactcctctgcactaaggcagccagtgtaacccagggcttgaaaacaaataatctaatcctatctctaagaatacttttatagagtgaataggaggcaagttatgccaaccaataaatagcaaagagtcagggagcttcaccgatgggacccacacaggaaaagctcggagttgggtggctggctcattgtccccagcagagccaggaaggcatgctcactgtcacctgttgttgagagctttggttggctttggttttgaatgtagcacaagtgaacaaactccataagagtgtttataaaaattaacttcttaggaagtgaattaaaaacaataaaagccctttgttgagttaaaaaaaaaaaaaaaaaa

SEQ ID NO: 7866 - protein, 505 aa, Rattus norvegicus
  ref <308>: DATABASE ACCESSION NUMBER: SWISS-Prot / AAB46910
  ref <309>: DATABASE ENTRY DATE: 2003-02-01
MERSPAVCCQDPRAELVERVAAISVAHLEEAEEGPEPASNGVDPPPRARAASVIPGSASRPTPVRPSLSARKFSLQERPAGSCLEAQVGPYSTGPASHMSPRAWRRPTIESHHVAISDTEDCVQLNQYKLQSEIGKGAYGVVRLAYNEREDRHYAMKVLSKKKLLKQYGFPRRPPPRGSQAPQGGPAKQLLPLERVYQEIAILKKLDHVNVVKLIEVLDDPAEDNLYLVFDLLRKGPVMEVPCDKPFPEEQARLYLRDIILGLEYLHCQKIVHRDIKPSNLLLGDDGHVKIADFGVSNQFEGNDAQLSSTAGTPAFMAPEAISDTGQSFSGKALDVWATGVTLYCFVYGKCPFIDEYILALHRKIKNEAVVFPEEPEVSEELKDLILKMLDKNPETRIGVSDIKLHPWVTKHGEEPLPSEEEHCSVVEVTEEEVKNSVKLIPSWTTVILVKSMLRKRSFGNPFEPQARREERSMSAPGNLLLKEGCGEGGKSPELPGVQEDEAAS

SEQ ID NO: 7867 - DNA, 3583 bp, Homo sapiens
  ref <308>: DATABASE ACCESSION NUMBER: Refseq / NM_032294
  ref <309>: DATABASE ENTRY DATE: 2002-11-05
ctgggccccagcgaggcggtggggcggggcggggcggggcggggcgcgcagcaggagcgagtggggccgcccgccgggccgcggacactgtcgcccggcgcccaggttcccaacaaggctacgcagaagaacccccttgactgaagcaatggaggggggtccagctgtctgctgccaggatcctcgggcagagctggtagaacgggtggcagccatcgatgtgactcacttggaggaggcagatggtggcccagagcctactagaaacggtgtggaccccccaccacgggccagagctgcctctgtgatccctggcagtacttcaagactgctcccagcccggcctagcctctcagccaggaagctttccctacaggagcggccagcaggaagctatctggaggcgcaggctgggccttatgccacggggcctgccagccacatctccccccgggcctggcggaggcccaccatcgagtcccaccacgtggccatctcagatgcagaggactgcgtgcagctgaaccagtacaagctgcagagtgagattggcaagggtgcctacggtgtggtgaggctggcctacaacgaaagtgaagacagacactatgcaatgaaagtcctttccaaaaagaagttactgaagcagtatggctttccacgtcgccctcccccgagagggtcccaggctgcccagggaggaccagccaagcagctgctgcccctggagcgggtgtaccaggagattgccatcctgaagaagctggaccacgtgaatgtggtcaaactgatcgaggtcctggatgacccagctgaggacaacctctatttggtgtttgacctcctgagaaaggggcccgtcatggaagtgccctgtgacaagcccttctcggaggagcaagctcgcctctacctgcgggacgtcatcctgggcctcgagtacttgcactgccagaagatcgtccacagggacatcaagccatccaacctgctcctgggggatgatgggcacgtgaagatcgccgactttggcgtcagcaaccagtttgaggggaacgacgctcagctgtccagcacggcgggaaccccagcattcatggcccccgaggccatttctgattccggccagagcttcagtgggaaggccttggatgtatgggccactggcgtcacgttgtactgctttgtctatgggaagtgcccattcatcgacgatttcatcctggccctccacaggaagatcaagaatgagcccgtggtgtttcctgaggagccagaaatcagcgaggagctcaaggacctgatcctgaagatgttagacaagaatcccgagacgagaattggggtgccagacatcaagttgcacccttgggtgaccaagaacggggaggagccccttccttcggaggaggagcactgcagcgtggtggaggtgacagaggaggaggttaagaactcagtcaggctcatccccagctggaccacggtgatcctggtgaagtccatgctgaggaagcgttcctttgggaacccgtttgagccccaagcacggagggaagagcgatccatgtctgctccaggaaacctactggtgaaagaagggtttggtgaagggggcaagagcccagagctccccggcgtccaggaagacgaggctgcatcctgagcccctgcatgcacccagggccacccggcagcacactcatcccgcgcctccagaggcccacccctcatgcaacagccgcccccgcaggcagggggctggggactgcagccccactcccgcccctcccccatcgtgctgcatgacctccacgcacgcacgtccagggacagactggaatgtatgtcatttggggtcttgggggcagggctcccacgaggccatcctcctcttcttggccctccttggcctgacccattctgtggggaaaccgggtgcccatggagcctcagaaatgccacccggctggttggcatggcctggggcaggaggcagaggcaggagaccaagatggcaggtggaggccaggcttaccacaacggaagagacctcccgctggggccgggcaggcctggctcagctgccacaggcatatggtggagaggggggtaccctgcccaccttggggtggtggcaccagagctcttgtctattcagacgctggtatgggggctcggacccctcactggggacagggccagtgttggagaattctgattccttttttgttgtcttttacttttgtttttaacctgggggttcggggagaggccctgcttgggaacatctcacgagctttcctacatcttccgtggttcccagcacagcccaagattatttggcagccaagtggatggaactaactttcctggactgtgtttcgcattcggcgttatctggaaagtggactgaacggaatcaagctctgagcagaggcctgaagcggaagcaccacatcgtccctgcccatctcactctctcccttgatgatgcccctagagctgaggctggagaagacaccagggctgactttgaccgagggccatggacgcgacaggcctgtggccctgcgcatgctgaaataactggaacccagcctctcctcctacaccggcctacccatctgggcccaagagctgcactcacactcctacaacgaaggacaaactgtccaggtcggagggatcacgagacacagaacctggaggggtgtgcacgctggcaggtggcctctgcggcaattgcctcaccctgaggacatcagcagtcagcctgctcagagcgggggtgctggagcgcgtgcagacacagctcttccggagcagccttcaccttctctctgggatcagtgtccggctggccgacgtggcatttgctgaccgaatgctcatagaggttgacccccacagggtcacgcaggactcggacactgccctggaaacatggatggacaagggcttttggccacaggtgtgggtgtcctgttggaggagggcttgtttggagaagggaggctggctgggggagaaacccggatcccgctgcatctccgcgcctgtgggtgcatgtcgcgtgctcatctgttgcacacagctcactcgtatgtcctgcactggtacatgcatctgtaatacagtttctacgtctatttaaggctaggagccgaatgtgccccattgtcagtgggtccacgtttctccccggctcctctgggctaaggcagtgtggcccgaggcttaaaaagttactcggtactgtttttaagaacacttttatagagttagtggaaggcaagttaagagccaatcactgatccccaagtgttccttgagcatctggtctggggggaccactttgatcggacccacccttggaaagctcaggggtaggcccaggtgggatgctcaccctgtcactgagggttttggttggcatcgttgtttttgaatgtagcacaagcgatgagcaaactctataagagtgttttaaaaattaacttcccaggaagtgagttaaaaacaataaaagccctttcttgagttaaaaagaaaaaaaaaaaaaaaaaaaaaaaaaaaaaaa

SEQ ID NO: 7868 - protein, 505 aa, Homo sapiens
  ref <308>: DATABASE ACCESSION NUMBER: Refseq / NP_115670
  ref <309>: DATABASE ENTRY DATE: 2002-11-05
MEGGPAVCCQDPRAELVERVAAIDVTHLEEADGGPEPTRNGVDPPPRARAASVIPGSTSRLLPARPSLSARKLSLQERPAGSYLEAQAGPYATGPASHISPRAWRRPTIESHHVAISDAEDCVQLNQYKLQSEIGKGAYGVVRLAYNESEDRHYAMKVLSKKKLLKQYGFPRRPPPRGSQAAQGGPAKQLLPLERVYQEIAILKKLDHVNVVKLIEVLDDPAEDNLYLVFDLLRKGPVMEVPCDKPFSEEQARLYLRDVILGLEYLHCQKIVHRDIKPSNLLLGDDGHVKIADFGVSNQFEGNDAQLSSTAGTPAFMAPEAISDSGQSFSGKALDVWATGVTLYCFVYGKCPFIDDFILALHRKIKNEPVVFPEEPEISEELKDLILKMLDKNPETRIGVPDIKLHPWVTKNGEEPLPSEEEHCSVVEVTEEEVKNSVRLIPSWTTVILVKSMLRKRSFGNPFEPQARREERSMSAPGNLLVKEGFGEGGKSPELPGVQEDEAAS

SEQ ID NO: 7869 - DNA, 3429 bp, Rattus norvegicus; identical to SEQ ID NO: 7865
  ref <308>: DATABASE ACCESSION NUMBER: EMBL / S83194
  ref <309>: DATABASE ENTRY DATE: 2000-03-04

SEQ ID NO: 7870 - protein, 505 aa, Rattus norvegicus; identical to SEQ ID NO: 7866
  ref <308>: DATABASE ACCESSION NUMBER: SWISS-Prot / AAB46910
  ref <309>: DATABASE ENTRY DATE: 2003-02-01

SEQ ID NO: 7871 - DNA, 3583 bp, Homo sapiens; identical to SEQ ID NO: 7867
  ref <308>: DATABASE ACCESSION NUMBER: Refseq / NM_032294
  ref <309>: DATABASE ENTRY DATE: 2002-11-05

SEQ ID NO: 7872 - protein, 505 aa, Homo sapiens; identical to SEQ ID NO: 7868
  ref <308>: DATABASE ACCESSION NUMBER: Refseq / NP_115670
  ref <309>: DATABASE ENTRY DATE: 2002-11-05

SEQ ID NO: 7873 - DNA, 2480 bp, Rattus norvegicus
  ref <308>: DATABASE ACCESSION NUMBER: EMBL / S83279
  ref <309>: DATABASE ENTRY DATE: 2000-03-04
gaattcggcacgagtagactcatggcttcgcctctgaggttcgacgggcgtgtggtcctggtcaccggcgccgggggagggttgggcagagcttatgccctggcttttgcagaaagaggagcattagttgttgtgaatgacttaggaggggacttcaaaggcgttgggaaaggctcttctgccgcagacaaggtcgtggaagaaataagaaggagaggcgggaaagcggtggccaattacgattcagtcgaagcaggcgagaagcttgtgaagacagcactggacacattcggcagaatagatgttgtggtgaacaatgctgggatcctgagggaccgttccttctctaggataagtgatgaagactgggatataattcaaagagttcatttgcggggctccttccaagtgacccgggcagcatgggatcatatgaagaagcagaattatggaagaatcattatgacggcctcagcttctggaatatacggcaactttggccaggcaaattatagtgctgcaaagctgggccttctgggtctcgccaatactctcgtgattgaaggcaggaagaacaacattcattgtaacaccattgccccaaacgctgggtcacggatgacagagacggtgatgccagaagacctcgttgaagccctgaagccagagtatgtggcaccgctggtcctttggctttgccatgagagctgtgaggaaaatggtggcttgtttgaggttggagcaggatggattggaaaattgcgctgggagaggaccctgggagccattgtcaggaagcggaatcagcccatgactcccgaggcagtgagggacaactgggtgaagatctgtgacttcagcaatgccagcaagccgaagagcattcaagagtccacaggtggtataatcgaagttttacataaaatagattcagaaggaatctcacaaaatcacaccggtcaagtggcatctgcagatgcatcaggatttgctggcgtcgttggccacaaacttccttcattttcttcttcatatacggaactgcagtgcattatgtatgccctcggagtaggagcttcagtcaaaaatccaaaggacttgaagtttgtttatgaagggagtgctgacttctcctgtttgcctacatttggagtcattgtcgctcagaagtccttgatgagtggaggcttagcagaggttcctgggctgtcaatcaactttgcaaaggttcttcatggggagcagtacttggagttgtataagccacttccccgatcaggggaattaaaatgtgaagcagttattgctgacatcctggataaaggctctggcatagtgattgttatggacgtctattcttattctggcaaggaacttatatgctataatcagttctctgtcttcgttgttggctctggaggctttggtggaaaacggacatcagaaaaactcaaagcagctgtagccgtaccaagtcggcctccagatgctgtactgagagataccacttcactgaatcaggccgctctgtaccgcctcagtggagactcgaatcctttacacattgacccgagctttgcgagcattgccggttttgagaaacccatattacacggattatgtacttttgggttttctgcaaggcatgttttacagcagtttgcggataatgatgtgtcaagattcaaggccattaaggttcgttttgccaaaccagtgtatccaggacaaactctacaaactgagatgtggaaggaaggaaacagaattcattttcaaaccaaggtccaagagactggagacattgtcatttccaatgcatatgtggatcttgttcctacatctggagtttccgctcagacaccttctgagggtggagcactgcagagtgctcttgtatttggggaaataggtcgacgcctcaaggatgttggacgtgaggtggtaaagaaagtaaatgctgtatttgaatggcatatcacgaaaaatgggaatgttgcagccaagtggaccattgacctgaagaacggctctggagaggtttaccaaggccctgccaaaggctctgctgacacgaccatcacaatttctgatgaggatttcatggaagtggtcctgggcaagcttaacccacagaatgccttcttcagtggcagactgaaggcccgaggaaacatcatgctgagccagaagctacagatgattctgaaagactatgccaagctctgaaggacccactgcgtgctttaataaaaccagaatcattacgttctgtctacgcagtcatgctccagccttctttgaaacgatccacggtaatgtgcagcagaaattgcttaacattttcagattcagataactttcagattttcattttctactaatttttcacatattatttttacaaggaactgtaatctagctagcaaataattgttctgttcatagatctgtatcttaataaaaaaaaaaaaaaaaaa

SEQ ID NO: 7874 - protein, 735 aa, Rattus norvegicus
  ref <308>: DATABASE ACCESSION NUMBER: SWISS-Prot / AAB49519
  ref <309>: DATABASE ENTRY DATE: 2002-06-15
MASPLRFDGRVVLVTGAGGGLGRAYALAFAERGALVVVNDLGGDFKGVGKGSSAADKVVEEIRRRGGKAVANYDSVEAGEKLVKTALDTFGRIDVVVNNAGILRDRSFSRISDEDWDIIQRVHLRGSFQVTRAAWDHMKKQNYGRIIMTASASGIYGNFGQANYSAAKLGLLGLANTLVIEGRKNNIHCNTIAPNAGSRMTETVMPEDLVEALKPEYVAPLVLWLCHESCEENGGLFEVGAGWIGKLRWERTLGAIVRKRNQPMTPEAVRDNWVKICDFSNASKPKSIQESTGGIIEVLHKIDSEGISQNHTGQVASADASGFAGVVGHKLPSFSSSYTELQCIMYALGVGASVKNPKDLKFVYEGSADFSCLPTFGVIVAQKSLMSGGLAEVPGLSINFAKVLHGEQYLELYKPLPRSGELKCEAVIADILDKGSGIVIVMDVYSYSGKELICYNQFSVFVVGSGGFGGKRTSEKLKAAVAVPSRPPDAVLRDTTSLNQAALYRLSGDSNPLHIDPSFASIAGFEKPILHGLCTFGFSARHVLQQFADNDVSRFKAIKVRFAKPVYPGQTLQTEMWKEGNRIHFQTKVQETGDIVISNAYVDLVPTSGVSAQTPSEGGALQSALVFGEIGRRLKDVGREVVKKVNAVFEWHITKNGNVAAKWTIDLKNGSGEVYQGPAKGSADTTITISDEDFMEVVLGKLNPQNAFFSGRLKARGNIMLSQKLQMILKDYAKL

SEQ ID NO: 7875 - DNA, 2593 bp, Homo sapiens; identical to SEQ ID NO: 6750
  ref <308>: DATABASE ACCESSION NUMBER: Refseq / NM_000414
  ref <309>: DATABASE ENTRY DATE: 2002-11-05

SEQ ID NO: 7876 - protein, 736 aa, Homo sapiens; identical to SEQ ID NO: 6751
  ref <308>: DATABASE ACCESSION NUMBER: SWISS-Prot / P51659
  ref <309>: DATABASE ENTRY DATE: 2002-06-15

SEQ ID NO: 7877 - DNA, 2480 bp, Rattus norvegicus; identical to SEQ ID NO: 7873
  ref <308>: DATABASE ACCESSION NUMBER: EMBL / S83279
  ref <309>: DATABASE ENTRY DATE: 2000-03-04

SEQ ID NO: 7878 - protein, 735 aa, Rattus norvegicus; identical to SEQ ID NO: 7874
  ref <308>: DATABASE ACCESSION NUMBER: SWISS-Prot / AAB49519
  ref <309>: DATABASE ENTRY DATE: 2002-06-15

SEQ ID NO: 7879 - DNA, 2593 bp, Homo sapiens; identical to SEQ ID NO: 6750
  ref <308>: DATABASE ACCESSION NUMBER: Refseq / NM_000414
  ref <309>: DATABASE ENTRY DATE: 2002-11-05

SEQ ID NO: 7880 - protein, 736 aa, Homo sapiens; identical to SEQ ID NO: 6751
  ref <308>: DATABASE ACCESSION NUMBER: SWISS-Prot / P51659
  ref <309>: DATABASE ENTRY DATE: 2002-06-15

SEQ ID NO: 7881 - DNA, 1444 bp, Rattus norvegicus
  ref <308>: DATABASE ACCESSION NUMBER: EMBL / S83320
  ref <309>: DATABASE ENTRY DATE: 2000-03-04
agcagctctgtaagaagggaatgtcggcttttacataacgttcctctctgcttttgacacactgtgtgagggtccatcttctgatcacagatggagtggaatggcttgaagatgataattagcaccatggagcctcaggtgtcaaatggaccgacatccaatacaagcaatggaccctccagcaacaacagaaactgtccttctcccatgcagacaggcgccgccacagacgacagcaaaaccaacctcatcgtcaactatttaccccagaatatgacccaagaggaattcaggagtctctttgggagcattggtgaaatcgaatcctgcaaactcgtgagagacaaaattacaggacagagtttagggtatggatttgttaactatattgatccaaaggatgcagagaaagccatcaacactttaaatggactcagactccagaccaaaaccataaaggtgtcgtacgcccgtccgagctcggcctcaatcagggatgctaacctgtacgttagtggccttcccaagaccatgacccagaaggagctggagcagcttttctctcagtacggtcgcatcatcacctcacgcatcctggttgatcaagtcacaggagtctctagaggggtgggattcatccgctttgataagaggattgaggcagaagaagccatcaaagggctgaatggccagaagcccagcggtgctacagaaccgattactgtgaagtttgccaacaaccccagccagaagtccagccaggccctgctctcccagctgtaccagtcccccaacaggcgataccctggccctctccaccaccaggctcaaagattcaggctggacaatttgcttaatatggcctatggcgtaaagagactgatgtctggaccagtccccccttctgcttgtccccccaggttctccccaatcaccattgacgggatgacaagtcttgtgggaatgaacatccctggtcacacagggacaggctggtgcatcttcgtctataacctgtcccctgattctgatgagagtgtcctctggcagctctttggcccctttggcgcagtgaacaacgtcaaggtcatccgtgacttcaacaccaacaaatgcaagggattcggctttgtcaccatgaccaactacgatgaggcagccatggccatcgccagcctcaatggttaccgcctgggagacagagtgttgcaagtttcctttaaaaccaacaaagcccacaagtcctgaatttctcacccttacttattaaaaaatatatataaatatatacgaacaaaacatgcgtgcacacacatacacaaaagagagagacaaactttccaaggcttatattcaaccatggactttataagcccgcgttgcctaagtattaaaacattggattatcctgaggtgtaccaggaaaggattttataatgcttag

SEQ ID NO: 7882 - protein, 373 aa, Rattus norvegicus
  ref <308>: DATABASE ACCESSION NUMBER: SWISS-Prot / AAB50733
  ref <309>: DATABASE ENTRY DATE: 2001-10-16
MEPQVSNGPTSNTSNGPSSNNRNCPSPMQTGAATDDSKTNLIVNYLPQNMTQEEFRSLFGSIGEIESCKLVRDKITGQSLGYGFVNYIDPKDAEKAINTLNGLRLQTKTIKVSYARPSSASIRDANLYVSGLPKTMTQKELEQLFSQYGRIITSRILVDQVTGVSRGVGFIRFDKRIEAEEAIKGLNGQKPSGATEPITVKFANNPSQKSSQALLSQLYQSPNRRYPGPLHHQAQRFRLDNLLNMAYGVKRLMSGPVPPSACPPRFSPITIDGMTSLVGMNIPGHTGTGWCIFVYNLSPDSDESVLWQLFGPFGAVNNVKVIRDFNTNKCKGFGFVTMTNYDEAAMAIASLNGYRLGDRVLQVSFKTNKAHKS

SEQ ID NO: 7883 - DNA, 1591 bp, Homo sapiens
  ref <308>: DATABASE ACCESSION NUMBER: Refseq / NM_021952
  ref <309>: DATABASE ENTRY DATE: 2002-11-05
tagaatcgggggtttcagctcactgctccttttcttttttttctttctctcccccgcccacccccccaaaaataattgatttgctttacaatcatccacactgtgttttgtggatctttaattatatataacaatagtagtcattttaaatatatattctgaaatctttgcaaattttaacagaagagtcgaagctctgcgagacccaatatttgccaataagaatggttatgataattagcaccatggagcctcaggtgtcaaatggtccgacatccaatacaagcaatggaccctccagcaacaacagaaactgtccttctcccatgcaaacaggggcaaccacagatgacagcaaaaccaacctcatcgtcaactatttaccccagaatatgacccaagaagaattcaggagtctcttcgggagcattggtgaaatagaatcctgcaaacttgtgagagacaaaattacaggacagagtttagggtatggatttgttaactatattgatccaaaggatgcagagaaagccatcaacactttaaatggactcagactccagaccaaaaccataaaggtctcatatgcccgtccgagctctgcctcaatcagggatgctaacctctatgttagcggccttcccaaaaccatgacccagaaggaactggagcaacttttctcgcaatacggccgtatcatcacctcacgaatcctggttgatcaagtcacaggagtgtccagaggggtgggattcatccgctttgataagaggattgaggcagaagaagccatcaaagggctgaatggccagaagcccagcggtgctacggaaccgattactgtgaagtttgccaacaaccccagccagaagtccagccaggccctgctctcccagctctaccagtcccctaaccggcgctacccaggtccacttcaccaccaggctcagaggttcaggctggacaatttgcttaatatggcctatggcgtaaagagactgatgtctggaccagtccccccttctgcttgttcccccaggttctccccaattaccattgatggaatgacaagccttgtgggaatgaacatccctggtcacacaggaactgggtggtgcatctttgtctacaacctgtcccccgattccgatgagagtgtcctctggcagctctttggcccctttggagcagtgaacaacgtaaaggtgattcgtgacttcaacaccaacaagtgcaagggattcggctttgtcaccatgaccaactatgatgaggcggccatggccatcgccagcctcaacgggtaccgcctgggagacagagtgttgcaagtttcctttaaaaccaacaaagcccacaagtcctgaatttcccattcttacttactaaaatatatatagaaatatatacgaacaaaacacacgcgcgcacacacacacatacacgaaagagagagaaacaaacttttcaaggcttatattcaaccatggactttataagccagtgttgcctaagtattaaaacattggattatcctgaggtgtaccaggaaaggattttataatgcttagaaaaaaaaaaaaaaaaaaaa

SEQ ID NO: 7884 - protein, 380 aa, Homo sapiens
  ref <308>: DATABASE ACCESSION NUMBER: SWISS-Prot / P26378
  ref <309>: DATABASE ENTRY DATE: 2002-06-15
MVMIISTMEPQVSNGPTSNTSNGPSSNNRNCPSPMQTGATTDDSKTNLIVNYLPQNMTQEEFRSLFGSIGEIESCKLVRDKITGQSLGYGFVNYIDPKDAEKAINTLNGLRLQTKTIKVSYARPSSASIRDANLYVSGLPKTMTQKELEQLFSQYGRIITSRILVDQVTGVSRGVGFIRFDKRIEAEEAIKGLNGQKPSGATEPITVKFANNPSQKSSQALLSQLYQSPNRRYPGPLHHQAQRFRLDNLLNMAYGVKRLMSGPVPPSACSPRFSPITIDGMTSLVGMNIPGHTGTGWCIFVYNLSPDSDESVLWQLFGPFGAVNNVKVIRDFNTNKCKGFGFVTMTNYDEAAMAIASLNGYRLGDRVLQVSFKTNKAHKS

SEQ ID NO: 7885 - DNA, 1444 bp, Rattus norvegicus; identical to SEQ ID NO: 7881
  ref <308>: DATABASE ACCESSION NUMBER: EMBL / S83320
  ref <309>: DATABASE ENTRY DATE: 2000-03-04

SEQ ID NO: 7886 - protein, 373 aa, Rattus norvegicus; identical to SEQ ID NO: 7882
  ref <308>: DATABASE ACCESSION NUMBER: SWISS-Prot / AAB50733
  ref <309>: DATABASE ENTRY DATE: 2001-10-16

SEQ ID NO: 7887 - DNA, 1591 bp, Homo sapiens; identical to SEQ ID NO: 7883
  ref <308>: DATABASE ACCESSION NUMBER: Refseq / NM_021952
  ref <309>: DATABASE ENTRY DATE: 2002-11-05

SEQ ID NO: 7888 - protein, 380 aa, Homo sapiens; identical to SEQ ID NO: 7884
  ref <308>: DATABASE ACCESSION NUMBER: SWISS-Prot / P26378
  ref <309>: DATABASE ENTRY DATE: 2002-06-15

SEQ ID NO: 7889 - DNA, 1444 bp, Rattus norvegicus; identical to SEQ ID NO: 7881
  ref <308>: DATABASE ACCESSION NUMBER: EMBL / S83320
  ref <309>: DATABASE ENTRY DATE: 2000-03-04

SEQ ID NO: 7890 - protein, 373 aa, Rattus norvegicus; identical to SEQ ID NO: 7882
  ref <308>: DATABASE ACCESSION NUMBER: SWISS-Prot / AAB50733
  ref <309>: DATABASE ENTRY DATE: 2001-10-16

SEQ ID NO: 7891 - DNA, 1591 bp, Homo sapiens; identical to SEQ ID NO: 7883
  ref <308>: DATABASE ACCESSION NUMBER: Refseq / NM_021952
  ref <309>: DATABASE ENTRY DATE: 2002-11-05

SEQ ID NO: 7892 - protein, 380 aa, Homo sapiens; identical to SEQ ID NO: 7884
  ref <308>: DATABASE ACCESSION NUMBER: SWISS-Prot / P26378
  ref <309>: DATABASE ENTRY DATE: 2002-06-15

SEQ ID NO: 7893 - DNA, 1444 bp, Rattus norvegicus; identical to SEQ ID NO: 7881
  ref <308>: DATABASE ACCESSION NUMBER: EMBL / S83320
  ref <309>: DATABASE ENTRY DATE: 2000-03-04

SEQ ID NO: 7894 - protein, 373 aa, Rattus norvegicus; identical to SEQ ID NO: 7882
  ref <308>: DATABASE ACCESSION NUMBER: SWISS-Prot / AAB50733
  ref <309>: DATABASE ENTRY DATE: 2001-10-16

SEQ ID NO: 7895 - DNA, 1591 bp, Homo sapiens; identical to SEQ ID NO: 7883
  ref <308>: DATABASE ACCESSION NUMBER: Refseq / NM_021952
  ref <309>: DATABASE ENTRY DATE: 2002-11-05

SEQ ID NO: 7896 - protein, 380 aa, Homo sapiens; identical to SEQ ID NO: 7884
  ref <308>: DATABASE ACCESSION NUMBER: SWISS-Prot / P26378
  ref <309>: DATABASE ENTRY DATE: 2002-06-15

SEQ ID NO: 7897 - DNA, 1444 bp, Rattus norvegicus; identical to SEQ ID NO: 7881
  ref <308>: DATABASE ACCESSION NUMBER: EMBL / S83320
  ref <309>: DATABASE ENTRY DATE: 2000-03-04

SEQ ID NO: 7898 - protein, 373 aa, Rattus norvegicus; identical to SEQ ID NO: 7882
  ref <308>: DATABASE ACCESSION NUMBER: SWISS-Prot / AAB50733
  ref <309>: DATABASE ENTRY DATE: 2001-10-16

SEQ ID NO: 7899 - DNA, 1591 bp, Homo sapiens; identical to SEQ ID NO: 7883
  ref <308>: DATABASE ACCESSION NUMBER: Refseq / NM_021952
  ref <309>: DATABASE ENTRY DATE: 2002-11-05

SEQ ID NO: 7900 - protein, 380 aa, Homo sapiens; identical to SEQ ID NO: 7884
  ref <308>: DATABASE ACCESSION NUMBER: SWISS-Prot / P26378
  ref <309>: DATABASE ENTRY DATE: 2002-06-15

SEQ ID NO: 7901 - DNA, 1444 bp, Rattus norvegicus; identical to SEQ ID NO: 7881
  ref <308>: DATABASE ACCESSION NUMBER: EMBL / S83320
  ref <309>: DATABASE ENTRY DATE: 2000-03-04

SEQ ID NO: 7902 - protein, 373 aa, Rattus norvegicus; identical to SEQ ID NO: 7882
  ref <308>: DATABASE ACCESSION NUMBER: SWISS-Prot / AAB50733
  ref <309>: DATABASE ENTRY DATE: 2001-10-16

SEQ ID NO: 7903 - DNA, 1591 bp, Homo sapiens; identical to SEQ ID NO: 7883
  ref <308>: DATABASE ACCESSION NUMBER: Refseq / NM_021952
  ref <309>: DATABASE ENTRY DATE: 2002-11-05

SEQ ID NO: 7904 - protein, 380 aa, Homo sapiens; identical to SEQ ID NO: 7884
  ref <308>: DATABASE ACCESSION NUMBER: SWISS-Prot / P26378
  ref <309>: DATABASE ENTRY DATE: 2002-06-15

SEQ ID NO: 7905 - DNA, 4541 bp, Rattus norvegicus
  ref <308>: DATABASE ACCESSION NUMBER: EMBL / S83358
  ref <309>: DATABASE ENTRY DATE: 2000-10-20
taggaacccagatccatggggtctcatgactagctggttttatcctgttcattggcttaatctggccaggacggtctgtgtttcagatttcggaagcagaagattcagtaactgagaggccaccgtggagctgctggaaactgttacagaaggagcacctctcaaaccgtgcttcaggctctgaaaaaaaggagcacaggggaagcttagtcttgctttggatccaagcaaatgctgtcggagcgatgaactgggactttgtgtgcggactcctggcttgatcttgataggattgggtgtatgttgttggaacgggcaggccaagaggcctgagatctacaggtgccgtctatatggagaaaagcggctgtagtccatttccagtgtgttgggctaaagaatatgacagatacctagcatctagcaaaagaatggcagctgcttatcttgacccaaacttgaatcacacaccaagttcgagtactaagactcacctgggtactggcacggaacggtcccctggtgcaatggaacgagtattaaaggtctttcattattttgaaagcagtaatgagccaaccacctgggccagtattatcaggcatggagacgctactgacgtcaggggaatcattcagaagatagtggacagtcacaaagtaaagcacgtggcctgctatggatttcgcctcagtcacctgcgatcggaggaggtgcactggctgcatgtggacatgggtgtctccagtgtgagggagaaatacgaactcgcccacccaccagaggagtggaaatatgagttgagaattcgttatttgccaaaaggatttctaaaccagtttactgaagataagccaacattgaatttcttctatcaacaggtgaagagtgactacatgctagaaatagctgatcaagtagaccaagacatagctttgaagttgggttgtttggaaattaggcgatcctactgggagatgaggggcaacgccctagagaagaagtccaactatgaagtgttagagaaagatgttggtttaaagcgattttttcccaagagtttactggattccgtgaaggccaaaacactaagaaagctgatccagcaaacattcaggcagtttgccaaccttaatagagaagaaagcatcctgaaattctttgagattctctctccagtgtacagatttgacaaagagtgcttcaagtgtgcccttgggtcaagttggattatttctgtggaactggcgatcggcccagaagaagggatcagttacctgacagacaagggctgcaatcccacacacctagcggacttcaaccaagtgcagaccatccagtactcaaacagtgaagacaaagacaggaaaggaatgctacaactcaaaatcgctggtgctcctgagcctctgacagtgacggccccatccctaaccattgcagagaacatggctgacctgatcgatggatactgccggctggtgaacggagccacgcagtccttcatcatcagaccccagaaagaaggtgaacgggcattgccatcaataccaaagttggccaacaatgaaaagcaaggcatgcggacacatgcagtctctgtgtcagagacagatgactatgccgagatcatcgatgaggaagacacatacaccatgccctcaaccagggattatgagattcagagagaaaggatagaacttggacgctgtattggagaaggccagtttggagatgtacatcaaggcgtgtacctgagcccagagaatccagctttggctgttgcaatcaaaacatgtaaaaactgtacttcggacagcgtgagagagaagttccttcaagaagccttaacaatgcgccagtttgaccatcctcacatcgtgaagctgattggagtcattacagagaacccagtttggataatcatggagttgtgcacacttggagagctgaggtcatttttgcaagtaaggaaatacagcttggatctagcatctttgatcttatatgcctatcagcttagtacagcactcgcgtatctggagagcaaaagatttgttcacagggacattgctgcacggaatgttctggtgtcttcaaatgattgtgtaaaattaggagactttggattatctcgatatatggaagacagtacttactataaagcttccaaaggaaaattacctattaaatggatggctccagagtcaatcaattttcgacgttttacctcagctagtgacgtgtggatgtttggtgtgtgtatgtgggagatactgatgcatggcgtgaagccttttcaaggagtgaagaacaatgatgtgatcggtcgaattgaaaatggggaaagattaccaatgcctccaaattgtcctcccaccctctacagccttatgacgaaatgttgggcctatgaccccagcagacggcccaggtttactgaactaaaagctcagctcagcacaatcctggaggaagagaaggtgcagcaagaagaacggatgaggatggaatccagaagacaggcaacagtgtcctgggactctggagggtctgatgaagcaccacccaagcccagcagacctggttatcctagcccgaggtccagtgaaggattttatcccagcccacagcacatggtccagaccaatcactatcagatctctggctacccaggttcccatggaatcccagccatggctggcagcatttacccaggtcaggcatctcttctggaccagacagaattgtggaatcacagacctcaggagatgtccatgtggcagcccagtgtggaggactcagcagctttagatcttcgagggatgggacaggtgcttcctcctcacctgatggaagagcggctaatccgacagcagcaggaaatggaggaagaccagcgctggctggaaaaggaagagcgattcctgaaacctgatgtgaggctctctcgaggcagcatcgacagggaggacgggagttttcagggtccgactggaaaccaacacatctatcagcctgtgggaaaaccagatcctgcagctccaccaaagaaaccacctcgccctggagcacctggccacctaagcaacttgtccagcatcagcagccctgcagaaagctacaatgagggtgtcaagccgtggaggcttcagccccaggaaatcagcccccctcccactgccaaccttgaccgatccaatgacaaggtatatgaaaatgtgacgggcctagtgaaggctgtcattgagatgtccagcaaaatccaaccagctcctccagaagagtacgtccctatggtgaaggaagttggcctggccctgcggaccttactggcaactgtggatgagaccattcccatccttccagccagcacccatcgagagatcgagatggcacagaagctgctgaactccgacttgggtgagctcatcagcaagatgaagctggcgcagcagtatgtcatgaccagccttcagcaggagtacaagaagcagatgctgacagctgctcacgccctggctgtggatgccaagaatctacttgatgttattgatcaagcgagactgaaaatgctagggcagacacggccacactgagccactggccattgaacatggctttctgccctttgggagatcttctctagcattccaccagcagcgaggaagtaaccttgtcctcggtcgcccgcactcacagctccaactgatgacagctagctgaaagtctctcttgtataagtttaactacttatacatggttttgattctgttatttttctaaatagtgttcagaaaactctggatccaaaatgtggcatttttctgagaatgaagattgtacattaagaagcttttaaaatatacttggtgttcaaattgggatgtatgttcctagaagtggtaattcatactgaccatgacttcgaattggaagagaagtgtctgaggagggagggctcccaagacactgagactggctatccttcctgccagaattcctgtccagactgaattgcaatatgctaatctcattatagagaagtgcataaaagctatattttgaagaatgagtggtttcaaaagaaaacttctgccctccctgtcttcaccttctttcctgtggatcctgaagcattgggttgcaaactatctctagaactgacaaaaacttgtctttcctcctcagaattctgtgccagttttgtaccagagcactcccaactgcatcaagaagttccaggaccatccctgttctccatttttatataatttataagaatgattaaagccatgttgactcttacagccactgagctaactgatctcatgcgtctgtcttcccagggaggatcccgcagacaaacagggatgtggttttctttagatgtccagttgttacaccatgcattctgttaggtggttttgagagcataccttccctttagtttgttggggatataaattattctcaggaagaatataataaattgtacagttactctgacctattaaaaaggagctcgtgcaaaaaaaaaa

SEQ ID NO: 7906 - protein, 1055 aa, Rattus norvegicus
  ref <308>: DATABASE ACCESSION NUMBER: SWISS-Prot / AAB72203
  ref <309>: DATABASE ENTRY DATE: 2002-06-15
MAAAYLDPNLNHTPSSSTKTHLGTGTERSPGAMERVLKVFHYFESSNEPTTWASIIRHGDATDVRGIIQKIVDSHKVKHVACYGFRLSHLRSEEVHWLHVDMGVSSVREKYELAHPPEEWKYELRIRYLPKGFLNQFTEDKPTLNFFYQQVKSDYMLEIADQVDQDIALKLGCLEIRRSYWEMRGNALEKKSNYEVLEKDVGLKRFFPKSLLDSVKAKTLRKLIQQTFRQFANLNREESILKFFEILSPVYRFDKECFKCALGSSWIISVELAIGPEEGISYLTDKGCNPTHLADFNQVQTIQYSNSEDKDRKGMLQLKIAGAPEPLTVTAPSLTIAENMADLIDGYCRLVNGATQSFIIRPQKEGERALPSIPKLANNEKQGMRTHAVSVSETDDYAEIIDEEDTYTMPSTRDYEIQRERIELGRCIGEGQFGDVHQGVYLSPENPALAVAIKTCKNCTSDSVREKFLQEALTMRQFDHPHIVKLIGVITENPVWIIMELCTLGELRSFLQVRKYSLDLASLILYAYQLSTALAYLESKRFVHRDIAARNVLVSSNDCVKLGDFGLSRYMEDSTYYKASKGKLPIKWMAPESINFRRFTSASDVWMFGVCMWEILMHGVKPFQGVKNNDVIGRIENGERLPMPPNCPPTLYSLMTKCWAYDPSRRPRFTELKAQLSTILEEEKVQQEERMRMESRRQATVSWDSGGSDEAPPKPSRPGYPSPRSSEGFYPSPQHMVQTNHYQISGYPGSHGIPAMAGSIYPGQASLLDQTELWNHRPQEMSMWQPSVEDSAALDLRGMGQVLPPHLMEERLIRQQQEMEEDQRWLEKEERFLKPDVRLSRGSIDREDGSFQGPTGNQHIYQPVGKPDPAAPPKKPPRPGAPGHLSNLSSISSPAESYNEGVKPWRLQPQEISPPPTANLDRSNDKVYENVTGLVKAVIEMSSKIQPAPPEEYVPMVKEVGLALRTLLATVDETIPILPASTHREIEMAQKLLNSDLGELISKMKLAQQYVMTSLQQEYKKQMLTAAHALAVDAKNLLDVIDQARLKMLGQTRPH

SEQ ID NO: 7907 - DNA, 3791 bp, Homo sapiens
  ref <308>: DATABASE ACCESSION NUMBER: EMBL / L13616
  ref <309>: DATABASE ENTRY DATE: 1999-07-02
cgaccactgtgagcccgcggcgtgaggcgtcgggaggaagcgcggctgctgtcgcccagcgccgccccgtcgtcgtctgccttcgcttcacggcgccgagccgcggtccgagcagaactggggctcccttgcatcttccagttacaaattcagtgccttctgcagtttccccagagctcctcaagaataacggaagggagaatatgacagatacctagcatctagcaaaataatggcagctgcttaccttgaccccaacttgaatcacacaccaaattcgagtactaagactcacctgggtactggtatggaacgttctcctggtgcaatggagcgagtattaaaggtctttcattattttgaaagcaatagtgagccaaccacctgggccagtattatcaggcatggagatgctactgatgtcaggggcatcattcagaagatagtggacagtcacaaagtaaagcatgtggcctgctatggattccgcctcagtcacctgcggtcagaggaggttcactggcttcacgtggatatgggcgtctccagtgtgagggagaagtatgagcttgctcacccaccagaggagtggaaatatgaattgagaattcgttatttgccaaaaggatttctaaaccagtttactgaagataagccaactttgaatttcttctatcaacaggtgaagagcgattatatgttagagatagctgatcaagtggaccaggaaattgctttgaagttgggttgtctagaaatacggcgatcatactgggagatgcggggcaatgcactagaaaagaagtctaactatgaagtattagaaaaagatgttggtttaaagcgattttttcctaagagtttactggattctgtcaaggccaaaacactaagaaaactgatccaacaaacatttagacaatttgccaaccttaatagagaagaaagtattctgaaattctttgagatcctgtctccagtctacagatttgataaggaatgcttcaagtgtgctcttggttcaagctggattatttcagtggaactggcaatcggcccagaagaaggaatcagttacctaacggacaagggctgcaatcccacacatcttgctgacttcactcaagtgcaaaccattcagtattcaaacagtgaagacaaggacagaaaaggaatgctacaactaaaaatagcaggtgcacccgagcctctgacagtgacggcaccatccctaaccattgcggagaatatggctgacctaatagatgggtactgccggctggtgaatggaacctcgcagtcatttatcatcagacctcagaaagaaggtgaacgggctttgccatcaataccaaagttggccaacagcgaaaagcaaggcatgcggacacacgccgtctctgtgtcagaaacagatgattatgctgagattatagatgaagaagatacttacaccatgccctcaaccagggattatgagattcaaagagaaagaatagaacttggacgatgtattggagaaggccaatttggagatgtacatcaaggcatttatatgagtccagagaatccagctttggcggttgcaattaaaacatgtaaaaactgtacttcggacagcgtgagagagaaatttcttcaagaagccttaacaatgcgtcagtttgaccatcctcatattgtgaagctgattggagtcatcacagagaatcctgtctggataatcatggagctgtgcacacttggagagctgaggtcatttttgcaagtaaggaaatacagtttggatctagcatctttgatcctgtatgcctatcagcttagtacagctcttgcatatctagagagcaaaagatttgtacacagggacattgctgctcggaatgttctggtgtcctcaaatgattgtgtaaaattaggagactttggattatcccgatatatggaagatagtacttactacaaagcttccaaaggaaaattgcctattaaatggatggctccagagtcaatcaattttcgacgttttacctcagctagtgacgtatggatgtttggtgtgtgtatgtgggagatactgatgcatggtgtgaagccttttcaaggagtgaagaacaatgatgtaatcggtcgaattgaaaatggggaaagattaccaatgcctccaaattgtcctcctaccctctacagccttatgacgaaatgctgggcctatgaccccagcaggcggcccaggtttactgaacttaaagctcagctcagcacaatcctggaggaagagaaggctcagcaagaagagcgcatgaggatggagtccagaagacaggccacagtgtcctgggactccggagggtctgatgaagcaccgcccaagcccagcagaccgggttatcccagtccgaggtccagcgaaggattttatcccagcccacagcacatggtacaaaccaatcattaccaggtttctggctaccctggttcacatggaatcacagccatggctggcagcatctatccaggtcaggcatctcttttggaccaaacagattcatggaatcatagacctcaggagatagcaatgtggcagcccaatgtggaggactctacagtattggacctgcgagggattgggcaagtgttgccaacccatctgatggaagagcgtctaatccgacagcaacaggaaatggaagaagatcagcgctggctggaaaaagaggaaagatttctgaaacctgatgtgagactctctcgaggcagtattgacagggaggatggaagtcttcagggtccgattggaaaccaacatatatatcagcctgtgggtaaaccagatcctgcagctccaccaaagaaaccgcctcgccctggagctcccggtcatctgggaagccttgccagcctcagcagccctgctgacagctacaacgagggtgtcaagcttcagccccaggaaatcagcccccctcctactgccaacctggaccggtcgaatgataaggtgtacgagaatgtgacgggcctggtgaaagctgtcatcgagatgtccagtaaaatccagccagccccaccagaggagtatgtccctatggtgaaggaagtcggcttggccctgaggacattattggccactgtggatgagaccattcccctcctaccagccagcacccaccgagagattgagatggcacagaagctattgaactctgacctgggtgagctcatcaacaagatgaaactggcccagcagtatgtcatgaccagcctccagcaagagtacaaaaagcaaatgctgactgctgctcacgccctggctgtggatgccaaaaacttactcgatgtcattgaccaagcaagactgaaaatgcttgggcagacgagaccacactgagcctcccctaggagcacgtcttgctaccctcttttgaagatgttctctagccttccaccagcagcgaggaattaaccctgtgtcctcagtcgccagcacttacagctccaacttttttgaatgaccatctggttgaaaaatctttctcatataagtttaaccacactttgatttgggttcattttttgttttgtttttttcaatcatgatattcagaaaaatccaggatccaaaatgtggcgtttttctaagaatgaaaattatatgtaagcttttaagcatcatgaagaacaatttatgttcacattaagatacgttctaaagggggatggccaaggggtgacatcttaattcctaaactaccttagctgcatagtggaagaggagagctagaagcaaa

SEQ ID NO: 7908 - protein, 1052 aa, Homo sapiens
  ref <308>: DATABASE ACCESSION NUMBER: SWISS-Prot / Q05397
  ref <309>: DATABASE ENTRY DATE: 2002-06-15
MAAAYLDPNLNHTPNSSTKTHLGTGMERSPGAMERVLKVFHYFESNSEPTTWASIIRHGDATDVRGIIQKIVDSHKVKHVACYGFRLSHLRSEEVHWLHVDMGVSSVREKYELAHPPEEWKYELRIRYLPKGFLNQFTEDKPTLNFFYQQVKSDYMLEIADQVDQEIALKLGCLEIRRSYWEMRGNALEKKSNYEVLEKDVGLKRFFPKSLLDSVKAKTLRKLIQQTFRQFANLNREESILKFFEILSPVYRFDKECFKCALGSSWIISVELAIGPEEGISYLTDKGCNPTHLADFTQVQTIQYSNSEDKDRKGMLQLKIAGAPEPLTVTAPSLTIAENMADLIDGYCRLVNGTSQSFIIRPQKEGERALPSIPKLANSEKQGMRTHAVSVSETDDYAEIIDEEDTYTMPSTRDYEIQRERIELGRCIGEGQFGDVHQGIYMSPENPALAVAIKTCKNCTSDSVREKFLQEALTMRQFDHPHIVKLIGVITENPVWIIMELCTLGELRSFLQVRKYSLDLASLILYAYQLSTALAYLESKRFVHRDIAARNVLVSSNDCVKLGDFGLSRYMEDSTYYKASKGKLPIKWMAPESINFRRFTSASDVWMFGVCMWEILMHGVKPFQGVKNNDVIGRIENGERLPMPPNCPPTLYSLMTKCWAYDPSRRPRFTELKAQLSTILEEEKAQQEERMRMESRRQATVSWDSGGSDEAPPKPSRPGYPSPRSSEGFYPSPQHMVQTNHYQVSGYPGSHGITAMAGSIYPGQASLLDQTDSWNHRPQEIAMWQPNVEDSTVLDLRGIGQVLPTHLMEERLIRQQQEMEEDQRWLEKEERFLKPDVRLSRGSIDREDGSLQGPIGNQHIYQPVGKPDPAAPPKKPPRPGAPGHLGSLASLSSPADSYNEGVKLQPQEISPPPTANLDRSNDKVYENVTGLVKAVIEMSSKIQPAPPEEYVPMVKEVGLALRTLLATVDETIPLLPASTHREIEMAQKLLNSDLGELINKMKLAQQYVMTSLQQEYKKQMLTAAHALAVDAKNLLDVIDQARLKMLGQTRPH

SEQ ID NO: 7909 - DNA, 1790 bp, Rattus norvegicus
  ref <308>: DATABASE ACCESSION NUMBER: EMBL / S85184
  ref <309>: DATABASE ENTRY DATE: 2000-06-24
aattcaggcagatagtgaatggctatcgccaccagaagcacaagaagggaaggttatttcaggaacctctgatgctgcagatccccaagactgtggactggagagaaaagggttgtgtgactcctgtgaagaatcagggccagtgtggttcttgctgggcttttagcgcatcgggttgcctagaaggacagatgttccttaagactggcaaactgatctcactgagtgaacagaaccttgtggactgttctcacgatcaaggcaatcagggctgtaatggaggcctgatggattttgctttccagtacattaaggaaaatggaggtctggactcagaggagtcttatccctatgaagcaaaggatggatcttgtaaatacagagctgagtatgctgtggctaacgacacagggtttgtggatatccctcagcaagagaaagccctcatgaaggctgtagcgacggtggggcctatttctgttgccatggatgcaagccatccgtctctccagttctatagttcaggtatctactatgaacccaactgtagcagcaaggacctcgaccatggggttctggtggttggctatggttatgaaggaacagattcaaataaggataaatactggcttgtcaaaaacagctggggtaaagaatggggtatggatggctacatcaaaatagccaaagaccggaacaaccactgcggacttgccaccgcagccagctatcctatcgtgaattgatggacagcgataataaggacttacggacactacatccgaaggagttcatcttaaaactgaccaaacccgtctctgagtgagaccatggtacttgaatcgttcaggatccaagtcacgatttaaattctgttgacatttttacatgggttaaatgttaccactacttaaaactcctgttataaacagctttataatattggacacttaatgcttaattctgattctggaatatttgttttataaaagttgtataaaactttctttaccttttaaaaataaattttagctcagtgcatgtgtgtgtgtatgggttaggggaacttcctgtgtgaaatgtgttcacaaatgtttgagactaaagactgactgattccagatgtccggactgattcgggtgtcagtggtagacctggggaaaggtgacaggtgctctggatggagccttctgattttacctcagcgtcctgtcaggttaggtatgtgtaagtaaatctagcttatggggtaattgttttttctttatttgtgtgagtatgtgtgtgtggaggtcagagaacaactcatttctacagtgttgatcctagcgatcaaaatcaggttgtcaggctggaccacaggtgccttttactactgaggtatcttgccagccccactggttttaagtgacgtataattacatatgtttatgtagtacaatataatgtgttgtgatacgtgtatactatgaaatgatctgatagttcacctcaaatattttattactttgttgaacttttctagctgtttctaaaatacacagtatattatcattggacctgtcttgttaatgtagcccaggctggccttaagccataatcttccttctcagccttctgtgagctaagataaaaaaaaaaaatcatgtaatgttatacccagtctcaagtcttatatctggcaaaccttgacagtccagaagaactagagtaaattgtttgacagtcctctcaactttcctaattctgtgacctttcaatatagttcctcctgttgtgaccccaaaaa

SEQ ID NO: 7910 - protein, 334 aa, Rattus norvegicus
  ref <308>: DATABASE ACCESSION NUMBER: SWISS-Prot / AAB21516
  ref <309>: DATABASE ENTRY DATE: 2002-06-15
MTPLLLLAVLCLGTALATPKFDQTFNAQWHQWKSTHRRLYGTNEEEWRRAVWEKNMRMIQLHNGEYSNGKHGFTMEMNAFGDMTNEEFRQIVNGYRHQKHKKGRLFQEPLMLQIPKTVDWREKGCVTPVKNQGQCGSCWAFSASGCLEGQMFLKTGKLISLSEQNLVDCSHDQGNQGCNGGLMDFAFQYIKENGGLDSEESYPYEAKDGSCKYRAEYAVANDTGFVDIPQQEKALMKAVATVGPISVAMDASHPSLQFYSSGIYYEPNCSSKDLDHGVLVVGYGYEGTDSNKDKYWLVKNSWGKEWGMDGYIKIAKDRNNHCGLATAASYPIVN

SEQ ID NO: 7911 - DNA, 1575 bp, Homo sapiens
  ref <308>: DATABASE ACCESSION NUMBER: Refseq / NM_001912
  ref <309>: DATABASE ENTRY DATE: 2002-11-05
agaaccgcgacctccgcaaccttgagcggcatccgtggagtgcgcctgcagctacgaccgcagcaggaaagcgccgccggccaggcccagctgtggccggacagggactggaagagaggacgcggtcgagtaggtgtgcaccagccctggcaacgagagcgtctaccccgaactctgctggccttgaggtggggaagccggggagggcagttgaggaccccgcggaggcgcgtgactggttgagcgggcaggccagcctccgagccgggtggacacaggttttaaaacatgaatcctacactcatccttgctgccttttgcctgggaattgcctcagctactctaacatttgatcacagtttagaggcacagtggaccaagtggaaggcgatgcacaacagattatacggcatgaatgaagaaggatggaggagagcagtgtgggagaagaacatgaagatgattgaactgcacaatcaggaatacagggaagggaaacacagcttcacaatggccatgaacgcctttggagacatgaccagtgaagaattcaggcaggtgatgaatggctttcaaaaccgtaagcccaggaaggggaaagtgttccaggaacctctgttttatgaggcccccagatctgtggattggagagagaaaggctacgtgactcctgtgaagaatcagggtcagtgtggttcttgttgggcttttagtgctactggtgctcttgaaggacagatgttccggaaaactgggaggcttatctcactgagtgagcagaatctggtagactgctctgggcctcaaggcaatgaaggctgcaatggtggcctaatggattatgctttccagtatgttcaggataatggaggcctggactctgaggaatcctatccatatgaggcaacagaagaatcctgtaagtacaatcccaagtattctgttgctaatgacaccggctttgtggacatccctaagcaggagaaggccctgatgaaggcagttgcaactgtggggcccatttctgttgctattgatgcaggtcatgagtccttcctgttctataaagaaggcatttattttgagccagactgtagcagtgaagacatggatcatggtgtgctggtggttggctacggatttgaaagcacagaatcagataacaataaatattggctggtgaagaacagctggggtgaagaatggggcatgggtggctacgtaaagatggccaaagaccggagaaaccattgtggaattgcctcagcagccagctaccccactgtgtgagctggtggacggtgatgaggaaggacttgactggggatggcgcatgcatgggaggaattcatcttcagtctaccagcccccgctgtgtcggatacacactcgaatcattgaagatccgagtgtgatttgaattctgtgatattttcacactggtaaatgttacctctattttaattactgctataaataggtttatattattgattcacttactgactttgcattttcgtttttaaaaggatgtataaatttttacctgtttaaataaaatttaatttcaaatgt

SEQ ID NO: 7912 - protein, 333 aa, Homo sapiens [sequence omitted]

SEQ ID NO: 7913 - DNA, 1790 bp, Rattus norvegicus; identical to SEQ ID NO: 7909
  ref <308>: DATABASE ACCESSION NUMBER: EMBL / S85184
  ref <309>: DATABASE ENTRY DATE: 2000-06-24

SEQ ID NO: 7914 - protein, 334 aa, Rattus norvegicus; identical to SEQ ID NO: 7910
  ref <308>: DATABASE ACCESSION NUMBER: SWISS-Prot / AAB21516
  ref <309>: DATABASE ENTRY DATE: 2002-06-15

SEQ ID NO: 7915 - DNA, 1575 bp, Homo sapiens; identical to SEQ ID NO: 7911
  ref <308>: DATABASE ACCESSION NUMBER: Refseq / NM_001912
  ref <309>: DATABASE ENTRY DATE: 2002-11-05

SEQ ID NO: 7916 - protein, 333 aa, Homo sapiens [sequence omitted]

SEQ ID NO: 7917 - DNA, 1950 bp, Rattus norvegicus
  ref <308>: DATABASE ACCESSION NUMBER: EMBL / S90449
  ref <309>: DATABASE ENTRY DATE: 2000-03-04
gaattccgtttaatgagcaaattcgtattagcaaatatgaaactgccacagagaggaggagcaggactgagaccacgggttgagggtcaggaagactaagaagaaccaactacttaagaaaccagggtggagaacagggaggaccaaagccagaggacgggagctgtggtcctgcaaaggagaaggcagggcactgagggcagacaacaaaattcaaaatagtttggccataaaatataaacacgctatgttcctaccatggggtaagagaggaggaaaggggtgtaagggttaagaggctgtttggggaatggcggaaaagccgctggtactctgaccgcctggtaaaaaatggcagttgcgggggagtttcctgccggcgcggctggagtctctgtttctctgtgtccggtggctggaagatgctccagagagatcaggctgcggcggaggaggtggcggcggccgagtcggcagcggcgctgggttggagagaaggcggcggcggcggcgtgaggggccggacggtgtaaacagctcgggcggcggcggtggccgagcccccgagggcgaagcggcggcggaggcggtgtcgcgtctcgggagaaagccgggggccgcgggcggctgtgcggcgggcaagcccgcgagaccttgccttccaccttcgccccagattcgttactaaacatgggtgcatttttggataaacccaaaactgaaaagcacaatgctcacggtgcagggaacggtctgcgttacggtctgagcagtatgcaaggatggagagtagaaatggaagacgcacacactgctgttgtgggaattcctcacggcttggaggactggtcgttttttgcagtctatgatggtcatgctggatcccgagtggcaaattactgttcaacacatctattagaacacatcactaccaatgaagactttagggcagctgacaaatcaggctttgctcttgagccgtcagtggaaaatgttaagactggtatccgaactggctttttgaaaattgatgaatatatgcgtaacttttcagacctgaggaacgggatggacaggagcggctctaccgcagtgggcgtgatgatttcaccgacacacatctactttatcaactgcggtgactcgagagctgttctatgtaggaatggacaagtctgcttttctacccaggatcacaaaccttgtaatccaatggaaaaggagcgcatccaaaatgcaggaggcagtgtaatgatacagcgtgtgaatgggtcgttagcagtgtctcgtgctctgggggactatgattacaagtgtgttgatggcaagggccccacagagcagcttgtttctccagagcctgaggtttatgagattctaagagcagaagaggatgaatttgtcgtcctggcttgtgatgggatctgggatgtgatgagcaatgaggagctctgtgagtttgttaactctaggcttgaggtgtcagacgacctggagaatgtgtgcaattgggtagtggacacttgtttacataagggaagtcgagataacatgagtattgtgttagtttgctttgcaaatgcccccaaggtctcagatgaagccgtgaaaagagatttagagttggacaagcacttggaatcacgggtggaagaaatcatgcagaagtctggagaggaaggaatgcctgatcttgcccatgtgatgcgcattttgtctgcagaaaatatcccaaatttacctcccgggggaggcctcgctggcaagcgcaatgttattgaagctgtttatagtagacttaatccaaacaaagacaatgatgggggcgctggcgatctagaagactcattggtagccttataaccttctaaatgcttttgattctgaaaattgggggaaaacttttaatcatattttcttcaatacaaggggaactattcttgtgaattc

SEQ ID NO: 7918 - protein, 390 aa, Rattus norvegicus; identical to SEQ ID NO: 4559
  ref <308>: DATABASE ACCESSION NUMBER: SWISS-Prot / AAB21898
  ref <309>: DATABASE ENTRY DATE: 2002-06-15

SEQ ID NO: 7919 - DNA, 1753 bp, Rattus norvegicus
  ref <308>: DATABASE ACCESSION NUMBER: EMBL / U01227
  ref <309>: DATABASE ENTRY DATE: 2000-03-04
ggaaaggcagccggaggagggccacccaggcccacagcaccacccagcctgctctgctgaggctgtcagatcacctcctggctaactacaagaagggggtgcggcctgtgcgggactggaggaagcccaccctggtctccatcgatgtcatcatgtatgccatcctcaacgtggatgagaagaaccaggttctgacaacctacatatggtaccggcagttctggaccgacgagtttctacagtggactcctgaggacttcgacaatgtcaccaaattgtccatccccaccgacagcatctgggtccctgacatcctcatcaatgagtttgtggacgtggggaagtctccaagcattccttatgtgtatgtgcaccatcaaggtgaagtccagaactacaagcccctacagctggtgaccgcctgtagccttgacatctataacttcccgttcgatgtgcagaactgctctctgaccttcaccagctggctgcataccatccaggacatcaacatttccctgtggcgaacaccagaagaagtgaggtcggacaagagcatcttcataaatcagggcgagtgggagctgctgggggtgttcaccaaatttcaggagttcagtatagaaaccagtaacagctatgcggaaatgaagttctacgtggtcatccgccggcggcctttattctacgcagtcagcctcttgctgcccagtatcttcctcatggtcgtggacattgtgggcttttgtctgcccccggacagtggtgagagagtgtctttcaagatcacgctccttctgggatactcagtctttctcatcatcgtgtcagacacactgcctgcaacggccatccgcactcccctcattggtgtctactttgtagtgtgcatggctctgctggtgataagcctcgctgagaccatcttcattgtgcagctggtgcataagcaggatttacagcgccctgtacctgactggctgaggcacctggtcctagacagaatagcctggctgctctgcctaggggagcagcccatggcccataggcccccagccaccttccaagccaacaagactgatgactgctcagccatgggaaaccactgcagccatgtcggaagccctcaggacttggagaagacctcgaggagcagagatagccctcttccaccaccaagggaggcctcgctggctgtgcgtggcctcttgcaagagctgtcctccatccgccactccctggagaagcgggatgagatgcgggaggtggcaagggactggttgcgggtgggatatgtgctggacaggctgctgtttcgcatctacctgctggccgtgctggcttacagcatcaccctggtcacgctctggtccatttggcattattcctgagtgggtacagcctggcagggaggggatgtgagtcctgcatcctgtttccaacaccaattcatctgagcaaccccagtccccttgtcccctaaacttagcactgaagacccggtcagaccccccgacttcgctatcatggctttaaagcatgatatccttttccagtacttctgtgattatggcccttgggatggctcatttccacagtttttttttcctttttgatcagaggaaagcaaattctcttgcctaggtgcctgagacgtctgtgcctgttttatccaggccccagtggcttcttcttcagctcacttgtgggtacttccctagcgctcagcctcatcaaccaacggggggagggg

SEQ ID NO: 7920 - protein, 483 aa, Rattus norvegicus; identical to SEQ ID NO: 2088
  ref <308>: DATABASE ACCESSION NUMBER: SWISS-Prot / AAA52182
  ref <309>: DATABASE ENTRY DATE: 2002-06-15

SEQ ID NO: 7921 - DNA, 2202 bp, Homo sapiens; identical to SEQ ID NO: 2089
  ref <308>: DATABASE ACCESSION NUMBER: Refseq / NM_000869
  ref <309>: DATABASE ENTRY DATE: 2000-10-31

SEQ ID NO: 7922 - protein, 478 aa, Homo sapiens; identical to SEQ ID NO: 2090
  ref <308>: DATABASE ACCESSION NUMBER: SWISS-Prot / P46098
  ref <309>: DATABASE ENTRY DATE: 2002-06-15

SEQ ID NO: 7923 - DNA, 1753 bp, Rattus norvegicus; identical to SEQ ID NO: 7919
  ref <308>: DATABASE ACCESSION NUMBER: EMBL / U01227
  ref <309>: DATABASE ENTRY DATE: 2000-03-04

SEQ ID NO: 7924 - protein, 483 aa, Rattus norvegicus; identical to SEQ ID NO: 2088
  ref <308>: DATABASE ACCESSION NUMBER: SWISS-Prot / AAA52182
  ref <309>: DATABASE ENTRY DATE: 2002-06-15

SEQ ID NO: 7925 - DNA, 2202 bp, Homo sapiens; identical to SEQ ID NO: 2089
  ref <308>: DATABASE ACCESSION NUMBER: Refseq / NM_000869
  ref <309>: DATABASE ENTRY DATE: 2000-10-31

SEQ ID NO: 7926 - protein, 478 aa, Homo sapiens; identical to SEQ ID NO: 2090
  ref <308>: DATABASE ACCESSION NUMBER: SWISS-Prot / P46098
  ref <309>: DATABASE ENTRY DATE: 2002-06-15

SEQ ID NO: 7927 - DNA, 2533 bp, Rattus norvegicus
  ref <308>: DATABASE ACCESSION NUMBER: EMBL / U01344
  ref <309>: DATABASE ENTRY DATE: 2000-03-04
ggagaggagaggagagggaaagccagccaagaacacatggagagaggggaggggatgtggaaagagggagaaggcgcagagagtaagagagcaagggcgtcaaacagcccctttaagagtaagccaggcatgcctggctaatgccaggtaactgtgggggcagagcctagaggggatgctaacagagctcatctcagtccactcttctcacccagtctgccccagtcaccctgtctttgtatccaccccttctgctaggaaacaccatcctcacacatccgtggagctcactgtctgtcatccttcggatgcaagtgtggctttcttcatccatattagttcccatcaaaactctccttctacctctctattttagttatcctgtggacagctactacacttctcttttttgtttttaaattacttatgtattattttaatacccactgaaatgcaagattttggagggcaagaaagcatagcaagtatctaaaggatgttcagtgaagggatgacttggtcaatcagtgtagctcattcagtaaggagcctcatagagcacccagtgcagtgatgaatgggtcactcgccatggcattctctagtgtgtaagtctcccatttttgtgaataactgtttgaaagattattttggcaatatctacctttcatcaccaaggtaaccacatctaatctctcttttgactggtcatttagccttattttctacctcaaaaacttgaaagatacaaggaataacaaaactttcctctaaggctctctgagagtatttaatgaacagcaggtaaaagcaagccaggctgtagaggtgacatgattgcctaggagctatgtagaggcatctttcatgtatacacgttaacaacacattcgaactacagttagctgactctgggacacccagaagaattgatgtcatgtttgtctgctttcatcctgtttgccttagggagccatggacatcgaagcatacttcgaaaggattggttacaagaactcagtgaataagttggacttggccacattaactgaagttcttcaacaccagatgcgagcagttccttttgagaatcttagtatgcactgtggagaagccatgtgtctgggcttagaggccacttttgaccacatagtaaggaaaaagcggggtgggtggtgtctccaggttaatcatctgctgtactgggctctgaccaaaatgggttttgaaaccacaatgttgggaggatatgtttacataactccagtcaacaaatatagcagtgaaatggtccaccttctagtacaagtgaccatcagtgacaggaactacattgtggattctgcctatggaagctcctaccagatgtgggagcctctggaattaacctcagggaaggatcagcctcaggtgcctgccatctttcgtttgacagaagagaatggaacctggtacttggaccaaatcagaagagagcaggatgttccaaaccaagagtttgttaactcggacctccttgaaaagagcaaatatcgaaaaatctattcctttactcttgagccccgcactattgaggattttgaatatgtaaatacctaccttcagacatcgccagcctctgtgtttgtaagcacatcgttctgttccttgcagacctcagaaggggtttgctgtttaattggttccacccttacaagtaggagattcagttataaggacaatgtagatctggttgagtttaagagtctgactgaggaagaaatagaagatgtactgaaaaccacatttggcatttctttggagaaaaagtttgtgcccaaacatggcgaactcgtttttactatttagggtaaattgttctccattattatctcagtcttaaacattctaaaaatatgcaaatacatatccataacagaaatcgcacagctcaatattgatcaactaatgacctgtatcttctatttcctacattttatacaaaacgaaacccagttgtcctgtcatttcaccaataaaaataccgccagttataatgaaataaacctgatcatggatgtaacgacaatcctctcaacattaatcaacaaaaattacttatcgaagaggtggcgatcttgggagccatattcatttacaaacctcccaacatcattttatggttgaactcagatgaaaaatgaatgaatatgaatgatcagagaacagcaggaagtaaagtcaggcagactaaatctgaggtccaaggtttacaagaaaccacctgtacaacttaggattagaataaagcaaagaagaatgaaccatcattacaggtccaggtaacttcccagtcctcaaaacagaactcacgccagtggacctgggctctgggattaggtgccaagacaatgacacggcttagaaggcttagaatttcttccagagataattttgcagacacagttctttttgtatctgattttttttaactatgagaatactggtattaagtgatttataccttatatataataatctttgtagcctataa

SEQ ID NO: 7928 - protein, 290 aa, Rattus norvegicus
  ref <308>: DATABASE ACCESSION NUMBER: SWISS-Prot / P50297
  ref <309>: DATABASE ENTRY DATE: 2001-10-16
MDIEAYFERIGYKNSVNKLDLATLTEVLQHQMRAVPFENLSMHCGEAMCLGLEATFDHIVRKKRGGWCLQVNHLLYWALTKMGFETTMLGGYVYITPVNKYSSEMVHLLVQVTISDRNYIVDSAYGSSYQMWEPLELTSGKDQPQVPAIFRLTEENGTWYLDQIRREQDVPNQEFVNSDLLEKSKYRKIYSFTLEPRTIEDFEYVNTYLQTSPASVFVSTSFCSLQTSEGVCCLIGSTLTSRRFSYKDNVDLVEFKSLTEEEIEDVLKTTFGISLEKKFVPKHGELVFTI

SEQ ID NO: 7929 - DNA, 1606 bp, Homo sapiens
  ref <308>: DATABASE ACCESSION NUMBER: EMBL / U80835
  ref <309>: DATABASE ENTRY DATE: 1999-07-05
ctttgtataaggctcagctaaaagggaaattgagtgggtcaggtaccacggatactatacactctattgcatgattctcctgcctacatcagaagatgtttataagcctattttaaaggataccagttggaatctctcttttattaatcaccaagagaaccatgaacaagctgtttatcatttgactcatcatttaatcttgatttccagcttctcacacttgaaagaagacataatacatttctcacaggattctgggactattaactgaacttatgtgtgtaaaaggaattcatacaatgaaagcactagaaataattattatacttataaccattgtatttttacatgtttaaaatatagccataattagcctactcaaatccaagtgtaaaagtaatatgatttgctttcgttttgttttccttgcttaggggatcatggacattgaagcatatcttgaaagaattggctataagaagtctaggaacaaattggacttggaaacattaactgacattcttcaacaccagatccgagctgttccctttgagaaccttaacatccattgtggggatgccatggacttaggcttagaggccatttttgatcaagttgtgagaagaaatcggggtggatggtgtctccaggtcaatcatcttctgtactgggctctgaccactattggttttgagaccacgatgttgggagggtatgtttacagcactccagccaaaaaatacagcactggcatgattcaccttctcctgcaggtgaccattgatggcaggaactacattgtcgatgctgggtttggacgctcataccagatgtggcagcctctggagttaatttctgggaaggatcagcctcaggtgccttgtatcttccgtttgacagaagagaatggattctggtatctagaccaaatcagaagggaacagtacattccaaatgaagaatttcttcattctgatctcctagaagacagcaaataccgaaaaatctactcctttactcttaagcctcgaacaattgaagattttgagtctatgaatacatacctgcagacatctccagcatctgtgtttactagtaaatcattttgttccttgcagaccccagatggggttcactgtttggtgggcttcaccctcacccataggagattcaattataaggacaatacagatctaatagagttcaagactctgagtgaggaagaaatagaaaaagtgctgaaaaatatatttaatatttccttgcagagaaagcttgtgcccaaacatggtgatagattttttactatttagaataaggagtaaaacaatcttgtctatttgtcatccagctcaccagttatcaactgacgacctatcatgtatcttctgtacccttaccttattttgaagaaaatcctagacatcaaatcatttcacctataaaaatgtcatcatatataattaaacagctttttaaagaaacataaccacaaaccttttcaaataataataataataaatgtattttaaagatggcctgtggttatcttggaaattggtgatttatgctagaaagcttttaatgttggtttattgttgaattc

SEQ ID NO: 7930 - protein, 291 aa, Homo sapiens
  misc_feature (1)..(291): Xaa=Unknown amino acid
MDIEAYLERIGYKKSRNKLDLETLTDILQHQIRAVPFENLNIHCGDAMDLGLEAIFDQVVRRNRGGWCLQVNHLLYWALTTIGFETTMLGGYVYSTPAKKYSTGMIHLLLQVTIDGRNYIVDAGFGRSYQMWQPLELISGKDQPQVPCIFRLTEENGFWYLDQIRREQYIPNEEFLHSDLLEDSKYRKIYSFTLKPRTIEDFESMNTYLQTSPASVFTSKSFCSLQTPDGVHCLVGFTLTHRRFNYKDNTDLIEFKTLSEEEIEKVLKNIFNISLQRKLVPKHGDRFFTIX

SEQ ID NO: 7931 - DNA, 1043 bp, Rattus norvegicus
  ref <308>: DATABASE ACCESSION NUMBER: EMBL / U02315
  ref <309>: DATABASE ENTRY DATE: 2000-03-04
ggaagggcaagaagaaggaccggggatcccgcgggaagcccgggcccgccgagggcgacccgagcccagcactgcctcccagattgaaagaaatgaagagccaggagtcagctgcaggctccaagctagtgctccggtgcgaaaccagctccgagtactcctcactcagattcaaatggttcaagaatgggaacgagctgaaccgcaaaaataaaccagaaaacatcaagatacagaagaagccagggaagtcagagcttcgaattaacaaagcatccctggctgactctggagagtatatgtgcaaagtgatcagcaagttaggaaatgacagtgcctctgccaacatcaccattgttgagtcaaacgagttcatcactggcatgccagcctcgactgagacagcctatgtgtcctcagagtctcccattagaatctcagtttcaacagaaggcgcaaacacttcttcatccacatcaacatccacgactgggaccagccatctcataaagtgtgcggagaaggagaaaactttctgtgtgaatgggggcgagtgcttcacggtgaaggacctgtcaaacccgtcaagatacttgtgcaagtgcccaaatgagtttactggtgatcgttgccaaaactacgtaatggccagcttctacagtacgtccactccctttctgtctctgcctgagtaggagcatgctcagtcgatgctgctttcttgttgctacatctcccctcagagtcacctagagcctagaaccttctaccaggtctaatattgactgcctctgcctgtcgcatgagaacattaacaaggccgctgtgttacttctctgtttgtgactagtcggctcagagttactaaataggtgtgtgaggccccagaggtttctgaaaatggtcccgcagaaggtgatgcaaatcgatagtcaacatgccaagagtgaaataataataataataataataataataataataataataaaggcgtttcaaactcgcacttgtattggtaaaataaaatcattccaacaagt

SEQ ID NO: 7932 - protein, 662 aa, Rattus norvegicus
  ref <308>: DATABASE ACCESSION NUMBER: SWISS-Prot / P43322
  ref <309>: DATABASE ENTRY DATE: 2001-10-16
MSERKEGRGKGKGKKKDRGSRGKPGPAEGDPSPALPPRLKEMKSQESAAGSKLVLRCETSSEYSSLRFKWFKNGNELNRKNKPENIKIQKKPGKSELRINKASLADSGEYMCKVISKLGNDSASANITIVESNEFITGMPASTETAYVSSESPIRISVSTEGANTSSSTSTSTTGTSHLIKCAEKEKTFCVNGGECFTVKDLSNPSRYLCKCPNEFTGDRCQNYVMASFYMTSRRKRQETEKPLERKLDHSLVKESKAEELYQKRVLTITGICIALLVVGIMCVVAYCKTKKQRQKLHDRLRQSLRSERSNLVNIANGPHHPNPPPENVQLVNQYVSKNVISSEHIVEREVETSFSTSHYTSTAHHSTTVTQTPSHSWSNGHTESVISESNSVIMMSSVENSRHSSPAGGPRGRLHGLGGPRDNSFLRHARETPDSYRDSPHSERYVSAMTTPARMSPVDFHTPSSPKSPPSEMSPPVSSMTVSMPSVAVSPFVEEERPLLLVTPPRLREKKYDHHPQQLNSFHHNPAHQSTSLPPSPLRIVEDEEYETTQEYESVQEPVKKVTNSRRAKRTKPNGHIANRLEMDSNTSSVSSNSESETEDERVGEDTPFLGIQNPLAASLEVAPAFRLAESRTNPAGRFSTQEELQARLSSVIANQDPIAV

SEQ ID NO: 7933 - DNA, 886 bp, Homo sapiens
  ref <308>: DATABASE ACCESSION NUMBER: EMBL / U02327
  ref <309>: DATABASE ENTRY DATE: 1999-06-30
gtgcctctgccaatatcaccatcgtggaatcaaacgagatcatcactggtatgccagcctcaactgaaggagcatatgtgtcttcagagtctcccattagaatatcagtatccacagaaggagcaaatacttcttcatctacatctacatccaccactgggacaagccatcttgtaaaatgtgcggagaaggagaaaactttctgtgtgaatggaggggagtgcttcatggtgaaagacctttcaaacccctcgagatacttgtgcaagtgccaacctggattcactggagcaagatgtactgagaatgtgcccatgaaagtccaaaaccaagaaagtgcccaaatgagtttactggtgatcgctgccaaaactacgtaatggccagcttctacagtacgtccactccctttctgtctctgcctgaataggagcatgctcagttggtgctgctttcttgttgctgcatctcccctcagattccacctagagctagatgtgtcttaccagatctaatattgactgcctctgcctgtcgcatgagaacattaacaaaagcaattgtattacttcctctgttcgcgactagttggctctgagatactaataggtgtgtgaggctccggatgtttctggaattgatattgaatgatgtgatacaaattgatagtcaatatcaagcagtgaaatatgataataaaggcatttcaaagtctcacttttattgataaaataaaaatcattctactgaacagtccatcttctttatacaatgaccacatcctgaaaagggtgttgctaagctgtaaccgatatgcacttgaaatgatggtaagttaattttgattcagaatgtgttatttgtcacaaataaacataataaaagg

SEQ ID NO: 7934 - protein, 639 aa, Homo sapiens
  ref <308>: DATABASE ACCESSION NUMBER: SWISS-Prot / Q12784
  ref <309>: DATABASE ENTRY DATE: 2002-06-15
SERKEGRGKGKGKKKERGSGKKPESAAGSQSPALPPRLKEMKSQESAAGSKLVLRCETSSEYSSLRFKWFKNGNELNRKNKPQNIKIQKKPGKSELRINKASLADSGEYMCKVISKLGNDSASANITIVESNEIITGMPASTEGAYVSSESPIRISVSTEGANTSSSTSTSTTGTSHLVKCAEKEKTFCVNGGECFMVKDLSNPSRYLCKCQPGFTGARCTENVPMKVQNQEKAEELYQKRVLTITGICIALLVVGIMCVVAYCKTKKQRKKLHDRLRQSLRSERNNMMNIANGPHHPNPPPENVQLVNQYVSKNVISSEHIVEREAETSFSTSHYTSTAHHSTTVTQTPSHSWSNGHTESILSESHSVIVMSSVENSRHSSPTGGPRGRLNGTGGPRECNSFLRHARETPDSYRDSPHSERYVSAMTTPARMSPVDFHTPSSPKSPPSEMSPPVSSMTVSMPSMAVSPFMEEERPLLLVTPPRLREKKFDHHPQQFSSFHHNPAHDSNSLPASPLRIVEDEEYETTQEYEPAQEPVKKLANSRRAKRTKPNGHIANRLEVDSNTSSQSSNSESETEDERVGEDTPFLGIQNPLAASLEATPAFRLADSRTNPAGRFSTQEEIQARLSSVIANQDPIAV

SEQ ID NO: 7935 - DNA, 1043 bp, Rattus norvegicus; identical to SEQ ID NO: 7931
  ref <308>: DATABASE ACCESSION NUMBER: EMBL / U02315
  ref <309>: DATABASE ENTRY DATE: 2000-03-04

SEQ ID NO: 7936 - protein, 662 aa, Rattus norvegicus; identical to SEQ ID NO: 7932
  ref <308>: DATABASE ACCESSION NUMBER: SWISS-Prot / P43322
  ref <309>: DATABASE ENTRY DATE: 2001-10-16

SEQ ID NO: 7937 - DNA, 886 bp, Homo sapiens; identical to SEQ ID NO: 7933
  ref <308>: DATABASE ACCESSION NUMBER: EMBL / U02327
  ref <309>: DATABASE ENTRY DATE: 1999-06-30

SEQ ID NO: 7938 - protein, 639 aa, Homo sapiens; identical to SEQ ID NO: 7934
  ref <308>: DATABASE ACCESSION NUMBER: SWISS-Prot / Q12784
  ref <309>: DATABASE ENTRY DATE: 2002-06-15

SEQ ID NO: 7939 - DNA, 1255 bp, Rattus norvegicus
  ref <308>: DATABASE ACCESSION NUMBER: EMBL / U02320
  ref <309>: DATABASE ENTRY DATE: 2000-03-04
gcggccgcagctgccgggagatgcgagcgcagaccggattgtgatcacctttccctcttcgggctgtaagagagcgagacaagccaccgaagcgaggccactccagagccggcagcggagggacccgggacactagagcagctccgagccactccagactgagcggacgctccaggtgatcgagtccacgctgcttcctgcaggcgacaggcgacgcctcccgagcagcccggccactggctcttcccctcctgggacaaacttttctgcaagcccttggaccaaacttgtcgcgcgtcaccgtcacccaaccgggtccgcgtagagcgctcatcttcggcgagatgtctgagcgcaaagaaggcagaggcaaggggaagggcaagaagaaggaccggggatcccgcgggaagcccgggcccgccgagggcgacccgagcccagcactgcctcccagattgaaagaaatgaagagccaggagtcagctgcaggctccaagctagtgctccggtgcgaaaccagctccgagtactcctcactcagattcaaatggttcaagaatgggaacgagctgaaccgcaaaaataaaccagaaaacatcaagatacagaagaagccagggaagtcagagcttcgaattaacaaagcatccctggctgactctggagagtatatgtgcaaagtgatcagcaagttaggaaatgacagtgcctctgccaacatcaccattgttgagtcaaacgagttcatcactggcatgccagcctcgactgagacagcctatgtgtcctcagagtctcccattagaatctcagtttcaacagaaggcgcaaacacttcttcatccacatcaacatccacgactgggaccagccatctcataaagtgtgcggagaaggagaaaactttctgtgtgaatgggggcgagtgcttcacggtgaaggacctgtcaaacccgtcaagatacttgtgcaagtgcccaaatgagtttactggtgatcgttgccaaaactacgtaatggccagcttctacaaagcggaggaactctaccagaagagggtgctgacaattactggcatctgtatcgccctgctggtggtcggcatcatgtgtgtggtggcctactgcaaaaccaagaagcagcggcagaagcttcatgatcggcttcggcagagtcttcggtcagaacggagcaacctggtgaacatagcgaatgggcctcaccacccaaacccacgcgtccggacgcgtgg

SEQ ID NO: 7940 - protein, 662 aa, Rattus norvegicus; identical to SEQ ID NO: 7932
  ref <308>: DATABASE ACCESSION NUMBER: SWISS-Prot / AAA19945
  ref <309>: DATABASE ENTRY DATE: 2001-10-16

SEQ ID NO: 7941 - DNA, 2490 bp, Homo sapiens
  ref <308>: DATABASE ACCESSION NUMBER: Refseq / NM_013957
  ref <309>: DATABASE ENTRY DATE: 2001-02-03
gtggctgcggggcaattgaaaaagagccggcgaggagttccccgaaacttgttggaactccgggctcgcgcggaggccaggagctgagcggcggcggctgccggacgatgggagcgtgagcaggacggtgataacctctccccgatcgggttgcgagggcgccgggcagaggccaggacgcgagccgccagcggcgggacccatcgacgacttcccggggcgacaggagcagccccgagagccagggcgagcgcccgttccaggtggccggaccgcccgccgcgtccgcgccgcgctccctgcaggcaacgggagacgcccccgcgcagcgcgagcgcctcagcgcggccgctcgctctccccatcgagggacaaacttttcccaaacccgatccgagcccttggaccaaactcgcctgcgccgagagccgtccgcgtagagcgctccgtctccggcgagatgtccgagcgcaaagaaggcagaggcaaagggaagggcaagaagaaggagcgaggctccggcaagaagccggagtccgcggcgggcagccagagcccagccttgcctccccaattgaaagagatgaaaagccaggaatcggctgcaggttccaaactagtccttcggtgtgaaaccagttctgaatactcctctctcagattcaagtggttcaagaatgggaatgaattgaatcgaaaaaacaaaccacaaaatatcaagatacaaaaaaagccagggaagtcagaacttcgcattaacaaagcatcactggctgattctggagagtatatgtgcaaagtgatcagcaaattaggaaatgacagtgcctctgccaatatcaccatcgtggaatcaaacgagatcatcactggtatgccagcctcaactgaaggagcatatgtgtcttcagagtctcccattagaatatcagtatccacagaaggagcaaatacttcttcatctacatctacatccaccactgggacaagccatcttgtaaaatgtgcggagaaggagaaaactttctgtgtgaatggaggggagtgcttcatggtgaaagacctttcaaacccctcgagatacttgtgcaagtgcccaaatgagtttactggtgatcgctgccaaaactacgtaatggccagcttctacaaggcggaggagctgtaccagaagagagtgctgaccataaccggcatctgcatcgccctccttgtggtcggcatcatgtgtgtggtggcctactgcaaaaccaagaaacagcggaaaaagctgcatgaccgtcttcggcagagccttcggtctgaacgaaacaatatgatgaacattgccaatgggcctcaccatcctaacccaccccccgagaatgtccagctggtgaatcaatacgtatctaaaaacgtcatctccagtgagcatattgttgagagagaagcagagacatccttttccaccagtcactatacttccacagcccatcactccactactgtcacccagactcctagccacagctggagcaacggacacactgaaagcatcctttccgaaagccactctgtaatcgtgatgtcatccgtagaaaacagtaggcacagcagcccaactgggggcccaagaggacgtcttaatggcacaggaggccctcgtgaatgtaacagcttcctcaggcatgccagagaaacccctgattcctaccgagactctcctcatagtgaaaggtatgtgtcagccatgaccaccccggctcgtatgtcacctgtagatttccacacgccaagctcccccaaatcgcccccttcggaaatgtctccacccgtgtccagcatgacggtgtccaagccttccatggcggtcagccccttcatggaagaagagagacctctacttctcgtgacaccaccaaggctgcgggagaagaagtttgaccatcaccctcagcagttcagctccttccaccacaaccccgcgcatgacagtaacagcctccctgctagccccttgaggatagtggaggatgaggagtatgaaacgacccaagagtacgagccagcccaagagcctgttaagaaactcgccaatagccggcgggccaaaagaaccaagcccaatggccacattgctaacagattggaagtggacagcaacacaagctcccagagcagtaactcagagagtgaaacagaagatgaaagagtaggtgaagatacgcctttcctgggcatacagaaccccctggcagccagtcttgaggcaacacctgccttccgcctggctgacagcaggactaacccagcaggccgcttctcgacacaggaagaaatccaggccaggctgtctagtgtaattgctaaccaagaccctattgctgtataaaacctaaataaacacatagattcacctgtaaaactttattttatataataaagtattccaccttaaattaaacaatttattttattttagcagttctgcaaataaaaaaaaaaaaa

SEQ ID NO: 7942 - protein, 639 aa, Homo sapiens; identical to SEQ ID NO: 7934
  ref <308>: DATABASE ACCESSION NUMBER: SWISS-Prot / Q12784
  ref <309>: DATABASE ENTRY DATE: 2002-06-15

SEQ ID NO: 7943 - DNA, 1255 bp, Rattus norvegicus; identical to SEQ ID NO: 7939
  ref <308>: DATABASE ACCESSION NUMBER: EMBL / U02320
  ref <309>: DATABASE ENTRY DATE: 2000-03-04

SEQ ID NO: 7944 - protein, 662 aa, Rattus norvegicus; identical to SEQ ID NO: 7932
  ref <308>: DATABASE ACCESSION NUMBER: SWISS-Prot / AAA19945
  ref <309>: DATABASE ENTRY DATE: 2001-10-16

SEQ ID NO: 7945 - DNA, 2490 bp, Homo sapiens; identical to SEQ ID NO: 7941
  ref <308>: DATABASE ACCESSION NUMBER: Refseq / NM_013957
  ref <309>: DATABASE ENTRY DATE: 2001-02-03

SEQ ID NO: 7946 - protein, 639 aa, Homo sapiens; identical to SEQ ID NO: 7934
  ref <308>: DATABASE ACCESSION NUMBER: SWISS-Prot / Q12784
  ref <309>: DATABASE ENTRY DATE: 2002-06-15

SEQ ID NO: 7947 - DNA, 2402 bp, Rattus norvegicus
  ref <308>: DATABASE ACCESSION NUMBER: EMBL / U02322
  ref <309>: DATABASE ENTRY DATE: 2000-03-04
gcggccgcagctgccgggagatgcgagcgcagaccggattgtgatcacctttccctcttcgggctgtaagagagcgagacaagccaccgaagcgaggccactccagagccggcagcggagggacccgggacactagagcagctccgagccactccagactgagcggacgctccaggtgatcgagtccacgctgcttcctgcaggcgacaggcgacgcctcccgagcagcccggccactggctcttcccctcctgggacaaacttttctgcaagcccttggaccaaacttgtcgcgcgtcaccgtcacccaaccgggtccgcgtagagcgctcatcttcggcgagatgtctgagcgcaaagaaggcagaggcaaggggaagggcaagaagaaggaccggggatcccgcgggaagcccgggcccgccgagggcgacccgagcccagcactgcctcccagattgaaagaaatgaagagccaggagtcagctgcaggctccaagctagtgctccggtgcgaaaccagctccgagtactcctcactcagattcaaatggttcaagaatgggaacgagctgaaccgcaaaaataaaccagaaaacatcaagatacagaagaagccagggaagtcagagcttcgaattaacaaagcatccctggctgactctggagagtatatgtgcaaagtgatcagcaagttaggaaatgacagtgcctctgccaacatcaccattgttgagtcaaacgagttcatcactggcatgccagcctcgactgagacagcctatgtgtcctcagagtctcccattagaatctcagtttcaacagaaggcgcaaacacttcttcatccacatcaacatccacgactgggaccagccatctcataaagtgtgcggagaaggagaaaactttctgtgtgaatgggggcgagtgcttcacggtgaaggacctgtcaaacccgtcaagatacttgtgcaagtgcccaaatgagtttactggtgatcgttgccaaaactacgtaatggccagcttctacatgacttctaggaggaaaaggcaagaaacagagaagcctctagaaagaaaattggatcatagccttgtgaaagaatcgaaagcggaggaactctaccagaagagggtgctgacaattactggcatctgtatcgccctgctggtggtcggcatcatgtgtgtggtggcctactgcaaaaccaagaagcagcggcagaagcttcatgatcggcttcggcagagtcttcggtcagaacggagcaacctggtgaacatagcgaatgggcctcaccacccaaacccaccgccagagaacgtgcagctggtgaatcaatacgtatctaaaaacgtcatctccagtgagcatattgttgagagagaagtggagacttccttttccaccagtcattacacttccacagcccatcactccacgactgtcacccagactcctagtcacagctggagtaatgggcacacggagagcgtcatttcagaaagcaactccgtaatcatgatgtcttcggtagagaacagcaggcacagcagtcccgccgggggcccacgaggacgtcttcatggcctgggaggccctcgtgataacagcttcctcaggcatgccagagaaacccctgactcctacagagactctcctcatagcgaaaggtatgtatcagccatgaccaccccggctcgtatgtcacctgtagatttccacacgccaagctcccctaaatcgcccccttcggaaatgtctccacccgtgtccagcatgacggtgtccatgccctctgtggcagtcagcccctttgtggaagaagagaggcctctgctgcttgtgacgccaccaaggctacgggagaagaaatatgatcatcacccccagcaactcaactcctttcatcacaaccctgcacatcagagtaccagcctcccccctagcccactgaggatagtggaggatgaggagtacgagacgacccaggagtatgagtcagttcaagagcccgttaagaaagtcaccaatagccggcgggccaaaagaaccaagcccaatggccacattgccaataggttggaaatggacagcaacacaagttctgtgagcagtaactcagaaagtgagacagaagacgaaagagtaggtgaagacacaccattcctgggcatacagaaccccctggcagccagccttgaggtggcccctgccttccgtctggctgagagcaggactaacccagcaggccgcttctccacacaggaggaattacaggccaggctgtctagtgtaatcgctaaccaagaccctattgctgtataaaacctaaataaacacatagattcacctgtaaaactttattttatataataaagtatttcaccttaaatt

SEQ ID NO: 7948 - protein, 662 aa, Rattus norvegicus; identical to SEQ ID NO: 7932
  ref <308>: DATABASE ACCESSION NUMBER: SWISS-Prot / P43322
  ref <309>: DATABASE ENTRY DATE: 2001-10-16

SEQ ID NO: 7949 - DNA, 886 bp, Homo sapiens; identical to SEQ ID NO: 7933
  ref <308>: DATABASE ACCESSION NUMBER: EMBL / U02327
  ref <309>: DATABASE ENTRY DATE: 1999-06-30

SEQ ID NO: 7950 - protein, 639 aa, Homo sapiens; identical to SEQ ID NO: 7934
  ref <308>: DATABASE ACCESSION NUMBER: SWISS-Prot / Q12784
  ref <309>: DATABASE ENTRY DATE: 2002-06-15

SEQ ID NO: 7951 - DNA, 648 bp, Rattus norvegicus
  ref <308>: DATABASE ACCESSION NUMBER: EMBL / U02506
  ref <309>: DATABASE ENTRY DATE: 1997-07-05
aatcccaatattaagaggttaaaaaataggaccagaagtttaaagtaatccttggctacctagtgagtgtaaggccagcctggaatcaataagagttggtttcaaagaagcaggaggagaaggaggaacaggaacaggaggaggagcagggggaggagaaaaaggaggaggaggaggaggaggaagaggaggaggaggaggaggaggaggaggaggaggaggaggaggaggaggaggagaagaagaagaagaagaagaagaagaagaagaagaagaagaagaagaagaagaagaagaagaagaagaagaagaagaagaagaagaagaagaagaagaagaagaagaagaaattagaagaagaaaagaagaaggacaaatggctcttttctggtctcaccttttcccttcctgtcactcatgtggacctcagataagagcacagatactctcgacctcttacatttggagagttttgagcagacaggaagaagacggagcctgggagcagctgttctccaatagtcaaattaagactgttcctctctgagctctgtacttcaaccagcacctttaggcagaagccatcaaatcagaaatgtctgttaataattaaagtctatgattgccaccaaaaaaaaaaaaaaaaaa

SEQ ID NO: 7952 - DNA, 2741 bp, Rattus norvegicus
  ref <308>: DATABASE ACCESSION NUMBER: EMBL / U02522
  ref <309>: DATABASE ENTRY DATE: 2000-03-04
ccgccggcgcccccgcgcccgcccccgccccggcccgcgcccggcccgccgcccgcgcccgcgccccgcgcccgcggccccgccgccggcccggacatggccgccaacatgtacagggtcggagactatgtctactttgagaactcctccagcaacccgtacctgatccgcaggattgaagagctgaataagacagccaacgggaatgtggaggccaaagtggtgtgtttctacagaaggcgggacatttccagcagcctcatcgcgctggctgacaagcatgcaaccctgtcagtctgctatagagccggaccgggggcggacaccggcgaggaaggggaagtggaggaggaggtagaaaacccagagatggtagacctgcctgagaaacttaagcaccagctgcggcatcgggaactgttcctctctcggcagttggagtctctgcctgccacccacatcaggggcaagtgcagtgttaccctgctcaatgagaccgagtcactcaagtcctacctggagcgtgaggatttcttcttctactctctagtctacgacccacagcagaagaccctcctggctgataaaggcgaaattcgtgtagggaaccggtaccaggctgacatcactgatttgctgaaagacggtgaggaggacggccgcgatcagtcgaagctggagaccaaggtgtgggaagcccacaatccacttgtagataagcagattgaccagtttctggtggtggcccgctctgtgggtacctttgcacgggccctggattgcagcagctccgtgcggcagcctagcctgcacatgagtgccgccgcagcctcccgagacatcaccctgtttcatgccatggacacgctgcacaagaacatctacgacatctccaaggccatctctgcccttgtgcctcagggtgggccagtgctctgcagggatgagatggaggagtggtcagcatcagaagccaacctttttgaggaagctctggaaaaatatgggaaagatttcacagacattcagcaagactttctcccatggaagtcgctcaccagcatcattgagtattactacatgtggaagaccaccgacagatacgtccagcagaaacgtttgaaagcagctgaagcagagagcaagttaaagcaggtttatattcccaactataacaagccaaacccaaaccagatcagcgtcaacagtgtcaaggccagtgtagtgaatggcacagggacaccaggccagagccccggggccggtcgggcctgcgagagctgttacaccacacagtcttaccagtggtattcttggggtccccctaacatgcagtgtcgcctctgcgcatcttgttggacatattggaagaaatatggtggcttgaaaatgccaacccggttagatggagagaggccgggaccaaaccgcaataacatgagtccccatggcatcccagctcggagcagtgggagccccaagtttgccatgaagacaaggcaggccttctacctgcatactaccaagttgacacgcattgcccggcgcttgtgccgtgagatcctacgcccatggcatgccgcacgccacccctacatgcccatcaacagtgcagcaatcaaggctgaatgcacagcacggctgcccgaagcttcccagagcccactggtgctgaagcaggtagtacggaagcccctggaggctgtgctccggtatcttgagactcatccccgcccgcctaagcccgaccctgtgaagagctcatccagtgtgctcagcagtctgacccctgccaagtcagcccctgtcatcaacaatggctcccctaccatcttgggcaagaggagctatgagcagcacaatggggtagatggtctggcaaaccatggacagaccaggcacatgggaccaagtcggaatctcctgctcaatgggaagtcctaccccaccaaagtgcgcctaatccgaggcggctccctgcctccagtcaagcggcggcggatgaactggattgacgccccagatgatgtattttacatggccaccgaggagaccaggaaaatccgaaagctgctctcatcttcagaaaccaagcgtgctgcccgccggccctacaagcctattgccctgcgccagagccaggccctgccgctgcggccacccccacctgcaccagtcaatgatgagcccattgttattgaggactaggcggtcacccacagtggcctgcctgggcccctccatcagccccagagtatccagtgaggcctgcagaggccaagcggcctccctcccccaccagactgctgcccaccccaccctctgtttccgtagtgccccaactcccgccctcacatgcagagaaactgctcctctggtggacatgcgggggaagaagtgtggtctaacttattccaagacaccgaggagtcttttttagctttgtgtttactttctggctggagcagagatgaggagtgccctgggccgtgggctgcagggcttctcagctggggtgggctctaaggttttgttgtgttctgttgaaggtgccattttaaattttatttttattacttttttgtagatgaacttgagctctgtaacttacacctggaatgttaggattggtgcagccagcagcggccaagctgcctggcagggttggtcccttgtcttttcaagtaattttcatattaaacaaaaacaaagaaaaaaatctcataaaaaggaaaacccca

SEQ ID NO: 7953 - protein, 703 aa, Rattus norvegicus
  ref <308>: DATABASE ACCESSION NUMBER: SWISS-Prot / Q62599
  ref <309>: DATABASE ENTRY DATE: 2001-10-16
MAANMYRVGDYVYFENSSSNPYLIRRIEELNKTANGNVEAKVVCFYRRRDISSSLIALADKHATLSVCYRAGPGADTGEEGEVEEEVENPEMVDLPEKLKHQLRHRELFLSRQLESLPATHIRGKCSVTLLNETESLKSYLEREDFFFYSLVYDPQQKTLLADKGEIRVGNRYQADITDLLKDGEEDGRDQSKLETKVWEAHNPLVDKQIDQFLVVARSVGTFARALDCSSSVRQPSLHMSAAAASRDITLFHAMDTLHKNIYDISKAISALVPQGGPVLCRDEMEEWSASEANLFEEALEKYGKDFTDIQQDFLPWKSLTSIIEYYYMWKTTDRYVQQKRLKAAEAESKLKQVYIPNYNKPNPNQISVNSVKASVVNGTGTPGQSPGAGRACESCYTTQSYQWYSWGPPNMQCRLCASCWTYWKKYGGLKMPTRLDGERPGPNRNNMSPHGIPARSSGSPKFAMKTRQAFYLHTTKLTRIARRLCREILRPWHAARHPYMPINSAAIKAECTARLPEASQSPLVLKQVVRKPLEAVLRYLETHPRPPKPDPVKSSSSVLSSLTPAKSAPVINNGSPTILGKRSYEQHNGVDGLANHGQTRHMGPSRNLLLNGKSYPTKVRLIRGGSLPPVKRRRMNWIDAPDDVFYMATEETRKIRKLLSSSETKRAARRPYKPIALRQSQALPLRPPPPAPVNDEPIVIED

SEQ ID NO: 7954 - DNA, 2662 bp, Homo sapiens
  ref <308>: DATABASE ACCESSION NUMBER: Refseq / NM_004689
  ref <309>: DATABASE ENTRY DATE: 2001-08-18
cccggacatggccgccaacatgtacagggtcggagactacgtctactttgagaactcctccagcaacccatacctgatccggagaatcgaggagctcaacaagacggccaatgggaacgtggaggccaaagtggtgtgcttctaccggaggcgggacatctccagcaccctcatcgccctggccgacaagcacgcaaccctgtcagtctgctataaggccggaccgggggcggacaacggcgaggaaggggaaatagaagaggaaatggagaatccggaaatggtggacctgcccgagaaactaaagcaccagctgcggcatcgggagctgttcctctcccggcagctggagtctctgcccgccacgcacatcaggggcaagtgcagcgtcaccctgctcaacgagaccgagtcgctcaagtcctacctggagcgggaggatttcttcttctattctctagtctacgacccacagcagaagaccctgctggcagataaaggagagattcgagtaggaaaccggtaccaggcagacatcaccgacttgttaaaagaaggcgaggaggatggccgagaccagtccaggttggagacccaggtgtgggaggcgcacaacccactcacagacaagcagatcgaccagttcctggtggtggcccgctctgtgggcaccttcgcacgggccctggactgcagcagctccgtccgacagcccagcctgcacatgagcgccgcagctgcctcccgagacatcaccctgttccacgccatggatactctccacaagaacatctacgacatctccaaggccatctcggcgctggtgccgcagggcgggcccgtgctctgcagggacgagatggaggagtggtctgcatcagaggccaaccttttcgaggaagccctggaaaaatatgggaaggatttcacggacattcagcaagattttctcccgtggaagtcgctgaccagcatcattgagtactactacatgtggaagaccaccgacagatacgtgcagcagaaacgcttgaaagcagctgaagctgagagcaagttaaagcaagtttatattcccaactataacaagccaaatccgaaccaaatcagcgtcaacaacgtcaaggccggtgtggtgaacggcacgggggcgccgggccagagccctggggctggccgggcctgcgagagctgttacaccacacagtcttaccagtggtattcttggggtccccctaacatgcagtgtcgtctctgcgcatcttgttggacatattggaagaaatatggtggcttgaaaatgccaacccggttagatggagagaggccaggaccaaaccgcagtaacatgagtccccacggcctcccagcccggagcagcgggagccccaagtttgccatgaagaccaggcaggctttctatctgcacacgacgaagctgacgcggatcgcccggcgcctgtgccgtgagatcctgcgcccgtggcacgctgcgcggaacccctacctgcccatcaacagcgcggccatcaaggccgagtgcacggcgcggctgcccgaagcctcccagagcccgctggtgctgaagcaggcggtacgcaagccgctggaagccgtgcttcggtatcttgagacccacccccgcccccccaagcctgaccccgtgaaaagcgtgtccagcgtgctcagcagcctgacgcccgccaaggtggcccccgtcatcaacaacggctcccccaccatcctgggcaagcgcagctacgagcagcacaacggggtggacggcaacatgaagaagcgcctcttgatgcccagtaggggtctggcaaaccacggacagaccaggcacatgggaccaagccggaacctcctgctcaacgggaagtcctaccccaccaaagtgcgcctgatccgggggggctccctgcccccagtcaagcggcggcggatgaactggatcgacgccccgggtgacgtgttctacatgcccaaagaggagaccaggaagatccgcaagctgctctcatcctcggaaaccaagcgtgctgcccgccggccctacaagcccatcgccctgcgccagagccaggccctgccgccgcggccaccgccacctgcgcccgtcaacgacgagcccatcgtcatcgaggactaggggccgcccccacctgcggccgccccccgcccctcgcccgcccacacggccccttcccagccagcccgccgcccgcccctcagtttggtagtgccccacctcccgccctcacctgaagagaaacgcgctccttggcggacactgggggaggagaggaagaagcgcggctaacttattccgagaatgccgaggagttgtcgtttttagctttgtgtttactttttggctggagcggagatgaggggccaccccgtgcccctgtgctgcggggccttttgcccggaggccgggccctaaggttttgttgtgttctgttgaaggtgccattttaaattttatttttattactttttttgtagatgaacttgagctctgtaacttacacctggaatgttaggatcgtgcggccgcggccggccgagctgcctggcggggttggcccttgtcttttcaagtaattttcatattaaacaaaaacaaagaaaaaaaatcttataaaaaggaaaa

SEQ ID NO: 7955 - protein, 715 aa, Homo sapiens
  ref <308>: DATABASE ACCESSION NUMBER: SWISS-Prot / Q13330
  ref <309>: DATABASE ENTRY DATE: 2001-10-16
MAANMYRVGDYVYFENSSSNPYLIRRIEELNKTANGNVEAKVVCFYRRRDISSTLIALADKHATLSVCYKAGPGADNGEEGEIEEEMENPEMVDLPEKLKHQLRHRELFLSRQLESLPATHIRGKCSVTLLNETESLKSYLEREDFFFYSLVYDPQQKTLLADKGEIRVGNRYQADITDLLKEGEEDGRDQSRLETQVWEAHNPLTDKQIDQFLVVARSVGTFARALDCSSSVRQPSLHMSAAAASRDITLFHAMDTLHKNIYDISKAISALVPQGGPVLCRDEMEEWSASEANLFEEALEKYGKDFTDIQQDFLPWKSLTSIIEYYYMWKTTDRYVQQKRLKAAEAESKLKQVYIPNYNKPNPNQISVNNVKAGVVNGTGAPGQSPGAGRACESCYTTQSYQWYSWGPPNMQCRLCASCWTYWKKYGGLKMPTRLDGERPGPNRSNMSPHGLPARSSGSPKFAMKTRQAFYLHTTKLTRIARRLCREILRPWHAARNPYLPINSAAIKAECTARLPEASQSPLVLKQAVRKPLEAVLRYLETHPRPPKPDPVKSVSSVLSSLTPAKVAPVINNGSPTILGKRSYEQHNGVDGNMKKRLLMPSRGLANHGQTRHMGPSRNLLLNGKSYPTKVRLIRGGSLPPVKRRRMNWIDAPGDVFYMPKEETRKIRKLLSSSETKRAARRPYKPIALRQSQALPPRPPPPAPVNDEPIVIED

SEQ ID NO: 7956 - DNA, 938 bp, Rattus norvegicus
  ref <308>: DATABASE ACCESSION NUMBER: EMBL / U03414
  ref <309>: DATABASE ENTRY DATE: 1998-02-26
ccagccctgcccgagaggcagtcgcgccggaaccggtaccataaatatgcagagcggaggctcagcgcagcagagcccgcgcgccgcccgccccggctgctaagcaggcgccgccggagcccgagccgcggccggagccccagccccaaccacagccgggagcgcgtccacgtccccgcagccgccgaccgccagcacccaggccctgcacgctaggacgtcggagtggccgcgagacatgcaaccggcccggaagctcctcagcctcctggtcctcctggtgatgggcaccgaactcacccaagtgttgcccaccaaccccgaggagagctggcaggtgtacagctctgcccaggacagtgagggcaggtgtatctgcacggtggtcgccccccagcagaccatgtgttcacgggatgcccgcacaaaacagctgaggcagctactggagaaggtgcaaaacatgtctcaatccatagaagtcttggacaggcggactcagagagacctgcagtacgtggagaagatggagaaccagatgaaaggcctggagtccaagttcaggcaggtggaggagagccataagcagcatctggccaggcagttcaagggctaacttaaagagttttttcaatgcgccagtgactgaagaagcagtccccccatgtaaccatgagagagccagagagctttttgcaccatgcattttatgattcttttccaatccttagcgccatttcactaaggaaccttgaatccagccaggatcctccttttgcatgcgactctagatgcatcccatgaatagtttgaacccttccttgtcaatgcactttttgaaagagaaagaaaaaaaaacccacaaactttgtgtatgtgacctaaagcatgtaactttaagatgctgcattctcaactgactaataaaggcctttccc

SEQ ID NO: 7957 - protein, 485 aa, Rattus norvegicus
  ref <308>: DATABASE ACCESSION NUMBER: SWISS-Prot / Q62609
  ref <309>: DATABASE ENTRY DATE: 2002-06-15
MSVPLLKIGVVLSTMAMITNWMSQTLPSLVGLNTTRLSAASGGTLDRSTGVLPTNPEESWQVYSSAQDSEGRCICTVVAPQQTMCSRDARTKQLRQLLEKVQNMSQSIEVLDRRTQRDLQYVEKMENQMKGLESKFRQVEESHKQHLARQFKAIKAKMDELRPLIPVLEEYKADAKLVLQFKEEVQNLTSVLNELQEEIGAYDYDELQSRVSNLEERLRACMQKLACGKLTGISDPVTVKTSGSRFGSWMTDPLAPEGDNRVWYMDGYHNNRFVREYKSMVDFMNTDNFTSHRLPHPWSGTGQVVYNGSIYFNKFQSHIIIRFDLKTETILKTRSLDYAGYNNMYHYAWGGHSDIDLMVDENGLWAVYATNQNAGNIVISKLDPVSLQILQTWNTSYPKRSAGEAFIICGTLYVTNGYSGGTKVHYAYQTNASTYEYIDIPFQNKYSHISMLDYNPKDRALYAWNNGHQTLYNVTLFHVIRSDEL

SEQ ID NO: 7958 - DNA, 1009 bp, Homo sapiens
  ref <308>: DATABASE ACCESSION NUMBER: EMBL / D82343
  ref <309>: DATABASE ENTRY DATE: 1999-03-23
gcgcgggggagccattaggaggcgaggagagaggagggcgcagctcccgcccagcccagccctgcccagccctgcccggaggcagacgcgccggaaccgggacgcgataaatatgcagagcggaggcttcgcgcagcagagcccgcgcgccgcccgctccgggtgctgaatccaggcgtggggacacgagccaggcgccgccgccggagccagcggagccggggccagagccggagcgcgtccgcgtccacgcagccgccggccggccagcacccagggccctgcatgccaggtcgttggaggtggcagcgagacatgcacccggcccggaagctcctcagcctcctcttcctcatcctgatgggcactgaactcactcaagtgctgcccaccaaccctgaggagagctggcaggtgtacagctctgcccaggacagcgagggcaggtgtatctgcacagtggtcgccccacagcagaccatgtgttcacgggatgcccgcacaaaacagctgaggcagctactggagaaggtgcagaacatgtctcaatccatagaggtcttggacaggcggacccagagagacttgcagtacgtggagaagatggagaaccaaatgaaaggactggagtccaagttcaaacaggtggaggagagtcataagcaacacctggccaggcagtttaagggctaacttaaaagagttttttcaatgctgcagtgactgaagaagcagtccactcccatgtaaccatgaaagagagccagagagctttttgcaccatgcatttttactattattttccaatacttagcaccatttcactaaggaaccttgaatacaaccaggatcctcctttgcatgcgactgtagctgcatttcatgaatagtttgaacccttgtcaatgcattttttgaaaaagaaagaaaaaaaaaacttcgtgtatgtgactcaaagcatgtaaccttaagatgttgcattctaaactgacaataaagacctttcccc

SEQ ID NO: 7959 - protein, 485 aa, Homo sapiens
  ref <308>: DATABASE ACCESSION NUMBER: SWISS-Prot / Q99784
  ref <309>: DATABASE ENTRY DATE: 2002-06-15
MSVPLLKIGVVLSTMAMITNWMSQTLPSLVGLNTTRLSAASGGTLDRSTGVLPTNPEESWQVYSSAQDSEGRCICTVVAPQQTMCSRDARTKQLRQLLEKVQNMSQSIEVLDRRTQRDLQYVEKMENQMKGLESKFKQVEESHKQHLARQFKAIKAKMDELRPLIPVLEEYKADAKLVLQFKEEVQNLTSVLNELQEEIGAYDYDELQSRVSNLEERLRACMQKLACGKLTGISDPVTVKTSGSRFGSWMTDPLAPEGDNRVWYMDGYHNNRFVREYKSMVDFMNTDNFTSHRLPHPWSGTGQVVYNGSIYFNKFQSHIIIRFDLKTETILKTRSLDYAGYNNMYHYAWGGHSDIDLMVDESGLWAVYATNQNAGNIVVSRLDPVSLQTLQTWNTSYPKRSAGEAFIICGTLYVTNGYSGGTKVHYAYQTNASTYEYIDIPFQNKYSHISMLDYNPKDRALYAWNNGHQILYNVTLFHVIRSDEL

SEQ ID NO: 7960 - DNA, 2065 bp, Rattus norvegicus
  ref <308>: DATABASE ACCESSION NUMBER: EMBL / U04317
  ref <309>: DATABASE ENTRY DATE: 2000-03-04
aggagaaaagactgggatatgctagcttgctagctccagcaagcggcggtatgcgcggtctttaaaatagacagacatagaggctttgggggagaggaagaagtgcctgggatgaagaagagatgcacctacccggcaggggtgaaatcccaagctacactgatttctcttttggaccctacatcagacagcacacatcaaccgcctagtggactcaccgttaccttcctgtgccattgccatcggagagatctcggccatcaatcactagcacatgattggcaaatggagaatggggctttgggctttggcaattctgacagttcccatgtatttcatagtgacagagggcagaaaaacatcctggggtctagaaaacgaggctttaattgtcagatgcccccaaagaggaggtgcgattaaccctgtggaatggtattattcaaatacaaatgaaagaattcctactcaaaagagaaatcggatcttcgtctcaagagatcgtctgaagtttctaccagccaaagtggaagactctgggatttatacgtgtgttatcagaagccctgaatcgattaagaccggatctttgaatgtcaccatatataaaagaccaccaaactgcaaaatccctgattacatgatgtactcgacagtagatggatcagataaaaattccaagataacatgtccaacaattgccttgtataattggacagcgcctgttcagtggtttaagaactgcaaagctctccaagggccaaggttcagggcacacatgtcctatttgttcattgacaaagtgagtcatgttgatgaaggtgactacacatgtcgattcactcacacggagaacggaaccaattacattgtgactgccaccagatcattcacagttgaagaaaaaggcttctctacatttccagtaattacaaaccctccacacaactacacagtggaagtggaaataggaaaaacagcaaacattgcctgctcagcttgctttggcacagcctctcagttcgttgctgtcctgtggcagattaacaaaacgagaattggatcttttggcaaagcaagaattcaagaagagaaaggcccaaataaaagttccagcaatggcatgatttgcttaacctcactgttaaggataactggtgtgaccgacaaggacttctccctgaaatatgactgtgtggccatgaaccatcacggagtgataaggcaccccgtaagactgagaaggaaacaaccaattgaccaccaaagcacctactacatagttgccggatgtagtttattgctaatgtttatcaatgtcttggtgatagtcttaaaagtgttctggattgaggttgctctgttctggagagatataatggcaccttacaaaacccagaatgatggaaagctctatgatgcttacatcatttaccctcgggtcttccggggcagcgcagcagggaccggctctgtggagtactttgttcactacactctgcccgacgttctcgaaaataaatgtggctacaagttgtgcatttacgggagagacctgctgcctgggcaagatgcggccactgtggtggaaagcagtatccagaatagtagacggcaagtgtttgtcctggcccctcacatgatgcacagcaaagagtttgcctatgagcaggagatcgccctgcacagcgccctcatccagaacaactccaaggtgattctgattgaaatggagcctatgggtgaggcaagccgactgcagcttggggatctgcaagattctctccagcatcttgtgaaaatgcaggggaccatcaagtggagggaagaccacgtggccgacaaacagtctctaagctccaaattctggaagcatgtgagataccaaatgccagtcccgaaaagaccccccaagatggcatctgttgccgctccgttgagtggcaaggtgtgcttggacctgaaacacttttgagtcgtggacttgcctactcagagctggggaatcccagcagtaggccccagaagtgaaggtgtgaagacttgaaatgccaagggtggggcc

SEQ ID NO: 7961 - protein, 566 aa, Rattus norvegicus
  ref <308>: DATABASE ACCESSION NUMBER: SWISS-Prot / AAA18480
  ref <309>: DATABASE ENTRY DATE: 2003-02-01
MIGKWRMGLWALAILTVPMYFIVTEGRKTSWGLENEALIVRCPQRGGAINPVEWYYSNTNERIPTQKRNRIFVSRDRLKFLPAKVEDSGIYTCVIRSPESIKTGSLNVTIYKRPPNCKIPDYMMYSTVDGSDKNSKITCPTIALYNWTAPVQWFKNCKALQGPRFRAHMSYLFIDKVSHVDEGDYTCRFTHTENGTNYIVTATRSFTVEEKGFSTFPVITNPPHNYTVEVEIGKTANIACSACFGTASQFVAVLWQINKTRIGSFGKARIQEEKGPNKSSSNGMICLTSLLRITGVTDKDFSLKYDCVAMNHHGVIRHPVRLRRKQPIDHQSTYYIVAGCSLLLMFINVLVIVLKVFWIEVALFWRDIMAPYKTQNDGKLYDAYIIYPRVFRGSAAGTGSVEYFVHYTLPDVLENKCGYKLCIYGRDLLPGQDAATVVESSIQNSRRQVFVLAPHMMHSKEFAYEQEIALHSALIQNNSKVILIEMEPMGEASRLQLGDLQDSLQHLVKMQGTIKWREDHVADKQSLSSKFWKHVRYQMPVPKRPPKMASVAAPLSGKVCLDLKHF

SEQ ID NO: 7962 - DNA, 2058 bp, Homo sapiens
  ref <308>: DATABASE ACCESSION NUMBER: EMBL / AB012701
  ref <309>: DATABASE ENTRY DATE: 2000-08-24
aaagagaggctggctgttgtatttagtaaagctataaagctgtaagagaaattggctttctgagttgtgaaactgtgggcagaaagttgaggaagaaagaactcaagtacaacccaatgaggttgagatataggctactcttcccaactcagtcttgaagagtatcaccaactgcctcatgtgtggtgaccttcactgtcgtatgccagtgactcatctggagtaatctcaacaacgagttaccaatacttgctcttgattgataaacagaatggggttttggatcttagcaattctcacaattctcatgtattccacagcagcaaagtttagtaaacaatcatggggcctggaaaatgaggctttaattgtaagatgtcctagacaaggaaaacctagttacaccgtggattggtattactcacaaacaaacaaaagtattcccactcaggaaagaaatcgtgtgtttgcctcaggccaacttctgaagtttctaccagctgaagttgctgattctggtatttatacctgtattgtcagaagtcccacattcaataggactggatatgcgaatgtcaccatatataaaaaacaatcagattgcaatgttccagattatttgatgtattcaacagtatctggatcagaaaaaaattccaaaatttattgtcctaccattgacctctacaactggacagcacctcttgagtggtttaagaattgtcaggctcttcaaggatcaaggtacagggcgcacaagtcatttttggtcattgataatgtgatgactgaggacgcaggtgattacacctgtaaatttatacacaatgaaaatggagccaattatagtgtgacggcgaccaggtccttcacggtcaaggatgagcaaggcttttctctgtttccagtaatcggagcccctgcacaaaatgaaataaaggaagtggaaattggaaaaaacgcaaacctaacttgctctgcttgttttggaaaaggcactcagttcttggctgccgtcctgtggcagcttaatggaacaaaaattacagactttggtgaaccaagaattcaacaagaggaagggcaaaatcaaagtttcagcaatgggctggcttgtctagacatggttttaagaatagctgacgtgaaggaagaggatttattgctgcagtacgactgtctggccctgaatttgcatggcttgagaaggcacaccgtaagactaagtaggaaaaatccaattgatcatcatagcatctactgcataattgcagtatgtagtgtatttttaatgctaatcaatgtcctggttatcatcctaaaaatgttctggattgaggccactctgctctggagagacatagctaaaccttacaagactaggaatgatggaaagctctatgatgcttatgttgtctacccacggaactacaaatccagtacagatggggccagtcgtgtagagcactttgttcaccagattctgcctgatgttcttgaaaataaatgtggctataccttatgcatttatgggagagatatgctacctggagaagatgtagtcactgcagtggaaaccaacatacgaaagagcaggcggcacattttcatcctgacccctcagatcactcacaataaggagtttgcctacgagcaggaggttgccctgcactgtgccctcatccagaacgacgccaaggtgatacttattgagatggaggctctgagcgagctggacatgctgcaggctgaggcgcttcaggactccctccagcatcttatgaaagtacaggggaccatcaagtggagggaggaccacattgccaataaaaggtccctgaattccaaattctggaagcacgtgaggtaccaaatgcctgtgccaagcaaaattcccagaaaggcctctagtttgactcccttggctgcccagaagcaatagtgcctgctgtgatgtgcaaagggatctgggtttgaagctttcctgacttctcctagctggcttatgcccctgcactgaagtgtgaggagcgggaatattaaagggattcaggccac

SEQ ID NO: 7963 - protein, 328 aa, Homo sapiens
  ref <308>: DATABASE ACCESSION NUMBER: SWISS-Prot / Q01638
  ref <309>: DATABASE ENTRY DATE: 2002-06-15
MGFWILAILTILMYSTAAKFSKQSWGLENEALIVRCPRQGKPSYTVDWYYSQTNKSIPTQERNRVFASGQLLKFLPAEVADSGIYTCIVRSPTFNRTGYANVTIYKKQSDCNVPDYLMYSTVSGSEKNSKIYCPTIDLYNWTAPLEWFKNCQALQGSRYRAHKSFLVIDNVMTEDAGDYTCKFIHNENGANYSVTATRSFTVKDEQGFSLFPVIGAPAQNEIKEVEIGKNANLTCSACFGKGTQFLAAVLWQLNGTKITDFGEPRIQQEEGQNQSFSNGLACLDMVLRIADVKEEDLLLQYDCLALNLHGLRRHTVRLSRKNPSKECF

SEQ ID NO: 7964 - DNA, 6801 bp, Rattus norvegicus
  ref <308>: DATABASE ACCESSION NUMBER: EMBL / U04998
  ref <309>: DATABASE ENTRY DATE: 1996-02-03
cctagaccctggccagtcaccggcgtcccctgtctcggtgttcccactctctgcaccctaagctgtacccctgcggctggcgaggggccgcggacccggctggagatgcgaatcctgcagagcttcctcgcgtgcgttcagctactgtgcgtgtgtcgcctggactgggcttatggatactacagacaacagagaaaacttgttgaagagattggctggtcctatacaggagcactaaatcaaaaaaattggggaaagaaatatccaatatgtaatagcccaaagcagtctcctattaatattgatgaagatcttacacaagtaaatgtgaatcttaagaaactgaaatttcagggttgggaaaaaccatccttggaaaacacgtttattcacaacactgggaaaacagtggaaataaatctcaccaatgactactatctcagtggaggactttcagaaaaggtcttcaaggcaagcaaaatgacttttcactgggggaaatgcaatgtgtcatcggaaggatcggaacacagcttagaagggcagaagtttccactcgagatgcaaatctactgcttcgatgcggaccgattttcaagttttgaggaaacagttaaaggaaaaggaaggttaagggctctatccattttatttgagattggagttgaagaaaatttggattacaaagccattattgatgggactgaaagtgttagtcgttttggaaagcaggctgccttagatccgttcatcttgcagaacctcctgccaaactccactgacaagtactacatttacaacggatcactgacatcccctccctgcacagacaccgtcgaatggattgtttttaaggatacagttagcatctctgaaagccagctggctgtattttgtgaagttctcacaatgcaacagtccgggtatgtcatgttgatggattacttacaaaacaatttccgagaacaacagtacaagttttccaggcaggtgttttcttcgtacactgggaaggaagagattcatgaagcagtgtgcagttcagaaccagaaaatgtgcaagctgaccctgagaattacaccagccttctgatcacatgggaaaggcctcgggttgtttatgacacaatgattgagaagtttgcggttctgtaccagccactggagggaaacgaccaaaccaagcatgagtttttaacagatggctatcaggacttgggtgccattctcaataacttaatacctaacatgagttatgtgctccaaatagtggccatatgctctaatggcctttatggaaagtacagtgaccaattgatagtcgacatgcctactgaggatgctgaacttgacctctttcctgaattaattggaactgaagaaataatcaaggaggaaaactatggaaaaggcaatgaagaagacactggcttgaatcccggtagagacagtgccacaaaccaaataaggaaaaaggaaccccaggtttctaccacaactcactataatcacatggggactaaatataatgaagccaagactaaccgatctccaacgagaggatctgaattctctggaaagagtgatgttctcaacacatccctgaatcctacttcccaacaggttgctgaattcaatccagaaagagaaatgtccttgccttctcagattggaactaacctgccaccacacagtgtggaaggcacctcagcctccttaaacagtggctctaaaactctccttgtcttcccacagatgaacttgtctgggactgcagaatccttaaatatggtttccataacagagtacaaagaggtgtctgctgacctcagtgaggaagaaaacttactgactgatttcaagctcgatagtggagcagatgattcgtcaggctctagccctgcatcctccactgtccccttttccacagataatctatcccatggatatacgtcttcttcagacacgcccgaggcggtcacgtatgatgtccttaggccagaatctacgagaaatgctctagaggattcggctccatcaggttcagaagaatcactaaaggatccctctcttgaagggagtgtgtggttccctggatccacagacctaacaacacagtctgagactggatctgggagagagggctttctccaagttaactccacggacttccaagttgatgaatcgagggagacaactgagacattttctccagatgctaccgcgtcccggggtccttcggtcacagatatggaaatgccacattattctacctttgcctaccccccgactgaagtaacatcacatgctttcactccgtcctccagaccacttgatttggctcccactagcaacatcctccattcgcagacaactcaaccagtatacaatggtgagacacctcttcaaccttcctacagtagtgaagtctttcctctagtcacccctttgttgcttgacaatcagaccctcaacactacccctgctgcttcaagtagtgattcggccttgcatgctacgcctgtattccccagtgttggtgtgtcatttgactccatcctgtcttcctatgatgatgcacctctgctcccattttcctctgcttccttcagtagtgacttgtttcaccatctgcatacggtttctcaaacccttccgcaagttacttcagctgctgagagggatgagctgtctttgcatgcttctctgctggtggctgggggtgatttgctgttagagcccagccttgttcagtattctgatgtgatgtcacatcaggtcactattcatgctgcttcggacacattggaatttggtagtgagtctgctgtcctttataaaacgtctatggtttctcaaatcgaatcacccagcagtgatgtcgttatgcatgcatattcgtcagggcctgaaacttcttatgccattgagggctcccaccacgtgctcactgtttcttccagttctgcaatacctgtgcatgattctgtcggtgtagctgatcaggggtccttacttatcaatcctagccatatatcactgcctgagtcctcatttattactccaactgcatcattactgcagcttcctcctgccctctctggtgatggggagtggtctggagcctcctctgatagtgaattgcttttacctgacacagatgggctgagaactcttaacatgtcttcacctgtttctgtagctgattttacatacacgacatctgtgtctggcgatgatattaagccgctttctaaaggtgaaatgatgtatggaaatgagaccgaactgaaaatgtcttctttcagtgacatggcatacccttctaaaagcacagtcgtgccaaagatgtctgatattgtaaataagtggagtgaatctttaaaagaaacctctgtttccgtatctagcataaacagcgtgtttacagagtctcttgtttatcccataactaaggtttttgatcaggagattagtcgagttccagagattatcttcccagttaaacctacacacacagcatctcaagcatctggtgacacttggcttaaacccgggcttagcacaaactcagagcctgcgctctctgacactgcttctagtgaagtatcacacccttcaacacagcccttgctctatgaggccgcatctccttttaatacggaagcattgctgcaaccttcctttccggcttctgatgttgacaccttgcttaaaactgcccttccctctgggcctcgtgatccagtgctgactgaaacccccatggttgagcaaagtagctcttccgtatctcttcccctggcatcagagtctgcttcaagcaaaagcacgctgcactttacatctgtaccagttctcaatatgtcaccttctgatgtgcaccccacttcacttcaacgcttaacagttcctcactcgagggaggaatattttgaacaaggtttgcttaagagcaaaagtccccagcaagtcctgccgtccttgcacagccatgacgagtttttccaaactgcacatctggacattagccaggcctaccctccaaaaggaaggcatgcatttgctactcctattttatcaatcaatgaaccacaaaatacacttataaacaggcttgtgtattctgaggacattttcatgcaccctgaaatttctattactgataaggcacttactggtctaccaacgaccgtttctgatgtacttatagctactgaccattctgttccattaggaagtgggcccatttccatgacaactgtttctcccaacagagatgattctgtgaccacaaccaagttgcttcttccttctaaagctacttctaagccgactcatagtgccagatctgatgccgatttagtaggaggtggtgaagatggtgatgactatgatgatgatgattatgatgacatagatagtgatcgctttcccgtaaataagtgtatgtcatgttcaccctatagagaatcacaggaaaaggtaatgaatgactcggacacccaagaaagcagtcttgtggatcagagtgacccaatttcacatttgctctctgagaataccgaagaagaaaatggaggcacgggtgtaactagggtggataaaagtcctgataagtcaccaccaccaagtatgctaccccagaagcacaatgatggaagagaggaccgtgacattcagatgggtagtgctgtccttcctcacaccccaggatctaaagcatgggcagttttgacaagtgatgaagagagtgggtcagggcaaggcacctcagatagccttaatgataatgagacttccacagatttcagtttcccagatgttaatgaaaaggatgctgatggtgtcctggaagcagatgacacaggcatagctccgggatctccacggtcctccacaccatctgttactagtgggcattcaggagtatccaacagttcagaggcaggttagttatgagcaaagggatagaacgagatgtgctgattttcttgctatgaaagtaaaaatagaagagtcacggaagaaaagaattctggtccaccagcagatcttcactttctaatcagaacgttcaatacatttatagctcttataaatatggttttactcatgatttcgaatgaatatccaacatattttggttattgatttttattatcttcaaaatgcattgtgtgctgttactaatccctattcctattgtgtgtagtatcaactatgtatgcataatacgccattagaatattacaacgcagtgtgctgtgttaagacagtttaaatgttcatacttgtattctgaaacaagttgtacacaaactctattggatttaaaatctcagtaatatgctataagcacccatccaccaatggtggacacttcacatgtgcacaacagcttggagagcttctcaaaagaactacagggctaagatttgatagctaaggaaggtttttataaacatcatactgcttttaaactatccttgagcttcttttttgttgcctaaagagggcagtataaaccaccaaaatacattctactttgtgtttgttacagtattccaacttactaatcgacatgaatatgcagaagatgcataggtattgtatgacaagatgtaaaagaaaaagcctacagccttttctgtagagatgcatttcattgttaatatattttatgcaaatgggtttattagccagatgtttcttggagcagactgcaacctagaatacagatgtgtgctttaaatgtcaatggtaacaaaattcgaaattccattaagtgtttaaaaaaaaaactaggtgattccattgaattcacggcaagaattttataatttgctttgattaagtgatgaggtttttttttaatgcacaaggaaagtatttaaatcttagcaagtcaaaagataagataatgtataatgtgacattgggtaataattgcacagagcttaatattaaaaatccacagtatagagccaatctcattaaaatatatattctctttgttattttcatcattcacattagttgtaaactctttagtatggcagcaattaagagattatatatttagataagacagtttctttcttttctgtattctgacgtgatctccacttaacgttgaatttcagcttcaatatatgaactgatgtgtgagaaggagtaatgagtccatgggtcactgtagtcaggaatgttgttacatatgtgaattgttatctgtcctcaattatagcacttgtttttctttctatatttttagatttatctgaaagggaaagatcgtgaacatactctaatggacagaccatgcatatacatatatcccaaagcactatatctagaattatcgaagaaagttatttctcttagatgtactaattagatttatttaactgttaagagtaagttcccccactaatgaaaacacagcaatatggataaaacatccatcttcaggaaataatacagttaatgaagggagtaggatcaaatagaattagggaaaacaatttttacctgtttttaaagctgtatctgtaaaactaattcaaagtcagtcttatccaattattgaatattccctagtctgaaactcatcatttatggtacttctaaattgtagaaaaactgacatgatgtttcctaaactaatataaatagggcaaatatagatgagagtgaacaaagactgtaagatacttgctctggttcacataaagagtccatccaaaactaaccctgggaatgtattattagtgtctgtctcttagaacatgcttacat

SEQ ID NO: 7965 - protein, 2316 aa, Rattus norvegicus
  ref <308>: DATABASE ACCESSION NUMBER: SWISS-Prot / Q62656
  ref <309>: DATABASE ENTRY DATE: 2002-06-15
MRILQSFLACVQLLCVCRLDWAYGYYRQQRKLVEEIGWSYTGALNQKNWGKKYPICNSPKQSPINIDEDLTQVNVNLKKLKFQGWEKPSLENTFIHNTGKTVEINLTNDYYLSGGLSEKVFKASKMTFHWGKCNVSSEGSEHSLEGQKFPLEMQIYCFDADRFSSFEETVKGKGRLRALSILFEIGVEENLDYKAIIDGTESVSRFGKQAALDPFILQNLLPNSTDKYYIYNGSLTSPPCTDTVEWIVFKDTVSISESQLAVFCEVLTMQQSGYVMLMDYLQNNFREQQYKFSRQVFSSYTGKEEIHEAVCSSEPENVQADPENYTSLLITWERPRVVYDTMIEKFAVLYQPLEGNDQTKHEFLTDGYQDLGAILNNLIPNMSYVLQIVAICSNGLYGKYSDQLIVDMPTEDAELDLFPELIGTEEIIKEENYGKGNEEDTGLNPGRDSATNQIRKKEPQVSTTTHYNHMGTKYNEAKTNRSPTRGSEFSGKSDVLNTSLNPTSQQVAEFNPEREMSLPSQIGTNLPPHSVEGTSASLNSGSKTLLVFPQMNLSGTAESLNMVSITEYKEVSADLSEEENLLTDFKLDSGADDSSGSSPASSTVPFSTDNLSHGYTSSSDTPEAVTYDVLRPESTRNALEDSAPSGSEESLKDPSLEGSVWFPGSTDLTTQSETGSGREGFLQVNSTDFQVDESRETTETFSPDATASRGPSVTDMEMPHYSTFAYPPTEVTSHAFTPSSRPLDLAPTSNILHSQTTQPVYNGETPLQPSYSSEVFPLVTPLLLDNQTLNTTPAASSSDSALHATPVFPSVGVSFDSILSSYDDAPLLPFSSASFSSDLFHHLHTVSQTLPQVTSAAERDELSLHASLLVAGGDLLLEPSLVQYSDVMSHQVTIHAASDTLEFGSESAVLYKTSMVSQIESPSSDVVMHAYSSGPETSYAIEGSHHVLTVSSSSAIPVHDSVGVADQGSLLINPSHISLPESSFITPTASLLQLPPALSGDGEWSGASSDSELLLPDTDGLRTLNMSSPVSVADFTYTTSVSGDDIKPLSKGEMMYGNETELKMSSFSDMAYPSKSTVVPKMSDIVNKWSESLKETSVSVSSINSVFTESLVYPITKVFDQEISRVPEIIFPVKPTHTASQASGDTWLKPGLSTNSEPALSDTASSEVSHPSTQPLLYEAASPFNTEALLQPSFPASDVDTLLKTALPSGPRDPVLTETPMVEQSSSSVSLPLASESASSKSTLHFTSVPVLNMSPSDVHPTSLQRLTVPHSREEYFEQGLLKSKSPQQVLPSLHSHDEFFQTAHLDISQAYPPKGRHAFATPILSINEPQNTLINRLVYSEDIFMHPEISITDKALTGLPTTVSDVLIATDHSVPLGSGPISMTTVSPNRDDSVTTTKLLLPSKATSKPTHSARSDADLVGGGEDGDDYDDDDYDDIDSDRFPVNKCMSCSPYRESQEKVMNDSDTQESSLVDQSDPISHLLSENTEEENGGTGVTRVDKSPDKSPPPSMLPQKHNDGREDRDIQMGSAVLPHTPGSKAWAVLTSDEESGSGQGTSDSLNDNETSTDFSFPDVNEKDADGVLEADDTGIAPGSPRSSTPSVTSGHSGVSNSSEAEASNSSHESRIGLAEGLESEKKAVIPLVIVSALTFICLVVLVGILIYWRKCFQTAHFYLEDNTSPRVISTPPTPIFPISDDIGAIPIKHFPKHVADLHASNGFTEEFETLKEFYQEVQSCTVDLGITADSSNHPDNKHKNRYVNIVAYDHSRVKLTQLAEKDGKLTDYINANYVDGYNRPKAYIAAQGPLKSTAEDFWRMIWEHNVEVIVMITNLVEKGRRKCDQYWPTDGSEEYGSFLVNQKNVQVLAYYTVRNFTLRNTKIKKGSQKGRSSGRLVTQYHYTQWPDMGVPEYSLPVLAFVRKTAQAKRHAVGPVVVHCSAGVGRTGTYIVLDSMLQQIQHEGTVNIFGFLKHIRSQRNYLVQTEEQYVFIHDTLVEAILSKETEVPDSHIHSYVNTLLIPGPSGKTKLEKQFQLLSQSNILQSDYSTALKQCNREKNRTSSIIPVERSRVGISSLSGEGTDYINASYIMGYYQSNEFIITQHPLLHTIKDFWRMIWDHNAQLVVMIPDGQNMAEDEFVYWPNKDEPINCESFKVTLMSEEHKCLSNEEKLIVQDFILEATQDDYVLEVRHFQCPKWPNPDSPISKTFELISIIKEEAANRDGPMIVHDEHGGVTAGTFCALTTLMHQLEKENSMDVYQVAKMINLMRPGVFTDIEQYQFLYKVVLSLVSTRQEENPSTSLDSNGAALPDGNIAESLESLV

SEQ ID NO: 7966 - DNA, 7941 bp, Homo sapiens
  ref <308>: DATABASE ACCESSION NUMBER: EMBL / M93426
  ref <309>: DATABASE ENTRY DATE: 2000-03-04
cacacatacgcacgcacgatctcacttcgatctatacactggaggattaaaacaaacaaacaaaaaaaacatttccttcgctccccctccctctccactctgagaagcagaggagccgcacggcgaggggccgcagaccgtctggaaatgcgaatcctaaagcgtttcctcgcttgcattcagctcctctgtgtttgccgcctggattgggctaatggatactacagacaacagagaaaacttgttgaagagattggctggtcctatacaggagcactgaatcaaaaaaattggggaaagaaatatccaacatgtaatagcccaaaacaatctcctatcaatattgatgaagatcttacacaagtaaatgtgaatcttaagaaacttaaatttcagggttgggataaaacatcattggaaaacacattcattcataacactgggaaaacagtggaaattaatctcactaatgactaccgtgtcagcggaggagtttcagaaatggtgtttaaagcaagcaagataacttttcactggggaaaatgcaatatgtcatctgatggatcagagcatagtttagaaggacaaaaatttccacttgagatgcaaatctactgctttgatgcggaccgattttcaagttttgaggaagcagtcaaaggaaaagggaagttaagagctttatccattttgtttgaggttgggacagaagaaaatttggatttcaaagcgattattgatggagtcgaaagtgttagtcgttttgggaagcaggctgctttagatccattcatactgttgaaccttctgccaaactcaactgacaagtattacatttacaatggctcattgacatctcctccctgcacagacacagttgactggattgtttttaaagatacagttagcatctctgaaagccagttggctgttttttgtgaagttcttacaatgcaacaatctggttatgtcatgctgatggactacttacaaaacaattttcgagagcaacagtacaagttctctagacaggtgttttcctcatacactggaaaggaagagattcatgaagcagtttgtagttcagaaccagaaaatgttcaggctgacccagagaattataccagccttcttgttacatgggaaagacctcgagtcgtttatgataccatgattgagaagtttgcagttttgtaccagcagttggatggagaggaccaaaccaagcatgaatttttgacagatggctatcaagacttgggtgctattctcaataatttgctacccaatatgagttatgttcttcagatagtagccatatgcactaatggcttatatggaaaatacagcgaccaactgattgtcgacatgcctactgataatcctgaacttgatcttttccctgaattaattggaactgaagaaataatcaaggaggaggaagagggaaaagacattgaagaaggcgctattgtgaatcctggtagagacagtgctacaaaccaaatcaggaaaaaggaaccccagatttctaccacaacacactacaatcgcatagggacgaaatacaatgaagccaagactaaccgatccccaacaagaggaagtgaattctctggaaagggtgatgttcccaatacatctttaaattccacttcccaaccagtcactaaattagccacagaaaaagatatttccttgacttctcagactgtgactgaactgccacctcacactgtggaaggtacttcagcctctttaaatgatggctctaaaactgttcttagatctccacatatgaacttgtcggggactgcagaatccttaaatacagtttctataacagaatatgaggaggagagtttattgaccagtttcaagcttgatactggagctgaagattcttcaggctccagtcccgcaacttctgctatcccattcatctctgagaacatatcccaagggtatatattttcctccgaaaacccagagacaataacatatgatgtccttataccagaatctgctagaaatgcttccgaagattcaacttcatcaggttcagaagaatcactaaaggatccttctatggagggaaatgtgtggtttcctagctctacagacataacagcacagcccgatgttggatcaggcagagagagctttctccagactaattacactgagatacgtgttgatgaatctgagaagacaaccaagtccttttctgcaggcccagtgatgtcacagggtccctcagttacagatctggaaatgccacattattctacctttgcctacttcccaactgaggtaacacctcatgcttttaccccatcctccagacaacaggatttggtctccacggtcaacgtggtatactcgcagacaacccaaccggtatacaatggtgagacacctcttcaaccttcctacagtagtgaagtctttcctctagtcacccctttgttgcttgacaatcagatcctcaacactacccctgctgcttcaagtagtgattcggccttgcatgctacgcctgtatttcccagtgtcgatgtgtcatttgaatccatcctgtcttcctatgatggtgcacctttgcttccattttcctctgcttccttcagtagtgaattgtttcgccatctgcatacagtttctcaaatccttccacaagttacttcagctaccgagagtgataaggtgcccttgcatgcttctctgccagtggctgggggtgatttgctattagagcccagccttgctcagtattctgatgtgctgtccactactcatgctgcttcagagacgctggaatttggtagtgaatctggtgttctttataaaacgcttatgttttctcaagttgaaccacccagcagtgatgccatgatgcatgcacgttcttcagggcctgaaccttcttatgccttgtctgataatgagggctcccaacacatcttcactgtttcttacagttctgcaatacctgtgcatgattctgtgggtgtaacttatcagggttccttatttagcggccctagccatataccaatacctaagtcttcgttaataaccccaactgcatcattactgcagcctactcatgccctctctggtgatggggaatggtctggagcctcttctgatagtgaatttcttttacctgacacagatgggctgacagcccttaacatttcttcacctgtttctgtagctgaatttacatatacaacatctgtgtttggtgatgataataaggcgctttctaaaagtgaaataatatatggaaatgagactgaactgcaaattccttctttcaatgagatggtttacccttctgaaagcacagtcatgcccaacatgtatgataatgtaaataagttgaatgcgtctttacaagaaacctctgtttccatttctagcaccaagggcatgtttccagggtcccttgctcataccaccactaaggtttttgatcatgagattagtcaagttccagaaaataacttttcagttcaacctacacatactgtctctcaagcatctggtgacacttcgcttaaacctgtgcttagtgcaaactcagagccagcatcctctgaccctgcttctagtgaaatgttatctccttcaactcagctcttattttatgagacctcagcttcttttagtactgaagtattgctacaaccttcctttcaggcttctgatgttgacaccttgcttaaaactgttcttccagctgtgcccagtgatccaatattggttgaaacccccaaagttgataaaattagttctacaatgttgcatctcattgtatcaaattctgcttcaagtgaaaacatgctgcactctacatctgtaccagtttttgatgtgtcgcctacttctcatatgcactctgcttcacttcaaggtttgaccatttcctatgcaagtgagaaatatgaaccagttttgttaaaaagtgaaagttcccaccaagtggtaccttctttgtacagtaatgatgagttgttccaaacggccaatttggagattaaccaggcccatcccccaaaaggaaggcatgtatttgctacacctgttttatcaattgatgaaccattaaatacactaataaataagcttatacattccgatgaaattttaacctccaccaaaagttctgttactggtaaggtatttgctggtattccaacagttgcttctgatacatttgtatctactgatcattctgttcctataggaaatgggcatgttgccattacagctgtttctccccacagagatggttctgtaacctcaacaaagttgctgtttccttctaaggcaacttctgagctgagtcatagtgccaaatctgatgccggtttagtgggtggtggtgaagatggtgacactgatgatgatggtgatgatgatgatgacagagatagtgatggcttatccattcataagtgtatgtcatgctcatcctatagagaatcacaggaaaaggtaatgaatgattcagacacccacgaaaacagtcttatggatcagaataatccaatctcatactcactatctgagaattctgaagaagataatagagtcacaagtgtatcctcagacagtcaaactggtatggacagaagtcctggtaaatcaccatcagcaaatgggctatcccaaaagcacaatgatggaaaagaggaaaatgacattcagactggtagtgctctgcttcctctcagccctgaatctaaagcatgggcagttctgacaagtgatgaagaaagtggatcagggcaaggtacctcagatagccttaatgagaatgagacttccacagatttcagttttgcagacactaatgaaaaagatgctgatgggatcctggcagcaggtgactcagaaataactcctggattcccacagtccccaacatcatctgttactagcgagaactcagaagtgttccacgtttcagaggcagaggccagtaatagtagccatgagtctcgtattggtctagctgaggggttggaatccgagaagaaggcagttataccccttgtgatcgtgtcagccctgacttttatctgtctagtggttcttgtgggtattctcatctactggaggaaatgcttccagactgcacacttttacttagaggacagtacatcccctagagttatatccacacctccaacacctatctttccaatttcagatgatgtcggagcaattccaataaagcactttccaaagcatgttgcagatttacatgcaagtagtgggtttactgaagaatttgagacactgaaagagttttaccaggaagtgcagagctgtactgttgacttaggtattacagcagacagctccaaccacccagacaacaagcacaagaatcgatacataaatatcgttgcctatgatcatagcagggttaagctagcacagcttgctgaaaaggatggcaaactgactgattatatcaatgccaattatgttgatggctacaacagaccaaaagcttatattgctgcccaaggcccactgaaatccacagctgaagatttctggagaatgatatgggaacataatgtggaagttattgtcatgataacaaacctcgtggagaaaggaaggagaaaatgtgatcagtactggcctgccgatgggagtgaggagtacgggaactttctggtcactcagaagagtgtgcaagtgcttgcctattatactgtgaggaattttactctaagaaacacaaaaataaaaaagggctcccagaaaggaagacccagtggacgtgtggtcacacagtatcactacacgcagtggcctgacatgggagtaccagagtactccctgccagtgctgacctttgtgagaaaggcagcctatgccaagcgccatgcagtggggcctgttgtcgtccactgcagtgctggagttggaagaacaggcacatatattgtgctagacagtatgttgcagcagattcaacacgaaggaactgtcaacatatttggcttcttaaaacacatccgttcacaaagaaattatttggtacaaactgaggagcaatatgtcttcattcatgatacactggttgaggccatacttagtaaagaaactgaggtgctggacagtcatattcatgcctatgttaatgcactcctcattcctggaccagcaggcaaaacaaagctagagaaacaattccagctcctgagccagtcaaatatacagcagagtgactattctgcagccctaaagcaatgcaacagggaaaagaatcgaacttcttctatcatccctgtggaaagatcaagggttggcatttcatccctgagtggagaaggcacagactacatcaatgcctcctatatcatgggctattaccagagcaatgaattcatcattacccagcaccctctccttcataccatcaaggatttctggaggatgatatgggaccataatgcccaactggtggttatgattcctgatggccaaaacatggcagaagatgaatttgtttactggccaaataaagatgagcctataaattgtgagagctttaaggtcactcttatggctgaagaacacaaatgtctatctaatgaggaaaaacttataattcaggactttatcttagaagctacacaggatgattatgtacttgaagtgaggcactttcagtgtcctaaatggccaaatccagatagccccattagtaaaacttttgaacttataagtgttataaaagaagaagctgccaatagggatgggcctatgattgttcatgatgagcatggaggagtgacggcaggaactttctgtgctctgacaacccttatgcaccaactagaaaaagaaaattccgtggatgtttaccaggtagccaagatgatcaatctgatgaggccaggagtctttgctgacattgagcagtatcagtttctctacaaagtgatcctcagccttgtgagcacaaggcaggaagagaatccatccacctctctggacagtaatggtgcagcattgcctgatggaaatatagctgagagcttagagtctttagtttaacacagaaaggggtggggggactcacatctgagcattgttttcctcttcctaaaattaggcaggaaaatcagtctagttctgttatctgttgatttcccatcacctgacagtaactttcatgacataggattctgccgccaaatttatatcattaacaatgtgtgcctttttgcaagacttgtaatttacttattatgtttgaactaaaatgattgaattttacagtatttctaagaatggaattgtggtatttttttctgtattgattttaacagaaaatttcaatttatagaggttaggaattccaaactacagaaaatgtttgtttttagtgtcaaatttttagctgtatttgtagcaattatcaggtttgctagaaatataacttttaatacagtagcctgtaaataaaacactcttccatatgatattcaacattttacaactgcagtattcacctaaagtagaaataatctgttacttattgtaaatactgccctagtgtctccatggaccaaatttatatttataattgtagatttttatattttactactgagtcaagttttctagttctgtgtaattgtttagtttaatgacgtagttcattagctggtcttactctaccagttttctgacattgtattgtgttacctaagtcattaactttgtttcagcatgtaattttaacttttgtggaaaatagaaataccttcattttgaaagaagtttttatgagaataacaccttaccaaacattgttcaaatggtttttatccaaggaattgcaaaaataaatataaatattgccattaaaaaaaaaaaaaaaaaaaaaaaaaaaaaaaaaaa

SEQ ID NO: 7967 - protein, 2314 aa, Homo sapiens
  ref <308>: DATABASE ACCESSION NUMBER: SWISS-Prot / P23471
  ref <309>: DATABASE ENTRY DATE: 2002-06-15
MRILKRFLACIQLLCVCRLDWANGYYRQQRKLVEEIGWSYTGALNQKNWGKKYPTCNSPKQSPINIDEDLTQVNVNLKKLKFQGWDKTSLENTFIHNTGKTVEINLTNDYRVSGGVSEMVFKASKITFHWGKCNMSSDGSEHSLEGQKFPLEMQIYCFDADRFSSFEEAVKGKGKLRALSILFEVGTEENLDFKAIIDGVESVSRFGKQAALDPFILLNLLPNSTDKYYIYNGSLTSPPCTDTVDWIVFKDTVSISESQLAVFCEVLTMQQSGYVMLMDYLQNNFREQQYKFSRQVFSSYTGKEEIHEAVCSSEPENVQADPENYTSLLVTWERPRVVYDTMIEKFAVLYQQLDGEDQTKHEFLTDGYQDLGAILNNLLPNMSYVLQIVAICTNGLYGKYSDQLIVDMPTDNPELDLFPELIGTEEIIKEEEEGKDIEEGAIVNPGRDSATNQIRKKEPQISTTTHYNRIGTKYNEAKTNRSPTRGSEFSGKGDVPNTSLNSTSQPVTKLATEKDISLTSQTVTELPPHTVEGTSASLNDGSKTVLRSPHMNLSGTAESLNTVSITEYEEESLLTSFKLDTGAEDSSGSSPATSAIPFISENISQGYIFSSENPETITYDVLIPESARNASEDSTSSGSEESLKDPSMEGNVWFPSSTDITAQPDVGSGRESFLQTNYTEIRVDESEKTTKSFSAGPVMSQGPSVTDLEMPHYSTFAYFPTEVTPHAFTPSSRQQDLVSTVNVVYSQTTQPVYNGETPLQPSYSSEVFPLVTPLLLDNQILNTTPAASSSDSALHATPVFPSVDVSFESILSSYDGAPLLPFSSASFSSELFRHLHTVSQILPQVTSATESDKVPLHASLPVAGGDLLLEPSLAQYSDVLSTTHAASETLEFGSESGVLYKTLMFSQVEPPSSDAMMHARSSGPEPSYALSDNEGSQHIFTVSYSSAIPVHDSVGVTYQGSLFSGPSHIPIPKSSLITPTASLLQPTHALSGDGEWSGASSDSEFLLPDTDGLTALNISSPVSVAEFTYTTSVFGDDNKALSKSEIIYGNETELQIPSFNEMVYPSESTVMPNMYDNVNKLNASLQETSVSISSTKGMFPGSLAHTTTKVFDHEISQVPENNFSVQPTHTVSQASGDTSLKPVLSANSEPASSDPASSEMLSPSTQLLFYETSASFSTEVLLQPSFQASDVDTLLKTVLPAVPSDPILVETPKVDKISSTMLHLIVSNSASSENMLHSTSVPVFDVSPTSHMHSASLQGLTISYASEKYEPVLLKSESSHQVVPSLYSNDELFQTANLEINQAHPPKGRHVFATPVLSIDEPLNTLINKLIHSDEILTSTKSSVTGKVFAGIPTVASDTFVSTDHSVPIGNGHVAITAVSPHRDGSVTSTKLLFPSKATSELSHSAKSDAGLVGGGEDGDTDDDGDDDDDRDSDGLSIHKCMSCSSYRESQEKVMNDSDTHENSLMDQNNPISYSLSENSEEDNRVTSVSSDSQTGMDRSPGKSPSANGLSQKHNDGKEENDIQTGSALLPLSPESKAWAVLTSDEESGSGQGTSDSLNENETSTDFSFADTNEKDADGILAAGDSEITPGFPQSPTSSVTSENSEVFHVSEAEASNSSHESRIGLAEGLESEKKAVIPLVIVSALTFICLVVLVGILIYWRKCFQTAHFYLEDSTSPRVISTPPTPIFPISDDVGAIPIKHFPKHVADLHASSGFTEEFETLKEFYQEVQSCTVDLGITADSSNHPDNKHKNRYINIVAYDHSRVKLAQLAEKDGKLTDYINANYVDGYNRPKAYIAAQGPLKSTAEDFWRMIWEHNVEVIVMITNLVEKGRRKCDQYWPADGSEEYGNFLVTQKSVQVLAYYTVRNFTLRNTKIKKGSQKGRPSGRVVTQYHYTQWPDMGVPEYSLPVLTFVRKAAYAKRHAVGPVVVHCSAGVGRTGTYIVLDSMLQQIQHEGTVNIFGFLKHIRSQRNYLVQTEEQYVFIHDTLVEAILSKETEVLDSHIHAYVNALLIPGPAGKTKLEKQFQLLSQSNIQQSDYSAALKQCNREKNRTSSIIPVERSRVGISSLSGEGTDYINASYIMGYYQSNEFIITQHPLLHTIKDFWRMIWDHNAQLVVMIPDGQNMAEDEFVYWPNKDEPINCESFKVTLMAEEHKCLSNEEKLIIQDFILEATQDDYVLEVRHFQCPKWPNPDSPISKTFELISVIKEEAANRDGPMIVHDEHGGVTAGTFCALTTLMHQLEKENSVDVYQVAKMINLMRPGVFADIEQYQFLYKVILSLVSTRQEENPSTSLDSNGAALPDGNIAESLESLV

SEQ ID NO: 7968 - DNA, 6801 bp, Rattus norvegicus; identical to SEQ ID NO: 7964
  ref <308>: DATABASE ACCESSION NUMBER: EMBL / U04998
  ref <309>: DATABASE ENTRY DATE: 1996-02-03

SEQ ID NO: 7969 - protein, 2316 aa, Rattus norvegicus; identical to SEQ ID NO: 7965
  ref <308>: DATABASE ACCESSION NUMBER: SWISS-Prot / Q62656
  ref <309>: DATABASE ENTRY DATE: 2002-06-15

SEQ ID NO: 7970 - DNA, 7941 bp, Homo sapiens; identical to SEQ ID NO: 7966
  ref <308>: DATABASE ACCESSION NUMBER: EMBL / M93426
  ref <309>: DATABASE ENTRY DATE: 2000-03-04

SEQ ID NO: 7971 - protein, 2314 aa, Homo sapiens; identical to SEQ ID NO: 7967
  ref <308>: DATABASE ACCESSION NUMBER: SWISS-Prot / P23471
  ref <309>: DATABASE ENTRY DATE: 2002-06-15

SEQ ID NO: 7972 - DNA, 14984 bp, Rattus norvegicus
  misc_feature (1)..(14984): n=a, c, g or t
  ref <308>: DATABASE ACCESSION NUMBER: EMBL / U05013
  ref <309>: DATABASE ENTRY DATE: 2000-03-04
aagcttgtgctttaactatagccacatccttgtgatgcctcttgtctggtgtagccagtaggcttctctgttgttgaccgatctgttagcttttgtcaagtgcttgatattgttgaggctcatctctcagtaccccgtctgtggagctcatcctcagtaccccatgtctggcctcttgtgtgttgtgatagcacacatggtggactgctgtcgagaaggtgtctgggcatatctgctgttagagctgctgaactcatttcccagagacttcagatggaggagactcgcttcaggccgtagatagtgtagtgtgatacaaacgctgaaatgtgtacctaaatcaatagtctagactactcatgtaaatggcagatggctgtggggttggaaagactatatctgggaatctaccacttaggaaaataacacaaaatttctgatgtagatcaagtaaatgcatggcagcagctgtttcttcttcctctcaatccttggaagtaacatcgaggagcctagtgcaaagttctgctaagtaatcactgtcactattgggtttgtttttttttaatttttaaatattattacgaggtatattgcaagtactttatgctaacagtggatgattatgaatttatcttaaaaatttgacgatacatagatcatttgataggatggttgtcttatatacataaggttctgatttcagtcctcagcaaaaaaaaaaaaaggttgattgtattaaagtacattcctgtatattggtctgcattgagtgttgcattgagtgtttttaaacccactcagtcacctacccacccacatcacacacacagctccatacacacagggtttctctgtgtagttctggctgtcctgggatttactcggagtccaggttggcctcaaactcagagatccacctgcttctgcttcccaagtgctgggattaaaggctctcaccaccactgtcccgaatcttatttttaattatgtgtgtatacatctgagtgttggtgtggtgcctgcagaggccaggagagggcgtcagattcccaggagctagagttattggtggctgtgaatactgaacagagtgaatcagtttctcaccaagaacagtctgtgctcttaattgctgaaccatctctccagctccagagctttttgtcatagaagaaagttgatgagtctgtacttgggtgtcttcctgtgggacatagttgtctgtatgtaaatcaacccttatttgatgagaacacagttgaagacccccactcctagagattcctggtgccttgctcattaaggtggaaaagtatgagatgaagtcagtctgacagcccctcaagtataggctgttctaagaaattcagccgttttattctcatccgtcagctgtgctttattcttaactgccatagctaccaagctgtgtaaacctaaaacagccattggaagtacttgatcttgtcaggaatgtcactgttaggaagtctcgaataatcccatactctgaagggccctaggaagtcatgtacgtnccttgcaaaaactagatgaatgtagaaggtaccagttgataaagtcttattctgtgaaggttgctgatcttacagaacttttctctcacccctcttaccctaccatttccaaacatacattttcttaaaaaaatttaaaattaggtttattcattttttttttagttttatgtgtatatatatgtatgtgtaccatttacattcctggtgcccacaggggttcagaatagggcattggattcccctggactggagttaaagatggtgtgaactaccatgtgtgcactgagaaatgaacccaggccctctgtaagagagcaagtgctcttagccccatcagtatatatacattttcagaagcaggtaggactgcttagatttttaagtaatcactacacagttgacacaaagatggttccctccctccctctctctcacatagctctgcctgcctgtttcccaactactgggattaaaagccttcaaccaccacctccctgatacacactgagatccctggagctcaccgagagttctcattctcagaatcaccactccagagtgattcttgtaactagatctttgtttctctcaatcactatggcaactagtgctatagagatgtggagaccctattgtgacctctttagtgttggttagctctgattttattatccactaaggcctgataagtctggctatttctctccaggcacggagtgttggggtgtgccatctcccctttgggaccaccttgggttgccctcttagcaaagttggccttaccaaggagcagtcatcttggattatataatttgaatgagccaaggtaggtgtttgagagacaggaagtaacaactctgtgtgtgtgtgtgtgtgtgtgtgtgtgcgcgcggcgcgcatgtgcatgcccaagtgcctgcaagcatatgagaccagagnacactgggtgccttctcagtcttgggtcacacttagttgttgaaacaggtttctcactaaatttgtggctcattgatgtggttagctggctggttagtgagctccagggatctgcctttctcctcaccctcagaactgaagccatagatatgccactgtttctatgtgggtcatgagatctgaatgcaggtccttgttgtttttacccaccaagctgtgtcctcagcccccagcaaagcatttatatctcagaaatcatagggtcatgcttttcatcctgaaacaaactatagtttattaccttcctgtaggaataaatagtgtagtctggcagtgtacctcagtttctgtgtagcctggagtgtgtggtaacactaactcacacgtgtgaaccagtgaaaactgttggggacacaggaagaaccttttaccttctgaatgactcgggtttagttccaacttgactgttaggtgtttcatgtagccaaagctggcctcttatttactttgtagccaagaatgaccttgaagttttggtcttccggcttctccctccaccctcagagtgctaggattatgtaccagactgtaccagcatgctccatatgcagtgctggggatttaacccaggactttgtcttatgctgggcaaacactgtacagctgagccacagcccaaccgaatcaaattttagtccatcttccctctcttaagtagactaaggaacaacgccaggcctctgcgcttgttcattagcgtcttctcttagattattatgtgtcattgtatagatctgtcatgctatgccttgtggtcctctcgtcgttttcccctacagaagaatagcttctcaacgcgtttttagtgttactggagaggaaagtatctgggagctgggttgcattggagcatctaatcgctgactttttccctccaactagaaatagtgattcttatagggaccactatcagctcaggacaccccaagaccaggttctcagcacagagatgtatttgccctagaggtctaggaataagagacaaagataggagagaggatgaggagaagagagagggggaagggatatttgtcatgggggacaaaagacagcctctggatagagaggacacagatgtagctcataggcaaatcgtgttaggatgaggtgtttaattttaactgagcatgttaattaagtgagccaaagaggttttgattgattactgacttcaatactttgataggtggaagttggtattcagctcaggaagagaagtggcctaatgagggaatgatgatatcacacacacacacacacacacacacacacacacacacacacacacacacacacacacacgtactttaacatacatgtagggagcaggaggagtatgctgttgatttcatttattgtaggaatgcctacactccgtccctccctcccccctggtttgtgatgataagtaagcttcttgtttaactgggggtggttacatagggcaagatggtgccagttctatataggagtaaaatcttgaactgtagacagccttctaggaagcaggcagggattcacaatgttgataagtctgatactgagcagaaatctattcagagggaattatgatcaagtcttggtgaggaatgcttacaacagccacttagcctcccttcccatatgagaataacggtgacttgtactgtggacataaactcattgttgctgggtgccactacttaatgagtcaggcttacaacgttggtctcattccagggagcaggtaactctgacagtccttttccgtgtctcgaacctgctcctttccttcagatagaatgatacaagaagtctttattattcttagatcatcagattgagaaatgaaccatgatatagtccttagttacatttcgctagcagcagtgctctgaattacccggccttgtgaaacttttggagctagtctccacgaaggagagtttctttgaataacatgttatttcagaaagtcatggtgcctttgaggtggatgttctatctgctaggtgggtctctaggaacctcttctggaagcttctgtgaatggaacttgctgcttcactcattcaggtgttagcatgagacagcagctgattggaaagacagctggcagtctgaggatgtgagtggagtagcagtcagtgttttaaacggggaggggcacagaagtgactttctggaacttgtgatagcagaagggtcaaggactgacttccttgttgttagttgaggacatatcttttttctttttttttttttttttttttttttttggttctttttttcggtgctggggaccgaacccaggaccttgcgcttcctaggcaagagctctaccactgagctaaatccccaacccctagttgaggacatatcttaactagttttttggttacaccattctaattcaattcctatctgggtttcctctttaccctttccttcctgatttgtgtcctacccttttttcttcctatagaaccacgctacataaaagagacaaccagttggctaagctgtccaacagaagcagactgaagagctttcccgtttcctgtcgtagtgacgtggttacatgctgatgcagtccaggctggcgacgaggtgcacctccacaccgcaccccgggcctgcagttttctgttagagagttgtggtcagcgtttggcttctcgtgtgtgtgtgtgtgtgtgtgtgtgtgtgtgcgcacaaccacagcttaggtagcttgccatagctgtgctagccctctactagtttactgtcctttggggagcttagtgtccttggctgtttgactgtatttatcttctagtgtgactgtatataatattgtacagattgctatgacattttaaaggagtatatgctagagtaaacagatcagcgagaggtcccggatatgtagcttttcagaggttgaagataattgtttctactggggcaaggtagcctcttagtgttaccctatatggttactcacttgaggaatggacacatattgtttcccttagcagtagactatgttggttgaaagtgatactgagccttcccagctaagggagctttcagaccctttaaggactcagtattcttcgaagggaaataaataagtaaattgtacttgtagtttagaaaacttaaaatgacagacagcaggttattagtattattttattgttttaaaatacatattgtaaactagatgcggtgatacgtgcctgtgatcctagtaagctgaagtgaggctggaggattgagattgaaagtcatctgggttacctttaaaggacgggcaggggttggggatttagctcagtggtagagcgttgcctagcaagcacaaggccctgggttcggtccccagctctgaaaaaaagaaaagggggggaaaaaaaaggacgggcaaatagatctctgtgagttcaaggtcatacatggttccaggatgccagaggtacagtgtaagaccctctctctgagagagagagagagagagagagagagagagagagagagagagagagagagagggggagggggaggaaggaaggaaggaagaaaatagcatagcctagagctagcatggctagaccctactatatagctcaggctattttcaatctcaaggtatgatacatactggttgatatatttaactccttccctccgtccctacccttttataggccttgaactttatttagccagggataaccttgaactcctgtctttactcccaaagtactaggattacaggcatgcgcagtatncaccttgctccctccccccctctcttctttccttcttcccttcctacctacctacctacctacctacctacctacctacctacctacctagtttagagagtgttttgtttaacatcaggaaggatttctagaaagcccagtgttccctgtcctggagctaaatagttgaaaagacagtggtagccattttactggctgtgaagactgaagtaggggctggcagatggtaaaattgaaaaggatgtatgtgaggatggctcggggtgggggctgacacacacaaattaagtgactcagaatgtgaaactagtgattgggtaccatgaaagccaactcttacttttcttttgtattttttttaaccataaccagctttattaaagatgcttttcataaacaatcatggtatttcaggcaagacatgggcagacagtcaaccatatacaggaacttccaaattcccttcttgtatagactaccaaaatcagaaatccactataaaacccaatgaagtcttcattcagtgctttgaaagggggagtagcttagagtgagggttgacatttcacgttaaggaggttgtttaacaactttccacaagccgaccctgactgtcagaactgaacatggcagaatctgaagatccacagtcttttacaaaaggaaccagtgctcttccgagaacactcaaagtcactgcaaagtccacgtgcccaatagactagaaaaccaattttgggggtgaggctccaacgggtctctggttttaagggaattaagtctgtgttgatggtacggggggagggaacaggatatagaaatgaatttagagtttccagagaccacaggccttggtggctacccacgcaagaccaggtagtccttttgaaattatcagggaaaggggttttctgtcctcaattcagcttgggtgatattttgttggtgacacatgatccttccccccacccccaacaatgaagtgttcgtgtgctaacaatatagttaaaaaaaaaaaagtaaaacaaaattctgcatttttataaaacttgataaaaaatagtatttcaaactgtgcagtcaccagaagtacagagttttcaaaaatgcacacacgtctcttggcctctccagcaccttcagctttctgtgcctggtctgtgttggcatctccgttgtccgcatggttaccggcattggctctccccttctctcccttctctgcagggccgttttaggcctgggctatggctttggaggagcaggtttggcagacccaccttgcagatccctggggctcctccttcatcttggctttgtctcctttagcgtccccttcagcctttcttttgggcatggcagtggcaggggatgtcggcgctgagcacgggtttacagcggccgacgggtttggtccattccggggtcatcctcgctgcttcttcacactgctcttcttttgtatttttaaaagatgaaaagggccttgttgttcaagaaaattgcactcccagaatgagcacttagtcccagataaaacagcgactatattttagtcactgctgttcactgtaataattggggtacaagtatcattcacagaactattgaagtgataaattacattagtattactttactcttttatctacctcactacatggtaacctttgtgactgtgcttgtccctgccattgtcatgctgtactttgaaaagcaggggatctgcaattctaaggtgtcacagtgcagcttagaagctctgggacactttaccgcattgtactcttctcttctgagtaaccggggctctcatgtggtactctttgccttgttgctatctgtcactgagagaccagaaacatttcttgtctattagggtcccagaggtgtgggatagcctccttcaactttcactgctcctcccccaccccaccttctttcctgccctttctttgtgcatttggttttttgtttgtttgttttcatggtcttaatgagaggccaaacctactctgtcttggtaccggcctacatctaaaaaaaaaaaaaaaacctgagaacttgacctgcagctgaacccaagctgctctcaaattccagggaggacctcatggcctgtcattagcccataccccagagttactccctagcaacagttaatcaaagatcagtctgattgtttctttgtgagaccatttgtgattgttcagtcttacttcaggacacctacctgtaggtgcttgccaggctgaacaccccctatgtcagggttgggttgaaggagagcccaagcccaagctttaataaagagaccttaatgtgattgcattggaaatggccccttggtgtctttgggattcacgaacacttctggggataacattagtaggtacgctaatgggctggaactcgttatagacttagccttatagatctggccttgaagttgcagtgatcctcttgcttctgtaaatccacattaattctttgcaaacccttagaaggcccatgtaggagtcatcctacacctgacaaagcttgcctcagccattcctgagaaacacggcacggcagccttgcactaccttactgctgtaccacatcccaactctgagcccttgcgttgttgacggttcttctagaagcctcctccatatttgatggccatctgcctttacattctgatgggcagttgtgtcccatagttctgaagtatgtatgctttggagtcaagcaaatgttgtttgtactatgtaagtttcattaaacctcaatcggaatgcaagtagaagacccagcttgttgacacatgtctgtaaccagtactcaggaggctgaggcattaggattagcacaagtttagtttgggctatagatctacttcagaaaaggcttaggaagtgcaggatgtgtgttaaaaaaaaaattgaaggggctggagagatggctcagtagtagaatacttagtgctcttatatcttataaagaactagggttcagttctcaacacccacacaggtctcacaactctagttccaaggcattctctacaccatcttttgacttttctggacaccaggcatgcacatgacacagaaatgcatgcaggtaaaataggtatatattaggttaaaagaaatccgcttaaattttttttaaaaactgaggactgtgctgagcaaaccacacacatagcctaaaaacgcaaagatggcagctgggtccctagagcatgtactaatgtgattctgtaggggagatatgttttatggtatattttgtttttgttttctccctttccaagatcttgctttttctttttttcttttccttttcttcctttttttgggggggtgggggtgggggcaaggtttctctgtgtactctttactgtcctggaacttgctctgtagaccaggctgcctcaaactcagaggtctatctgcttctgcctcccaaggactggttaaaagaggtgccatcactgcctggctcgaaggagtttccacagtgctagacatttgaacaaaggtctcacacatgttagccaagcactttagcctgagctacatacactcactttatgggcacctaattgtctcccttgtggaaaatgctcaataagtaagtgctaattgaggtagaaaattgtgttttccttggcccagtttagccagataaggctccagagctggaattcttgtctttatgaatgactttcttagttggcgctgttgtgccacactgctcttctagaagtccgagtggacaccctgtatatcgccaagtagcgtctcaggatgagatggtgtcatcatgttatggattgtacttcccttgttgacgaaagctcagccttgaagcaggcatgggaattaatcagctggcttattgttccctgcaccagcagagcacagactaggcgggggacagtttgctgggcgacttaatgggttgttctgttctacagtggagccgtcagacatagcctggcctaactaaactctggtcagtactgttctcattcctgtcacctggcaggaacgaactgtgtggtaaaatggaggctttgcttgcttactaagctgagagctcctgaaccttttatcttttttttttttaatgtagctttcttttatatctttggtagctttttatttatatatcaatctcaaacacgcagaaaaaaaggtaagtctagtgcaaagaacttctgtaccccttttagccagactgtcggcacttttgcttgcctcacatccccacatacagcttacgtgctgacagtagttgcagacagcatcccatgtacttccaaatgccagtgtgtattgcccaagaacaaaagcattattataaccccctgtccatcttcagatctgtccatgttctgaaagtctcccgcaatggcagaattttgaggtgcaggggtgtctgttatattggcttaaatgagaaaaggttatgcagtcatcagttccttgtgtctgtacaggaccgaagtgagggcagcacaaacaactcagcaacaatgtcttcagaggtggagacctcggagggcgtcgatgagtcagagaacaactctacggcaccagaaaaggaaaaccataccaagtgagtgacggcagctggcctgtgctgtcaggaggcctcgctcagcacctgtcctcacccctgtcatcgtgcttggttcagtctgatgcgacaagggaatggtcgtcagcactaagggccctgctgcacaagttccttagcttctcattagagtcctgtcattggctaagtcatttcctatatcttactatatttgctaataaaccagttcttaggatgtggggtgatacagaataatttccttaaaaaaataaaatactggtagagactagaccacaagagaaccagattttttctcattctaacagatggagtgtgtgaatacacaggagccttcctaggttccattgtccttatgatgatatttttcttccttatccatttattgatgtaactttatcctgtgtaattctgttaaatacaaaactgggaggcagaagcaggtggtggatctctgagttcaaggcatcctgtctacagagtgagttccaggacagccagagctacacagaaaccccgtcacaaagacaaaaagaaaaagaaaccaaccaagatcttggtctgtctctcaactatctcatcttcccacaactaggcccatccacatatcatctgggaggaaggcagctctttctgggatagattaagtattggttcttccaagctaggtggctacaaagcaaagcgtcattattggtgcttgctaacagataccaatgcaggcactcttgaggagaccagagtaagtgtcttgtcactgagttcttgtgtcagattgtcctatcttgccctgtgctcactgacaggctcagttactcacattggactggaatagtgtctgagcagctcctgtttcctgctccatcgtgggccttttagtcttttctggagaactggaaagggctactgtctcacccaaaattcatctcccacagaatggcagacctttctgagctcctgaaggaagggaccaaggaagcacatgaccgggcagaaaatacccagtttgtcaaagacttcttgaaaggaaacattaagaaggagctatttaggtttgtgcccctcagtcagatggggttgggttctaactttaataaggggtgggaagtggggtggcttagtcagttgaggaagttgtcatgcaaccactctaggaagaagctgctgggtcttttctacttttttcttggagacagtctggatggatatatggatggatatatatatatatctccgtccactatcccagccatatatttgttttcctggtgttaagcctattctagctagacggagtaacaaaaatatattggcaaatattcactagaagcttcctaggtgtattaagtagttaatatatttaaaaaggaccacagttggatctttgggaactggacaagtggcttttgtcttgagctactcttaaaactggtggtgatggtggtggggactggagagttggctcagtggttaagagtactgactgctcttcagaggtcctggttcaattcctaggaacacatagtggctcacaaccatctgtaatgggatctgatgccctcttttggcatgcagataaagcactcatatatatataataatctttaaaaaaaaaaaaaacaaagcttagtgggttctagagctgctgctggcttatagctctttcccacaatcttccatcacactcacagctggccaccactgcactttacttcacatactcagcccttgaggaggaaatggatcgcaacaaggaccacccagccttcgcccccttatatttccccacggaactacaccggaaggaagcactgatcaaggacatggagtatttctttggtgaaaactgggaggagcaggtgaagtgctccgaggctgcccagaagtatgtggatcggattcactacgtaggacagaatgagccagagctgctggtggcccatgcttacactcgttacatgggggacctttcgggaggccaggtgctgaagaaggtggctcagcgggcactaaaactccccagcactggggaagggacccagttctacctgttcgagcatgtggacaatgcccagcaattcaagcagttctaccgcgccaggatgaatgccttggacctgagtatgaagaccaaagagaggattgtggaggaggccaacaaagcctttgaatataatatgcaggtattactgggcactgaccatggaacctgacccatgcggttataaccttggatgcatgcgtagtagagtcaaagccagaagtttgttgagaggctattggtagtgtgacaaatgagttcctacatgccctagaaaaaagtgagggaaccagttagccatcagggatcatgggagcagtggatggctcccaggcctggctggaggcatgactagggctgaagcagccgcattgagtctgaatagactcattccctctatcttaccacagatattagattgaggaatggagagtttcattttgtagcaagtattgatataaaaatatcacttaataggagccagattcattgggaagtagaataaagaggttttacaagtctcaggtagggctgatcttacagaagccatttctgtccccagtacctcagtgttgggagagaatagctgtggcactcaagcagagtccaaagcagcagccaccagagctcccactaagatgtgcagggcggtgttcagttttctggcttgatgttcatctggttttcagtcctgatgaggtgtttctggactctagcttctccatgggtcatctgtagagtgtaaattctgagtctccctagtttagggatagcctctaatgattgtttttgctcctcagatattcagtgaactggaccaggctggctccatgctaacaaaagaaaccctggaggatgggctcccagtacatgatgggaaaggagatgtacgtaaatgccccttttatgctgctcagccagacaaaggtaccctgggaggcagcaactgccccttccggacagccatggctgtgctgaggaagcctagcctgcagctcattctggctgccagtgtggccttggtagctggactcttggcctggtactacatgtgaaggacctgtcatgttgtttgcatcctatcccaagtgacctcttccatccccatctccacctctgcccaaaactaccacctcaggtgacttttctaatgctgggtttgagaaaacaagcaaccaataaaagccagacactagcacctctgcctgccagcatcttctctgccaaccaggtacataccagacagcggctgtcgctctgttaacagccagtgcccgactgcagttcagtcatggacttctcatctggcagtgctccaggacgtttgccatttgggaggcctgggtacactgttttcttagcagtacttggaatagtcattgccatgctgggagtgagctgcccacacccaggttttgtggaaaacggtcatgccagctgatgggtcagttttccaggccttttggagtagaagctgtgtattcctgcctcaaagcctacagagcttatcctgcataaccaggatctccccaagaagtcttgttagcctggtctgtctccactgactacacctgccacagcactctaaaaacaaactccacacactcccctccttcctgggacagtacagagtcctcagaaacagtggcatgttgcataccaatggacatcctctttgatgacactccttgcccacttcctagcaccttctatttccttgtattcatgctaaacaccataaaagatccttaacatctctgcttggacctgtgatttttctaactcaaattctttgaggtttcttatttcaaaagtacatacttaaatttaagcaattcatgctctaaaatagaaatgtgaagttaaatgtctttattagtaggaatctattctataaagtctttgtgtgaaaatggtagaacagcagggaaactcaaaagacttgagctcaccacttcacagttcagaagattgatttacagactgagtgcgagacttcatgtgtgtcatcagatatagctagtc

SEQ ID NO: 7973 - protein, 315 aa, Rattus norvegicus; identical to SEQ ID NO: 2628
  ref <308>: DATABASE ACCESSION NUMBER: SWISS-Prot / P23711
  ref <309>: DATABASE ENTRY DATE: 2002-06-15

SEQ ID NO: 7974 - DNA, 977 bp, Homo sapiens; identical to SEQ ID NO: 906
  ref <308>: DATABASE ACCESSION NUMBER: EMBL / D21243
  ref <309>: DATABASE ENTRY DATE: 1999-01-21

SEQ ID NO: 7975 - protein, 316 aa, Homo sapiens; identical to SEQ ID NO: 907
  ref <308>: DATABASE ACCESSION NUMBER: SWISS-Prot / P30519
  ref <309>: DATABASE ENTRY DATE: 2002-06-15

SEQ ID NO: 7976 - DNA, 14984 bp, Rattus norvegicus; identical to SEQ ID NO: 7972
  misc_feature (1)..(14984): n=a, c, g or t
  ref <308>: DATABASE ACCESSION NUMBER: EMBL / U05013
  ref <309>: DATABASE ENTRY DATE: 2000-03-04

SEQ ID NO: 7977 - protein, 315 aa, Rattus norvegicus; identical to SEQ ID NO: 2628
  ref <308>: DATABASE ACCESSION NUMBER: SWISS-Prot / P23711
  ref <309>: DATABASE ENTRY DATE: 2002-06-15

SEQ ID NO: 7978 - DNA, 977 bp, Homo sapiens; identical to SEQ ID NO: 906
  ref <308>: DATABASE ACCESSION NUMBER: EMBL / D21243
  ref <309>: DATABASE ENTRY DATE: 1999-01-21

SEQ ID NO: 7979 - protein, 316 aa, Homo sapiens; identical to SEQ ID NO: 907
  ref <308>: DATABASE ACCESSION NUMBER: SWISS-Prot / P30519
  ref <309>: DATABASE ENTRY DATE: 2002-06-15

SEQ ID NO: 7980 - DNA, 843 bp, Rattus norvegicus
  ref <308>: DATABASE ACCESSION NUMBER: EMBL / U05014
  ref <309>: DATABASE ENTRY DATE: 2000-03-04
gggccgaggtgccgcggggttgctggagggtcgtgggcggcgtgcaggagacatgtcggcgggcagcagttgcagccagactcccagccgggctatccccactcgccgcgtagccctcggcgacggcgtgcagctcccgcccggggactacagcaccacccccggcggcacgctcttcagcaccaccccgggaggaaccagaatcatctatgaccggaaattcctgatggagtgtcggaactcgcctgtggccaaaacacccccaaaggacctgccaaccattccaggggtcactagccctaccagcgatgagcctcccatgcaggccagccagagccatctgcacagcagcccggaagataagcgggcaggtggtgaagagtcacagtttgagatggacatttaagggaccagccataggacgcagtgatgcttctgggcccctggggcccttgggaggagagccacagcagtcaggccttgtacccggcagacactgggtgtggatcggccacccagtcctgctcctcactcagggcacctgctctgccttccattttgtgaataccagcacatacctccttgtgcctctgttgatactgagctgctactccagggtaatgactctcacctacaccctccctgcatcaagcgccagcgagtggacacagaggagtctgtcggaatgatctggcaattctagccccaacctctggagcacacccaccttaccttaggttggggtacctgggaaagccaccctttacttctttccctgagaggaaataaaagccacatttaccctaggcccacagccgggccctgtctgaaaaaaaaaaaaaa

SEQ ID NO: 7981 - protein, 117 aa, Rattus norvegicus
  ref <308>: DATABASE ACCESSION NUMBER: SWISS-Prot / AAA86938
  ref <309>: DATABASE ENTRY DATE: 2001-12-01
MSAGSSCSQTPSRAIPTRRVALGDGVQLPPGDYSTTPGGTLFSTTPGGTRIIYDRKFLMECRNSPVAKTPPKDLPTIPGVTSPTSDEPPMQASQSHLHSSPEDKRAGGEESQFEMDI

SEQ ID NO: 7982 - DNA, 895 bp, Homo sapiens
  ref <308>: DATABASE ACCESSION NUMBER: Refseq / NM_004095
  ref <309>: DATABASE ENTRY DATE: 2002-04-08
gcggagcgaggctggaggcgcgggagggcagcgagaggttcgcgggtgcagcgcacaggagaccatgtccgggggcagcagctgcagccagaccccaagccgggccatccccgccactcgccgggtggtgctcggcgacggcgtgcagctcccgcccggggactacagcacgacccccggcggcacgctcttcagcaccaccccgggaggtaccaggatcatctatgaccggaaattcctgatggagtgtcggaactcacctgtgaccaaaacacccccaagggatctgcccaccattccgggggtcaccagcccttccagtgatgagccccccatggaagccagccagagccacctgcgcaatagcccagaagataagcgggcgggcggtgaagagtcacagtttgagatggacatttaaagcaccagccatcgtgtggagcactaccaaggggcccctcagggccttcctgggaggagtcccaccagccaggccttatgaaagtgatcatactgggcaggcgttggcgtggggtcggacaccccagccctttctccctcactcagggcacctgccccctcctcttcgtgaacaccagcagatacctccttgtgcctccactgatgcaggagctgccaccccaaggggagtgacccctgccagcacaccctgcagccaagggccaggaagtggacaagaacgaacccttccttccgaatgatcagcagttccagcccctcgctgctgggggcgcaaccaccccttccttaggttgatgtgcttgggaaagctccctccccctccttccccaagagaggaaataaaagccaccttcgccctaggaaaaaaaaaaaaaaaaaaaaaaaaaaaaaaaaaaaaaaaaaaaaaaaaaaa

SEQ ID NO: 7983 - protein, 118 aa, Homo sapiens
  ref <308>: DATABASE ACCESSION NUMBER: Refseq / NP_004086
  ref <309>: DATABASE ENTRY DATE: 2002-04-08
MSGGSSCSQTPSRAIPATRRVVLGDGVQLPPGDYSTTPGGTLFSTTPGGTRIIYDRKFLMECRNSPVTKTPPRDLPTIPGVTSPSSDEPPMEASQSHLRNSPEDKRAGGEESQFEMDI

SEQ ID NO: 7984 - DNA, 843 bp, Rattus norvegicus; identical to SEQ ID NO: 7980
  ref <308>: DATABASE ACCESSION NUMBER: EMBL / U05014
  ref <309>: DATABASE ENTRY DATE: 2000-03-04

SEQ ID NO: 7985 - protein, 117 aa, Rattus norvegicus; identical to SEQ ID NO: 7981
  ref <308>: DATABASE ACCESSION NUMBER: SWISS-Prot / AAA86938
  ref <309>: DATABASE ENTRY DATE: 2001-12-01

SEQ ID NO: 7986 - DNA, 895 bp, Homo sapiens; identical to SEQ ID NO: 7982
  ref <308>: DATABASE ACCESSION NUMBER: Refseq / NM_004095
  ref <309>: DATABASE ENTRY DATE: 2002-04-08

SEQ ID NO: 7987 - protein, 118 aa, Homo sapiens; identical to SEQ ID NO: 7983
  ref <308>: DATABASE ACCESSION NUMBER: Refseq / NP_004086
  ref <309>: DATABASE ENTRY DATE: 2002-04-08

SEQ ID NO: 7988 - DNA, 861 bp, Rattus norvegicus
  ref <308>: DATABASE ACCESSION NUMBER: EMBL / U05784
  ref <309>: DATABASE ENTRY DATE: 2000-03-04
ggcacgagccaggacccccgcgcgccatgccgtccgagaagaccttcaaacagcgccggagcttcgaacaaagagtggaagatgtccggctcatccgggagcagcaccccaccaagatcccagtgattatagagcgatacaagggtgagaagcagctgcccgtcctggacaagaccaagttccttgtacctgatcacgtgaatatgagcgaactcatcaagataattagaaggcgcctgcagctcaatgctaaccaagccttcttcctcctggtgaatgggcacagcatggtgagtgtgtccacacccatctctgaagtgtacgagagcgagagagatgaagacggcttcctgtacatggtctatgcctcccaggagacgttcgggacagcactggctgttacatacatgtcagctctgaaggcaacagcaacaggaagagagccatgcttgtgacagacatacagccacttccaactaaagcaagcctctgcttcctgctacctgcatggagcccactgtgacactcagaccatccccggtcactcactcgtgtctgagaatctcagtgagagctgcctctgtcacggaccggaagccaacacagccacctctcgacctgctccccacagcacccaccctccctgcatgcaagctgtccctgctaacccccaatgttatgttacactgtgtaaatccccactgctgccgtgtgtgggttgtgtacgtcgtcatgtccctggtttataactatggtgcggtcgggaaggattcctgtaatgctgctctaaggatctggctcaggcagccattgtaggacacctgtactctgatgcactaagtccaataaaggcacaactgg

SEQ ID NO: 7989 - protein, 141 aa, Rattus norvegicus
  ref <308>: DATABASE ACCESSION NUMBER: SWISS-Prot / Q62625
  ref <309>: DATABASE ENTRY DATE: 2002-06-15
PSEKTFKQRRSFEQRVEDVRLIREQHPTKIPVIIERYKGEKQLPVLDKTKFLVPDHVNMSELIKIIRRRLQLNANQAFFLLVNGHSMVSVSTPISEVYESERDEDGFLYMVYASQETFGTALAVTYMSALKATATGREPCL

SEQ ID NO: 7990 - DNA, 460 bp, Homo sapiens
  misc_feature (1)..(460): n=a, c, g or t
  ref <308>: DATABASE ACCESSION NUMBER: EMBL / H28835
  ref <309>: DATABASE ENTRY DATE: 2000-03-04
gaacggacacagcatggtcagcgtctccacaccaatctcagaggtgtatgagagtgagaaagatgaagatggattcctgtacatggtctatgcctcccaggagacgttcgggatgaaattgtcagtgtaaaaccagaaaaaatgcatctcttctagaattgtttaaacccttaccaaggaaaaaaaaggggtgttaccaactgagatcgatcagttcatccaatcacagatcatgaaacagtagtgttcccacctaggagtgttaggaagttgtgtttgtgtttcaagcagaaaaacttgagctccaagtgagcacattcagctttgggaaactatattatttaaatgttaggcttagctttgtttttcaantttttaaaagttttaaaaantaaantacttttgcattctaaggtttgcccantaaantaggaccnttcaagttatttttaatggcccc

SEQ ID NO: 7991 - protein, 125 aa, Homo sapiens
  ref <308>: DATABASE ACCESSION NUMBER: Refseq / NP_073729
  ref <309>: DATABASE ENTRY DATE: 2002-11-05
MPSEKTFKQRRTFEQRVEDVRLIREQHPTKIPVIIERYKGEKQLPVLDKTKFLVPDHVNMSELIKIIRRRLQLNANQAFFLLVNGHSMVSVSTPISEVYESEKDEDGFLYMVYASQETFGMKLSV

SEQ ID NO: 7992 - DNA, 1589 bp, Rattus norvegicus
  ref <308>: DATABASE ACCESSION NUMBER: EMBL / U06230
  ref <309>: DATABASE ENTRY DATE: 2000-03-04
aattggcttgaaaccagttgtagggggttcgaatcagaatctctcgatcactcaaattggctcctgattgcacttcgtgaagggaagattgaagttcagtttaagaatgagttttcaacccaaatcacaactggaggcaatgttattaacaatggtatatggaatatggtgtctgtggaagaattagacgacagtgttagcattaaaatagctaaggaggccgtgatgaatattaataaacttgggagtctttttaaacctaccgatggatttctggacaccaaaatatactttgcaggattacctcggaaggtggaaagtgcactcattaagccgattaatcctcgtctggatggatgtatacgaggctggaacttgatgaaacaaggagctttgggtgcaaaggaaatagttgaaggaaaacaaaataaacattgcttcctcactgtggagaagggctcctactaccctggttcaggaattgctcagttcagcatagactacaataatgtaactaatgcagaggattggcaaataaatgtgaccttgaatattcgcccgttcactggcactggggtcatgcttgctttagtttctggggacacagtgccctttgccttgtccttggtggattctggctctggaacttctcaggacattctggtatttgttgaaaattcagtagcagctcacttagaagccataactctgtgctcggaacagccatcccagctgaaatgtaacattaacagaaatggactggaactgtggaccccagttagaaaagacgtcatttactctaaagatctccaaaggcaactcgccatcttggacaaaacaatgaaaggaaccgtggccacttacctgggtggcgttccagatatttccttcagtgccacaccagtgaatgctttttacagcggctgcatggaagtgaacatcaacggggtacagttggatctggatgaagccatttccaaacataatgacattagagctcactcctgtccgtcagtgaggaaaatccagaagaacttctaaagtctgtttcctgggcttctaatctctcttttcatattgtaattatgctcttgttcatgtttccatcaccaaatggcaggattacatgtgttatatgcatgtttaaatatgatgtggtactttgtccttcagatttttgttatataagtcgcatttttgaaaagtcttgtactcactgctgtctagaaattaaataacaaaacacatgaaacatttaaatttcaatttatttcctataaatcttccagtgcgtcacaggcaacataatctgctccattgtctttggagagcgctttgactacagagaccgccagttcctgcgcttgctcgacctgttgtataggaccttttccctcataagctcattctccagccagatgtttgaggtctactctgacttcctgaagtactttcctggtgtccacagagaaatctacaaaaacctgaaggaagtcctcgactacattgatcatagtgtggagaaccacagggccactttggaccccaatgctccccgagactttatcgatactttccttctggaattc

SEQ ID NO: 7993 - DNA, 3309 bp, Homo sapiens
  ref <308>: DATABASE ACCESSION NUMBER: EMBL / M15036
  ref <309>: DATABASE ENTRY DATE: 2000-03-04
ctgcagggggggggggggggggggggggggggggggggcgcagcacggctcagaccgaggcgcacaggctcgcagctccgggcgcctagcgcccggtccccgccgcgacgcgccaccgtccctgccggcgcctccgcgccttcgaaatgagggtcctgggtgggcgctgcggggcgccgctggcgtgtctcctcctagtgcttcccgtctcagaggcaaaccttctgtcaaagcaacaggcttcacaagtcctggttaggaagcgtcgtgcaaattctttacttgaagaaaccaaacagggtaatcttgaaagagaatgcatcgaagaactgtgcaataaagaagaagccagggaggtctttgaaaatgacccggaaacggattatttttatccaaaatacttagtttgtcttcgctcttttcaaactgggttattcactgctgcacgtcagtcaactaatgcttatcctgacctaagaagctgtgtcaatgccattccagaccagtgtagtcctctgccatgcaatgaagatggatatatgagctgcaaagatggaaaagcttcttttacttgcacttgtaaaccaggttggcaaggagaaaagtgtgaatttgacataaatgaatgcaaagatccctcaaatataaatggaggttgcagtcaaatttgtgataatacacctggaagttaccactgttcctgtaaaaatggttttgttatgctttcaaataagaaagattgtaaagatgtggatgaatgctctttgaagccaagcatttgtggcacagctgtgtgcaagaacatcccaggagattttgaatgtgaatgccccgaaggctacagatataatctcaaatcaaagtcttgtgaagatatagatgaatgctctgagaacatgtgtgctcagctttgtgtcaattaccctggaggttacacttgctattgtgatgggaagaaaggattcaaacttgcccaagatcagaagagttgtgaggttgtttcagtgtgccttcccttgaaccttgacacaaagtatgaattactttacttggcggagcagtttgcaggggttgttttatatttaaaatttcgtttgccagaaatcagcagattttcagcagaatttgatttccggacatatgattcagaaggcgtgatactgtacgcagaatctatcgatcactcagcgtggctcctgattgcacttcgtggtggaaagattgaagttcagcttaagaatgaacatacatccaaaatcacaactggaggtgatgttattaataatggtctatggaatatggtgtctgtggaagaattagaacatagtattagcattaaaatagctaaagaagctgtgatggatataaataaacctggacccctttttaagccggaaaatggattgctggaaaccaaagtatactttgcaggattccctcggaaagtggaaagtgaactcattaaaccgattaaccctcgtctagatggatgtatacgaagctggaatttgatgaagcaaggagcttctggaataaaggaaattattcaagaaaaacaaaataagcattgcctggttactgtggagaagggctcctactatcctggttctggaattgctcaatttcacatagattataataatgtatccagtgctgagggttggcatgtaaatgtgaccttgaatattcgtccatccacgggcactggtgttatgcttgccttggtttctggtaacaacacagtgccctttgctgtgtccttggtggactccacctctgaaaaatcacaggatattctgttatctgttgaaaatactgtaatatatcggatacaggccctaagtctatgttccgatcaacaatctcatctggaatttagagtcaacagaaacaatctggagttgtcgacaccacttaaaatagaaaccatctcccatgaagaccttcaaagacaacttgccgtcttggacaaagcaatgaaagcaaaagtggccacatacctgggtggccttccagatgttccattcagtgccacaccagtgaatgccttttataatggctgcatggaagtgaatattaatggtgtacagttggatctggatgaagccatttctaaacataatgatattagagctcactcatgtccatcagtttggaaaaagacaaagaattcttaaggcatcttttctctgcttataataccttttccttgtgtgtaattatacttatgtttcaataacagctgaagggttttatttacaatgtgcagtctttgattattttgtggtcctttcctgggatttttaaaaggtcctttgtcaaggaaaaaaattctgttgtgatataaatcacagtaaagaaattcttacttctcttgctatctaagaatagtgaaaaataacaattttaaatttgaatttttttcctacaaatgacagtttcaatttttgtttgtaaaactaaattttaattttatcatcatgaactagtgtctaaatacctatgtttttttcagaaagcaaggaagtaaactcaaacaaaagtgcgtgtaattaaatactattaatcataggcagatactattttgtttatgtttttgtttttttcctgatgaaggcagaagagatggtggtctattaaatatgaattgaatggagggtcctaatgccttatttcaaaacaattcctcagggggaccagctttggcttcatctttctcttgtgtggcttcacatttaaaccagtatctttattgaattagaaaacaagtgggacatattttcctgagagcagcacaggaatcttcttcttggcagctgcagtctgtcaggatgagatatcagattaggttggataggtggggaaatctgaagtgggtacattttttaaattttgctgtgtgggtcacacaaggtctacattacaaaagacagaattcagggatggaaaggagaatgaacaaatgtgggagttcatagttttccttgaatccaacttttaattaccagagtaagttgccaaaatgtgattgttgaagtacaaaaggaactatgaaaaccagaacaaattttaacaaaaggacaaccacagagggatatagtgaatatcgtatcattgtaatcaaagaagtaaggaggtaagattgccacgtgcctgctggtactgtgatgcatttcaagtggcagttttatcacgtttgaatctaccattcatagccagatgtgtatcagatgtttcactgacagtttttaacaataaattcttttcactgtattttatatcacttataataaatcggtgtataatttt

SEQ ID NO: 7994 - protein, 676 aa, Homo sapiens
  ref <308>: DATABASE ACCESSION NUMBER: SWISS-Prot / P07225
  ref <309>: DATABASE ENTRY DATE: 2002-06-15
MRVLGGRCGALLACLLLVLPVSEANFLSKQQASQVLVRKRRANSLLEETKQGNLERECIEELCNKEEAREVFENDPETDYFYPKYLVCLRSFQTGLFTAARQSTNAYPDLRSCVNAIPDQCSPLPCNEDGYMSCKDGKASFTCTCKPGWQGEKCEFDINECKDPSNINGGCSQICDNTPGSYHCSCKNGFVMLSNKKDCKDVDECSLKPSICGTAVCKNIPGDFECECPEGYRYNLKSKSCEDIDECSENMCAQLCVNYPGGYTCYCDGKKGFKLAQDQKSCEVVSVCLPLNLDTKYELLYLAEQFAGVVLYLKFRLPEISRFSAEFDFRTYDSEGVILYAESIDHSAWLLIALRGGKIEVQLKNEHTSKITTGGDVINNGLWNMVSVEELEHSISIKIAKEAVMDINKPGPLFKPENGLLETKVYFAGFPRKVESELIKPINPRLDGCIRSWNLMKQGASGIKEIIQEKQNKHCLVTVEKGSYYPGSGIAQFHIDYNNVSSAEGWHVNVTLNIRPSTGTGVMLALVSGNNTVPFAVSLVDSTSEKSQDILLSVENTVIYRIQALSLCSDQQSHLEFRVNRNNLELSTPLKIETISHEDLQRQLAVLDKAMKAKVATYLGGLPDVPFSATPVNAFYNGCMEVNINGVQLDLDEAISKHNDIRAHSCPSVWKKTKNS

SEQ ID NO: 7995 - DNA, 2825 bp, Rattus norvegicus
  ref <308>: DATABASE ACCESSION NUMBER: EMBL / U06713
  ref <309>: DATABASE ENTRY DATE: 2000-03-04
ggatccaggttttcaagtttgttaggggatttaatgcaaatcaatatgcaaacagagagcattgtaaaaaaaaaaatccagtcctttctccggtcacacacaggttagctaatgtggagctcgcccagatgctctgcagcaccagctcaaggggaagggccaggaggagggcagtcccgggggcgggaccatgacgttgaggtcaaggcggggcttcctctcgttcctccccgggctgcggccgccgcggcggtggctccgcatctccaaaaggggccctccgacttctcactgggccagtccggcgctgggtggcagaactctacactactcctgccggtctcagagcgggactcccttctcttcagagtttcaagcaactttccccgcctttgcagctaaagtggctcggggaccgtggctgccgcaggtggtagagcccccggcccggctctctgcatctccgctgtgcgttcgctctgggcaagccctcggtgcgtgcaccctgggggtcccccgcctcggctctgtgagcgagatgcctctgggacacatcatgaggctggatctggagaagatcgccctggagtacatcgtgccctgtctgcacgaggtcggtttctgctacctggacaacttcctaggcgaggtggtgggcgactgcgtactggagcgagtcaagcagctgcattacaacggggccctgcgtgacggccagctggcggggccccgcgccggcgtctccaagcggcacctgcgaggcgaccagatcacgtggatcgggggcaacgaggagggctgcgaggccatcaacttcctcctgtccctcatcgacaggctggtcctgtactgcgggagccgcctgggcaaatactatgtcaaggagcggtccaaggcgatggtggcttgctatccaggaaatggaacaggttatgttcgtcatgtggacaaccccaatggtgatggccgctgtatcacctgtatctactacctgaataagaattgggacgccaagttacatggaggggtcctgcggatatttccagaaggaaaatcatttgtagcagacgtggagcccatttttgatagactcctgttctcctggtcagaccgcaggaatccacatgaagttcagccctcctatgccaccaggtacgccatgactgtctggtacttcgatgctgaagaaagggcagaagccaaaaagaaattcaggaatctaactagaaaaactgaatctgctcttgctaaagactgacggtggtgtgaagtccgctgggcgcattcgtttagtgacagttcctgaaatgttaagtgtcaagatccaaagactctgtccaatcccctgcctaccgcctgcatcgtttggctccctaccttgtttgtggtacttcgtgttttcttgctgggaatgcgttgccctccagacactctctttgccggatgaactcatttgctaactccagaaacacctgcagacatcctagctggccagcggtttaacggatagatctgggaatggatagatatgggaatgcagctgttcagcccaggattgcctcgtgttcgcactttatgcatacttcctggtctgataggaggaggtttgcgaagaaataaactggtgacagatgccacaaagaggcacccttgaaaccctaacagcaagaaagagaaagatctgaactatttccagatgttgttaacccgagactggacgattacggacaacctgatgacattatcgcctctagaaagggctgctgtcatagcgatcgatttataagtgtcccacggtggatgctcctttttcctggtcctacaacctgttctttttgaaggtcattgctaaattgatgctctcttgtcgaagacgaccccagcctgtatgctccatttttacttcttacttggggatcctaattatccagagaataaaactcaccaggtagtttgggttgttttttctggtactgaaaatttgaagttaaatgagagggacaggaagcgtcctggtaatttagcttctgctaactctgtgggaagagcaaagcctagcggtatgcgataaccatgcatacggtgagcagttcgagagggagatgtggttggaagtgcagacagccccctttcatcatgttccctttagctgttcttcgttcatggctaagaacagcatgttgtactcttaaaagatatggaaataaaaagacctcaaagctatcgagttctcccacattgtctgctctgccagcctcgctttagccgtcttgatccttgagagcaactggttggaagtgcatccagtggtgtggaatttcctagaactgtgggaggtttctcctgcaggatgcaggtgccgcttcccccagaactctgtacgaaacacccattttacggaagttagccatcctagttttcgctgctacttccccatctttcgaacctctttaatttccttgttagaatcccacaagcagcacagacccgagagtgttttatttcatcgtgttcagccatgcagactttccaagcaaagaagttgatacttctttcttctttcgggaaagtgtccaggaagaactgtcattcctccccccatggctctgttttgttttatttcccaccttctaacttacaacgtcatttccttatttattatgtttattgtcttgtagcctatgatgtctagagtgttaaacacaacgaaggcagggatttgtacgtttttgatccatgcagcatgttcccagcacctaagctaacatacagtaagcaacggcttaccaaacacatgttcaataaactcagtctcctctgtaaaa

SEQ ID NO: 7996 - protein, 356 aa, Rattus norvegicus
  misc_feature (1)..(356): Xaa=Unknown amino acid
MTLRSRRGFLSFLPGLRPPRRWLRISKRGPPTSHWASPALGGRTLHYSCRSQSGTPFSSEFQATFPAFAAKVARGPWLPQVVEPPARLSASPLCVRSGQALGACTLGVPRLGSVSEMPLGHIMRLDLEKIALEYIVPCLHEVGFCYLDNFLGEVVGDCVLERVKQLHYNGALRDGQLAGPRAGVSKRHLRGDQITWIGGNEEGCEAINFLLSLIDRLVLYCGSRLGKYYVKERSKAMVACYPGNGTGYVRHVDNPNGDGRCITCIYYLNKNWDAKLHGGVLRIFPEGKSFVADVEPIFDRLLFSWSDRRNPHEVQPSYATRYAMTVWYFDAEERAEAKKKFRNLTRKTESALAKDX

SEQ ID NO: 7997 - DNA, 2770 bp, Homo sapiens
  ref <308>: DATABASE ACCESSION NUMBER: EMBL / AK025273
  ref <309>: DATABASE ENTRY DATE: 2000-09-29
gagtctggccgcagtcgcggcagtggtggcttcccatccccaaaaggcgccctccgactccttgcgccgcactgctcgccgggccagtccggaaacgggtcgtggagctccgcaccactcccgctggttcccgaaggcagatcccttctcccgagagttgcgagaaactttcccttgtccccgacgctgcagcggctcgggtaccgtggcagccgcaggtttctgaaccccgggccacgctccccgcgcctcggcttcgcgctcgtgtagatcgttccctctctggttgcacgctggggatcccggacctcgattctgcgggcgagatgcccctgggacacatcatgaggctggacctggagaaaattgccctggagtacatcgtgccctgtctgcacgaggtgggcttctgctacctggacaacttcctgggcgaggtggtgggcgactgcgtcctggagcgcgtcaagcagctgcactgcaccggggccctgcgggacggccagctggcggggccgcgcgccggcgtctccaagcgacacctgcggggcgaccagatcacgtggatcgggggcaacgaggagggctgcgaggccatcagcttcctcctgtccctcatcgacaggctggtcctctactgcgggagccggctgggcaaatactacgtcaaggagaggtctaaggcaatggtggcttgctatccgggaaatggaacaggttatgttcgccacgtggacaaccccaacggtgatggtcgctgcatcacctgcatctactatctgaacaagaattgggatgccaagctacatggtgggatcctgcggatatttccagaggggaaatcattcatagcagatgtggagcccatttttgacagactcctgttcttctggtcagatcgtaggaacccacacgaagtgcagccctcttacgcaaccagatatgctatgactgtctggtactttgatgctgaagaaagggcagaagccaaaaagaaattcaggaatttaactaggaaaactgaatctgccctcactgaagactgaccgtgctctgaaatctgctggccttgttcattttagtaacggttcctgaattctcttaaattctttgagatccaaagatggcctcttcagtgacaacaatctccctgctacttcttgcatccttcacatccctgtcttgtgtgtggtacttcatgttttcttgccaagactgtgttgatcttcagatactctctttgccagatgaagttatttgctaactccagaaattcctgcagacatcctactcggccagcggtttacctgatagattcggtaatactatcaagagaagagcctaggagcacagcgagggaatgaaccttacttgcactttatgtatacttcctgatttgaaaggaggaggtttgaaaagaaaaaaatggaggtggtagatgccacagagaggcatcacggaagccttaacagcaggaaacagagaaatttgtgtcatctgaacaatttccagatgttcttaatccagggctgttggggtttctggagaattatcacaacctaatgacattaatacctctagaaagggctgctgtcatagtgaacaatttataagtgtcccatggggcagacactccttttttcccagtcctgcaacctggattttctgcctcagctccattttgctgaaaataatgactttctgaataaagatggcaacacaattttttctccattttcagttcttacctgggaacctaattccccagaagctaaaaaactagacattagttgttttggttgctttgttggaatggaatttaaatttaaatgaaaggaaaaatatatccctggtagttttgtgttaaccactgataactgtggaaagagctaggtctactgatatacaataaacatgtgtgcatcttgaacaatttgagaggggaggtggagttggaaatgtgggtgttcctgtttttttttttttttttttttttttttagttttcctttttaatgagctcaccctttaacacaaaaaaagcagggtgatgtattttaaaaaaggaagtggaaataaaaaaatctcaaagctatttgagttctcgtctgtccctagcagtctttcttcagctcacttggctctctagatccactgtggttggcagtatgaccagaatcatggaacttgctagaactgtggaagcttctactcctgcagtaagcacagatcgcactgcctcaataacttggtattgagcacgtattttgcaaaagctacttttcctagttttcagtattactttcatgttttaaaaatccctttaatttcttgcttgaaaatcccatgaacattaaagagccagaaatattttcctttgttatgtacggatatatatatatatatagtcttccaagatagaagtttactttttcctcttctggttttggaaaatttccagataagacatgtcaccattaattctcaacgactgctctattttgttgtacggtaatagttatcaccttctaaattactatgtaatttactcacttattatgtttattgtcttgtatcctttctctggagtgtaagcacaatgaagacaggaattttgtatatttttaaccaatgcaacatactctcagcacctaaaatagtgccgggaacatagtaagggctcagtaaatacttgttgaataaactcagtctcctacattagcattctaaaaaaaaaaaaaaaaaaaaaaaaaaaaaaaaaaaaaaaaaag

SEQ ID NO: 7998 - protein, 240 aa, Homo sapiens
  misc_feature (1)..(240): Xaa=Unknown amino acid
MPLGHIMRLDLEKIALEYIVPCLHEVGFCYLDNFLGEVVGDCVLERVKQLHCTGALRDGQLAGPRAGVSKRHLRGDQITWIGGNEEGCEAISFLLSLIDRLVLYCGSRLGKYYVKERSKAMVACYPGNGTGYVRHVDNPNGDGRCITCIYYLNKNWDAKLHGGILRIFPEGKSFIADVEPIFDRLLFFWSDRRNPHEVQPSYATRYAMTVWYFDAEERAEAKKKFRNLTRKTESALTEDX

SEQ ID NO: 7999 - DNA, 2825 bp, Rattus norvegicus; identical to SEQ ID NO: 7995
  ref <308>: DATABASE ACCESSION NUMBER: EMBL / U06713
  ref <309>: DATABASE ENTRY DATE: 2000-03-04

SEQ ID NO: 8000 - protein, 356 aa, Rattus norvegicus; identical to SEQ ID NO: 7996
  misc_feature (1)..(356): Xaa=Unknown amino acid

SEQ ID NO: 8001 - DNA, 2770 bp, Homo sapiens; identical to SEQ ID NO: 7997
  ref <308>: DATABASE ACCESSION NUMBER: EMBL / AK025273
  ref <309>: DATABASE ENTRY DATE: 2000-09-29

SEQ ID NO: 8002 - protein, 240 aa, Homo sapiens; identical to SEQ ID NO: 7998
  misc_feature (1)..(240): Xaa=Unknown amino acid

SEQ ID NO: 8003 - DNA, 5795 bp, Rattus norvegicus
  ref <308>: DATABASE ACCESSION NUMBER: EMBL / U06752
  ref <309>: DATABASE ENTRY DATE: 2000-03-04
ttaacatcttctcagagccaacacactggtagcatgaagaccacccacaatcctcaaaccaccagaaacacagaggtgactacaactctttctgcctcctcaagtgaccaagttcaggtagagacaacttcccagacaacactatccgatgcaacaacgacctcacatgctcccagagagagcagctcacctccaagtacatcagatattttaaccaccatggcctccacagaaggcacctcaggagacacaggacacacaatggcagtaactactcaaggttccacacctgccaccacagagatctcagtgacaccttcaacccagaaaatgtcacctgtgtcaacattcagcacttctacacaggaaataacaacactttcccaaagtcaacacactggaggcatgaagaccacccgcaatcctcaaaccaccggaaccacagaggtgactacaactctttcagcctcctcaagtgaccaagttcaggcagagacaagttcccagacaacactatctcctgatacaacaaccacctcacatgctcccagagagagcagctcacctccaagtacttcagacatgttaaccaccacggcctccacagaaggcacctcaggagacacaggacacacaacggcagtaactactcagggttctatacctgctaccacacagttatcaacaacattcgcatctcaaaaaatgtcaacagtgtcaacacccaccacctcctcaattcaggaattgtcaacacttcctcagagccaacacactggcagcatggagatcagtagcagacctcaaaccacctcagtcacatcaactctttcatcctctccaagtggctcaactcctgtacagactcggtccgtgacatcatcctcagatgaaagaaccaacccaacttcttctggtgtcagtaacacatccccagctacaacagaagtgctcaccccaacatcctctccagagtctactccaggaaacacagctccgaggacaactgagacctctacaacaaccacgacaaaagtcttaatgacatctttacaacagaaactaccaacagggtcaacactcggcacttctacacccacagaggtgactacaactctttcagcctcctcaagtgaccaagttcaggtagagacaacttcccagacaacactatctcctgatgcaacaaccacctcacatgctcccagagagagcagctcacctccaagtacatcagttatattaaccaccatggcctccacagaaggcacctcaggagacacaggacacacaacagcagtaactgaccaaggttccacacctgccaccacagagatctcagtgacaccttcaacccagaaaatgtcaactgtgtcaacacttgtcacttctactcaagaattaacttcttctcagagccaacgcactggaagcatggggaccagcagcaaacctcaagccaccacaccgacagaggtgaccacatccactctttcatcgttttcaaggggatccttattttctgcgcgtaactgctgcttgcaaacaaaaaaaccaccgctaccagcggtggtttgtttgccggatccgagctcggtaccaagcttgatgcatagcagcaaacctcaagccaccacaccgacagaggtgaccacatccactctttcatcattttcaaggggatccactcaaacccagacagtttcttgggaaacatcctcctcaggaaaaataactgccccatctacttccagtaggaggaccccatccgtagccacatcagacatattcaccaccacagactccacctcaggaaacgcggggcacacacttttaacgggaagccacagtgtgatcacatcaagagtcgcaagcacaactctaggccgattgtcaactgtagcgcacagacagtctactcagcgatcatctacacattctcagagttacttgactgaaagcatgggggcatccagcacgtctgaaaccagcctcctcacagaggctaccacagagacgagtttatgcctcttcacctggacccactgtgacagagaccttctctcgtggacgtcctcttcaggattgaccacgaaaacagacaatgacagaagtacagcactctcagccacctccttgacccttccggctcccagcacgtccacagcctccaggtccacagtgcctccagcccctcttccaccagatcagggtatttccctctttcagattggctttcccctcggctctctctgcgggattccttctattttacagataacggtcagatcattttccccgagtcagactacgatgtcttctcctaccccaacccacctcaaagaggcttcacaggaagggagcgtgtgccatagtggccattctggggtgatgctgatttctctagctccaggggaaccatattttaggaccactacatcacattttacgatgagcagcaccagcctaattcggaaggtggagtctctgattaatgagtttacaagtgactggagcttcaagccaagtgacactgaagtcacctgggtcaatgttcctgcctatccagcccaggggaggactttgggagccaatacctaccaagccatcctctccacagatgggagcaggtcctacgccctgtttctctaccagagcggtggcatgaggtgggatgtgacccagggactgtacaaccgagtgctcatgggcttctccagtggagatgggtattttgaaaacagcccgctgatattccggccagcagtggagaagtaccgtccagatcgattcctaactccaaattacggatccggggactcgaggtctacaggctacacagggaggtgtggcccaactacaggctcaagtgtctgcagtggttggaaagtcagcctcagcagcccagctggggctggaacaagatttcctgcccttgctcctggcagcagggacttcggttctggctcatcaacacaggtctgtggggcaggcagctatgcagcttctctccgggcagggcgtgtgctgtacgtatggcacctgggtgagtttcgagaaggctggagaatgcacagtccttggcagtttgatgaggacgaaggaaggcacagaactggcttggccgctggaacgacaagccctctttctgcgtccagtaccagctcaggcggccccgagttagttgtgctgggtaccaggcccccccggcccgcttggacatttggtgatccccacatcaccactttggataacgccaaatacaccttcaacgggctaggatacttcctgctggttcaggcccaggacagaaattcttccttcctgctggagggccgcactgcccagactgattctgccaatgccacgaacttcattgcctttgcggcccaatacaacaccagcagcctgaagtctcccatcacagttcagtggtttcttgagcccaatgacacaatccgagttgtacacaataaccaaacggtggcctttaacaccagcgacactgaagacttgcccgtattcaatgccactggtgtcctactgatccaaaatggctcccaagtctcagccaactttgatgggacagtgaccatctctgtgattgctctctccaacatccttcacgcctcctccagcctgtcagaggagtaccgcaaccacacaaagggccttctgggagtctggaatgacaatccagaagatgacttcagaatgcccaatggctccaccatcccctccaacacgtccgaggagactcttttccactatggaatgacatcggaaactaacgggataggcctccttggggtgaggacagaccctctgccttctgagtttactcccatcttcttgtcccaactgtggaacaagagcggcgccggtgaagacttgatctctgggtgcaacgaggacgcacagtgcaagtttgacatcctggccacaggaaacagagacatcggacaaagcaccaactcaatccttagaacattccggcacgtgaatggcacgctcaaccagtacccaccccctatccactacagcagcaagattcaagcctacaaggggcgagaacagtggccattgagatcaccagcaactctaaggatgtcgtattcagcctctccaacaagtgcagtggcctttgagctctttgaaaacgggagtttgcacgtggacaccaacatccccagaagaacgtacctggagattctagcaagggatgtcaagactaacttgtcatcggtactccagcctgagacggtggcttgcttctgtagtaaggaggaacagtgtttgtacaacgagaccagcaaagagggcaactcttccactgaggtgaccagctgcaagtgcgatgggaactccttcggccgcttgtgtgaacactctaaggacctctgcactgagccatgcttccctaatgtggactgcattcctgggaagggctgtcaggcctgccctccaaacatgactggagatgggcgtcattgtgtagctgtggagatctctgaattctgccagaaccattcctgtcctgtgaattactgctataaccatggccattgcgacatctctgggcctccagactgccagcccacttgcacctgcgcccctgccttcactggtaaccgctgcttcctggccgggaacaatttcactcccatcatctataaagagcttcccttgaggaccatcacgctctctctcagggaggacgaaaacgcctctaacgctgacgtcaatgcctcggtggcaaacgtactagagaacttggacatgcgggcttttctctccaacagcttagtggagctgatacgaacctctcccggagcaccagtccttggcaagcccattcatcactggaaggtcgtctcccacttcaagtaccgtcccaggggacccctcatccactatctgaacaaccaactgataagcgccgtgatggaggccttcctcctccaggctcggcaggagaggcggaagaggagtggagaagccaggaagaacgtccgcttcttccccatctcgagggcagacgtccaggacgggatggccctgaacctaagtatgctggacgagtacttcacgtgcgatggctacaaaggctaccacttggtctacagcccccaggatggcgtcacctgtgtgtccccatgtagtgagggctactgtcacaatggaggccaatgcaagcacctgccagatgggccccagtgcacgtgcgcaaccttcagcatctacacatcctggggcgaacgctgtgagcatctaagcgtgaaacttggggcattcttcgggatcctctttggagccctgggtgccctcttgctactggccatcttagcatgtgtggtctttcacttctgcggctgctccatgaacaagttctcctaccctctggactcagaactgtgaggcctcgtcccagatgggcagctgcacctagaatacctcaggacccgcccaccggtctgcccctgctctagggagactggaaagggccgactcgatgaagatgatttgagattcttcaagcatgaataaagggagtgaaaccagactctaccattttagtaggccatgggtataggttttccggagatgaggaaatgtagagatggatggattcctatacagcacatgggaaaggatattgcctatgtacacacacacacacacacacaccagagttaatggatgactggctttatattcaccaaaatgtttttacttataaaaccagcatacttctcattaaaatctatttaaatataaaaaaaaaaccggaattc

SEQ ID NO: 8004 - protein, 1805 aa, Rattus norvegicus
  ref <308>: DATABASE ACCESSION NUMBER: SWISS-Prot / AAA85523
  ref <309>: DATABASE ENTRY DATE: 2003-02-01
LTSSQSQHTGSMKTTHNPQTTRNTEVTTTLSASSSDQVQVETTSQTTLSDATTTSHAPRESSSPPSTSDILTTMASTEGTSGDTGHTMAVTTQGSTPATTEISVTPSTQKMSPVSTFSTSTQEITTLSQSQHTGGMKTTRNPQTTGTTEVTTTLSASSSDQVQAETSSQTTLSPDTTTTSHAPRESSSPPSTSDMLTTTASTEGTSGDTGHTTAVTTQGSIPATTQLSTTFASQKMSTVSTPTTSSIQELSTLPQSQHTGSMEISSRPQTTSVTSTLSSSPSGSTPVQTRSVTSSSDERTNPTSSGVSNTSPATTEVLTPTSSPESTPGNTAPRTTETSTTTTTKVLMTSLQQKLPTGSTLGTSTPTEVTTTLSASSSDQVQVETTSQTTLSPDATTTSHAPRESSSPPSTSVILTTMASTEGTSGDTGHTTAVTDQGSTPATTEISVTPSTQKMSTVSTLVTSTQELTSSQSQRTGSMGTSSKPQATTPTEVTTSTLSSFSRGSLFSARNCCLQTKKPPLPAVVCLPDPSSVPSLMHSSKPQATTPTEVTTSTLSSFSRGSTQTQTVSWETSSSGKITAPSTSSRRTPSVATSDIFTTTDSTSGNAGHTLLTGSHSVITSRVASTTLGRLSTVAHRQSTQRSSTHSQSYLTESMGASSTSETSLLTEATTETSLCLFTWTHCDRDLLSWTSSSGLTTKTDNDRSTALSATSLTLPAPSTSTASRSTVPPAPLPPDQGISLFQIGFPLGSLCGIPSILQITVRSFSPSQTTMSSPTPTHLKEASQEGSVCHSGHSGVMLISLAPGEPYFRTTTSHFTMSSTSLIRKVESLINEFTSDWSFKPSDTEVTWVNVPAYPAQGRTLGANTYQAILSTDGSRSYALFLYQSGGMRWDVTQGLYNRVLMGFSSGDGYFENSPLIFRPAVEKYRPDRFLTPNYGSGDSRSTGYTGRCGPTTGSSVCSGWKVSLSSPAGAGTRFPALAPGSRDFGSGSSTQVCGAGSYAASLRAGRVLYVWHLGEFREGWRMHSPWQFDEDEGRHRTGLAAGTTSPLSASSTSSGGPELVVLGTRPPRPAWTFGDPHITTLDNAKYTFNGLGYFLLVQAQDRNSSFLLEGRTAQTDSANATNFIAFAAQYNTSSLKSPITVQWFLEPNDTIRVVHNNQTVAFNTSDTEDLPVFNATGVLLIQNGSQVSANFDGTVTISVIALSNILHASSSLSEEYRNHTKGLLGVWNDNPEDDFRMPNGSTIPSNTSEETLFHYGMTSETNGIGLLGVRTDPLPSEFTPIFLSQLWNKSGAGEDLISGCNEDAQCKFDILATGNRDIGQSTNSILRTFRHVNGTLNQYPPPIHYSSKIQAYKGREQWPLRSPATLRMSYSASPTSAVAFELFENGSLHVDTNIPRRTYLEILARDVKTNLSSVLQPETVACFCSKEEQCLYNETSKEGNSSTEVTSCKCDGNSFGRLCEHSKDLCTEPCFPNVDCIPGKGCQACPPNMTGDGRHCVAVEISEFCQNHSCPVNYCYNHGHCDISGPPDCQPTCTCAPAFTGNRCFLAGNNFTPIIYKELPLRTITLSLREDENASNADVNASVANVLENLDMRAFLSNSLVELIRTSPGAPVLGKPIHHWKVVSHFKYRPRGPLIHYLNNQLISAVMEAFLLQARQERRKRSGEARKNVRFFPISRADVQDGMALNLSMLDEYFTCDGYKGYHLVYSPQDGVTCVSPCSEGYCHNGGQCKHLPDGPQCTCATFSIYTSWGERCEHLSVKLGAFFGILFGALGALLLLAILACVVFHFCGCSMNKFSYPLDSEL

SEQ ID NO: 8005 - DNA, 3815 bp, Homo sapiens
  ref <308>: DATABASE ACCESSION NUMBER: EMBL / AJ242542
  ref <309>: DATABASE ENTRY DATE: 2000-08-16
cctctgaagatggaaacatcaggaatgacaacaccgtcactgaagacagacggtgggagacgcacagccacatcaccaccccccacaacctcccagaccatcatttccaccattcccagcactgccatgcacacccgctccacagctgcccccatccccatcctgcctgagagaggtgaggccatacaggagtttccctcttcccctatggggcagacgccggggacctggagttcgtcaggaggaccgtggacttcacctccccactcttcaagccggcgactggcttcccccttggctcctctctccgtgattccctctacttcacagacaatggccagatcatcttcccagagtcagactaccagattttctcctaccccaacccactcccaacaggcttcacaggccgggaccctgtggccctggtggctccgttctgggacgatgctgacttctccactggtcgggggaccacattttatcaggaatacgagacgttctatggtgaacacagcctgctagtccagcaggccgagtcttggattagaaagatcacaaacaacgggggctacaaggccaggtgggccctaaaggtcacgtgggtcaatgcccacgcctatcctgcccagtggaccctcgggagcaacacctaccaagccatcctctccacggacgggagcaggtcctatgccctgtttctctaccagagcggtgggatgcagtgggacgtggcccagcgctcaggcaacccggtgctcatgggcttctctaggcctccaagggctgcagttctacaggctacaccgggaagaaaggcccaactaccgtctcgagtgcctgcagtggctgaagagccagcctcggtggcccagctggggctggaaccaggtctcctgcccttgttcctggcagcagggacgacgggacttacgattccaacccgtcagcataggtcgctggggcctcggcagtaggcagctgtgcagcttcacctcttggcgaggaggcgtgtgctgcagctacgggccctggggagagtttcgtgaaggctggcacgtgcagcgtccttggcagttggcccaggaactggagccacagagctggtgctgccgctggaatgacaagccctacctctgtgccctgtaccagcagaggcggccccacgtgggctgtgctacatacaggcccccacagcccgcctggatgttcggggacccccacatcaccaccttggatggtgtcagttacaccttcaatgggctgggggacttcctgctggtcggggcccaagacgggaactcctccttcctgcttcagggccgcaccgcccagactggctcagcccaggccaccaacttcatcgcctttgcggctcagtaccgctccagcagcctgggccccgtcacggtccaatggctccttgagcctcacgacgcaatccgtgtcctgctggataaccagactgtgacatttcagcctgaccatgaagacggcggaggccaggagacgttcaacgccaccggagtcctcctgagccgcaacggctctgaggtctcggccagcttcgacggctgggccaccgtctcggtgatcgcgctctccaacatcctccacgcctccgccagcctcccgcccgagtaccagaaccgcacggaggggctcctgggggtctggaataacaatccagaggacgacttcaggatgcccaatggctccaccattcccccagggagccctgaggagatgcttttccactttggaatgacctggcagatcaacgggacaggcctccttggcaagaggaatgaccagctgccttccaacttcacccctgttttctactcacaactgcaaaaaaacagctcctgggctgaacatttgatctccaactgtgacggagatagctcatgcatctatgacaccctggccctgcgcaacgcaagcatcggacttcacacgagggaagtcagtaaaaactacgagcaggcgaacgccaccctcaatcagtacccgccctccatcaatggtggtcgtgtgattgaagcctacaaggggcagaccacgctgattcagtacaccagcaatgctgaggatgccaacttcacgctcagagacagctgcaccgacttggagctctttgagaatgggacgttgctgtggacacccaagtcgctggagccattcactctggagattctagcaagaagtgccaagattggcttggcatctgcactccagcccaggactgtggtctgccattgcaatgcagagagccagtgtttgtacaatcagaccagcagggtgggcaactcctccctggaggtggctggctgcaagtgtgacgggggcaccttcggccgctactgcgagggctccgaggatgcctgtgaggagccgtgcttcccgagtgtccactgcgttcctgggaagggctgcgaggcctgccctccaaacctgactggggatgggcggcactgtgcggctctggggagctctttcctgtgtcagaaccagtcctgccctgtgaattactgctacaatcaaggccactgctacatctcccagactctgggctgtcagcccatgtgcacctgccccccagccttcactgacagccgctgcttcctggctgggaacaacttcagtccaactgtcaacctagaacttcccttaagagtcatccagctcttgctcagtgaagaggaaaatgcctccatggcagaggtcaacgcctcggtggcatacagactggggaccctggacatgcgggcctttctccgcaacagccaagtggaacgaatcgattctgcagcaccggcctcgggaagccccatccaacactggatggtcatctcggagttccagtaccgccctcggggcccggtcattgacttcctgaacaaccagctgctggccgcggtggtggaggcgttcttataccacgttccacggaggagtgaggagcccaggaacgacgtggtcttccagcccatctccgaggaagacgtgcgcgatgtgacagccctgaacgtgagcacgctgaaggcttacttcagatgcgatggctacaagggctacgacctggtctacagcccccagagcggcttcacctgcgtgtccccgtgcagtaggggctactgtgaccatggaggccagtgccaacacctgcccagtgggccccgctgcagctgtgtgtccttctccatctacacggcctggggcgagcactgtgagcacctgagcatgaaactcgacgcgttcttcggcatcttctttggggccctgggcggcctcttgctgctgggggtcgggacgttcgtggtcctgcgcttctggggttgctccggggccaggttctcctatttcctgaactcagctgaggccttgccttgaaggggcagctgtggcctaggctacctcaagactcacctcatccttaccgcacatttaaggcgccattgcttttgggagactggaaaagggaaggtgactgaaggctgtcaggattcttcaaggagaatgaatactgggaatcaagacaggactataccttatccataggcgcaggtgcacagggggaggccataaagatcaaacatgcatggatgggtcctcacgcagacacacccacagaaggacactagcctggcgcgcgtgcacacacacacacacacacacgagttcataatgtggtgatggccctaagttaagcaaaatgcttctgcacacaaaactctctggtttacttcaaattaactctatttaaataaagtctctctgactttttgtgtctccaaaaaaaaaaaaaaaaa

SEQ ID NO: 8006 - protein, 1125 aa, Homo sapiens [sequence omitted]

SEQ ID NO: 8007 - DNA, 1217 bp, Rattus norvegicus
  ref <308>: DATABASE ACCESSION NUMBER: EMBL / U07181
  ref <309>: DATABASE ENTRY DATE: 2000-03-04
cagagcctcctcttgtctggacaagatggcaacccttaaggaaaagctcattgcgccagtcgcagacgacgagactgccgtcccgaacaacaagattactgtagtaggcgttggacaagttggaatggcttgtgctatcagcattctggggaagtctctggctgatgagcttgccctggtggatgtcttggaagacaagctcaaaggagaaatgatggatctgcagcacgggagcttatttctccagactccgaaaatcgtggctgataaagattactccgtgacagccaattctaagattgtggtggtgaccgcgggagtccgccagcaggagggggagagtcggctcaacctggtgcagagaaacgtcaatgtattcaagttcattattcctcagatcgtcaagtacagccccgactgcaccatcatcgtggtttccaacccagtggatattcttacctatgtcacctggaagctgagcgggctacctaagcaccgcgtgattggaagtggatgcaatctggattctgctcggtttcgttacctcatggccgaaaagcttggtattcatcccagcagctgccacggctggatcctgggcgagcacggggactccagtgtggcagtgtggagcggggtgaatgtggcaggagtctccctccaggaactgaacccagagatgggaacggacaatgacagcgagaactggaaggaggtgcataagatggtggtggacagtgcctatgaagtcatcaagctaaaaggctacaccaactgggccatcggcctaagtgtggctgacctcatcgaatccatgctgaaaaacctctctcggattcaccccgtgtctacaatggtgaagggaatgtacggcatcgagaacgaagtcttcctcagtctcccgtgcatccttaatgctcggggactgaccagcgtcatcaaccagaagctgaaggacgatgaggtcgctcagctcaggaagagtgcggacaccctgtgggatatccagaaagacctcaaggacctgtgactgccaggcgccaggctgtagaaatccaaacctccaatgtgactaagtgaacctttagtcttcggccttgtacgtaggtcacagtttgcttcttccctaacatgtgataatgagctcacagatcaaaaccaggagtgtttgatgtttgcactaggagctcctgaacaaataaagtttagcaattgca

SEQ ID NO: 8008 - protein, 333 aa, Rattus norvegicus
  ref <308>: DATABASE ACCESSION NUMBER: SWISS-Prot / P42123
  ref <309>: DATABASE ENTRY DATE: 2002-06-15
ATLKEKLIAPVADDETAVPNNKITVVGVGQVGMACAISILGKSLADELALVDVLEDKLKGEMMDLQHGSLFLQTPKIVADKDYSVTANSKIVVVTAGVRQQEGESRLNLVQRNVNVFKFIIPQIVKYSPDCTIIVVSNPVDILTYVTWKLSGLPKHRVIGSGCNLDSARFRYLMAEKLGIHPSSCHGWILGEHGDSSVAVWSGVNVAGVSLQELNPEMGTDNDSENWKEVHKMVVDSAYEVIKLKGYTNWAIGLSVADLIESMLKNLSRIHPVSTMVKGMYGIENEVFLSLPCILNARGLTSVINQKLKDDEVAQLRKSADTLWDIQKDLKDL

SEQ ID NO: 8009 - DNA, 321 bp, Homo sapiens
  ref <308>: DATABASE ACCESSION NUMBER: EMBL / BF913405
  ref <309>: DATABASE ENTRY DATE: 2001-08-31
cagggcaatctctgaaggaacaactcatcgcaccagctgcggaagaagaggcaacaggtgccaaacaagtaagatcactgtagggggtgtcggacaagtaggtatggcgtgtgctatcagcattctgggaaagtctctggctgatgaacttgctctggtggagtgttttggaaggcagtttttaagacaaaacacgggagatgatcagacttcctgaatagagaaagcttatgtgcttcgttacattggggaacaactgaagagattcttgactcaaccttttagagcttagtccatgtggcaacgagaaatgggctttgg

SEQ ID NO: 8010 - protein, 334 aa, Homo sapiens
  ref <308>: DATABASE ACCESSION NUMBER: Refseq / NP_002291
  ref <309>: DATABASE ENTRY DATE: 2002-11-05
MATLKEKLIAPVAEEEATVPNNKITVVGVGQVGMACAISILGKSLADELALVDVLEDKLKGEMMDLQHGSLFLQTPKIVADKDYSVTANSKIVVVTAGVRQQEGESRLNLVQRNVNVFKFIIPQIVKYSPDCIIIVVSNPVDILTYVTWKLSGLPKHRVIGSGCNLDSARFRYLMAEKLGIHPSSCHGWILGEHGDSSVAVWSGVNVAGVSLQELNPEMGTDNDSENWKEVHKMVVESAYEVIKLKGYTNWAIGLSVADLIESMLKNLSRIHPVSTMVKGMYGIENEVFLSLPCILNARGLTSVINQKLKDDEVAQLKKSADTLWDIQKDLKDL

SEQ ID NO: 8011 - DNA, 1217 bp, Rattus norvegicus; identical to SEQ ID NO: 8007
  ref <308>: DATABASE ACCESSION NUMBER: EMBL / U07181
  ref <309>: DATABASE ENTRY DATE: 2000-03-04

SEQ ID NO: 8012 - protein, 333 aa, Rattus norvegicus; identical to SEQ ID NO: 8008
  ref <308>: DATABASE ACCESSION NUMBER: SWISS-Prot / P42123
  ref <309>: DATABASE ENTRY DATE: 2002-06-15

SEQ ID NO: 8013 - DNA, 321 bp, Homo sapiens; identical to SEQ ID NO: 8009
  ref <308>: DATABASE ACCESSION NUMBER: EMBL / BF913405
  ref <309>: DATABASE ENTRY DATE: 2001-08-31

SEQ ID NO: 8014 - protein, 334 aa, Homo sapiens; identical to SEQ ID NO: 8010
  ref <308>: DATABASE ACCESSION NUMBER: Refseq / NP_002291
  ref <309>: DATABASE ENTRY DATE: 2002-11-05

SEQ ID NO: 8015 - DNA, 2370 bp, Rattus norvegicus
  ref <308>: DATABASE ACCESSION NUMBER: EMBL / U08214
  ref <309>: DATABASE ENTRY DATE: 2000-03-04
gtggaattcttagagccaaatgtgaatgatagcaataatctatacattctagtagccagggaggacaagttttgccatgaaagatccaggttacaaaactctaatgcagttcaaactcagaatgatgacacattccaacattcaatcaggaagggctacaaagaccctatctaaaaaaacaagaaacaaaaaccaaatcaagtcaataaaccaaagtaccactataggaagatttgtaaatgttaaattattttaccaacgatctttatttttaaaataagcccaacttcaatcaaagtgaagtttttaatgttaattctttatacaaatcaatctttagagtgacagttctgagtttctctgtgtcaccttggctgtcctccaacagaggttgacctgcctctgcctgcccgagtgctacgattgaagaccgtgccaccaacgctcgaggccttaaagatgataacctacaaaattctgctttaaagaatattctattgtgacgtaagcctgtaaatcttaccacttgagaggtctctgatataattagatcacaagtttaaggtcagtttgtgtcacacagttcaaggctagactgaacttcttcacagcaagaccttatctcaaaaacaagcaaaaacataaacaaaaaaggaaaaaaagaaaaaagaaaaaaacccacccaactacaataagatcacaactcaagaattttaagtttaacaaacatacttaagacttctcccaaaaaaaaaaaagtatattcccagaaatatagaaactctctatttcaatgattttgtatatatccttagagaagaaacattttcttggcacagaggcagagctgaaacaatgtcttactatgtaagacattctctcgtgccgaattcggcacgagagaagaagggcaggatgctgggggtctactgcgagagtggtacatgatcatctctcgagagatgttcaaccctatgtatgccttgttccgtacctcacctggtgaccgggtcactacacgatcaatccatcttcccactgtaaccccaaccacctcagctacttcaagtttagctggacgatatgtagccaaagctgtaatgacaaccgccctcctggagtgctactttactaggtctttctacaaacacatcttgggcaaatctgtcaggtatacagatatggagagtgaggattaccacttctaccagggtctagtttatctgcttgaaaatgatgtctctacattaggttatgacctcaccttcagcactgaggttcaagaatttggagtatgtgaggttcgtgacctcaaacccaatggagccaacatcttagtaacagaggagaacaagaaggaatatgtacacctggtttgccagatgagaatgacaggagccatccgcaaacagctggcagccttcttagaaggcttctatgaaatcattccaaagcgcctcatatccatctttactgagcaggagttagagctgctctatacagggctgcctaccatcgacatagatgacctaaaatctaacactgagtaccacaagtaccagtccaactccattcagatccaatggttctggagagcattgcgttcctttgaccaagcagaccgtgccaagttcctccagtttgtcacaggtacttccaaggtgcccctgcaaggatttgctgcccttgaaggcatgaatggcattcagaagtttcagattcatcgagacgacagatccacagatcgcctgccttcagctcacacatgttttaatcaactggacctgcctgcctatgagagctttgagaagctccgccacatgctactattggccatccaggagtgctctgaaggctttgggctggctaataaataaggccctgcctacttctgtggggtttttctaccatttttggacctggggaggggggggggtttaaaagatccagaaagaaaatgtcaaaatccaataaatgaaattcaccaactcaccatgtgtgtgtccagctgcccatcttcctagtgcatacctgttcgcttctcattctctttcctctaccctttccttgcctttcccttttccatgccgtccatgatccccaccccatgtgttaagaaggcagttgctttgcagggacctgtttgtccaactgaacagtgtgctcctcagattctgtgttcagaaggatttgctgcattgagacttgaaacctttggtaaggggaaaattatatatatatatatttttttgttctgtttgcatttcttaatttgtgcttggaatgtgttgatgtgcacagctaatgattcaatgcgagacaagattggcatctgtgttgtggaggttcaaataaagagcactcttcata

SEQ ID NO: 8016 - protein, 310 aa, Rattus norvegicus
  ref <308>: DATABASE ACCESSION NUMBER: SWISS-Prot / AAA81950
  ref <309>: DATABASE ENTRY DATE: 2001-10-16
MIISREMFNPMYALFRTSPGDRVTTRSIHLPTVTPTTSATSSLAGRYVAKAVMTTALLECYFTRSFYKHILGKSVRYTDMESEDYHFYQGLVYLLENDVSTLGYDLTFSTEVQEFGVCEVRDLKPNGANILVTEENKKEYVHLVCQMRMTGAIRKQLAAFLEGFYEIIPKRLISIFTEQELELLYTGLPTIDIDDLKSNTEYHKYQSNSIQIQWFWRALRSFDQADRAKFLQFVTGTSKVPLQGFAALEGMNGIQKFQIHRDDRSTDRLPSAHTCFNQLDLPAYESFEKLRHMLLLAIQECSEGFGLANK

SEQ ID NO: 8017 - DNA, 3312 bp, Rattus norvegicus
  ref <308>: DATABASE ACCESSION NUMBER: EMBL / U08257
  ref <309>: DATABASE ENTRY DATE: 2000-03-04
cttttctggttcttgttgtcccggagcgttatgtcatgcccagaccagcagagggctccatgaggagttatagaagatgccccgtgtctctgctcctctggtgctgcttcctgcttggctcttgatggtggcctgtagcccacactccctgaggatcgctgctatcttggatgaccccatggagtgcagcagaggggaacggctctccatcaccctggccaagaaccgcatcaaccgcgcaccagagaggctgggcaaggcaaaagtcgaagtggacatctttgagcttctcagagacagcgagtacgaaactgcagaaaccatgtgtcagatcctccccaagggagtggtcgctgtcctgggaccgtcgtccagcccagcctccagctccatcatcagcaacatctgtggagagaaggaggtccctcatttcaaagtggccccagaggagtttgtcaggttccaactccagagattcaccaccctgaaccttcaccccagcaacaccgacatcagcgtggctgtggctgggatcctgaacttcttcaactgcaccaccgcctgcctcatctgtgccaaagcagaatgccttttaaacctggagaagctgctccggcaattccttatctccaaggacacactgtcggtccggatgctggatgacacacgggaccccactccgctcctcaaggagatccgggatgacaagacagctactatcatcatccatgccaacgcctccatgtcgcacaccatcctcctgaaggcagctgaactggggatggtgtcagcctattacacctacatcttcaccaatctggagttctccctccagagaatggacagccttgtggatgatagagtcaacatcttaggattttccattttcaaccaatcccatgctttcttccaagagttctcccagagcctcaaccaatcctggcaggagaactgtgaccacgtgcccttcaccggccctgcgttgtcctcagccctactgtttgacgctgtctacgctgtggtgacagcggtacaggaactgaaccggagccaggaaattggcgtgaagcccctgtcctgtggctcggcccagatctggcagcatggcaccagcctcatgaactacctgcgcatggtagaattggaaggtcttaccggccacattgaattcaacagcaaaggccagaggtccaactatgccttgaaaatcttacagttcaccaggaatgggtttcggcagattggccagtggcatgtggcagagggcctcagcatggacagccgcctctacgcctccaacatctctgacagtctcttcaacaccaccctggtcgtcaccaccatcctggaaaacccatacctaatgctgaaggggaaccaccaggacatggaaggcaatgaccggtacgagggattctgcgtggacatgctcaaggagttggctgagatcctacggttcaactacaagatccgcctcgttggggatggtgtttacggcgtacctgaggccaacggcacctggacgggcatggttggggagctgatcgctcggaaagcagatctggctgtggcgggcctcaccatcacagctgaacgtgagaaagtgattgatttctccaagccgttcatgacgctgggaattagtattctttacagagttcatatgggacgcagaccgggctatttctcctttctggaccccttttctccaggagtctggctcttcatgcttctagcttatctggctgtcagctgtgtcctcttcctggtggctcggttaactccttatgagtggtacagtccacatccttgtgcacagggccggtgtaatctcctggtcaaccagtactctctgggcaacagcctctggtttccagtgggaggcttcatgcagcaaggctccaccatcgccccgcgggctttgtccacacgctgcgtcagtggtgtctggtgggccttcacgttgatcatcatctcatcgtacacagccaacctggcagccttcctgacggtgcagcgcatggaagtgcccatcgagtctgtggatgacctggctgaccagaccgccattgagtatggcacgattcacggaggctccagcatgaccttcttccaaaattcccgctaccagacctaccagcgcatgtggaattacatgtactccaagcagcccagtgtgtttgtgaagagcacagaggagggaattgccagggtgttgaattccaactacgccttcctgctggagtccaccatgaacgagtactaccggcagaggaactgcaacctcactcagattgggggcctgctggacaccaagggctatgggattggcatgccagtcggctcagtgttccgggatgagttcgacctggccattctccagctgcaggagaacaaccgcctggagattctgaagcggaagtggtgggaagggggaaaatgtcccaaggaggaggaccacagagccaaaggcctgggaatggagaatattggtggaatctttgtggttcttatttgtggcttaatagtggccatttttatggctatgctggagtttttatggactctcagacactcagaagcatcagaggtgtctgtgtgtcaggagatgatgactgagctgcgcagcatcatcctgtgccaggacaatatccatccccggaggcggcgctctggaggcctgccaccccagcccccggtcctggaggagcgccggcccaggggtacagcgacgctcagcaatggcaagctatgtggcgccggggagccggaccaactggcgcagagactggctcaggaggccgccctggtggcccgaggctgcacgcacatccgcgtgtgcccggagtgccgccgcttccagggcctgcgggctcgaccgtcgccagcgcgcagcgaggagagcctggagtgggacaagaccaccaacagcagcgagcctgagtagtggcggcgaaggaccgtggagccaggcggggaggcgggagggctaatgttacaacctccttctctccgattgaagattcagtgactttacaaagtcactgatggcccagctagggcggatcccgccctatctgagacttgcaaacacgtggcagagacattgtccctcttgggcacaaggacccatctcctccagagggtctttccctcacattcaaaaacatggattctgggtagtggggccctgctgagagagcagtccaagaaattgatggtatcatcagttggattaccccctaggaaggggccattgtaccctgggtctagttcttacaggaaaaaaaaaattaaactcaacagggaagg

SEQ ID NO: 8018 - protein, 956 aa, Rattus norvegicus
  ref <308>: DATABASE ACCESSION NUMBER: SWISS-Prot / Q01812
  ref <309>: DATABASE ENTRY DATE: 2002-06-15
MPRVSAPLVLLPAWLLMVACSPHSLRIAAILDDPMECSRGERLSITLAKNRINRAPERLGKAKVEVDIFELLRDSEYETAETMCQILPKGVVAVLGPSSSPASSSIISNICGEKEVPHFKVAPEEFVRFQLQRFTTLNLHPSNTDISVAVAGILNFFNCTTACLICAKAECLLNLEKLLRQFLISKDTLSVRMLDDTRDPTPLLKEIRDDKTATIIIHANASMSHTILLKAAELGMVSAYYTYIFTNLEFSLQRMDSLVDDRVNILGFSIFNQSHAFFQEFSQSLNQSWQENCDHVPFTGPALSSALLFDAVYAVVTAVQELNRSQEIGVKPLSCGSAQIWQHGTSLMNYLRMVELEGLTGHIEFNSKGQRSNYALKILQFTRNGFRQIGQWHVAEGLSMDSRLYASNISDSLFNTTLVVTTILENPYLMLKGNHQDMEGNDRYEGFCVDMLKELAEILRFNYKIRLVGDGVYGVPEANGTWTGMVGELIARKADLAVAGLTITAEREKVIDFSKPFMTLGISILYRVHMGRRPGYFSSLDPFSPGVWLFMLLAYLAVSCVLFLVARLTPYEWYSPHPCAQGRCNLLVNQYSLGNSLWFPVGGFMQQGSTIAPRALSTRCVSGVWWAFTLIIISSYTANLAAFLTVQRMEVPIESVDDLADQTAIEYGTIHGGSSMTFFQNSRYQTYQRMWNYMYSKQPSVFVKSTEEGIARVLNSNYAFLLESTMNEYYRQRNCNLTQIGGLLDTKGYGIGMPVGSVFRDEFDLAILQLQENNRLEILKRKWWEGGKCPKEEDHRAKGLGMENIGGIFVVLICGLIVAIFMAMLEFLWTLRHSEASEVSVCQEMMTELRSIILCQDNIHPRRRRSGGLPPQPPVLEERRPRGTATLSNGKLCGAGEPDQLAQRLAQEAALVARGCTHIRVCPECRRFQGLRARPSPARSEESLEWDKTTNSSEPE

SEQ ID NO: 8019 - DNA, 2871 bp, Homo sapiens
  ref <308>: DATABASE ACCESSION NUMBER: EMBL / S67803
  ref <309>: DATABASE ENTRY DATE: 2000-03-04
atgccccgcgtctcggcgcctttggtgctgcttcctgcgtggctcgtgatggtcgcctgcagcccgcactccttgaggatcgctgctatcttggacgaccccatggagtgcagcagaggggagcggctctccatcaccctggccaagaaccgcatcaaccgcgctcctgagaggctgggcaaggccaaggtcgaagtggacatctttgagcttctcagagacagcgagtacgagactgcagaaaccatgtgtcagatcctccccaagggggtggtcgctgtcctcggaccatcgtccagcccagcctccagctccatcatcagcaacatctgtggagagaaggaggtccctcacttcaaagtggccccagaggagttcgtcaagttccagttccagagattcacaaccctgaacctccaccccagcaacactgacatcagcgtggctgtagctgggatcctgaacttcttcaactgcaccaccgcctgcctcatctgtgccaaagcagaatgccttttaaacctagagaagctgctccggcaattccttatctccaaggacacgctgtccgtccgcatgctggatgacacccgggaccccaccccgctcctcaaggagatccgggacgacaagaccgccaccatcatcatccacgccaacgcctccatgtcccacaccatcctcctgaaggcagccgaacttgggatggtgtcagcctattacacatacatcttcactaatctggagttctcactccagagaacggacagccttgtggatgatcgtgtcaacatcctgggattttccattttcaaccaatcccatgctttcttccaagagtttgcccagagcctcaaccagtcctggcaggagaactgtgaccatgtgcccttcactgggcctgcgctctcctcggccctgctgtttgatgctgtctatgctgtggtgactgcggtgcaggaactgaaccggagccaagagatcggcgtgaagcccttgtcctgcggctcggcccagatctggcagcacggcaccagcctcatgaactacctgcgcatggtagaattggaaggtcttaccggccacattgaattcaacagcaaaggccagaggtccaactacgctttgaaaatcttacagttcacaaggaatggttttcggcagatcggccagtggcacgtggcagagggcctcagcatggacagccacctctatgcctccaacatctcggacactctcttcaacaccaccctggtcgtcaccaccatcctggaaaacccatatttaatgctgaaggggaaccaccaggagatggaaggcaatgaccgctacgagggcttctgtgtggacatgctcaaggagctggcagagatcctccgattcaactacaagatccgcctggttggggatggcgtgtacggcgttcccgaggccaacggcacctggacgggaatggtcggggagctgatcgctaggaaagcagatctggctgtggcaggcctcaccattacagctgaacgggagaaggtgattgatttctctaagccattcatgactctgggaattagcattctttaccgcattcatatgggacgcaaacccggctatttctccttcctggacccattttctccgggcgtctggctcttcatgcttctagcctatctggccgtcagctgtgtcctcttcctggtggctcggttgacgccctacgagtggtacagcccacacccatgtgcccagggccggtgcaacctcctggtgaaccagtactccctgggcaacagcctctggtttccggtcggggggttcatgcagcagggctccaccatcgcccctcgcgccttatccacccgctgtgtcagtggcgtctggtgggcattcacgctgatcatcatctcatcctacacggccaacctggcagccttcctgaccgtgcagcgcatggatgtgcccattgagtcagtggatgacctggctgaccagaccgccattgaatatggcacaattcacggaggctccagcatgaccttcttccaaaattcccgctaccagacctaccaacgcatgtggaattacatgtattccaagcagcccagcgtgttcgtgaagagcacagaggagggaatcgccagggtgttgaattccaactacgccttcctcctggaatccaccatgaacgagtactatcggcagcgaaactgcaacctcactcagattgggggcctgctggacaccaagggctatgggattggcatgccagtcggctcggttttccgggacgagtttgatctggccattctccagctgcaggagaacaaccgcctggagatcctgaagcgcaaatggtgggaaggagggaagtgccccaaggaggaagatcacagagctaaaggcctgggaatggagaatattggtggaatctttgtggttcttatttgtggcttaatcgtggccatttttatggctatgttggagtttttatggactctcagacactcagaagcaactgaggtgtccgtctgccaggagatggtgaccgagctgcgcagcattatcctgtgtcaggacagtatccacccccgccggcggcgcgccgcagtcccgccgccccggccccccatccccgaggagcgccgaccgcggggcacggcgacgctcagcaacgggaagctgtgcggggcaggggagcccgaccagctcgcgcagagactggcgcaggaggccgccctggtggcccgcggctgcacgcacatccgcgtctgccccgagtgccgccgcttccagggcctgcgggcacggccgtcgcccgcccgcagcgaggagagcctggagtgggagaaaaccaccaacagcagcgagcccgagtag

SEQ ID NO: 8020 - protein, 956 aa, Homo sapiens [sequence omitted]

SEQ ID NO: 8021 - DNA, 1178 bp, Rattus norvegicus
  ref <308>: DATABASE ACCESSION NUMBER: EMBL / U08290
  ref <309>: DATABASE ENTRY DATE: 2000-03-04
gcgaacccttgctctcgaccacccacccactttcggaaccatggccgcagtggcagcagcctcggcagaactgctcatcatcggctggtacatcttccgcgtgctgctgcaggtgttcctggaatgctgcatttactgggtaggattcgcttttcgaaatcctccagggacacagcccattgcgagaagtgaggtgttcaggtactccctgcagaagctggcgcacacggtgtcccggaccgggcggcaggtgctgggggagcgcaggcaccgagcccccaactgaggccccatctcccagccctgggcggccgtgtcatcaggtgctcctgtgcttctcgaccagcatgggagccaatgccgcgcaggaatggggggtcccctgtgctccctcgtcagaggagcacttgccaaggtcagtgaggggccggtaggtccccagaaaagcagcaccgacaatgatgaagacatcagttcctttcccagccccccccccctttgcccctgtcccatggccggcgggtgggagaggatgggggaagaggggagcaaccctcgagatatgggcgtaggcaccacattctgatctggaccaagttggaacagcaccatctcagccgcacagatcctaccatggagagctaacaccccaccaaccagcagaatggacattctgacatcaccagctgaaaccctgaatctcggtgcagaagagaaagtgtcaactgcgtgcagcactgggggagtggagggtgtgggtggtggaggaagagggttaagaaaactagtggggccctcttgctgtcccttgcctatggcacgcatattcctgccttgctccctcactccccctctcccctgccttccaaagccccaccccccaaaaatgtgtcacttgattcggacctattcaaccagtaattggatcccacctttaccaaaacaccgtctctgacccccggcccttcactgatcttgcttatccctggtctcacgcagcagttgtggttgctattgtggtagtcgctaattgtactagtttacgtgtgcattagttgtgtctccccggctagattgtaagctcctggagacagggaccacctccacaaaaaataaaaaaacggacctctcctgtcttgtagtgtgctaggaccctgcagggcagtgggggtgcacca

SEQ ID NO: 8022 - protein, 81 aa, Rattus norvegicus
  ref <308>: DATABASE ACCESSION NUMBER: SWISS-Prot / Q62649
  ref <309>: DATABASE ENTRY DATE: 2000-05-30
MAAVAAASAELLIIGWYIFRVLLQVFLECCIYWVGFAFRNPPGTQPIARSEVFRYSLQKLAHTVSRTGRQVLGERRHRAPN

SEQ ID NO: 8023 - DNA, 1212 bp, Homo sapiens
  ref <308>: DATABASE ACCESSION NUMBER: EMBL / AB002392
  ref <309>: DATABASE ENTRY DATE: 1998-03-10
accctctttctcgaccacccacctaccattcttggaaccatggcggcagtggcggcggcctcggctgaactgctcatcatcggctggtacatcttccgcgtgctgctgcaggtgttcctggaatgctgcatttactgggtaggattcgcttttcgaaatcctccagggacacagcccattgcgagaagtgaggtgttcaggtactccctgcagaagctggcatacacggtgtcgcggaccgggcggcaggtgttgggggagcgcaggcagcgagcccccaactgaggccccagctcccagccctgggcggccgtatcatcaggtgctcctgtgcatctcggccagcacgggagccagtgccgcgcaggaatgtggggtcccctgtgttccctcgccagaggagcacttggcaaggtcagtgaggggccagtagacccccggagaagcagtaccgacaatgacgaagataccagatcccttcccaacccctttgcaccggtcccactaaggggcagggtcgagagaggaggggggatagggggagcagacccctgagatctgggcataggcaccgcattctgatctggacaaagtcgggacagcaccatcccagccccgaagccagggccatgccagcaggccccaccatggaaatcaaaacaccgcaccagccagcagaatggacattctgacatcgccagccgacgccctgaatcttggtgcagcaccaaccgcgtgcctgtgtggcgggactggagggcacagttgaggaaggagggtggttaagaaatacagtggggccctctcgctgtcccttgcccagggcacttgcattccagcctcgctgcatttgctctctcgattcccctttcctcctcactgcctcccaagcccaccctactccaaaataatgtgtcacttgatttggaactattcaagcagtaaaagtaaatgaatcccacctttactaaaacactttctctgaaccccccttgcccctcactgatcttgcttttccctggtctcatgcagttgtggtcaatattgtggtaatcgctaattgtactgattgtttaagtgtgcattagttgtgtctccccagctagattgtaagctcctggaggacagggaccacctctacaaaaaataaaaaaagtacctcccctgtctcgcacagtgtcccaggaccctgcggtgcagtagaggcgcacc

SEQ ID NO: 8024 - protein, 81 aa, Homo sapiens
  ref <308>: DATABASE ACCESSION NUMBER: SWISS-Prot / Q16517
  ref <309>: DATABASE ENTRY DATE: 2002-06-15
MAAVAAASAELLIIGWYIFRVLLQVFLECCIYWVGFAFRNPPGTQPIARSEVFRYSLQKLAYTVSRTGRQVLGERRQRAPN

SEQ ID NO: 8025 - DNA, 1097 bp, Rattus norvegicus
  ref <308>: DATABASE ACCESSION NUMBER: EMBL / U08976
  ref <309>: DATABASE ENTRY DATE: 2000-03-04
agctccagagatggctaccgcgatgacagtttccagcaaactcctcggcctgctgatgcagcagctgagaggtacccgccagctgtacttcaacgtcagccttcgatctctgagctcctctgcacaagaggcgtccaaaagaatccctgaggaagtctcagaccacaactacgagtctattcaagtaacatctgcccagaagcatgttctgcatgtacaactaaaccggccggagaagaggaatgccatgaacagggctttctggagggagttggtggaatgcttccaaaagatatctaaagactccgactgtcgggctgttgtggtctctggtgcaggaaagatgttcacttcaggtattgacctcatggacatggcatcagacatcctgcagcccccaggagacgatgtggcccgcatagcctggtacctccgagacctcatcagccgataccaaaagactttcactgtcattgagaagtgccccaagccggtgatcaccgcaattcacggaggctgcattggtggaggcgtggatcttatttctgcctgtgacattcgctactgcactcaggatgctttcttccaagtcaaggaggtggatgtgggcctggctgctgatgtaggaacgctgcagcgactgcccaaggtcattgggaaccggagcctggtcaacgagctgaccttcaccgcccgcaagatgatggctgacgaggccctggacagtgggctggtcagccgcgtgttcccagataaggacgtcatgctgaatgcagcctttgccctggcggccgatatttccagcaagagtcctgtggctgtgcaggggtcaaaaatcaatttaatctactcccgagaccattctgtggacgagagccttgactatatggccacttggaacatgagcatgctgcagacccaggacatcatcaagtcagtccaggcagccatggagaagaaggactcaaaaagcatcaccttctccaagctctgagtgccttcctgaccctggtcccctcagtgcctcctcccggtgtataactttatgacttagttcttcagttcccggggccttatctccactgtgaacaataaag

SEQ ID NO: 8026 - protein, 327 aa, Rattus norvegicus
  ref <308>: DATABASE ACCESSION NUMBER: SWISS-Prot / Q62651
  ref <309>: DATABASE ENTRY DATE: 2002-06-15
MATAMTVSSKLLGLLMQQLRGTRQLYFNVSLRSLSSSAQEASKRIPEEVSDHNYESIQVTSAQKHVLHVQLNRPEKRNAMNRAFWRELVECFQKISKDSDCRAVVVSGAGKMFTSGIDLMDMASDILQPPGDDVARIAWYLRDLISRYQKTFTVIEKCPKPVIAAIHGGCIGGGVDLISACDIRYCTQDAFFQVKEVDVGLAADVGTLQRLPKVIGNRSLVNELTFTARKMMADEALDSGLVSRVFPDKDVMLNAAFALAADISSKSPVAVQGSKINLIYSRDHSVDESLDYMATWNMSMLQTQDIIKSVQAAMEKKDSKSITFSKL

SEQ ID NO: 8027 - DNA, 1196 bp, Homo sapiens
  ref <308>: DATABASE ACCESSION NUMBER: EMBL / U16660
  ref <309>: DATABASE ENTRY DATE: 1999-06-30
ggaactcagtagacgaaggcggcggcgatggcggcggggatagtggcttctcgcagactccgcgacctactgacccggcgactgacaggctccaactacccgggactcagtattagccttcgcctcactggctcctctgcacaagaggaggcttccggagtagccctcggtgaagccccagaccacagctatgagtcccttcgtgtgacgtctgcgcagaaacatgttctgcatgtccagctcaaccggcccaacaagaggaatgccatgaacaaggtcttctggagagagatggtagagtgcttcaacaagatttcgagagacgctgactgtcgggcggtggtgatctctggtgcaggaaaaatgttcactgcaggtattgacctgatggacatggcttcggacatcctgcagcccaaaggagatgatgtggcccggatcagctggtacctccgtgacatcatcactcgataccaggagaccttcaacgtcatcgagaggtgccccaagcccgtgattgctgccgtccatgggggctgcattggcggaggtgtggaccttgtcaccgcctgtgacatccggtactgtgcccaggatgctttcttccaggtgaaggaggtggacgtgggtttggctgccgatgtaggaacactggagcgcctgcccaaggtcatcgggaaccagagcctggtcaacgagctggccttcaccgcccacaagatgatggctgacgaggccctggacagtgggctggtcagccgggtgttcccagacaaagaggtcatgctggatgctgccttacccctggcgcccgagatttccagcaagaccaccgtgttggtgcagagcaccaaggtcaacctgctgtattcccgcgaccattcggtggccgagagcctcaactacgtggcgtcctggaacatgagcatgctgcagacccaagacctcgtgaagtcggtccagcccacgactgagaacaaggaactgaaaaccgtcaccttctccaagctctgagagccctcgcgtcccagccccagccagggggccggccttgtcccgcctcatccacagaaagggaggatgggcgatgacagttgtttctatgccttctgacccagtttcccagtttataactttatgacaatgagtttctcaagcccaaggccttatcttcaccccacaaacaataaagcaaa

SEQ ID NO: 8028 - protein, 328 aa, Homo sapiens
  ref <308>: DATABASE ACCESSION NUMBER: SWISS-Prot / Q13011
  ref <309>: DATABASE ENTRY DATE: 2001-10-16
MAAGIVASRRLRDLLTRRLTGSNYPGLSISLRLTGSSAQEEASGVALGEAPDHSYESLRVTSAQKHVLHVQLNRPNKRNAMNKVFWREMVECFNKISRDADCRAVVISGAGKMFTAGIDLMDMASDILQPKGDDVARISWYLRDIITRYQETFNVIERCPKPVIAAVHGGCIGGGVDLVTACDIRYCAQDAFFQVKEVDVGLAADVGTLERLPKVIGNQSLVNELAFTAHKMMADEALDSGLVSRVFPDKEVMLDAALPLAPEISSKTTVLVQSTKVNLLYSRDHSVAESLNYVASWNMSMLQTQDLVKSVQPTTENKELKTVTFSKL

SEQ ID NO: 8029 - DNA, 2858 bp, Rattus norvegicus
  ref <308>: DATABASE ACCESSION NUMBER: EMBL / U09211
  ref <309>: DATABASE ENTRY DATE: 2000-03-04
ggcagcgcggctcacctcgggggctccgtgcccgctgtgcgccgaagtccaggctgaggaggaggtctagagcccccggctctcccgtctcccaccaggctgcggggaactggctgccgcacccctcctccaagtgggggtagaacggagtctcacccccataggtcccagaactaaggggaacatagggccggttcctcccactgctcagccatccccaggggcttgtctaggactatagctctccaaatcccccttcccctggcttccatcctgggcgcatctcagaagcggacccctgcccggacgcgccccgcccccggcccccgccccgacgacgtcctattagcatgagcgacgccagtggccggggcaccactcgggggccgagactcaccgcgtcatagccccaagtggagggagaaagaaaaaaaaagaggcggcggtggaggaagaggcaagagcggacgcgcggggagggctggagagacggcgggcggcggcagcatgcccctgggcgggtgcacacggcctctctgcaccgcaggggctgcttctgctctctctgggcaccacgcgtccagtctcccgcctcagcccctcggcttgccggcctttgcggttgcgctcgaaacatcgtccactggtccccgaagcatctaagagcagcggcgccgcgcgggacaatccttgcttttttctgagctcggggatatgagccccacagccacctgaagcgcagggggcgctacgcggctaggaccgcgcccccgaagtaccttatcctagcctctgcactgcgggacgccgacacccgactccggtggaggcatcttagggaaagcagccggtaggggcatggaacccaccgcgccaaccggtcaggcccgggcggcggccaccaaactgtcggaagcggtgggagccgcgctacaagagccccagaggcagcggcgcctggtgctggtcatcgtgtgcgttgcactgttactggacaacatgttgtacatggtcatcgtgcccattgttcccgactatatcgcccacatgcgcgggggcagcgagggcccgaccctggtctctgaggtgtgggaacccactctgccgccgcccactctggctaatgccagtgcctacttggccaacacgtcggcgtccccgacggctgccgggtcggctcggtcaatcctgcgacctcgctaccccacagaaagcgaagatgtgaagataggtgtgctgtttgcctccaaggctatcctgcagcttctggtgaaccccttaagcgggcctttcattgatcgcatgagctacgacgtgccgctgcttataggcctgggcgtcatgttcgcctccacagtcatgtttgcctttgcagaagactatgccacgctcttcgctgcgcgcagtctacaaggcctgggctcggccttcgcggacacgtctggcattgccatgatcgccgacaagtatcccgaggagcctgagcgcagtcgtgccctgggcgtggcgctagcctttattagctttggaagcctagtggcgccaccgtttgggggcatcctctacgagttcgcgggcaagcgtgtaccctttctagtgctcgccgctgtgtcccttttcgacgcgctcctgctcctggcggtggctaagcccttctcggctgcggctcgggcgcgagccaacctgccggtgggcacacctatccatcgcctcatgctagacccttacatcgctgtggtagccggcgcgctcaccacttgtaacattccccttgcgttcctcgagcccaccatagccacgtggatgaagcacacaatggccgcatccgagtgggagatgggcatggtttggctgccggctttcgtgccacacgtgttaggcgtctacctcaccgtgcgcctggcggcgcgttatccacacctgcagtggctgtacggcgctctcgggctagcggtaattggagtgagctcttgcgtcgtacctgcctgtcgctcattcgcgccgttagtggtctcgctctgcggactctgcttcggcatcgcgttagtggacacagcgctcctacccacgctcgcctttctggtggacgtgcgccacgtatccgtctatggcagtgtctatgccatagctgacatctcctattctgtggcctacgcgctcgggcccatagtggcaggccacatcgttcactctcttggctttgagcagctcagcctgggcatgggcctggccaacctgctctacgcaccagtccttcttcttttgcgcaatgtaggcctccttacacgctcgcgttcggagcgcgatgtgttgcttgatgaaccgccgcagggtctgtacgacgcggtgcgcctgcgtgaggtgcagggcaaggatggcggcgaaccttgtagcccacctggcccttttgacgggtgcgaggacgactacaactattactcccgcagctagcagacccgcttctcctccaggccacctacccgccccatttaggtcaagatggtcattctgcaagagcactgtccaactttggcttggggcccacctcctctaatgaataccctagcccctcgcccgtcctgaattcctttgctggaatcccttctccatgacccctcccagtctaggcccctccccaaacacactcgtattcattggggaaatggagcagggaggcagaagaagctgttgggctcttggcagaggtgaagaggtgtgcgggtgatcgccaatcacctactgagagcccccaaatagagtcatgcatctgtttgtccttcctgcggatctttccagtgccaaacttggtctctgcactccggtgcctccggcctgaattaataaaccatatctatctg

SEQ ID NO: 8030 - protein, 530 aa, Rattus norvegicus
  ref <308>: DATABASE ACCESSION NUMBER: SWISS-Prot / AAA20498
  ref <309>: DATABASE ENTRY DATE: 2003-02-01
MEPTAPTGQARAAATKLSEAVGAALQEPQRQRRLVLVIVCVALLLDNMLYMVIVPIVPDYIAHMRGGSEGPTLVSEVWEPTLPPPTLANASTYLANTSASPTAAGSARSILRPRYPTESEDVKIGVLFASKAILQLLVNPLSGPFIDRMSYDVPLLIGLGVMFASTVMFAFAEDYATLFAARSLQGLGSAFADTSGIAMIADKYPEEPERSRALGVALAFISFGSLVAPPFGGILYEFAGKRVPFLVLAAVSLFDALLLLAVAKPFSAAARARANLPVGTPIHRLMLDPYIAVVAGALTTCNIPLAFLEPTIATWMKHTMAASEWEMGMVWLPAFVPHVLGVYLTVRLAARYPHLQWLYGALGLAVIGVSSCVVPACRSFAPLVVSLCGLCFGIALVDTALLPTLAFLVDVRHVSVYGSVYAIADISYSVAYALGPIVAGHIVHSLGFEQLSLGMGLANLLYAPVLLLLRNVGLLTRSRSERDVLLDEPPQGLYDAVRLREVQGKDGGEPCSPPGPFDGCEDDYNYYSRS

SEQ ID NO: 8031 - DNA, 2421 bp, Homo sapiens
  ref <308>: DATABASE ACCESSION NUMBER: EMBL / U09210
  ref <309>: DATABASE ENTRY DATE: 1999-06-30
ggaggaggcaagagccgacgcgaggggaggggagcgcagcggcggggctaacgggcgggcaagcgggcgggcggcaacagcatgtccctcggccagcgcgggcggcctcttagcgcggcgggggctgctctgggcgcgccccgggcgaagtgcgcccagtctccggccccggcccctcggcgcgcccgacttcccggccgcccctgagcccagcagccgcgggtcccgggatcggctaagagtagctgcaacgcctcgccggacggagtcctttcctttcccgggacgctgggccatgagctccgcggcccacctgaggcacaggggagtctgctcggccaggacagcctccccgaagtcccgctgccctcgcctctgcactgcgggacgccagcgctcggccctggcggaggcgtcttcggaagagcatcggggtgggggcatggaatccgcggaacctgcgggccaggcccgggcggcggccaccaagctgtcggaggctgtgggcgcggcgctgcaggagccccggcggcagaggcgcctggtgcttgttatcgtgtgcgtggcgctgttactggacaacatgctgtacatggtcatcgtgcccatagtgcccgactacatcgcccacatgcgcgggggcggcgagggccccacccggactcccgaggtgtgggagcccaccctgccgctgcccactccggccaatgccagcgcctacacggccaacacctcggcgtccccgacagctgcgtggccagcgggctcagcccttcggccccgctaccctacggagagcgaagacgtgaagatcggggtgctgtttgcttccaaggctatcctgcagctgctagtgaaccccttgagcgggcccttcatcgaccgcatgagctacgacgtgccgctgctgatcggcctgggcgtcatgttcgcctctacagtcctgttcgccttcgccgaggactacgccacgctgttcgcggcgcgcagcctgcagggcctgggctcagccttcgccgacacgtctggcatagccatgatcgccgataagtacccggaggagccggagcgcagtcgtgcactgggcgtggcgctggccttcattagcttcggaagcctagtggccccgcccttcgggggcatcctctatgagttcgccggcaagcgcgtgcccttcttggtgctagctgccgtgtcgctctttgacgcgctgttgctgctggcagtggccaaacccttctcggcggctgcacgggctcgggccaacctgccagtgggcactcccatccaccgcctcatgctagacccctacattgccgtggtggccggcgcgctcaccacctgtaacattcccctcgccttcctcgaacccaccattgccacgtggatgaagcatacgatggcggcttccgagtgggagatgggcatggcctggctgccggccttcgtgcctcatgtgctgggcgtctacctcaccgtgcgcctggcggcgcgctacccacacctgcagtggctgtacggcgcgcttgggctggctgtgatcggcgccagctcgtgcatcgtgcccgcctgccgctccttcgcgccgctagtggtctcactatgcggcctctgttttggcatagccctagtcgacacagcactgctgcccacgctcgccttcctggtggacgtgcgccatgtctcagtctatggcagcgtctacgccatcgccgacatctcctattcggtggcctacgcgctcgggcccatagtggcaggccacattgtgcactcgctgggctttgagcagctcagccttggcatgggactggccaacctgctctatgctcccgtcttgctgctgctccgcaacgtgggcctcctgacgcgctcccgttccgagcgcgatgtgctgcttgatgagccaccgcaaggtctgtacgatgcggtgcgcctgcgtgagcgtcctgtgtctggccaggacggcgagcctcgcagcccgcctggcccttttgatgagtgcgaggacgactacaactactactacacccgcagctagcatccccactcctcctccagcccacccaaccgccttgggtcaagggggctgctctgcaagcccactggccagctctggctcagggcccacctcctccagcgagtaccccagccactcctcaaccttgacttctgcccaaatcccctccctgtgacccgttccatatccctttctctcttgtccaatggggcttggagcaccgaggccagcgaagccatcgcgctccttgcggaggtgaagaggaccctgagtccccacctgcggctcccctgtgtagagcctgcatctgtctgtccttccttccattgctcccagtgccaaacttgggccgctgcaccgcggcgcctccgcccaaatcaataaactgtgtctgtcccagg

SEQ ID NO: 8032 - protein, 532 aa, Homo sapiens
  ref <308>: DATABASE ACCESSION NUMBER: Refseq / NP_003046
  ref <309>: DATABASE ENTRY DATE: 2000-10-31
MESAEPAGQARAAATKLSEAVGAALQEPRRQRRLVLVIVCVALLLDNMLYMVIVPIVPDYIAHMRGGGEGPTRTPEVWEPTLPLPTPANASAYTANTSASPTAAWPAGSALRPRYPTESEDVKIGVLFASKAILQLLVNPLSGPFIDRMSYDVPLLIGLGVMFASTVLFAFAEDYATLFAARSLQGLGSAFADTSGIAMIADKYPEEPERSRALGVALAFISFGSLVAPPFGGILYEFAGKRVPFLVLAAVSLFDALLLLAVAKPFSAAARARANLPVGTPIHRLMLDPYIAVVAGALTTCNIPLAFLEPTIATWMKHTMAASEWEMGMAWLPAFVPHVLGVYLTVRLAARYPHLQWLYGALGLAVIGASSCIVPACRSFAPLVVSLCGLCFGIALVDTALLPTLAFLVDVRHVSVYGSVYAIADISYSVAYALGPIVAGHIVHSLGFEQLSLGMGLANLLYAPVLLLLRNVGLLTRSRSERDVLLDEPPQGLYDAVRLRERPVSGQDGEPRSPPGPFDECEDDYNYYYTRS

SEQ ID NO: 8033 - DNA, 1494 bp, Rattus norvegicus
  ref <308>: DATABASE ACCESSION NUMBER: EMBL / U09228
  ref <309>: DATABASE ENTRY DATE: 2000-03-04
ggcaactctcatatcccacagtctagcagctactgtagcctgcatccacatgaacgtctgagctatccatcgcactcctcggcagacatcaactccagtcttcctccgatgtccacgttccatcgaagtggcacaaaccattacagcacctcttcctgcacacctcctgccaacggaacagacagtataatggcaaacagaggaactggggcagcaggcagctcccagactggagacgctctggggaaagccctggcttcgatctattctcctgatcacacgaacaacagcttctcctccaacccttcaactcctgttggctcccctccttcactctcagcaggcacagctgtttggtctcgaaacggaggacaggcctcgtcatctcccaattacgaaggacccttgcactccttgcagagccgaattgaagaccgtttagaaagactggacgacgcgattcatgttctccggaaccacgcggtgggcccatccacagctgtgcccggtggccatggggacatgcatgggatcatcggaccctctcacaatggagcaatgggcagtctgggctcaggatatggaactggccttctctcagccaacagacattcactcatggtcggggcccaccgtgaagatggcgtggcactgagaggcagccattctctcctgccaaaccaggttccggttccacagcttccggtccagtctgcaacttcccctgacttgaacccaccccaagacccttacagagggatgccaccaggcctccagggacagagtgtgtcttccggcagctctgagatcaagtccgacgacgagggcgatgagaacctacaggacacaaaatcttccgaggacaagaaactagacgacgacaagaaggatatcaaatcaattactaggtcaagatctagcaataacgatgatgaggacctgaccccggagcagaaggccgagcgtgagaaggagcggaggatggccaataacgcccgtgagcgcctgagggtccgtgatatcaacgaggctttcaaggagctgggccgcatggtacagctccacctgaagagcgacaagccccagaccaagctcctgattctccaccaggcagtggctgtcatcctcagcctggagcagcaagtgcgagaaaggaacctgaacccaaaagctgcctgtctgaaaagaagggaggaagagaaggtgtcctcagagcctcccccgctctccttggctggcccacaccctgggatgggagacgcagcgaatcacatgggtcagatgtgaaagggtccaagttgccaccttgcttcattaaaacaagagaccacttccttaacagctgtattatcctaaacccacataaacactgctccttaaccccgttttttttgtaatataagacaagtctgagtagttatgaatcgcagacgcaagaggtttcagcattcccaattatcaaaaaacagaaaaacaaacacaaaaaaaaaaaaa

SEQ ID NO: 8034 - protein, 428 aa, Rattus norvegicus
  ref <308>: DATABASE ACCESSION NUMBER: SWISS-Prot / Q62655
  ref <309>: DATABASE ENTRY DATE: 2002-06-15
GNSHIPQSSSYCSLHPHERLSYPSHSSADINSSLPPMSTFHRSGTNHYSTSSCTPPANGTDSIMANRGTGAAGSSQTGDALGKALASIYSPDHTNNSFSSNPSTPVGSPPSLSAGTAVWSRNGGQASSSPNYEGPLHSLQSRIEDRLERLDDAIHVLRNHAVGPSTAVPGGHGDMHGIIGPSHNGAMGSLGSGYGTGLLSANRHSLMVGAHREDGVALRGSHSLLPNQVPVPQLPVQSATSPDLNPPQDPYRGMPPGLQGQSVSSGSSEIKSDDEGDENLQDTKSSEDKKLDDDKKDIKSITRSRSSNNDDEDLTPEQKAEREKERRMANNARERLRVRDINEAFKELGRMVQLHLKSDKPQTKLLILHQAVAVILSLEQQVRERNLNPKAACLKRREEEKVSSEPPPLSLAGPHPGMGDAANHMGQM

SEQ ID NO: 8035 - DNA, 1958 bp, Homo sapiens
  ref <308>: DATABASE ACCESSION NUMBER: EMBL / AK026674
  ref <309>: DATABASE ENTRY DATE: 2000-09-29
agctttatagcacgtgctgctctgccttcttgagacaagacgtcgtgcacacttctcttttttacatgacagcccttggaatatttgaaccctgctgctgtgacgacttcctcatatgatatgctttccaggtggctcatcatcctctttgccttccattcaaaagtttctaatttgtcactgtaacactcagaaatggacagaaccgatcttatcttttcagactattctgggcccggccgtgcatttgttatgaatcatggaatattttggttttcacaattagaaattaccttttggctttttttttttttttttttgtaagagacagagtctggctgtgttgcccaggctggagtgcagtggcctgatcacatctcactgtagcctccacctcctagattcaagtgagcctcccacctcagcctcctgagtagctgagaccgcaggtgtgcatcactgtgcccagctaatttttttttattttttgtagagacgaggtctcactatatcgtccaggctggggttataggcatgagccactgcacccagctttctggcttcatttttgactcacaatgaggtcatggtcattcataagctgcaggtgtttggtttgttgaatcgttttgcatgactgatatcagttcaggtttcccaaacttgttctgtggatcataaacatctataagattaaagaccatggaagtcatgtttttgtaactttttgtttaatacatagagaaaatgagactcacatagtgggttgaccaggccttcaaagcaaggtaatggggacacctgaataaaagcctcactgtcttcactcccattgctctggtgtcttacatataggcctttcttcttactcctgttaagctgccttgtatttttttgacctatcaaaatcatttttcaattacttgtttcccctagatttcagatgtcacggtatgaaaggttttatatatatttaaaaaataaagtataaacataaagtctttttgaagcgtggttatgcaacatatgctaggcgtaagttggtgaatgcctgctttgcagagtgtaaccccattgaataaaaaaagctttgttttccctttctgcccccctgtatcagtatgggcacaccctgcactctaactttaatctacgtcaccctcacctgtttggtttgggtttaatgtctgtgagaaaaccaaatatcttgtgtattgtgaactgtcaaagccatctaaaccaatcccaaggtcaagtggatataaaaattctgccaaaaacatggcataagatggaaaagttccctgaaaactctggaagaaaacaaagtaatgtagacaccttctttttccccacaccattagaaaatgttgcatcccttttgtcccacagcaataatgacgatgaggacctgacaccagagcagaaggcagagcgtgagaaggagcggaggatggccaacaatgcccgagagcgtctgcgggtccgtgacatcaacgaggctttcaaagagctcggccgcatggtgcagctccacctcaagagtgacaagccccagaccaagctcctgatcctccaccaggcggtggccgtcatcctcagtctggagcagcaagtccgagaaaggaatctgaatccgaaagctgcgtgtctgaaaagaagggaggaagagaaggtgtcctcggagcctccccctctctccttggccggcccacaccctggaatgggagacgcatcgaatcacatgggacagatgtaaaagggtccaagttgccacattgcttcattaaaacaagagaccacttccttaacagctgtattatcttaaacccacataaacacttctccttaacccccatttttgtaatataagacaagtctgagtagttatgaatcgcagacgcaagaggtttcagcattcccaattatcaaaaaacagaaaaacaaaaaaaaaaaaa

SEQ ID NO: 8036 - protein, 667 aa, Homo sapiens
  ref <308>: DATABASE ACCESSION NUMBER: SWISS-Prot / AAA60310
  ref <309>: DATABASE ENTRY DATE: 2000-05-30
MHHQQRMAALGTDKELSDLLDFSAMFSPPVSSGKNGPTSLASGHFTGSNVEDRSSSGSWGNGGHPSPSRNYGDGTPYDHMTSRDLGSHDNLSPPFVNSRIQSKTERGSYSSYGRESNLQGCHQQSLLGGDMDMGNPGTLSPTKPGSQYYQYSSNNPRRRPLHSSAMEVQTKKVRKVPPGLPSSVYAPSASTADYNRDSPGYPSSKPATSTFPSSFFMQDGHHSSDPWSSSSGMNQPGYAGMLGNSSHIPQSSSYCSLHPHERLSYPSHSSADINSSLPPMSTFHRSGTNHYSTSSCTPPANGTDSIMANRGSGAAGSSQTGDALGKALASIYSPDHTNNSFSSNPSTPVGSPPSLSAGTAVWSRNGGQASSSPNYEGPLHSLQSRIEDRLERLDDAIHVLRNHAVGPSTAMPGGHGDMHGIIGPSHNGAMGGLGSGYGTGLLSANRHSLMVGTHREDGVALRGSHSLLPNQVPVPQLPVQSATSPDLNPPQDPYRGMPPGLQGQSVSSGSSEIKSDDEGDENLQDTKSSEDKKLDDDKKDIKSITSNNDDEDLTPEQKAEREKERRMANNARERLRVRDINEAFKELGRMVQLHLKSDKPQTKLLILHQAVAVILSLEQQVRERNLNPKAACLKRREEEKVSSEPPPLSLAGPHPGMGDASNHMGQM

SEQ ID NO: 8037 - DNA, 7851 bp, Rattus norvegicus
  ref <308>: DATABASE ACCESSION NUMBER: EMBL / U09357
  ref <309>: DATABASE ENTRY DATE: 2000-03-04
cctagaccctggccagtcaccggcgtcccctgtctcggtgttcccactctctgcaccctaagctgtacccctgcggctggcgaggggccgcggacccggctggagatgcgaatcctgcagagcttcctcgcgtgcgttcagctactgtgcgtgtgtcgcctggactgggcttatggatactacagacaacagagaaaacttgttgaagagattggctggtcctatacaggagcactaaatcaaaaaaattggggaaagaaatatccaatatgtaatagcccaaagcagtctcctattaatattgatgaagatcttacacaagtaaatgtgaatcttaagaaactgaaatttcagggttgggaaaaaccatccttggaaaacacgtttattcacaacactgggaaaacagtggaaataaatctcaccaatgactactatctcagtggaggactttcagaaaaggtcttcaaggcaagcaaaatgacttttcactgggggaaatgcaatgtgtcatcggaaggatcggaacacagcttagaagggcagaagtttccactcgagatgcaaatctactgcttcgatgcggaccgattttcaagttttgaggaaacagttaaaggaaaaggaaggttaagggctctatccattttatttgagattggagttgaagaaaatttggattacaaagccattattgatgggactgaaagtgttagtcgttttggaaagcaggctgccttagatccgttcatcttgcagaacctcctgccaaactccactgacaagtactacatttacaacggatcactgacatcccctccctgcacagacaccgtcgaatggattgtttttaaggatacagttagcatctctgaaagccagctggctgtattttgtgaagttctcacaatgcaacagtccgggtatgtcatgttgatggattacttacaaaacaatttccgagaacaacagtacaagttttccaggcaggtgttttcttcgtacactgggaaggaagagattcatgaagcagtgtgcagttcagaaccagaaaatgtgcaagctgaccctgagaattacaccagccttctgatcacatgggaaaggcctcgggttgtttatgacacaatgattgagaagtttgcggttctgtaccagccactggagggaaacgaccaaaccaagcatgagtttttaacagatggctatcaggacttgggtgccattctcaataacttaatacctaacatgagttatgtgctccaaatagtggccatatgctctaatggcctttatggaaagtacagtgaccaattgatagtcgacatgcctactgaggatgctgaacttgacctctttcctgaattaattggaactgaagaaataatcaaggaggaaaactatggaaaaggcaatgaagaagacactggcttgaatcccggtagagacagtgccacaaaccaaataaggaaaaaggaaccccaggtttctaccacaactcactataatcacatggggactaaatataatgaagccaagactaaccgatctccaacgagaggatctgaattctctggaaagagtgatgttctcaacacatccctgaatcctacttcccaacaggttgctgaattcaatccagaaagagaaatgtccttgccttctcagattggaactaacctgccaccacacagtgtggaaggcacctcagcctccttaaacagtggctctaaaactctccttgtcttcccacagatgaacttgtctgggactgcagaatccttaaatatggtttccataacagagtacaaagaggtgtctgctgacctcagtgaggaagaaaacttactgactgatttcaagctcgatagtggagcagatgattcgtcaggctctagccctgcatcctccactgtccccttttccacagataatctatcccatggatatacgtcttcttcagacacgcccgaggcggtcacgtatgatgtccttaggccagaatctacgagaaatgctctagaggattcggctccatcaggttcagaagaatcactaaaggatccctctcttgaagggagtgtgtggttccctggatccacagacctaacaacacagtctgagactggatctgggagagagggctttctccaagttaactccacggacttccaagttgatgaatcgagggagacaactgagacattttctccagatgctaccgcgtcccggggtccttcggtcacagatatggaaatgccacattattctacctttgcctaccccccgactgaagtaacatcacatgctttcactccgtcctccagaccacttgatttggctcccactagcaacatcctccattcgcagacaactcaaccagtatacaatggtgagacacctcttcaaccttcctacagtagtgaagtctttcctctagtcacccctttgttgcttgacaatcagaccctcaacactacccctgctgcttcaagtagtgattcggccttgcatgctacgcctgtattccccagtgttggtgtgtcatttgactccatcctgtcttcctatgatgatgcacctctgctcccattttcctctgcttccttcagtagtgacttgtttcaccatctgcatacggtttctcaaacccttccgcaagttacttcagctgctgagagggatgagctgtctttgcatgcttctctgctggtggctgggggtgatttgctgttagagcccagccttgttcagtattctgatgtgatgtcacatcaggtcactattcatgctgcttcggacacattggaatttggtagtgagtctgctgtcctttataaaacgtctatggtttctcaaatcgaatcacccagcagtgatgtcgttatgcatgcatattcgtcagggcctgaaacttcttatgccattgagggctcccaccacgtgctcactgtttcttccagttctgcaatacctgtgcatgattctgtcggtgtagctgatcaggggtccttacttatcaatcctagccatatatcactgcctgagtcctcatttattactccaactgcatcattactgcagcttcctcctgccctctctggtgatggggagtggtctggagcctcctctgatagtgaattgcttttacctgacacagatgggctgagaactcttaacatgtcttcacctgtttctgtagctgattttacatacacgacatctgtgtctggcgatgatattaagccgctttctaaaggtgaaatgatgtatggaaatgagaccgaactgaaaatgtcttctttcagtgacatggcatacccttctaaaagcacagtcgtgccaaagatgtctgatattgtaaataagtggagtgaatctttaaaagaaacctctgtttccgtatctagcataaacagcgtgtttacagagtctcttgtttatcccataactaaggtttttgatcaggagattagtcgagttccagagattatcttcccagttaaacctacacacacagcatctcaagcatctggtgacacttggcttaaacccgggcttagcacaaactcagagcctgcgctctctgacactgcttctagtgaagtatcacacccttcaacacagcccttgctctatgaggccgcatctccttttaatacggaagcattgctgcaaccttcctttccggcttctgatgttgacaccttgcttaaaactgcccttccctctgggcctcgtgatccagtgctgactgaaacccccatggttgagcaaagtagctcttccgtatctcttcccctggcatcagagtctgcttcaagcaaaagcacgctgcactttacatctgtaccagttctcaatatgtcaccttctgatgtgcaccccacttcacttcaacgcttaacagttcctcactcgagggaggaatattttgaacaaggtttgcttaagagcaaaagtccccagcaagtcctgccgtccttgcacagccatgacgagtttttccaaactgcacatctggacattagccaggcctaccctccaaaaggaaggcatgcatttgctactcctattttatcaatcaatgaaccacaaaatacacttataaacaggcttgtgtattctgaggacattttcatgcaccctgaaatttctattactgataaggcacttactggtctaccaacgaccgtttctgatgtacttatagctactgaccattctgttccattaggaagtgggcccatttccatgacaactgtttctcccaacagagatgattctgtgaccacaaccaagttgcttcttccttctaaagctacttctaagccgactcatagtgccagatctgatgccgatttagtaggaggtggtgaagatggtgatgactatgatgatgatgattatgatgacatagatagtgatcgctttcccgtaaataagtgtatgtcatgttcaccctatagagaatcacaggaaaaggtaatgaatgactcggacacccaagaaagcagtcttgtggatcagagtgacccaatttcacatttgctctctgagaataccgaagaagaaaatggaggcacgggtgtaactagggtggataaaagtcctgataagtcaccaccaccaagtatgctaccccagaagcacaatgatggaagagaggaccgtgacattcagatgggtagtgctgtccttcctcacaccccaggatctaaagcatgggcagttttgacaagtgatgaagagagtgggtcagggcaaggcacctcagatagccttaatgataatgagacttccacagatttcagtttcccagatgttaatgaaaaggatgctgatggtgtcctggaagcagatgacacaggcatagctccgggatctccacggtcctccacaccatctgttactagtgggcattcaggagtatccaacagttcagaggcagaggccagtaatagtagccatgagtctcgtattggtctagctgaggggttggagtctgagaagaaggcggttataccccttgtgatcgtgtctgccctgacttttatctgtctagtggttcttgttggtattctcatctactggagaaaatgcttccagacggctcacttttatttagaagacaatacatcccctcgagtaatatctacaccaccaacacccatctttccaatttcagatgatattggagcaattccaataaagcattttccaaagcacgtagcagacttacatgcaagtaatgggttcactgaagaatttgagacactgaaagagttttaccaggaagtgcagagctgcactgttgacttaggtattacagcagacagctccaatcacccagacaacaagcacaagaacagatatgtcaacatcgtagcctatgatcatagcagggttaagctcacacaacttgctgaaaaagatggaaaactgactgattacatcaatgccaattatgttgatggttacaacaggccaaaggcttacattgctgcccagggtccactgaagtccacagcagaagatttctggagaatgatatgggagcataatgtggaagtcatcgttatgataacaaacctcgtggagaaaggaagaagaaaatgtgaccagtactggcctactgatggcagtgaagaatacgggagcttcctggtcaaccagaagaatgttcaggtgcttgcttattatactgtgaggaatttcaccctaagaaacacaaagataaaaaagggctctcagaaaggaagatccagtggacgcctagtcactcagtatcattacacccagtggcctgatatgggtgttcccgagtactccctacccgtgctggcctttgtgaggaagactgctcaggccaagcgacatgcagtcgggccagttgttgtccactgcagcgctggcgtggggagaacgggcacatacattgtactagacagtatgctacagcagattcaacacgaaggaaccgtcaacatatttggtttcttaaaacacattcgttctcaaaggaattatttggtgcaaacagaggagcaatacgtcttcattcacgacacactggttgaggccatactcagcaaagagacagaggtgcctgacagccacatccattcctatgttaatacactcctcatacccggaccatcaggcaagacaaaactagagaaacaattccagcttctgagtcagtcaaatattcttcagagtgactactccacggccctgaagcagtgtaacagggagaagaacagaacatcctccatcatccccgtggaaagatcgagggtgggcatttcatccctgagtggggaaggcacagactacatcaatgcatcctatattatgggttattaccagagcaatgaattcatcatcacccagcacccccttctacacaccatcaaggacttctggagaatgatatgggatcataatgcccagctggtggttatgattccagatggtcaaaacatggcagaggatgaatttgtttactggccaaataaagatgagcccataaattgcgagagcttcaaagtcacgcttatgtctgaagaacacaaatgtctttcgaatgaggaaaaactgatagttcaagacttcatcttggaagcgacacaggatgattatgtgctggaagtaaggcattttcagtgcccgaaatggccaaatccagatagtcccattagtaaaacatttgaacttataagtattatcaaagaagaagctgctaacagagatgggcccatgattgttcacgatgagcatggaggagtaacagcagggacattttgtgctctcacaacccttatgcaccaactagaaaaagaaaactccatggatgtttaccaagtagccaagatgatcaatttgatgaggccgggagtcttcactgacattgagcagtaccagtttctctacaaagtggtcctcagcctggtcagcacaaggcaggaagagaatccatccacctccctggatagtaatggtgcagctttgcctgatggaaatatagctgaaagcctggagtctttagtctgacgcagaaagggtgtaggaccaccctcatccaagcagtgtctctttctaaacttagaaaaatgagtccagttctgttatctgtttacttcccatgacctgacggtaactcattctgctgccaaattgacaccattaacaacgtgtgcctttttgaaagacttcttgtaatccacttattatgtttgaactaaaatgattgaattttacaatgtttctaagaattgaattgtggcatttttttccatattgattttaacaacaacaacaaaaaaaatttgtagataataggaaacaccaaccttgggagatatttgttcttaagtgtcaaatttttagctgtatttgtagcaatcatcaggtttgctagaaatataacttttaatatagtagattgtaagtaaaccactttatccccgatgatattcaacattttacaactgcagtattcacctgaagtaggagtgacagtaacttatgtaaatactgccctggtgtctccatggaccaaatttatatttataattgtagatttttatattttactactgtgtgagttttctagtggtgtacttgagtttaattagcttactctctggtcttaacttactctaaatgtcttctaaaactgtactgtgttatccaagaaactaaccttctttctgcatgtcattttaacttttgtgaaaataggaaaccacttgttttaaaagatgtttttatgagaataacaccttaccaaacattccttaaatggtttttatctgagaagttgcaaaaataaatataaatattgcc

SEQ ID NO: 8038 - protein, 2316 aa, Rattus norvegicus; identical to SEQ ID NO: 7965
  ref <308>: DATABASE ACCESSION NUMBER: SWISS-Prot / Q62656
  ref <309>: DATABASE ENTRY DATE: 2002-06-15

SEQ ID NO: 8039 - DNA, 7941 bp, Homo sapiens; identical to SEQ ID NO: 7966
  ref <308>: DATABASE ACCESSION NUMBER: EMBL / M93426
  ref <309>: DATABASE ENTRY DATE: 2000-03-04

SEQ ID NO: 8040 - protein, 2314 aa, Homo sapiens; identical to SEQ ID NO: 7967
  ref <308>: DATABASE ACCESSION NUMBER: SWISS-Prot / P23471
  ref <309>: DATABASE ENTRY DATE: 2002-06-15

SEQ ID NO: 8041 - DNA, 4964 bp, Rattus norvegicus
  ref <308>: DATABASE ACCESSION NUMBER: EMBL / U09540
  ref <309>: DATABASE ENTRY DATE: 2000-03-04
gttgcagacacctctgcgacgccagcttgaaagccgccggcgggctgggatttagctccactttatcaactcccaacccctcacccatctcaaccgcaactccaactctgtgagaaagtcctgactttgcggagccccaggtgcactggagctcagcaaacttgagacacttcccccctgtcctccatcctaatctaagtttaggttctgactgagccaagagtgggtgctaaagcagcgggcctcaggtgtctaggactccgggtccttggggactctcaggttgaagtcttgcagagtctgggcagaggctccagagcttctcccagaccccactgctctacaccgctggaaccgcgcttcatcgcagcatggccaccagccttagtgcagacagtccacagcagctgagctcgctgtctacccaacagaccattcttctgctactcgtttcggtcctggccatcgtgcacttaggccagtggctgctgcgccagtggcgacggaaaccgtggtcctcgcccccgggtccctttccttggccattgatcggaaacgcggcgtctgttggccgggcatcgcacttgtacttcgctcgccttgcgaggcgctatggcgacgtttttcagatccgtctgggcagctgtcccgtggtggtgctgaatggcgagagtgccatccatcaggctctggtgcagcagggcggcgtctttgcggaccggcctcccttcgcctctttccgtgtggtgtctggtggccgcagcctggcgttcggccactactcagagcgctggaaggagcggcgacgtgcagcctatggcacgatgcgtgccttctccacccgccacccgcgcagccgcggtctcctcgagggccacgcgctgggagaggctcgagagttggtggcagtgttggtgcggcgctgcgccggtggcgcctgcctcgatccgacgcagccgatcatagtggcggtggctaatgtcatgagcgctgtatgcttcggctgtcggtacaaccacgacgatgccgagttcctggagctgctcagccacaacgaggagttcgggcgcaccgtgggcgcgggcagcctggtggacgtgatgccctggctgcagctttttcccaacccggtgcgcaccatcttccgcgagttcgagcagatcaaccgcaacttcagcaacttcgtcctggacaagttcctgaggcaccgagaaagcctcgtgcccggggctgctcctcgagacatgatggacgccttcatcctctccgccgaaaagaaggcgactggggaccctggtgacagtccctccgggctggatttggaggatgtgcctgccactattacagacatctttggagccagccaggacaccctttccaccgcgctgctgtggctgctcatcctctttaccagatacccggatgtgcaggcccgcgtgcaggccgagttggaccaggttgtggggagggaccgcctgccctgcatgagtgaccaacccaacttaccatacgtcatggcttttctttatgaatccatgcgattcaccagctttttgcctgtcacccttccacatgccaccactgccaacacctttgttttaggctactacatccccaaaaacacggtagtttttgttaaccagtggtctgtgaatcatgacccagcaaagtggtctaacccagaggactttgatccggcccgcttcctggacaaggacggcttcattaacaaggcactagccagcagcgtgatgatattttcagtgggcaaacgacggtgcatcggcgaggagttgtctaagacgcttctgtttctcttcatctccatcctcgctcatcagtgcaatttcaaggctaaccaaaacgagccctcaaacatgagtttcagttacggcctgagcattaagcccaagtcgtttaaaatccatgtgtctctcagagagtccatgaagctccttgatagtgctgtcgagaagctgcaagctgaggaagcttgccagtgagagagggagaggccggaggtaactgaaatgttcaaagaaaaccatctcattaactggagaggaaaacacagattttattttctccagcttcattttggcctcagttctcaagaatgagcggaaaccaagtggcctgaaggtgaggcgggcttaccaattcatggctcctcaccggccagcagctggagatcctgaagtattttgaaattgaagagtaatagggtccaaggaatttgcatactgttcccccctcacccccattaaacacatgcacacaaatcagcatgtgtgtacagctatccaacaaaatatttcagtaactctgcctttttgggtcgatttgaaagggaacttctattgcagaaattggccccataggaaaccacagtaagcagaggcttaggatatatatatatatatatatatattcaagattcaaagaagtgatttaagtgtaaaatataaagagcagaaatttaccaagagacaaatgagcactcccttgtggccctggacgaggttttctttctgcctgtagatgtgcctcccactctagaacggaccataaagccgttttgctccccctcaatttatggctagtttaataaccacagtaggttttagagattagtgaatccaaaggtaaattgtttgaaaggcaaaaggattttgtaagttaaaactgtatgtcattcagctgttcaaacgaagcattccagttatgagggagaaaaaggtttgccagtctaacgtaagctttcaactttgggatcgtaacaaactgatctgagtaataagtcggataaagtaaaaaataaaaaagcctcatgtcaccaaatagcattcaataaattttgcataattattcacaagcatcatatgaatattaactatttgacaggaaagcacttgaataatacatttcttatgtcatcttgcaaaccaaaaagtataatcagttgggtgaaatttgcccaaatccaggaaacgatcctgacaaaatcgatctgattaatatcagggaagcaagtaacaggacgatcctttcctttcttatttacagcccctacacgagacaaatctcaaaactaaaccagcaaaaccatgctctgatctggtaattgtagttacaacgcacttttcttttggaattgacccctttcggttgcgttaagattccaaactcttggctggctctgattttaaattagtttaaaatccaccttgattattttgtttcggttgaagctggagaaagtatggttattatctcacagaaggtgagacacctaacctttatctaaggacaaatgtcaaaggcaacaatcaatcaaacaaacaaacaaagccatgagtgctctgggtgttcttattagacgccctctgacaagaaactcagtaccactggtagttggtagtttctttttatgtgctattactatggttgttgtaggtgttttttaaattgagtattaaggtctgcggttttgtgtttttttttaagtcagaatctgaagattgtcttgggaggttgtttagcgactgcttggggagacagcagagacggctaaaattggctcttatttaggatggcagactgagcagccgccttcctggtagctgagagaggagaaatatatgtatttggattgtgtaaacaatccgaaacctgttaagaagggttggatgagtggaaaagtagggacagggcgcgtggggggtttcccatttctgttttcactgcaatttagacggaacaaaagaagcccacggcactcagagagcttatggttggctctgtttcattaggcttcttggaattttcctatcaaaattgcaaaggaaggagtgtgtgatattcttgtgtgcagaggccagaagctgacagacagagagtgcatgagcaggagagaaatgtttaaatggtccccattcactccaaattagtctcttgacctgtaacatttgaggcatgatgtttagaaaaaaaggagtttcaagggtcaggtcttaccttcaagtgtctcttaagactggctggagaccaagccctcaccctctctctcccccatccacatctattttgtagttggagattgaattataaaaaatataatgtaatccttatttaaatttctcacaacagaaccccttgaatgtgaaacacaggttgtgtcagtattttcgaggccttgatttcaactacaaaaattaactctgtaaacatttttaagtttttcagacattttaaaagcatgcacctcagtaaggtcgggacagtgatttgagcctccatggcctctttactatgagaaatttgtaagagtgaaaagtcttcatgaaccaatctggactcctcattaagccaaccagacccagatgttttgtgaacgtaggggtcatgttcgtctgatgctttcagcaaaggggaaagaagggggctactttgtatatatttagacccagtgaaaggaaggaggatacaagtcaggaaagagtaacaattgtcatattcggaagctaatagattactggcttagttggaaagcctgccttattctgctacagagggatttcttttgctggtcaccatcttcatcagagtatccacctcctgtcagggcaggcaaaaagtatgtttttattaaatgtctcccttgcacagtaaagcttggactatgtcagaacgttgcttttttttttaaaacaaaaaatatgcctcaggtgtgttttatgaattactcaaaagagttcatgccccagaacttagcctgtacctgtgaaatattatcatgccccttatgtattcacaccagggctgtgctagattaaatagagatcatcaccatggtatgctaattactgtttttagcagtgacacagttgtgtgacagaaggtgtatgttaccaggtgattataacccagaaataattccctatttaacctctaaaaaaaaaaaa

SEQ ID NO: 8042 - protein, 543 aa, Rattus norvegicus; identical to SEQ ID NO: 7047
  ref <308>: DATABASE ACCESSION NUMBER: SWISS-Prot / Q64678
  ref <309>: DATABASE ENTRY DATE: 2002-06-15

SEQ ID NO: 8043 - DNA, 5102 bp, Homo sapiens; identical to SEQ ID NO: 7048
  ref <308>: DATABASE ACCESSION NUMBER: EMBL / U03688
  ref <309>: DATABASE ENTRY DATE: 2000-03-04

SEQ ID NO: 8044 - protein, 543 aa, Homo sapiens; identical to SEQ ID NO: 7049
  ref <308>: DATABASE ACCESSION NUMBER: SWISS-Prot / Q16678
  ref <309>: DATABASE ENTRY DATE: 2002-06-15

SEQ ID NO: 8045 - DNA, 4964 bp, Rattus norvegicus; identical to SEQ ID NO: 8041
  ref <308>: DATABASE ACCESSION NUMBER: EMBL / U09540
  ref <309>: DATABASE ENTRY DATE: 2000-03-04

SEQ ID NO: 8046 - protein, 543 aa, Rattus norvegicus; identical to SEQ ID NO: 7047
  ref <308>: DATABASE ACCESSION NUMBER: SWISS-Prot / Q64678
  ref <309>: DATABASE ENTRY DATE: 2002-06-15

SEQ ID NO: 8047 - DNA, 5102 bp, Homo sapiens; identical to SEQ ID NO: 7048
  ref <308>: DATABASE ACCESSION NUMBER: EMBL / U03688
  ref <309>: DATABASE ENTRY DATE: 2000-03-04

SEQ ID NO: 8048 - protein, 543 aa, Homo sapiens; identical to SEQ ID NO: 7049
  ref <308>: DATABASE ACCESSION NUMBER: SWISS-Prot / Q16678
  ref <309>: DATABASE ENTRY DATE: 2002-06-15

SEQ ID NO: 8049 - DNA, 4964 bp, Rattus norvegicus; identical to SEQ ID NO: 8041
  ref <308>: DATABASE ACCESSION NUMBER: EMBL / U09540
  ref <309>: DATABASE ENTRY DATE: 2000-03-04

SEQ ID NO: 8050 - protein, 543 aa, Rattus norvegicus; identical to SEQ ID NO: 7047
  ref <308>: DATABASE ACCESSION NUMBER: SWISS-Prot / Q64678
  ref <309>: DATABASE ENTRY DATE: 2002-06-15

SEQ ID NO: 8051 - DNA, 5102 bp, Homo sapiens; identical to SEQ ID NO: 7048
  ref <308>: DATABASE ACCESSION NUMBER: EMBL / U03688
  ref <309>: DATABASE ENTRY DATE: 2000-03-04

SEQ ID NO: 8052 - protein, 543 aa, Homo sapiens; identical to SEQ ID NO: 7049
  ref <308>: DATABASE ACCESSION NUMBER: SWISS-Prot / Q16678
  ref <309>: DATABASE ENTRY DATE: 2002-06-15

SEQ ID NO: 8053 - DNA, 4964 bp, Rattus norvegicus; identical to SEQ ID NO: 8041
  ref <308>: DATABASE ACCESSION NUMBER: EMBL / U09540
  ref <309>: DATABASE ENTRY DATE: 2000-03-04

SEQ ID NO: 8054 - protein, 543 aa, Rattus norvegicus; identical to SEQ ID NO: 7047
  ref <308>: DATABASE ACCESSION NUMBER: SWISS-Prot / Q64678
  ref <309>: DATABASE ENTRY DATE: 2002-06-15

SEQ ID NO: 8055 - DNA, 5102 bp, Homo sapiens; identical to SEQ ID NO: 7048
  ref <308>: DATABASE ACCESSION NUMBER: EMBL / U03688
  ref <309>: DATABASE ENTRY DATE: 2000-03-04

SEQ ID NO: 8056 - protein, 543 aa, Homo sapiens; identical to SEQ ID NO: 7049
  ref <308>: DATABASE ACCESSION NUMBER: SWISS-Prot / Q16678
  ref <309>: DATABASE ENTRY DATE: 2002-06-15

SEQ ID NO: 8057 - DNA, 2642 bp, Rattus norvegicus
  ref <308>: DATABASE ACCESSION NUMBER: EMBL / U09551
  ref <309>: DATABASE ENTRY DATE: 2000-03-04
agtgtgctctaaaggcgacgggtttgtcggagcaccataatatggtgtgggaagtgaagacgaaccagaggcctcatgcagtacagagactcctgctggtgatggacgagagagctacaggagtgagtgactcattggagttgctgcagtgtaatgagaatgtgccgtcctctccaggatacaactcctgtgatgagcacatggagcttgatgaccttcctgaacttcaggctgttcaaagtgaccctacccaatctgccatataccagctcagttcagatgtatctcatcaagaatatccaagaccatcttggagccagaatacctcagacataccggaaaatactcaccgtgaagatgaggtggactggctaacagagttagcaaatattgccactagtccacaaagtccactaatgcagtgctcattttataacagatcatctcctgtacacatcatagctactagcaacagtttacattcctatgcacgcccaccaccagtgtcctctgcaaagagcggaccagccttccctcatgaccactggaaggaagaaacaccagtaagacatgaaagggcaaacagtgagtcagagtcaggaattttctgcatgtcctccctgtcagatgatgatgatctgggctggtgcaattcctggccatcaaccgtttggcattgctttctcaaaggcacacgactgtgcttccataaggaaagcaaaaaggagtggcaagatgttgaagactttgctagagccgccacctgtgatgaggaggagatccaaatgggcactcacaagggctatgggtctgatggtctaaagttgttatcccatgaagagagtgtgtcattcggtgagtctgtactgaagttgacatttgatcctggtacagtagaagatggcttgcttactgtggagtgcaagctggaccaccctttctatgttaaaaataaaggctggtcatcattttatccaagcttgactgtggtacagcacggcattccatgctgtgagattcatattggtgacgtatgtctacctcctggacaccctgatgccattaatttcgatgattcaggtgtttttgatacatttaaaagctatgacttcacacctatggactcttccgcagtctacgttttgagtagtatggctcgccagcgccgcgcatctttgtcttgtggaggacctggtactggtcaagagtttgcaggatctgaattcagtaaaagctgtggttcaccaggatcatcacagctctcctctagttctttatacactaaagctgtcaaaagccacagctcagggactgtgagtgccacttctcctaataagtgcaaaagaccaatgaatgccttcatgctttttgccaaaaaatacagagttgaatatactcagatgtatccagggaaagataacagagccataagtgtgatccttggtgacaggtggaaaaaaatgaagaacgaggaaaggaggatgtatacattagaagcaaaggctttggctgaagaacaaaagcgtttaaatcccgactgctggaaaaggaaaagaaccaattcaggctctcaacagcactaaacctgatgcttctgtctgtaagtctgtaccttgcatcagtactgactctgtacctgcataaggactgactctggacggaaaagcttggaagaccttggtctcaccatttgtcctacatttgtgtgaccataaaatgctgggagcattgagttttgtaatgatttaatgggtgaggaggatctgctttctccattagagcattaagtaagctaaaactatcaacattgtaaaccaaattgccttattttccttccaaacttcatatatgtctatcaggtaatataggcttgaaaattgatatcctgtggtgctaaagtacagtagaaagagagatgtgtatacatgtcttattttaaattgtacgaaggggaatttaaaaatatgtaactgctgtttatacatcagctccttactgcttattaatctgtattgtacccacgatatcaggaatgaagtagaagctggcctttccatgaatagccaccacatggcccagtgtctctgccaaacacagttgcttctagtctggccagtgccaagagacaacataacatggcaggtggatggtgtcattgtctcagctgagagccacctgcttcagataccatgggcgtgtgctgagtggatgcaccagggggcagcacagctccatgattcccagtgggggccaagccaggctaaggtgcagtcagttagcattgggacagtcattgtaatggtgctgttatcagttgaaaccatgctccctgtctcctcagccacatcccctccgtctctgctgtcatcttctctgtggtggggcagactttgcacttactgcagtgcaacacttgcactttacccctccggcttctacagtagagcaagtccttcggcagccctgctgctttcgctctgcgctacaatcatggcttctcatgttacttaccaagtggtatttttggttaggaatcacagctgtaaagttgatttcagttcattacacttcttaaacatattgcccctcaattttgcacactatattcttgtatattatttcaaataaaatgaaaaaagtct

SEQ ID NO: 8058 - protein, 513 aa, Rattus norvegicus
  ref <308>: DATABASE ACCESSION NUMBER: SWISS-Prot / AAA53240
  ref <309>: DATABASE ENTRY DATE: 2003-02-01
MVWEVKTNQRPHAVQRLLLVMDERATGVSDSLELLQCNENVPSSPGYNSCDEHMELDDLPELQAVQSDPTQSAIYQLSSDVSHQEYPRPSWSQNTSDIPENTHREDEVDWLTELANIATSPQSPLMQCSFYNRSSPVHIIATSNSLHSYARPPPVSSAKSGPAFPHDHWKEETPVRHERANSESESGIFCMSSLSDDDDLGWCNSWPSTVWHCFLKGTRLCFHKESKKEWQDVEDFARAATCDEEEIQMGTHKGYGSDGLKLLSHEESVSFGESVLKLTFDPGTVEDGLLTVECKLDHPFYVKNKGWSSFYPSLTVVQHGIPCCEIHIGDVCLPPGHPDAINFDDSGVFDTFKSYDFTPMDSSAVYVLSSMARQRRASLSCGGPGTGQEFAGSEFSKSCGSPGSSQLSSSSLYTKAVKSHSSGTVSATSPNKCKRPMNAFMLFAKKYRVEYTQMYPGKDNRAISVILGDRWKKMKNEERRMYTLEAKALAEEQKRLNPDCWKRKRTNSGSQQH

SEQ ID NO: 8059 - DNA, 2704 bp, Homo sapiens
  ref <308>: DATABASE ACCESSION NUMBER: EMBL / BC022329
  ref <309>: DATABASE ENTRY DATE: 2002-09-02
agacttggtaatggcgacgggtttgtcagagcaccataacatggtgtgggaagtgaagacaaatcagatgcctaatgcagtacagaaactcctgttggtgatggacaagagagcctcaggaatgaatgactcattggagttgctgcagtgtaatgagaatttgccatcttcacctggatataactcctgtgatgaacacatggagcttgatgaccttcctgaacttcaggcagttcaaagtgatcctacccaatctggcatgtaccagctgagttcagatgtttcacatcaagaatacccaagatcatcttggaaccaaaatacctcagacataccagaaactacttaccgtgaaaatgaggtggactggctaacagaattggcaaatatcgcgaccagtccacaaagtccactgatgctgtgctcattttacaatagatcatctcctgtacacatcatagccactagcaaaagtttacattcctatgcacgccctccaccagtgtcctcttcttcgaagagtgaaccagccttccctcatcaccattggaaggaggaaacaccagtaagacacgaaagggcaaatagtgagtcagaatctggcattttctgcatgtcctccctgtcagatgatgatgatttgggatggtgcaattcctggccttcaactgtctggcactgttttttgaaaggcacacgactgtgctttcataagggaagcaataaggaatggcaagatgttgaagattttgctagagctgaaggctgtgataatgaggaagatcttcaaatgggcattcacaagggctatggttctgatggtctaaagttgttatcacatgaagaaagtgtatcatttggcgagtctgtactgaagttgacttttgatcctggtacagtagaagatggtttacttaccgtagagtgtaagctggaccaccctttctatgttaaaaataaaggttggtcatcattttatccaagcttgactgtggtacagcatggcattccatgttgtgaagttcatattggcgatgtatgtctacctcctggacaccccgatgccattaattttgatgatccaggtgtttttgatacatttaaaagctatgacttcacacctatggattcttctgcagtttatgtgttaagtagtatggctcgccagcgtcgtgcatctttgtcttgtggaggacctggtggtcaagactttgcaagatctggattcagtaaaaactgtggctcacctggatcatcacagctctcttccaattctttgtatgctaaagctgtcaaaaaccacagctcagggactgtgagtgccacttctcctaataagtgcaaaagaccaatgaatgccttcatgctttttgccaaaaaatacagagttgaatatactcagatgtatccagggaaagataacagagccataagtgtgatccttggtgacaggtggaagaaaatgaagaatgaagagagaagaatgtacacattagaagcaaaggctttggctgaagaacagaaacgtttaaatcctgactgttggaagaggaaaagaaccaattcaggctcacaacaacattaaaccaggatgcttatgttcttaagtctatatttgcatatacattgactcttgatggaaagacttaagaagatcaaggtctcaccatttgtcctcaattcgtgtgaccataagatactgatagcattgagtcttgaaatgatttaataatatgagtgaggatttgctttctccattagagcattaagctaaaactatcaacattttaaaccaaattgccttatttttcttccaaacttcatatatgtctatcaggtaataataggcttgaaaattgatatcctgtggtgctaaagtacagtagaaagagaggagaagtgtatacatgttttattttaaattgtacgaaaggggaatttaaaaaatatgtaactgctgtttatacattggctccttactgcttattaatccgtattgtacacatgatgaaatgaagcagaagctgggagtcggcctttcctctagtaaccaccacatggctcagcatctgtgccaaacataggcgctcctagtctggtcagtgccaagaggctaccagaacatggggcaggtggctggtgttggtgtcccagcctaagagccacctgctgcagttaccatggcatgctgagttgatgcaccaggtggcagcagccatccgttattatttccaatggagacctagcccaggccaaggtaaagttagttaatagcattgggatatagtcactgtaatggtgctattaacaaacagtcaacaccattgtattttttaacttcgtgttctgtatctcctcagccatgtatcttaaatatattttgtcatcataatctttatggtgggggcagactttgcacttactgcagtgcaacacttgcactttaattttcctccaactgtctaaaattagagcaaatacattggcaatacagctgcttttgctctgagctacaatcatggcttttcatgttacttaccaagtggtgtttctggttaggaatcacagttgtaaaattgatttcagttcatcacacttcttcatgatgttgcccctaaattttgcacactatattcttgtatattatttcaaataaatgggaaaaaaagttaccaaaaaaaaaaaaaaaaaaaaaaaaaaaaaa

SEQ ID NO: 8060 - protein, 515 aa, Homo sapiens
  misc_feature (1)..(515): Xaa=Unknown amino acid
MVWEVKTNQMPNAVQKLLLVMDKRASGMNDSLELLQCNENLPSSPGYNSCDEHMELDDLPELQAVQSDPTQSGMYQLSSDVSHQEYPRSSWNQNTSDIPETTYRENEVDWLTELANIATSPQSPLMLCSFYNRSSPVHIIATSKSLHSYARPPPVSSSSKSEPAFPHHHWKEETPVRHERANSESESGIFCMSSLSDDDDLGWCNSWPSTVWHCFLKGTRLCFHKGSNKEWQDVEDFARAEGCDNEEDLQMGIHKGYGSDGLKLLSHEESVSFGESVLKLTFDPGTVEDGLLTVECKLDHPFYVKNKGWSSFYPSLTVVQHGIPCCEVHIGDVCLPPGHPDAINFDDPGVFDTFKSYDFTPMDSSAVYVLSSMARQRRASLSCGGPGGQDFARSGFSKNCGSPGSSQLSSNSLYAKAVKNHSSGTVSATSPNKCKRPMNAFMLFAKKYRVEYTQMYPGKDNRAISVILGDRWKKMKNEERRMYTLEAKALAEEQKRLNPDCWKRKRTNSGSQQHX

SEQ ID NO: 8061 - DNA, 2642 bp, Rattus norvegicus; identical to SEQ ID NO: 8057
  ref <308>: DATABASE ACCESSION NUMBER: EMBL / U09551
  ref <309>: DATABASE ENTRY DATE: 2000-03-04

SEQ ID NO: 8062 - protein, 513 aa, Rattus norvegicus; identical to SEQ ID NO: 8058
  ref <308>: DATABASE ACCESSION NUMBER: SWISS-Prot / AAA53240
  ref <309>: DATABASE ENTRY DATE: 2003-02-01

SEQ ID NO: 8063 - DNA, 2704 bp, Homo sapiens; identical to SEQ ID NO: 8059
  ref <308>: DATABASE ACCESSION NUMBER: EMBL / BC022329
  ref <309>: DATABASE ENTRY DATE: 2002-09-02

SEQ ID NO: 8064 - protein, 515 aa, Homo sapiens; identical to SEQ ID NO: 8060
  misc_feature (1)..(515): Xaa=Unknown amino acid

SEQ ID NO: 8065 - DNA, 661 bp, Rattus norvegicus
  ref <308>: DATABASE ACCESSION NUMBER: EMBL / U09793
  ref <309>: DATABASE ENTRY DATE: 2000-03-04
atgactgagtataaacttgtggtagttggagctggtggcgtaggcaagagtgccttgacgatacagctaattcagaatcactttgtggatgaatatgatcctacgatagaggactcctacaggaaacaagtagtaattgatggagaaacctgtctcttggatattctcgacacagcaggtcaagaggagtacagtgcaatgagggaccagtacatgagaactggggagggctttctttgtgtatttgccataaataatactaaatcatttgaagatattcaccattatagagaacaaattaaaagagtaaaggactctgaagatgtgcctatggtcctagtagggaataagtgtgacttgccttctagaacagtagacacgaaacaggctcaggagttagcaaggagttatgggattccattcattgagacctcagcgaagacaagacagggtgttgacgatgccttctatacattagtccgagaaattcgaaaacataaagaaaagatgagcaaagatgggaaaaagaagaagaagaagtcaaggacaaggtgtatagtcatgtgaatagtttgtactctttcttaaggcacacttaagtaaagtgtgatttttgtacattacactaaattattagcatttgttttagcattacctaatc

SEQ ID NO: 8066 - protein, 188 aa, Rattus norvegicus
  ref <308>: DATABASE ACCESSION NUMBER: SWISS-Prot / P46203
  ref <309>: DATABASE ENTRY DATE: 2001-10-16
MTEYKLVVVGAGGVGKSALTIQLIQNHFVDEYDPTIEDSYRKQVVIDGETCLLDILDTAGQEEYSAMRDQYMRTGEGFLCVFAINNTKSFEDIHHYREQIKRVKDSEDVPMVLVGNKCDLPSRTVDTKQAQELARSYGIPFIETSAKTRQGVDDAFYTLVREIRKHKEKMSKDGKKKKKKSRTRCIVM

SEQ ID NO: 8067 - DNA, 1362 bp, Homo sapiens
  ref <308>: DATABASE ACCESSION NUMBER: Refseq / NM_004985
  ref <309>: DATABASE ENTRY DATE: 2001-09-21
ggccgcggcggcggaggcagcagcggcggcggcagtggcggcggcgaaggtggcggcggctcggccagtactcccggcccccgccatttcggactgggagcgagcgcggcgcaggcactgaaggcggcggcggggccagaggctcagcggctcccaggtgcgggagagaggcctgctgaaaatgactgaatataaacttgtggtagttggagctggtggcgtaggcaagagtgccttgacgatacagctaattcagaatcattttgtggacgaatatgatccaacaatagaggattcctacaggaagcaagtagtaattgatggagaaacctgtctcttggatattctcgacacagcaggtcaagaggagtacagtgcaatgagggaccagtacatgaggactggggagggctttctttgtgtatttgccataaataatactaaatcatttgaagatattcaccattatagagaacaaattaaaagagttaaggactctgaagatgtacctatggtcctagtaggaaataaatgtgatttgccttctagaacagtagacacaaaacaggctcaggacttagcaagaagttatggaattccttttattgaaacatcagcaaagacaagacagggtgttgatgatgccttctatacattagttcgagaaattcgaaaacataaagaaaagatgagcaaagatggtaaaaagaagaaaaagaagtcaaagacaaagtgtgtaattatgtaaatacaatttgtacttttttcttaaggcatactagtacaagtggtaatttttgtacattacactaaattattagcatttgttttagcattacctaatttttttcctgctccatgcagactgttagcttttaccttaaatgcttattttaaaatgacagtggaagtttttttttcctcgaagtgccagtattcccagagttttggtttttgaactagcaatgcctgtgaaaaagaaactgaatacctaagatttctgtcttggggtttttggtgcatgcagttgattacttcttatttttcttaccaagtgtgaatgttggtgtgaaacaaattaatgaagcttttgaatcatccctattctgtgttttatctagtcacataaatggattaattactaatttcagttgagaccttctaattggtttttactgaaacattgagggaacacaaatttatgggcttcctgatgatgattcttctaggcatcatgtcctatagtttgtcatccctgatgaatgtaaagttacactgttcacaaaggttttgtctcctttccactgctattagtcatggtcactctccccaaaatattatattttttctataaaaaaaaaa

SEQ ID NO: 8068 - protein, 188 aa, Homo sapiens [sequence omitted]

SEQ ID NO: 8069 - DNA, 4113 bp, Rattus norvegicus
  ref <308>: DATABASE ACCESSION NUMBER: EMBL / U10354
  ref <309>: DATABASE ENTRY DATE: 2000-03-04
cgggactctccaggccggctcaggcaccggactgtaggtgtatttggagggatttggaggctggagaccccaggaagcacgcaggcgggagcaggcaaggggcggagccccgggcccggccaaggtggccgtcagagggtctgcggggaggcagtagcttgacccaaggcgaccagggaacttcagacggtagcacgccactcaaacaaattaacttgacatcgcaagctgggcgggctggtacgacatcctgacttcagcatccagctgttcctgggcagacagagggccaacaggtgttcctgtggaagaagccaggacaaggactccagaaaacatctcgggcagcctctacatgatgtcacttctcaggactcgaggaccagccaccctacacctctactacagagaaggcagaaatggagacccaaaggccatcactcctgctctgtcactaaccactctgtaatcatgtctccccaccagaaggtgtgaaccgcaccagggccgtggagttctcgggctcccaatccactgacacctttacctgtcccctgaagagaaggcaacgctatggcatcgtacagctgctgtttggccctattggctcttgcctggcactcctctgcctatgggcctgaccagcgagcccaaaagaagggggacattatcctaggaggtctctttcctatccattttggagtagcagccaaagatcaagatctgaagtcaagaccagagtctgtggagtgcattaggtataacttccgtggattccgatggttacaagccatgatattcgccatagaggagataaacagcagcccctcccttcttcccaacatgacactgggatataggatatttgacacctgtaacaccgtctccaaggcgctggaagccaccttgagttttgttgcccagaacaaaatcgattctttgaacctggacgagttctgcaactgctctgagcacatcccttcgaccattgccgtggtgggagccaccggctccggtgtctccacggcggtagccaacctgctgggacttttctacatcccccaggtgagctacgcctcctccagcaggctcctcagcaataagaaccagtacaaatccttcctccgcaccattcccaatgacgaacaccaggcaaccgcgatggccgacatcatcgagtacttccgctggaactgggtgggcacaattgcagctgatgacgactatggcagacctggcattgagaagttccgagaggaagccgaagagagggatatctgcattgattttagcgagctcatctcccagtactctgacgaggaagagatccagcaggtggtcgaagtgatccaaaactctacggccaaggtcattgtcgttttctccagcggcccggacctagaacctctcatcaaggagattgtgcggcgtaacatcacaggcaggatctggctggctagcgaggcctgggccagttcctcgctgattgctatgcctgagtatttccatgtagtcgggggcaccattgggttcggtctgaaggctgggcagattccaggcttcagagaattcctacagaaagttcatcctaggaagtctgtccacaatggttttgccaaagagttttgggaagaaacttttaattgccacctccaagaaggcgcaaaaggacctttacctgtggacaccttcgtgagaagtcacgaagaaggtggcaacaggttactcaatagctctactgccttccgacccctctgcacaggggatgagaacatcaacagtgtggagaccccttacatggattacgaacatttacggatatcctacaatgtgtacttagccgtctactccattgcgcatgccctacaagatatatacacctgcttacccggaagagggcttttcaccaacgggtcctgtgcagacatcaagaaggttgaggcctggcaggtcttgaagcacctacggcacctgaacttcaccaacaacatgggggagcaggtgaccttcgatgagtgtggtgatctggtggggaactattctatcatcaactggcacctctccccagaggacggctccattgtgttcaaggaagttgggtactacaatgtgtatgccaagaagggagaaagactcttcatcaatgaggagaagatcttgtggagtgggttctccagagaggtgcctttctccaattgcagccgggactgtcaggcagggaccaggaaggggatcatcgagggagagcccacctgctgctttgagtgtgtggagtgtcctgatggagagtacagtggagagacagatgcgagtgcctgtgacaagtgcccggatgacttctggtccaatgagaaccacacttcttgcattgccaaggagattgagtttctggcgtggaccgagccctttggaatcgctctcactctctttgcggtgctgggcattttcctgaccgcctttgtgctgggtgtcttcatcaagttccgaaacacacctatcgtcaaggccaccaaccgagaactgtcctacctcctgctcttctccctactctgctgcttctccagctccttgttcttcattggggagccccaggactggacgtgccgcctgcgacagcctgctttcggcatcagctttgtgctctgtatctcgtgcatcttggtgaagaccaatcgcgtcctcctggtatttgaagccaagatacccaccagcttccaccggaagtggtgggggctcaacctgcagttcctgctggttttcctctgcaccttcatgcagatcctcatctgcatcatctggctctacacggcgcccccctctagctaccgcaaccatgagctggaagacgaaatcatcttcatcacgtgccatgagggctcactcatggcacttggctccctgatcggctatacctgcctgctggctgccatctgcttcttctttgccttcaagtccaggaagttaccagagaacttcaacgaagccaagttcattaccttcagcatgctcatcttcttcatcgtctggatctccttcattccagcctatgccagcacctacggcaagtttgtctctgccgtagaggtgatcgccattttggcagccagctttggcttactagcctgcatcttcttcaacaaggtctacattatcctcttcaagccttcccggaacaccattgaggaagtccgctccagcaccgcagcacatgctttcaaagtagcagcccgcgccactctacgccgtcccaacatctcccggaagcggtccagcagccttggaggctccaccggctccattccctcctcctccatcagcagcaaaagcaacagcgaagaccggttcccgcagccagagaggcagaagcaacagcaaccgctgtccctgacccagcaagaacagcagcagcagcccctgaccctccacccacagcaacagcagcagccacagcagccgagatgcaaacagaaggtcatcttcggcagtggtacggtcaccttctctctgagttttgacgagcctcagaagaatgccatggcccacaggaactccatgcgtcagaactccctggaggcccagaggagcaacgacaccttgggcagacaccaggccctgcttcccctacagtgtgcagatgcggactcagaaatgaccattcaggaaacgggcctgcaagggcccatggtgggggaccaccagccagaaatggaaagctcagatgaaatgtccccagcgctggtcatgtccacctctcggagcttcgtcattagtggtggaggtagctctgtgacggaaaacgtattacactcctaatggagggaaaggctatccagttgagaggtttttcttagagccctgagcaaaaggatgggtccttcctttcttcccaggaagccagggagagtaggtacgtcaaagcctgtactcagttgcactgctttgaatgacagtgaactgactggtgtgctctttagagttaaaagaagagccatgttttggggtcgttttccagagctcagtatcacacctgggtttgctgaagtcttttcctctgctctatccaccatcagttcagacgaaagcaaggctctaagctacccatctgcttccctc

SEQ ID NO: 8070 - protein, 1079 aa, Rattus norvegicus
  ref <308>: DATABASE ACCESSION NUMBER: SWISS-Prot / P48442
  ref <309>: DATABASE ENTRY DATE: 2001-10-16
MASYSCCLALLALAWHSSAYGPDQRAQKKGDIILGGLFPIHFGVAAKDQDLKSRPESVECIRYNFRGFRWLQAMIFAIEEINSSPSLLPNMTLGYRIFDTCNTVSKALEATLSFVAQNKIDSLNLDEFCNCSEHIPSTIAVVGATGSGVSTAVANLLGLFYIPQVSYASSSRLLSNKNQYKSFLRTIPNDEHQATAMADIIEYFRWNWVGTIAADDDYGRPGIEKFREEAEERDICIDFSELISQYSDEEEIQQVVEVIQNSTAKVIVVFSSGPDLEPLIKEIVRRNITGRIWLASEAWASSSLIAMPEYFHVVGGTIGFGLKAGQIPGFREFLQKVHPRKSVHNGFAKEFWEETFNCHLQEGAKGPLPVDTFVRSHEEGGNRLLNSSTAFRPLCTGDENINSVETPYMDYEHLRISYNVYLAVYSIAHALQDIYTCLPGRGLFTNGSCADIKKVEAWQVLKHLRHLNFTNNMGEQVTFDECGDLVGNYSIINWHLSPEDGSIVFKEVGYYNVYAKKGERLFINEEKILWSGFSREVPFSNCSRDCQAGTRKGIIEGEPTCCFECVECPDGEYSGETDASACDKCPDDFWSNENHTSCIAKEIEFLAWTEPFGIALTLFAVLGIFLTAFVLGVFIKFRNTPIVKATNRELSYLLLFSLLCCFSSSLFFIGEPQDWTCRLRQPAFGISFVLCISCILVKTNRVLLVFEAKIPTSFHRKWWGLNLQFLLVFLCTFMQILICIIWLYTAPPSSYRNHELEDEIIFITCHEGSLMALGSLIGYTCLLAAICFFFAFKSRKLPENFNEAKFITFSMLIFFIVWISFIPAYASTYGKFVSAVEVIAILAASFGLLACIFFNKVYIILFKPSRNTIEEVRSSTAAHAFKVAARATLRRPNISRKRSSSLGGSTGSIPSSSISSKSNSEDRFPQPERQKQQQPLSLTQQEQQQQPLTLHPQQQQQPQQPRCKQKVIFGSGTVTFSLSFDEPQKNAMAHRNSMRQNSLEAQRSNDTLGRHQALLPLQCADADSEMTIQETGLQGPMVGDHQPEMESSDEMSPALVMSTSRSFVISGGGSSVTENVLHS

SEQ ID NO: 8071 - DNA, 5009 bp, Homo sapiens
  ref <308>: DATABASE ACCESSION NUMBER: EMBL / U20760
  ref <309>: DATABASE ENTRY DATE: 1999-07-02
ggggctgctgtggccggacccgaaggcgggcgccgggagcgcagcgagccagacgcgcctctccaagaccgtgaccttggcatagggagcggggctgcgcgcagtcctgagatcagaccagagctcatcctcgtggagacccacggccgaggggccggagctgcctctgtgcgagggagccctggccgcggcgcagaaggcatcacaggaggcctctgcatgatgtggcttccaaagactcaaggaccacccacattacaagtctggattgaggaaggcagaaatggagattcaaacaccacgtcttctattattttattaatcaatctgtagacatgtgtccccactgcagggagtgaactgctccaagggagaaacttctgggagcctccaaactcctagctgtctcatcccttgccctggagagacggcagaaccatggcattttatagctgctgctgggtcctcttggcactcacctggcacacctctgcctacgggccagaccagcgagcccaaaagaagggggacattatccttggggggctctttcctattcattttggagtagcagctaaagatcaagatctcaaatcaaggccggagtctgtggaatgtatcaggtataatttccgtgggtttcgctggttacaggctatgatatttgccatagaggagataaacagcagcccagcccttcttcccaacttgacgctgggatacaggatatttgacacttgcaacaccgtttctaaggccttggaagccaccctgagttttgttgctcaaaacaaaattgattctttgaaccttgatgagttctgcaactgctcagagcacattccctctacgattgctgtggtgggagcaactggctcaggcgtctccacggcagtggcaaatctgctggggctcttctacattccccaggtcagttatgcctcctccagcagactcctcagcaacaagaatcaattcaagtctttcctccgaaccatccccaatgatgagcaccaggccactgccatggcagacatcatcgagtatttccgctggaactgggtgggcacaattgcagctgatgacgactatgggcggccggggattgagaaattccgagaggaagctgaggaaagggatatctgcatcgacttcagtgaactcatctcccagtactctgatgaggaagagatccagcatgtggtagaggtgattcaaaattccacggccaaagtcatcgtggttttctccagtggcccagatcttgagcccctcatcaaggagattgtccggcgcaatatcacgggcaagatctggctggccagcgaggcctgggccagctcctccctgatcgccatgcctcagtacttccacgtggttggcggcaccattggattcgctctgaaggctgggcagatcccaggcttccgggaattcctgaagaaggtccatcccaggaagtctgtccacaatggttttgccaaggagttttgggaagaaacatttaactgccacctccaagaaggtgcaaaaggacctttacctgtggacacctttctgagaggtcacgaagaaagtggcgacaggtttagcaacagctcgacagccttccgacccctctgtacaggggatgagaacatcagcagtgtcgagaccccttacatagattacacgcatttacggatatcctacaatgtgtacttagcagtctactccattgcccacgccttgcaagatatatatacctgcttacctgggagagggctcttcaccaatggctcctgtgcagacatcaagaaagttgaggcgtggcaggtcctgaagcacctacggcatctaaactttacaaacaatatgggggagcaggtgacctttgatgagtgtggtgacctggtggggaactattccatcatcaactggcacctctccccagaggatggctccatcgtgtttaaggaagtcgggtattacaacgtctatgccaagaagggagaaagactcttcatcaacgaggagaaaatcctgtggagtgggttctccagggagccactcacctttgtgctgtctgtcctccaggtgcccttctccaactgcagccgagactgcctggcagggaccaggaaagggatcattgagggggagcccacctgctgctttgagtgtgtggagtgtcctgatggggagtatagtgatgagacagatgccagtgcctgtaacaagtgcccagatgacttctggtccaatgagaaccacacctcctgcattgccaaggagatcgagtttctgtcgtggacggagccctttgggatcgcactcaccctctttgccgtgctgggcattttcctgacagcctttgtgctgggtgtgtttatcaagttccgcaacacacccattgtcaaggccaccaaccgagagctctcctacctcctcctcttctccctgctctgctgcttctccagctccctgttcttcatcggggagccccaggactggacgtgccgcctgcgccagccggcctttggcatcagcttcgtgctctgcatctcatgcatcctggtgaaaaccaaccgtgtcctcctggtgtttgaggccaagatccccaccagcttccaccgcaagtggtgggggctcaacctgcagttcctgctggttttcctctgcaccttcatgcagattgtcatctgtgtgatctggctctacaccgcgcccccctcaagctaccgcaaccaggagctggaggatgagatcatcttcatcacgtgccacgagggctccctcatggccctgggcttcctgatcggctacacctgcctgctggctgccatctgcttcttctttgccttcaagtcccggaagctgccggagaacttcaatgaagccaagttcatcaccttcagcatgctcatcttcttcatcgtctggatctccttcattccagcctatgccagcacctatggcaagtttgtctctgccgtagaggtgattgccatcctggcagccagctttggcttgctggcgtgcatcttcttcaacaagatctacatcattctcttcaagccatcccgcaacaccatcgaggaggtgcgttgcagcaccgcagctcacgctttcaaggtggctgcccgggccacgctgcgccgcagcaacgtctcccgcaagcggtccagcagccttggaggctccacgggatccaccccctcctcctccatcagcagcaagagcaacagcgaagacccattcccacggcccgagaggcagaagcagcagcagccgctggccctaacccagcaagagcagcagcagcagcccctgaccctcccacagcagcaacgatctcagcagcagcccagatgcaagcagaaggtcatctttggcagcggcacggtcaccttctcactgagctttgatgagcctcagaagaacgccatggcccacaggaattctacgcaccagaactccctggaggcccagaaaagcagcgatacgctgacccgacaccagccattactcccgctgcagtgcggggaaacggacttagatctgaccgtccaggaaacaggtctgcaaggacctgtgggtggagaccagcggccagaggtggaggaccctgaagagttgtccccagcacttgtagtgtccagttcacagagctttgtcatcagtggtggaggcagcactgttacagaaaacgtagtgaattcataaaatggaaggagaagactgggctagggagaatgcagagaggtttcttggggtcccagggatgaggaatcgccccagactcctttcctctgaggaagaagggataatagacacatcaaatgccccgaatttagtcacaccatcttaaatgacagtgaattgacccatgttccctttaaaattaaaaaaaagaagagccttgtgtttctgtggttgcatttgtcaaagcattgagatctccacggtcagatttgctgttcacccacatctaatgtctcttcctctgttctatcccacccaacagctcagagatgaaactatggctttaaactaccctccagagtgtgcagactgatgggacatcaaatttgccaccactagagctgagagtctgaaagacagaatgtcaccagtcctgcccaatgccttgacaacagactgaattttaaatgttcacaacataaggagaatgtatctcctcctatttatgaaaaccatatgatattttgtctcctacctgctgctgctattatgtaacatccagaaggtttgcacccctcctataccatatgtctggttctgtccaggacatgatactgatgccatgtttagattccaggatcacaagaatcacctcaaattgttaggaagggactgcataaaccaatgagctgtatctgtaattaatattcctatatgtagctttatccttaggaaaatgcttctgttgtaatagtccatggacaatataaactgaaaaatgtcagtctggtttatataaggcagtattattgagctctatttccccaccccactatcctcactcccataagctaagccttatgtgagccccttcagggactcaagggtccagaagtccctcccatctctaccccaaagaattcctgaagccagatccaccctatccctgtacagagtaagttctcaattattggcctgctaatagctgctagggtaggaaagcgtggttccaagaaagatccaccctcaaatgtcggagctatgttccctccagcagtggtattaatactgccggtcacccaggctctggagccagagagacagaccggggttcaagccatggcttcgtcatttgcaagctgagtgactgtaggcagggaaccttaacctctctaagccacagcttcttcatctttaaaataaggataataatcattccttcccctcagagctcttatgtggattaaacgagataatgtatataaagtactttagcctggtacctagcacacaataagcattcaataaatattagttaatattat

SEQ ID NO: 8072 - protein, 1078 aa, Homo sapiens
  ref <308>: DATABASE ACCESSION NUMBER: SWISS-Prot / P41180
  ref <309>: DATABASE ENTRY DATE: 2002-06-15
MAFYSCCWVLLALTWHTSAYGPDQRAQKKGDIILGGLFPIHFGVAAKDQDLKSRPESVECIRYNFRGFRWLQAMIFAIEEINSSPALLPNLTLGYRIFDTCNTVSKALEATLSFVAQNKIDSLNLDEFCNCSEHIPSTIAVVGATGSGVSTAVANLLGLFYIPQVSYASSSRLLSNKNQFKSFLRTIPNDEHQATAMADIIEYFRWNWVGTIAADDDYGRPGIEKFREEAEERDICIDFSELISQYSDEEEIQHVVEVIQNSTAKVIVVFSSGPDLEPLIKEIVRRNITGKIWLASEAWASSSLIAMPQYFHVVGGTIGFALKAGQIPGFREFLKKVHPRKSVHNGFAKEFWEETFNCHLQEGAKGPLPVDTFLRGHEESGDRFSNSSTAFRPLCTGDENISSVETPYIDYTHLRISYNVYLAVYSIAHALQDIYTCLPGRGLFTNGSCADIKKVEAWQVLKHLRHLNFTNNMGEQVTFDECGDLVGNYSIINWHLSPEDGSIVFKEVGYYNVYAKKGERLFINEEKILWSGFSREVPFSNCSRDCLAGTRKGIIEGEPTCCFECVECPDGEYSDETDASACNKCPDDFWSNENHTSCIAKEIEFLSWTEPFGIALTLFAVLGIFLTAFVLGVFIKFRNTPIVKATNRELSYLLLFSLLCCFSSSLFFIGEPQDWTCRLRQPAFGISFVLCISCILVKTNRVLLVFEAKIPTSFHRKWWGLNLQFLLVFLCTFMQIVICVIWLYTAPPSSYRNQELEDEIIFITCHEGSLMALGFLIGYTCLLAAICFFFAFKSRKLPENFNEAKFITFSMLIFFIVWISFIPAYASTYGKFVSAVEVIAILAASFGLLACIFFNKIYIILFKPSRNTIEEVRCSTAAHAFKVAARATLRRSNVSRKRSSSLGGSTGSTPSSSISSKSNSEDPFPQPERQKQQQPLALTQQEQQQQPLTLPQQQRSQQQPRCKQKVIFGSGTVTFSLSFDEPQKNAMAHRNSTHQNSLEAQKSSDTLTRHQPLLPLQCGETDLDLTVQETGLQGPVGGDQRPEVEDPEELSPALVVSSSQSFVISGGGSTVTENVVNS

SEQ ID NO: 8073 - DNA, 4113 bp, Rattus norvegicus; identical to SEQ ID NO: 8069
  ref <308>: DATABASE ACCESSION NUMBER: EMBL / U10354
  ref <309>: DATABASE ENTRY DATE: 2000-03-04

SEQ ID NO: 8074 - protein, 1079 aa, Rattus norvegicus; identical to SEQ ID NO: 8070
  ref <308>: DATABASE ACCESSION NUMBER: SWISS-Prot / P48442
  ref <309>: DATABASE ENTRY DATE: 2001-10-16

SEQ ID NO: 8075 - DNA, 5009 bp, Homo sapiens; identical to SEQ ID NO: 8071
  ref <308>: DATABASE ACCESSION NUMBER: EMBL / U20760
  ref <309>: DATABASE ENTRY DATE: 1999-07-02

SEQ ID NO: 8076 - protein, 1078 aa, Homo sapiens; identical to SEQ ID NO: 8072
  ref <308>: DATABASE ACCESSION NUMBER: SWISS-Prot / P41180
  ref <309>: DATABASE ENTRY DATE: 2002-06-15

SEQ ID NO: 8077 - DNA, 2207 bp, Rattus norvegicus
  ref <308>: DATABASE ACCESSION NUMBER: EMBL / U10357
  ref <309>: DATABASE ENTRY DATE: 2000-03-04
gtctcccggctgtgcttggccgtgcggagggccggtgccagcacctccagctccgggacagcagcgggagccaagcccgagccgcaggcgtcgtcgccatgcgctggttccgggcgctgttgaagaatgcgtccctggcaggggcgcccaagtacatcgagcacttcagcaagttctccccgtccccgctgtccatgaagcagtttctagacttcggatccagcaatgcctgcgagaaaacttcattcaccttcctccggcaggagctgcccgtgcgcctggccaacatcatgaaagagatcaacctgcttcctgaccgggtgctgagcaccccctcagtgcaactggtgcagagctggtatgtccagagtctgctggacatcatggaattcctggacaaggaccccgaggaccaccggaccctaagccagttcactgatgccctggtcaccatccggaaccggcacaatgacgtagtgcccaccatggcacagggagtgttggagtacaaggacacctatggtgatgacccagtctccaaccagaacatccagtactttttggaccgcttctacctcagccgcatctctatccgcatgctcattaaccagcacaccctcatctttgatggcagcaccaacccagcccaccccaaacacattggcagcattgatcccaactgcagcgtgtctgatgtggtgaaagatgcctatgacatggctaagctcctgtgtgacaagtattacatggcttcccctgacctggagatccaggaagtcaatgccaccaacgccacccagcccattcacatggtctacgtcccctcccacctctaccacatgctctttgaactcttcaagaatgccatgcgggccacagtggaaagccacgagtccagcctcactctccctcccatcaaaatcatggtggccctcggtgaagaagatctgtccatcaaaatgagtgaccgaggcgggggtgtccccttgaggaagatcgagaggctcttcagctacatgtactctacagctcctacaccccagcctggcactgggggtaccccgctggctggctttgggtatggactccccatttcccgcctctacgccaagtacttccagggggacttgcagctcttctctatggagggctttgggacagatgctgtcatctatctgaaggccctgtccacggactcagtggagcgcctgcctgtctacaacaagtctgcctggcgccactaccagaccatccaggaggccggtgactggtgcgtgcccagcacagagcccaagaacacatcgacgtatcgggtcagctaggggccttctcttcctggcacctgggaggatgctgccacctctgaatccagccaccacagggacttccctatctatcccctggggtacgggggtgaaactgggtctccccgatggccagatctgtctttgtagaaatcgcagtggcccatctgtggcgatccctaagtgccaatctgtctctatggagaaacctagggggtttccctggagcctggtctccatggtgatgatgcttgagggttggggacggctctacctggtggggtggccccagagacacttctcccaagaccagagctgtctgttttctaccagaaaccctgggtccccctcactgcctgcatagtcctggtctcccacgtggctgcctcgcttgccttatgcccacaccctgtacaggcacattgggctggtttcttcgtcagtagtaagaaagatggagagagactggggaaacgggggccaaccttgtctctggtcctgcagcctctctccatctccactctggacactaaagttgccactgggaacttgagaatgggtggccgttctcacccaaggcccaccgagaaggcctaagagtaacctgtccccaaggcgatcttagcaatgtttctgccgcttcctggcctggcatgtcctcacgtgtatacctcccctgcccagtgtacgctcaccctatccctgcttgagctttagaccccagacttcctatgcccactatgtgtgcacagacgactcaaacccaggatgccccatgtacatagccagttttgtaatctcagatgcctcacccttgccctccgcacacaggggttaaagccgtgtgcccctcccagtggctgggatggtgacagtgacatccacagtaaatagatgaaatga

SEQ ID NO: 8078 - protein, 407 aa, Rattus norvegicus
  ref <308>: DATABASE ACCESSION NUMBER: SWISS-Prot / Q64536
  ref <309>: DATABASE ENTRY DATE: 2002-06-15
MRWFRALLKNASLAGAPKYIEHFSKFSPSPLSMKQFLDFGSSNACEKTSFTFLRQELPVRLANIMKEINLLPDRVLSTPSVQLVQSWYVQSLLDIMEFLDKDPEDHRTLSQFTDALVTIRNRHNDVVPTMAQGVLEYKDTYGDDPVSNQNIQYFLDRFYLSRISIRMLINQHTLIFDGSTNPAHPKHIGSIDPNCSVSDVVKDAYDMAKLLCDKYYMASPDLEIQEVNATNATQPIHMVYVPSHLYHMLFELFKNAMRATVESHESSLTLPPIKIMVALGEEDLSIKMSDRGGGVPLRKIERLFSYMYSTAPTPQPGTGGTPLAGFGYGLPISRLYAKYFQGDLQLFSMEGFGTDAVIYLKALSTDSVERLPVYNKSAWRHYQTIQEAGDWCVPSTEPKNTSTYRVS

SEQ ID NO: 8079 - DNA, 2260 bp, Homo sapiens
  ref <308>: DATABASE ACCESSION NUMBER: Refseq / NM_002611
  ref <309>: DATABASE ENTRY DATE: 2002-05-14
ggcacgagggagcgctgcccgcgcggggaccacaacccaagtcgcggccgccgcagccatgcgctgggtgtgggcgctgctgaagaatgcgtccctggcaggggcgcccaagtacatagagcacttcagcaagttctccccgtccccgctgtccatgaagcagtttctggacttcggatccagcaatgcctgtgagaaaacctccttcaccttcctcaggcaggagctgcctgtgcgcctggccaacatcatgaaagagatcaacctgcttcccgaccgagtgctgagcacaccctccgtgcagctggtgcagagctggtatgtccagagcctcctggacatcatggagttcctggacaaggatcccgaggaccatcgcaccctgagccagttcactgacgccctggtcaccatccggaaccggcacaacgacgtggtgcccaccatggcacaaggcgtgcttgagtacaaggacacctacggcgatgaccccgtctccaaccagaacatccagtacttcctggaccgcttctacctcagccgcatctccatccgcatgctcatcaaccagcacaccctcatctttgatggcagcaccaacccagcccatcccaaacacatcggcagcatcgaccccaactgcaacgtctctgaggtggtcaaagatgcctacgacatggctaagctcctgtgtgacaagtattacatggcctcacctgacctggagatccaggagatcaatgcagccaactccaaacagccgattcacatggtctacgtcccctcccacctctaccacatgctctttgagctcttcaagaatgccatgagggcgactgtggaaagccatgagtccagcctcattctcccacccatcaaggtcatggtggccttgggtgaggaagatctgtccatcaagatgagtgaccgaggtgggggtgttcccttgaggaagattgagcgactcttcagctacatgtactccacagcacccaccccccagcctggcaccgggggaacgccgctggctggctttggttatgggctccccatttcccgcctctacgccaagtacttccagggagacctgcagctcttctccatggaaggctttgggaccgatgctgtcatctatctcaaggccctgtccacggactcggtggagcgcctgcctgtctacaacaagtcagcctggcgccactaccagaccatccaggaggccggcgactggtgtgtgcccagcacggagcccaagaacacgtccacgtaccgcgtcagctaagggccgccgtgcatctgcacctgagaggacggactgccgcctctgggtccccccaccgtggtgcccctcaccatcctcctgggggagcagggggtgggttctccctgatgaccaggttctgtctctatgcaagtcactgcggtgataggtctgtgatggtccctaagtgccagtccatctctgtggagacccctcggtggcctccctatctctgtgggcgatgcctgagggttagggatgtctccaccctgatggggtgtcccagagacattttcccatggcagtcctcctctctgagaccagggctgtcacttttctgccaggggtactgggtccccctcagcaccctccacagcacaggccttccaagtggatgtcccgttgccttattcccccagcccacaaaggcaccctggccttggtctgctgaagtgttaggaagagggtgggtgccctccagacctggggactgagtggggaaaggagttacacccgtgagtggggaatgaggctggtcctgcagcctctccctccgctcagggcttgaaggtcggtggcggagggggtggctctcacagggcccaactctaaagtggaagaaccttgttagaccgagagcttgccatccagccaagctgctcgaggccctgcagtggccttggcaatgtctgtgccacctcctgagccctcccagcatgtcctcacatgctcatgcccacccgctcctccacaagcctagtccatcctgcctgagctccagcccccagcccccactgtgcccagacatgtgtgctcagggtggctttctccctaggaccttctgtgtatatagttagttttataaccctgaatgcccccacccttcccctaagcacacaggggttaaagctgtgtgtccctcccagtggctgtggcagtgacagtgacacccacacccacagtaaagaggagactgaatgaaaaaaaaaaaaaaaaaaa

SEQ ID NO: 8080 - protein, 407 aa, Homo sapiens
  ref <308>: DATABASE ACCESSION NUMBER: SWISS-Prot / Q15119
  ref <309>: DATABASE ENTRY DATE: 2002-06-15
MRWVWALLKNASLAGAPKYIEHFSKFSPSPLSMKQFLDFGSSNACEKTSFTFLRQELPVRLANIMKEINLLPDRVLSTPSVQLVQSWYVQSLLDIMEFLDKDPEDHRTLSQFTDALVTIRNRHNDVVPTMAQGVLEYKDTYGDDPVSNQNIQYFLDRFYLSRISIRMLINQHTLIFDGSTNPAHPKHIGSIDPNCNVSEVVKDAYDMAKLLCDKYYMASPDLEIQEINAANSKQPIHMVYVPSHLYHMLFELFKNAMRATVESHESSLILPPIKVMVALGEEDLSIKMSDRGGGVPLRKIERLFSYMYSTAPTPQPGTGGTPLAGFGYGLPISRLYAKYFQGDLQLFSMEGFGTDAVIYLKALSTDSVERLPVYNKSAWRHYQTIQEAGDWCVPSTEPKNTSTYRVS

SEQ ID NO: 8081 - DNA, 2207 bp, Rattus norvegicus; identical to SEQ ID NO: 8077
  ref <308>: DATABASE ACCESSION NUMBER: EMBL / U10357
  ref <309>: DATABASE ENTRY DATE: 2000-03-04

SEQ ID NO: 8082 - protein, 407 aa, Rattus norvegicus; identical to SEQ ID NO: 8078
  ref <308>: DATABASE ACCESSION NUMBER: SWISS-Prot / Q64536
  ref <309>: DATABASE ENTRY DATE: 2002-06-15

SEQ ID NO: 8083 - DNA, 2260 bp, Homo sapiens; identical to SEQ ID NO: 8079
  ref <308>: DATABASE ACCESSION NUMBER: Refseq / NM_002611
  ref <309>: DATABASE ENTRY DATE: 2002-05-14

SEQ ID NO: 8084 - protein, 407 aa, Homo sapiens; identical to SEQ ID NO: 8080
  ref <308>: DATABASE ACCESSION NUMBER: SWISS-Prot / Q15119
  ref <309>: DATABASE ENTRY DATE: 2002-06-15

SEQ ID NO: 8085 - DNA, 2514 bp, Rattus norvegicus
  ref <308>: DATABASE ACCESSION NUMBER: EMBL / U10995
  ref <309>: DATABASE ENTRY DATE: 1998-12-02
cgccgcctgtgccatttctgattttgcaacttggggaagaagaaaaaagcgagagaagggagctcgctcgccggggggtggggaggggggagagagagcgcggcccccccaggaacggagcgcgggggggagcgggcgaggggagcaggggtgttgggggggagcctgagagcctgggggggctgcaaaaagagagaaagaaaacagcaggaaccacaacaaaactccagcagggcgggcgggctccgcagcagcagcggggcggccgaggcagtacggcagcggcggcggcggcggaggcagcggccggtgtccggctcgggctcggctcctgcgaccccggggcgcccggcgggccccccgccccctccccctccccccttccccttccccttcccctcccagcgcgcccgcgcgccccgccgccctcggcgagcagctcggctccccccagcgctccccgggcccaaagatatggcaatggtagttagcagctggcgagatccgcaggacgacgtggccgggggcaaccccggcggccccaaccccgcagcgcaggcagcccgcggcggcggcggcggcgagcaacagcaggcgggctccggcgcgccgcacacgccgcagaccccgggccagcccggagcgcccgccacccccggcacggcaggggacaagggccagggcccgcccggttcaggccagagccagcagcacatcgagtgcgtggtgtgcggggacaagtcgagcggcaagcactacggccaattcacctgcgagggctgcaaaagtttcttcaagaggagcgtccgcaggaacttaacttacacatgccgtgccaacaggaactgtcccatcgaccagcaccaccgcaaccagtgccaatactgccgcctcaagaagtgcctcaaagtgggcatgaggcgggaagcggttcagcgaggaagaatgcctccaacccagcccaatccaggccagtacgcactcacaaacggggatcccctcaatggccactgctacctgtccggctacatctccctgctgctgcgagcagagccctaccccacgtcgcgttatggcagccagtgcatgcagcccaacaacatcatgggcatcgagaacatctgcgagctggcagcccgcctcctcttcagcgccgtcgagtgggcccgcaacatcccgttcttcccggatctgcagatcaccgaccaggtgtccctcctacgcctcacctggagcgagctgttcgtgctcaacgcggcccagtgctccatgcccctgcacgtggccgtgctggcagcagccggcctacacgcctcgcccatgtccgcggaccgggtcgtggccttcatggaccacatccgcatctttcaggaacaggtggagaagctcaaggcgctgcacgtcgactctgccgagtacagctgcctcaaagccatcgtgctgttcacgtcagatgcttgtggcctgtcggatgctgcacacatcgaaagcctgcaggagaaatcgcagtgtgcactggaggaatacgtgaggagccagtaccccaaccagcccagccgctttggcaaactgctgctgcgattgccctctcttcgcacagtgtcctcttctgtcatagagcagctcttcttcgtccgtttggtaggtaaaacccccatcgaaactctcatccgagacatgttgttgtcagggagcagtttcaactggccttacatgtccatccagtgctcctagaccttgggtgtttcccacctgcccctgcaccccctaacgccctagagactaagcggactcaccctgtaccaaggactcaaaagcctttggggatgctggtatcagggcaggcagggcggaggggaggagggccgaggagaggcccactctgcagaaatacaatccgagctacaaagcatgggaaaaagagactcttttaggatcagatctgtgagcacgttggcgaggaaaaacaaaacaaacaaaaaaaagaaccttgtgtctgtctggtgaaaaaaagaaaaacaaattggaagagaggaccatgagaattttaataaaacagaaggaaactaatggaccttccaggatttattgtggacggatgtggatatattctgtacaggaacaacacatatggaagtggactgaagcctatgtagaaacacacacacactgaacattgttattcattttgtaaaatactagtctttattttgcatttttcgtaaaatttaaacatcgtatgcgcataaacaaaaatgaacaagaattaggcggaaataacattttccaaataattataaaatataaataacattttccaaataattataaaatatttgtcctgtgtctatgtatctatatctgttttgtatttttttctggttccaaaccagatttcctgtgattctatactaataatttttgatataaccctttgcttcttataatgagtgcgatatatgttgtcgaggctgttcttcaagaattaaaattgaagtgaaaatttaaacaaaa

SEQ ID NO: 8086 - protein, 419 aa, Rattus norvegicus
  ref <308>: DATABASE ACCESSION NUMBER: SWISS-Prot / AAA83437
  ref <309>: DATABASE ENTRY DATE: 2002-10-01
MAMVVSSWRDPQDDVAGGNPGGPNPAAQAARGGGGGEQQQAGSGAPHTPQTPGQPGAPATPGTAGDKGQGPPGSGQSQQHIECVVCGDKSSGKHYGQFTCEGCKSFFKRSVRRNLTYTCRANRNCPIDQHHRNQCQYCRLKKCLKVGMRREAVQRGRMPPTQPNPGQYALTNGDPLNGHCYLSGYISLLLRAEPYPTSRYGSQCMQPNNIMGIENICELAARLLFSAVEWARNIPFFPDLQITDQVSLLRLTWSELFVLNAAQCSMPLHVAVLAAAGLHASPMSADRVVAFMDHIRIFQEQVEKLKALHVDSAEYSCLKAIVLFTSDACGLSDAAHIESLQEKSQCALEEYVRSQYPNQPSRFGKLLLRLPSLRTVSSSVIEQLFFVRLVGKTPIETLIRDMLLSGSSFNWPYMSIQCS

SEQ ID NO: 8087 - DNA, 784 bp, Homo sapiens
  ref <308>: DATABASE ACCESSION NUMBER: EMBL / BG701915
  ref <309>: DATABASE ENTRY DATE: 2001-05-08
agcggagtggcgccgggggaggaaggcagccgggagaaggaaagctgggacgggccgggaccacaggagccccagccccacacagcaaccacccgggcgagaaagaaagaaagagccagggaggcgggcgaagcgcggggagagaagcagagaagaaatattcaccttcccgcctcatgcccactttgatgcacttcttgaggcggcagtattggcactggttgcggtggtgctggtcgatgggacagttcctgttggcacggcatgtgtaagttaagttcctgcggacgctcctcttgaagaaacttttgcagccctcgcagcaggtagatgaaactcaagagaaaaggtgtggataaatgaaactagcccatgatgaacctgttttctccgtgaccacaatattaaccaggatgaatggcggtggcagtgggcctgcatcacaggttgcagcagatgttctcaatatttctattaaaatttccttatttccatatgcaagaggagccccagagctgcatccttatggtagctaccatgccgtgatgtaagctgccattcactggggagcttggcaatagaattggctagatcaggaagcctatgtcaactatggaacaacaacttgcagctcatctctattgatgttatttcttccactgacatcttgaacccctcagtcatccatgaggcttggaatcaacttcttccaaaactcctgctcatgtgatattttgatctccttttatgaaacatggatgtttaatagctcttacatgggaaa

SEQ ID NO: 8088 - protein, 423 aa, Homo sapiens
  ref <308>: DATABASE ACCESSION NUMBER: Refseq / NP_005645
  ref <309>: DATABASE ENTRY DATE: 2002-04-10
MAMVVSSWRDPQDDVAGGNPGGPNPAAQAARGGGGGAGEQQQQAGSGAPHTPQTPGQPGAPATPGTAGDKGQGPPGSGQSQQHIECVVCGDKSSGKHYGQFTCEGCKSFFKRSVRRNLTYTCRANRNCPIDQHHRNQCQYCRLKKCLKVGMRREAVQRGRMPPTQPNPGQYALTNGDPLNGHCYLSGYISLLLRAEPYPTSRYGSQCMQPNNIMGIENICELAARLLFSAVEWARNIPFFPDLQITDQVSLLRLTWSELFVLNAAQCSMPLHVAPLLAAAGLHASPMSADRVVAFMDHIRIFQEQVEKLKALHVDSAEYSCLKAIVLFTSDACGLSDAAHIESLQEKSQCALEEYVRSQYPNQPSRFGKLLLRLPSLRTVSSSVIEQLFFVRLVGKTPIETLIRDMLLSGSSFNWPYMSIQCS

SEQ ID NO: 8089 - DNA, 2514 bp, Rattus norvegicus; identical to SEQ ID NO: 8085
  ref <308>: DATABASE ACCESSION NUMBER: EMBL / U10995
  ref <309>: DATABASE ENTRY DATE: 1998-12-02

SEQ ID NO: 8090 - protein, 419 aa, Rattus norvegicus; identical to SEQ ID NO: 8086
  ref <308>: DATABASE ACCESSION NUMBER: SWISS-Prot / AAA83437
  ref <309>: DATABASE ENTRY DATE: 2002-10-01

SEQ ID NO: 8091 - DNA, 784 bp, Homo sapiens; identical to SEQ ID NO: 8087
  ref <308>: DATABASE ACCESSION NUMBER: EMBL / BG701915
  ref <309>: DATABASE ENTRY DATE: 2001-05-08

SEQ ID NO: 8092 - protein, 423 aa, Homo sapiens; identical to SEQ ID NO: 8088
  ref <308>: DATABASE ACCESSION NUMBER: Refseq / NP_005645
  ref <309>: DATABASE ENTRY DATE: 2002-04-10

SEQ ID NO: 8093 - DNA, 147 bp, Rattus norvegicus
  ref <308>: DATABASE ACCESSION NUMBER: EMBL / U11071
  ref <309>: DATABASE ENTRY DATE: 2002-08-27
ttttggatctgagttacattccctagaatccttgttaaaaactggggcaggggggggttggggatttagctcagtggtagagcgcttgcctaggaaggcaaggccctgggaacagtccccagctccgaaaaaaagaaggaaaaaaaa

SEQ ID NO: 8094 - DNA, 5259 bp, Rattus norvegicus
  ref <308>: DATABASE ACCESSION NUMBER: EMBL / U11419
  ref <309>: DATABASE ENTRY DATE: 2000-03-27
gctgaagactccttaaatatatatatatatatatatattcgggctactaacctcacatgcacatgggataatgactctggattctgcattgtgagctgctctccacaccctgagatcccctcttacattacattttttcctttgaatttgcatctcgtcaagacacaagattaaaaccaaatttacactacactggattttaaattttcttccgttcctttatcctccgtctttcttatgtggatatgcaagcgagaagaggaccctggatattcccaacatgctctctcccttaatctgtccgcctagaggtttggcgtctacaaaccaagagagccgactagctgaagatgaagcccagcgcagagtgctgttcccccaagttctggttggtgttggccgtcttggccgtatcaggcagcaaagctcgttcccaaaagagcccccccagcatcggcatcgctgtcatcctcgtgggcacttcagacgaagtggccataaaagacgcccacgagaaagatgacttccatcatctctcagtagttccccgggtggagctggtagccatgaacgaaactgacccaaagagcatcatcacccgtatctgcgatcttatgtctgaccggaagatccagggggtggtgttcgcggatgacaccgaccaagaagccatcgctcagatcctcgacttcatttctgctcagactctcacccccatcctgggcatccatgggggctcatctatgataatggcggataaggatgagtcctccatgttcttccagtttggcccgtctatcgaacagcaagcttccgtcatgctcaacatcatggaagaatatgactggtacatcttttccatcgtcaccacctacttccctggctaccaggactttgtgaacaagatccgcagtaccatcgagaacagcttcgtgggctgggagctcgaggaagtcctcctgctagacatgtctctggacgatggcgactctaagattcagaatcagctgaagaagctccaaagccccatcattctcctttattgcacgaaggaggaagccacctacatttttgaagtagctaactcagttgggctgactggctacggctacacgtggattgtgccgagtctggtggccggggatacggacacggtgccttcagagttccccacggggcttatctctgtgtcttatgatgaatgggactatggccttcctgccagagtgagagatggaattgccatcatcaccactgctgcctcggacatgctgtccgaacacagtttcatccctgagcccaagagcagttgctacaacacccacgagaagaggatctaccagtctaacatgttgaataggtatctgatcaatgtcacttttgaagggagaaacctgtccttcagcgaagatggctaccagatgcatccgaagctggtgataatccttctgaacaaggagaggaagtgggagagggtggggaaatggaaggacaagtccctgcagatgaagtattatgtgtggcctcggatgtgtcctgagactgaggagcaagaggatgaccatctgagcattgtcaccttggaggaggcgccatttgtcattgtggaaagcgtggaccctctcagtggaacctgcatgaggaatacagtcccgtgccagaagcgcatcatctctgagaataaaacagatgaggaaccaggctacatcaaaaaatgctgcaaggggttctgtattgacatccttaagaaaatttctaagtctgtgaagttcacctatgacctttacctggtgaccaatggcaagcacgggaagaagattaatgggacctggaatggcatgatcggtgaggtggtcatgaagagggcctacatggcagtgggatcactaactatcaatgaagaacggtcagaggtggttgacttctctgtacccttcatagaaactggcatcagtgtcatggtatctcgcagcaatgggactgtgtcaccttctgccttcttagagccattcagcgctgacgtgtgggtgatgatgtttgtgatgctgctcattgtttctgcggtggctgtctttgtctttgaatacttcagccctgtgggttacaacaggtgcctagccgatggcagagagccaggaggcccatctttcaccatcggcaaagcaatttggttactctggggtctggtgtttaacaactccgtacctgtgcagaacccaaaggggaccacctccaagatcatggtgtcagtgtgggccttctttgctgtcattttcctggccagctacactgccaacttagcagccttcatgatccaagaggagtatgtggaccaggtttctggcctgagtgacaagaagttccagagacctaatgacttctcaccccctttccgctttgggactgtgcccaatggcagcacagagaggaatatccgtaataactatgcagaaatgcatgcctacatgggaaagttcaaccaaaggggtgtagatgatgcattgctctccctgaaaacagggaagcttgatgcattcatctatgatgcagctgtgctcaactacatggctggaagggacgaaggctgcaaactggtgaccattggcagtggcaaggtctttgcttctaccggctatggcattgctatccaaaaggactccgggtggaagcgccaggtggacctggctatcctgcagctgtttggagatggggagatggaagaactggaagctctctggctcactggcatttgccacaatgagaagaatgaggtgatgagcagccagctggacatcgacaatatggcaggtgtcttctatatgttgggggcagccatggccctcagcctcatcaccttcatctgtgagcatctgttctattggcagttccggcattgcttcatgggtgtctgttctggcaagcctggcatggtcttctccatcagcagaggtatctacagctgtatccatggggtagccatagaggagcgccaatccgtgatgaactcccccactgccaccatgaacaacacccactccaacatcctacgcttgctccgcacggccaagaacatggccaacctgtctggagtaaacggctcccctcagagtgccctggacttcatccgccgagagtcctccgtctacgacatctctgagcatcgtcgcagcttcacgcattcagactgcaagtcttacaataacccaccctgtgaggaaaacctgttcagtgactacattagcgaggtagagagaacatttggtaacctgcagctgaaggacagcaatgtgtaccaagaccactatcaccatcaccaccggccacacagcatcggcagcaccagctccattgatgggctctatgactgtgacaacccacccttcaccacccagcccaggtcaatcagcaagaaacccctggacatcggcctgccctcctccaaacatagccagctcagcgacctgtatggcaagttctctttcaagagtgaccgctacagtggccacgacgacttgattcgatcggatgtctccgacatctccacgcacactgtcacctatgggaacatcgagggcaacgcagccaagaggaggaaacagcagtataaggacagtctaaagaagcggccagcctcggccaaatcgaggagggagtttgatgaaatcgagctggcctaccgtcgccgaccaccccgctccccggaccacaagcgctacttcagggacaaagaagggctccgagacttctacctggaccagttccgaacaaaggagaactcgcctcactgggagcacgtggacttgactgacatttacaaagaacgcagtgacgacttcaagcgagattcggtcagtggaggtgggccctgtaccaacaggtctcacctcaaacacggaacgggcgagaagcacggagtggtaggcggggtgcctgctccttgggagaagaacctgaccaatgtggattgggaggaccggtctgggggcaacttctgccgcagctgtccttccaagctgcacaattactcctcgacggtggcagggcagaactcgggccggcaggcctgcatcagatgtgaggcctgtaagaaggctggtaacctgtacgacatcagcaaggacaactccctgcaggaactggaccagccggctgcccccgtggctgtgacatccaacgcctccagcaccaagtaccctcaaagcccgactaattccaaggctcagaagaagaatcggaacaaactgcgccggcagcattcctacgacaccttcgtggacctgcagaaggaggaggccgccttggccccacgcagcgtgagcctgaaagacaagggccgattcatggatgggagcccctacgcccatatgtttgagatgccagctggtgagagctcctttgccaacaagtcctcagtgcccactgccggacaccaccacaacaaccccggcagcggctacatgctcagcaagtcgctctaccctgaccgggtcacgcaaaaccctttcatccccacttttggggatgaccagtgcttgcttcacggcagcaaatcctacttcttcaggcagcccacggtggcaggggcgtcaaaaacaaggccggacttccgggcccttgtcaccaataagccagtggtgtcagcccttcatggggctgtgccaggtcgtttccagaaggacatttgtatagggaaccagtccaacccctgtgtgcctaacaacaaaaaccccagggctttcaatggctccagcaatggacatgtttatgagaaactttctagtattgagtctgatgtctgagtgagggaagagagagaggttaaggtgggtacgggagggatagggctgtgggccgcgtggtgcgcatgtcatggaaagagtcgggggtgaacttggctcccattcgctttttcttcttcttttaatttctctatgggatcctggagttctggttccttactgaaggcaaccctcgtggccagcaccatttctcctccctcgcgcagttctctccttcccgcatctgtccaccattcctgtttccatgagagaatagaacggggcctcagtgtgggaggatggagaggagaccaaagcgctgcctgtgtgcttctttctagcgcagaagggctcttagcagttcactttgagcgaggctttcctgatgctgctctctttgttcaggtgaggaagcgaaggtgttctgaggaaggccattgaacctcctgttcataagagagaagaggctttcactgaattc

SEQ ID NO: 8095 - protein, 1482 aa, Rattus norvegicus
  ref <308>: DATABASE ACCESSION NUMBER: SWISS-Prot / Q00960
  ref <309>: DATABASE ENTRY DATE: 2002-06-15
MKPSAECCSPKFWLVLAVLAVSGSKARSQKSPPSIGIAVILVGTSDEVAIKDAHEKDDFHHLSVVPRVELVAMNETDPKSIITRICDLMSDRKIQGVVFADDTDQEAIAQILDFISAQTLTPILGIHGGSSMIMADKDESSMFFQFGPSIEQQASVMLNIMEEYDWYIFSIVTTYFPGYQDFVNKIRSTIENSFVGWELEEVLLLDMSLDDGDSKIQNQLKKLQSPIILLYCTKEEATYIFEVANSVGLTGYGYTWIVPSLVAGDTDTVPSEFPTGLISVSYDEWDYGLPARVRDGIAIITTAASDMLSEHSFIPEPKSSCYNTHEKRIYQSNMLNRYLINVTFEGRNLSFSEDGYQMHPKLVIILLNKERKWERVGKWKDKSLQMKYYVWPRMCPETEEQEDDHLSIVTLEEAPFVIVESVDPLSGTCMRNTVPCQKRIISENKTDEEPGYIKKCCKGFCIDILKKISKSVKFTYDLYLVTNGKHGKKINGTWNGMIGEVVMKRAYMAVGSLTINEERSEVVDFSVPFIETGISVMVSRSNGTVSPSAFLEPFSADVWVMMFVMLLIVSAVAVFVFEYFSPVGYNRCLADGREPGGPSFTIGKAIWLLWGLVFNNSVPVQNPKGTTSKIMVSVWAFFAVIFLASYTANLAAFMIQEEYVDQVSGLSDKKFQRPNDFSPPFRFGTVPNGSTERNIRNNYAEMHAYMGKFNQRGVDDALLSLKTGKLDAFIYDAAVLNYMAGRDEGCKLVTIGSGKVFASTGYGIAIQKDSGWKRQVDLAILQLFGDGEMEELEALWLTGICHNEKNEVMSSQLDIDNMAGVFYMLGAAMALSLITFICEHLFYWQFRHCFMGVCSGKPGMVFSISRGIYSCIHGVAIEERQSVMNSPTATMNNTHSNILRLLRTAKNMANLSGVNGSPQSALDFIRRESSVYDISEHRRSFTHSDCKSYNNPPCEENLFSDYISEVERTFGNLQLKDSNVYQDHYHHHHRPHSIGSTSSIDGLYDCDNPPFTTQPRSISKKPLDIGLPSSKHSQLSDLYGKFSFKSDRYSGHDDLIRSDVSDISTHTVTYGNIEGNAAKRRKQQYKDSLKKRPASAKSRREFDEIELAYRRRPPRSPDHKRYFRDKEGLRDFYLDQFRTKENSPHWEHVDLTDIYKERSDDFKRDSVSGGGPCTNRSHLKHGTGEKHGVVGGVPAPWEKNLTNVDWEDRSGGNFCRSCPSKLHNYSSTVAGQNSGRQACIRCEACKKAGNLYDISEDNSLQELDQPAAPVAVTSNASSTKYPQSPTNSKAQKKNRNKLRRQHSYDTFVDLQKEEAALAPRSVSLKDKGRFMDGSPYAHMFEMPAGESSFANKSSVPTAGHHHNNPGSGYMLSKSLYPDRVTQNPFIPTFGDDQCLLHGSKSYFFRQPTVAGASKTRPDFRALVTNKPVVVTLHGAVPGRFQKDICIGNQSNPCVPNNKNPRAFNGSSNGHVYEKLSSIESDV

SEQ ID NO: 8096 - DNA, 5969 bp, Homo sapiens
  ref <308>: DATABASE ACCESSION NUMBER: EMBL / U11287
  ref <309>: DATABASE ENTRY DATE: 2000-03-04
tttgaatttgcatctcttcaagacacaagattaaaacaaaatttacgctaaattggattttaaattatcttccgttcatttatccttcgtctttcttatgtggatatgcaagcgagaagaagggactggacattcccaacatgctcactcccttaatctgtccgtctagaggtttggcttctacaaaccaagggagtcgacgagttgaagatgaagcccagagcggagtgctgttctcccaagttctggttggtgttggccgtcctggccgtgtcaggcagcagagctcgttctcagaagagcccccccagcattggcattgctgtcatcctcgtgggcacttccgacgaggtggccatcaaggatgcccacgagaaagatgatttccaccatctctccgtggtaccccgggtggaactggtagccatgaatgagaccgacccaaagagcatcatcacccgcatctgtgatctcatgtctgaccggaagatccagggggtggtgtttgctgatgacacagaccaggaagccatcgcccagatcctcgatttcatttcagcacagactctcaccccgatcctgggcatccacgggggctcctctatgataatggcagataaggatgaatcctccatgttcttccagtttggcccatcaattgaacagcaagcttccgtaatgctcaacatcatggaagaatatgactggtacatcttttctatcgtcaccacctatttccctggctaccaggactttgtaaacaagatccgcagcaccattgagaatagctttgtgggctgggagctagaggaggtcctcctactggacatgtccctggacgatggagattctaagatccagaatcagctcaagaaacttcaaagccccatcattcttctttactgtaccaaggaagaagccacctacatctttgaagtggccaactcagtagggctgactggctatggctacacgtggatcgtgcccagtctggtggcaggggatacagacacagtgcctgcggagttccccactgggctcatctctgtatcatatgatgaatgggactatggcctccccgccagagtgagagatggaattgccataatcaccactgctgcttctgacatgctgtctgagcacagcttcatccctgagcccaaaagcagttgttacaacacccacgagaagagaatctaccagtccaatatgctaaataggtatctgatcaatgtcacttttgaggggaggaatttgtccttcagtgaagatggctaccagatgcacccgaaactggtgataattcttctgaacaaggagaggaagtgggaaagggtggggaagtggaaagacaagtccctgcagatgaagtactatgtgtggccccgaatgtgtccagagactgaagagcaggaggatgaccatctgagcattgtgaccctggaggaggcaccatttgtcattgtggaaagtgtggaccctctgagtggaacctgcatgaggaacacagtcccctgccaaaaacgcatagtcactgagaataaaacagacgaggagccgggttacatcaaaaaatgctgcaaggggttctgtattgacatccttaagaaaatttctaaatctgtgaagttcacctatgacctttacctggttaccaatggcaagcatgggaagaaaatcaatggaacctggaatggtatgattggagaggtggtcatgaagagggcctacatggcagtgggctcactcaccatcaatgaggaacgatcggaggtggtcgacttctctgtgcccttcatagagacaggcatcagtgtcatggtgtcacgcagcaatgggactgtctcaccttctgccttcttagagccattcagcgctgacgtatgggtgatgatgtttgtgatgctgctcatcgtctcagccgtggctgtctttgtctttgagtacttcagccctgtgggttataacaggtgcctcgctgatggcagagagcctggtggaccctctttcaccatcggcaaagctatttggttgctctggggtctggtgtttaacaactccgtacctgtgcagaacccaaaggggaccacctccaagatcatggtgtcagtgtgggccttctttgctgtcatcttcctggccagctacactgccaacttagctgccttcatgatccaagaggaatatgtggaccaggtttctggcctgagcgacaaaaagttccagagacctaatgacttctcaccccctttccgctttgggaccgtgcccaacggcagcacagagagaaatattcgcaataactatgcagaaatgcatgcctacatgggaaagttcaaccagaggggtgtagatgatgcattgctctccctgaaaacagggaaactggatgccttcatctatgatgcagcagtgctgaactatatggcaggcagagatgaaggctgcaagctggtgaccattggcagtgggaaggtctttgcttccactggctatggcattgccatccaaaaagattctgggtggaagcgccaggtggaccttgctatcctgcagctctttggagatggggagatggaagaactggaagctctctggctcactggcatttgtcacaatgagaagaatgaggtcatgagcagccagctggacattgacaacatggcaggggtcttctacatgttgggggcggccatggctctcagcctcatcaccttcatctgcgaacaccttttctattggcagttccgacattgctttatgggtgtctgttctggcaagcctggcatggtcttctccatcagcagaggtatctacagctgcatccatggggtggcgatcgaggagcgccagtctgtaatgaactcccccaccgcaaccatgaacaacacacactccaacatcctgcgcctgctgcgcacggccaagaacatggctaacctgtctggtgtgaatggctcaccgcagaggcccctggacttcatccgacgggagtcatccgtctatgacatctcagagcaccgccgcagcttcacgcattctgactgcaaatcctacaacaacccgccctgtgaggagaacctcttcagtgactacatcagtgaggtagagagaacgttcgggaacctgcagctgaaggacagcaacgtgtaccaagatcactaccaccatcaccaccggccccatagtattggcagtgccagctccatcgatgggctctacgactgtgacaacccacccttcaccacccagtccaggtccatcagcaagaagcccctggacatcggcctcccctcctccaagcacagccagctcagtgacctgtacggcaaattctccttcaagagcgaccgctacagtggccacgacgacttgatccgctccgatgtctctgacatctcaacccacaccgtcacctatgggaacatcgagggcaatgccgccaagaggcgtaagcagcaatataaggacagcctgaagaagcggcctgcctcggccaagtcccgcagggagtttgacgagatcgagctggcctaccgtcgccgaccgccccgctcccctgaccacaagcgctacttcagggacaaggaagggctacgggacttctacctggaccagttccgaacaaaggagaactcaccccactgggagcacgtagacctgaccgacatctacaaggagcggagtgatgactttaagcgcgactccgtcagcggaggagggccctgtaccaacaggtctcacatcaagcacgggacgggcgacaaacacggcgtggtcagcggggtacctgcaccttgggagaagaacctgaccaacgtggagtgggaggaccggtccgggggcaacttctgccgcagctgtccctccaagctgcacaactactccacgacggtgacgggtcagaactcgggcaggcaggcgtgcatccggtgtgaggcttgcaagaaagcaggcaacctgtatgacatcagtgaggacaactccctgcaggaactggaccagccggctgccccagtggcggtgacgtcaaacgcctccaccactaagtaccctcagagcccgactaattccaaggcccagaagaagaaccggaacaaactgcgccggcagcactcctacgacaccttcgtggacctgcagaaggaagaagccgccctggccccgcgcagcgtaagcctgaaagacaagggccgattcatggatgggagcccctacgcccacatgtttgagatgtcagctggcgagagcacctttgccaacaacaagtcctcagtgcccactgccggacatcaccaccacaacaaccccggcggcgggtacatgctcagcaagtcgctctaccctgaccgggtcacgcaaaaccctttcatccccacttttggggacgaccagtgcttgctccatggcagcaaatcctacttcttcaggcagcccacggtggcgggggcgtcgaaagccaggccggacttccgggcccttgtcaccaacaagccggtggtctcggcccttcatggggccgtgccagcccgtttccagaaggacatctgtatagggaaccagtccaacccctgtgtgcctaacaacaaaaaccccagggctttcaatggctccagcaatgggcatgtttatgagaaactttctagtattgagtctgatgtctgagtgagggaacagagaggttaaggtgggtacgggagggtaaggctgtgggtcgcgtgatgcgcatgtcacggagggtgacgggggtgaacttggttcccatttgctcctttcttgttttaatttatttatggggatcctggagttctggttcctactgggggcaaccctggtgaccagcaccatctctcctccttttcacagttctctccttcttccccccgctgtcagccattcctgttcccatgagatgatgccatgggtctcagcaggggagggtagagcggagaaaggaagggcagcatgcgggcttcctcctggtgtggaagagctccttgatatcctctttgagtgaagctgggagaaccaaaaagaggctatgtgagcacaaaggtagcttttcccaaactgatcttttcatttaggtgaggaagcaaaagcatctatgtgagaccatttagcacactgcttgtgaaaggaaagaggctctggctaaattcatgctgcttagatgacatctgtctaggaatcatgtgccaagcagaggttgggaggccatttgtgtttatatataagccaaaaaatgcttgcttcaaccccatgagactcgatagtggtggtgaacagaacaaaaggtcattggtggcagagtggattcttgaacaaactggaaagtacgttatgatagtgtcccacggtgccttggggacaagagcaggtggattgtgcgtgcatgtgtgttcatgcacacttgcacccatgtgtagtcaggtgcctcaagagaaggcaaccttgactctttctattgtttctttcaatatccccaagcagtgtgattgtttggcttatatacagacagagatggccatgtattacctgaattttggctgtgtctcccttcatccttctggaataaggagaatgaaaattcttgataaagaagattctgtggtctaaacaaaaaaaggcggtgagcaatcctgcaagagcaaggtacataaacaagtcctcagtggttggcaactgtttcaacctgtttgaaccaagaaccttccaggaaggctaaagggaaaccgaatttcacagccatgattcttttgcccacacttgggagcaaaagattctacaaagctcttttgagcatttagactctcgactggccaaggtttggggaagaacgaagccacctttgaagaagtaaggagtcgtgtatggtagggtaagtgagagagggggatgtttccaatgctttgatcccttcttacttaacctgaagctagacgagcaggcttcttccccccaaaact

SEQ ID NO: 8097 - protein, 1484 aa, Homo sapiens [sequence omitted]

SEQ ID NO: 8098 - DNA, 8554 bp, Rattus norvegicus
  ref <308>: DATABASE ACCESSION NUMBER: EMBL / U11681
  ref <309>: DATABASE ENTRY DATE: 2000-03-04
ggcacgagcggcacgaggcggtagctgaggcggtggccgaagccgcgcgaacctcagggcaagatgcttgggacaggccctgccacggccaccgccggtgccgccacatctagcaacgtgagcgttctgcagcagttcgccagtgggctgaagagccggaatgaggagaccagggccaaagcagccaaggagctccagcactatgtcaccatggaacttcgagagatgagtcaggaggagtctactcgcttctatgaccagctgaaccatcacatttttgaactggtttccagctcagacgccaatgagaggaagggtggcatcttggccattgccagcctcattggagtggaaggtgggaattccaccaggattggcagatttgccaactaccttcggaacctcctcccctcaagtgatccagttgtcatggagatggcatccaaggccattggccgccttgcaatggcaggggacactttcactgctgagtatgtggagtttgaagtgaagcgagccttggagtggctgggtgctgaccgaaatgagggccggagacatgcagctgtcctcgttctccgtgagctggccatcagcgtccccaccttcttcttccagcaagttcagcccttctttgacaacatttttgtggctgtgtgggaccccaagcaggccatccgtgaaggagctgtggctgcccttcgtgcctgtctgattcttaccacgcagcgggagccgaaggagatgcagaagcctcagtggtacaggcacacatttgaagaagcagagaaaggttttgatgagaccctggccaaagagaagggtatgaaccgagatgatcgaatccacggggccttgctgatcctcaacgagctcgtccgaatcagcagcatggagggagagcgtctgagagaggagatggaggaaatcacccagcagcagctggtacatgacaagtactgcaaagacctaatgggctttgggacaaagcctcggcacatcactcccttcaccagcttccaggctgtgcagccccagcagtcaaacgccttggtgggactgctggggtacagctcccaccaaggcctaatggggtttggggcttcccccagccctacaaagtccactctggtggaaagccgttgttgcagagacttgatggaagagaaatttgatcaggtgtgccagtgggtgctgaaatgtaggagcagcaagaactcactgatccaaatgacaatccttaatctgttgccccgcttggctgcattccgaccgtctgccttcacagatacccagtacctgcaagacaccatgaaccatgtcctgagctgtgtcaagaaggaaaaggaacggaccgcagcgttccaggccctagggctgctttctgtggcggtgaggtccgagtttaaggtctacctgccccgagtacttgacatcatccgagcagccctgcctccaaaggactttgcccacaagaggcagaaaactgtgcaggtggatgccacagtgttcacgtgcatcagcatgctggcgcgggccatggggccaggcatccagcaggacatcaaggagctgctggagcccatgttggcagtgggcctgagccctgcgctcactgctgtgctctatgacctgagccggcagattccgcagctgaagaaagatattcaggacgggcttctgaagatgctgtccctggtccttatgcacaaacccctgcggcacccgggcatgcccaaaggcctggcccaccagctggcctccccaggtcttaccaccctccctgaggccagcgacgtggccagcatcactcttgcccttcgaactctcggcagctttgaatttgaaggccactctctgacccagttcgtccgacactgcgcagatcatttcctgaacagtgagcacaaggagatccgcatggaagcagcccgcacctgctcccgcctgctcacaccctccatccacctcatcagcggccatgcccatgtggttagccagaccgcagtgcaagtggtagcagatgtgctcagcaagctgcttgtggtcggcataacagatcctgatcctgatatccgctactgtgtcttggcctccctggatgagcgcttcgatgcccacttggcccaggcagaaaacttacaagctctgtttgtggctctgaatgaccaggtctttgagatccgagagctggccatctgcactgtgggccgactcagtagcatgaacccagcctttgtcatgcctttcctgcgcaagatgctcatccagattttgacagagctggagcacagtggcattgggagaatcaaggagcagagtgcccgcatgctggggcacctggtctccaatgccccccgcctcatccgcccctatatggagcctattctgaaggctttaattttgaaactcaaagatccagaccctgacccaaacccgggcgtgatcaataacgtgttggccactataggagaactggctcaggttagcggcctggagatgaggaagtgggtggacgagctctttgtcatcatcatggacatgctgcaggactcctctcttctggccaaaagacaggtggctttgtggaccctgggacagttggtggccagtactggctacgtggtggagccctacaggaagtaccccactctgcttgaagtgctgctgaattttctgaagacggagcagaaccagggcactcggagagaggccatccgagtgttagggctcctcggggctttggacccctacaagcacaaagtgaacatcggcatgattgaccagtcccgagatgcttctgctgtcagcctgtcagaatccaagtcaagtcaagattcctctgactacagcaccagtgaaatgctggtcaacatgggaaacctgccactggacgagttctaccccgccgtgtccatggtggccttgatgcggatcttccgagaccagtccctctctcaccaccacaccatggtggttcaggccatcaccttcatcttcaagtccctggggctcaagtgtgtgcagttcctgccccaggtcatgcccacgttccttaacgtcatccgagtctgtgatggggccatccgggaatttctgttccagcagctgggaatgctggtgtcctttgtgaagagccacatccgtccctacatggatgaaatagtcaccctcatgagagaattttgggtcatgaacacctcaatccagagcacaatcattcttctcattgagcaaatcgtggtggctcttggaggtgaatttaagctctacctgccccagctgatcccacacatgctgcgtgtcttcatgcatgacaacagccagggccgcatagtctccatcaagctgttagcagcgatccagctgtttggcgccaacctggatgactatctgcacttgttgttgcctccgatcgtgaaattgtttgatgcccctgaagttccactgccgtcgagaaaggcagcgttggagacagtggaccgcctgacagagtccctggatttcactgactatgcctcccgcatcattcacccgattgttcgcacgctagaccagagcccagagctgcgctccacagccatggacaccctgtcttcacttgtgtttcaactagggaagaagtaccagatcttcattccaatggtgaataaagtccttgtgcgacaccggatcaatcaccagcgctacgacgtgctgatctgcagaatcgtcaaggggtacacgcttgctgatgaagaagaagaccctttgatttaccagcatcgaatgctaaggagcagccagggagatgccctggccagtggaccagttgaaacaggacccatgaagaaactgcatgtcagcaccatcaacctccaaaaggcctggggagctgccagaagggtctccaaggacgactggctggagtggctgcgacgcttgagtctggagctgctgaaggattcctcatcaccttccctgcgctcatgctgggccctggcccaggcctacaaccccatggccagggatctcttcaacgctgcgtttgtgtcctgctggtctgaactgaatgaagaccaacaagatgagctcatcaggagcattgagttggctctcacttctcaagacattgctgaagtcacacaaaccctcttgaacttggctgagttcatggagcacagtgacaagggccccctaccactgagagatgacaatggcatcgtgctgttgggtgagagagctgccaagtgccgggcatatgccaaagcactacactacaaagagctggagttccagaaggggcccacgcctgccatacttgagtccctcatcagcattaataataaactgcagcagcctgaggcagcgtccggggtgttagagtacgccatgaaacacttcggagagctggagatccaggccacctggtatgagaagttgcatgagtgggaggacgcccttgtggcctacgacaagaagatggacacgaacaaggatgacccagagctgatgctgggccgcatgcgctgtctcgaggccttgggagaatggggccagcttcatcagcagtgctgtgaaaagtggactctggttaatgacgagacccaggctaagatggcccggatggctgctgcagcagcatggggtttaggtcagtgggacagcatggaggagtacacctgtatgattcctcgggatactcacgatggagcattctacagagcagtgttggcactgcatcaggatctcttctccttggctcaacagtgcattgacaaggccagggacctgctggacgccgagctgactgccatggcaggggagagctacagccgagcctatggggccatggtttcttgccacatgctgtccgagctggaggaggttatccagtacaaactcgtcccggagcgacgggagatcatccgccagatctggtgggagagactgcagggctgccagcgtattgtagaggactggcagaaaatcctcatggtccggtcccttgtggtcagccctcacgaggacatgagaacctggctcaagtacgcaagcctgtgtggcaagagcggcagactggctcttgctcataaaaccttagtgttgctcttgggagttgatccatctcggcaacttgaccatcctctgccaacagttcaccctcaagtgacctatgcctacatgaaaaacatgtggaaaagcgctcggaagattgatgccttccagcacatgcagcactttgtgcagaccatgcagcagcaggcccagcacgccattgccacagaggaccagcagcacaagcaggagctgcataagctcatggccaggtgttttctgaaacttggggagtggcagctgaacctccagggcatcaacgagagcaccatccccaaggtgctacagtactacagtgctgccacagagcatgaccgcagctggtataaggcttggcacgcatgggcagtgatgaactttgaagccgtgctacactacaaacatcagaaccaagcccgcgatgagaagaagaaactgcgccatgccagcggggccaacatcaccaatgccaccaccactgccaccaccgctgcctccgctgccgctgccaccagcacagagggcagcaacagtgaaagtgaagccgagagcaatgagagcagccccaccccgtcccctctgcagaagaaggtcactgaggatttgtccaaaaccctcttgttgtacactgtccctgctgtccaaggcttcttccgttctatctccttgtcgagaggcaacaacctccaggatacactcagagtcctcaccttgtggtttgattatggtcactggccagatgtcaatgaagccctggtggaaggggtgaaggccatacagattgacacttggttacaggttatacctcagctcattgcaagaattgacacgcccagacccttggtgggccggctcattcaccagctcctcacagatattggtcggtaccacccacaggccctcatctaccccctgacggtggcttctaagtctaccaccacagcccgtcacaatgcagccaacaagatcctgaagaacatgtgcgagcacagcaacacgctagtccagcaggccatgatggtgagtgaagagctgattcgagtagccatcctctggcatgagatgtggcatgaaggcctagaagaggcctctcgcttgtactttggggagaggaacgtcaaaggcatgtttgaggtgctggagcccctgcatgctatgatggaacgcggtccccagaccctgaaggaaacgtcctttaatcaggcatatggtcgagatttaatggaggcacaagaatggtgccgaaagtacatgaaatcagggaacgtcaaggacctcacccaagcctgggacctctactatcacgtgttcagacggatctccaagcagctaccacagctcacatccctggagctgcagtatgtgtcccccaaacttttgatgtgcagagaccttgaattggctgtgccaggaacatatgaccccaaccagccaatcattcgcattcagtccatagccccgtctttgcaagtcatcacatccaagcagaggcctcggaagctgaccctgatgggcagcaatgggcacgagtttgttttcctcctgaaaggccatgaagatctgcggcaggacgagcgagtgatgcagctctttggcctggtgaacacactcctagccaatgacccaacttctcttcgaaagaacctcagcatccagagatacgccgtcattcctctgtccaccaactcgggcctgattggctgggtgccccactgtgacacgctgcatgccctcatccgggactacagagagaagaagaagatcctgctgaacatcgagcaccgcatcatgctgcggatggctcctgactatgaccacctgactctgatgcagaaggtggaggtgtttgagcatgctgtcaacaacacagccggggatgacctggccaagctgctgtggctgaaaagccccagctcagaggtgtggtttgaccgaagaaccaattatactcgctccctggctgtcatgtccatggttggatacattttaggccttggagacaggcacccatccaacctgatgctggaccggctgagtggaaagatcctgcacattgactttggggactgctttgaggttgctatgaccagagagaaatttccagaaaagattccatttagactaacaagaatgttgaccaatgctatggaggttaccggtctcgatggcaactatagaaccacatgccacacagtgatggaggtgcttcgggagcacaaggacagtgtcatggctgtgctagaagcctttgtctatgaccctctgctgaattggaggctgatggacacaaatgccaaaggcaacaagcggtcccgaaccaggacagactcctattctgcaggccagtcagtagaaattttggacggtgtagaacttggagaaccagcccataagaaaacagggaccactgtgccagaatccatccattctttcattggagatggtttggtgaaaccagaagccttaaacaagaaagctattcagattattaacagggttcgagataagctcactggtcgggatttctctcatgatgacactttggatgttccaacccaagtggaactgcttatcaagcaagcgacatctcatgagaacctctgccagtgctacattggctggtgtcctttctggtaaccaaggcctggcaaagaaaatcatctcctccgatgcttttgtaccttggtctgtgcttccagtggactgaaaccatggtcataaagttggactttgttaatattttgaaatgtatatgaaaagaactactgtatattcaaagttggcttatgccaacctcctagctgctgttgaaaagacactgtcagaaacacaaggcttgattcagttcccaggacagtgaaacacagtaatcctacagaaaccaagcctttgattttgggagaacagaagatgagtaactgactaagaaatacgggtttggacttaacttacagaagaactcatcatacgcatttgctgaccgaataatctagttgatcctctcaaccaggggcttcaacagcaaggacacagatgtcagcactccaccatcctgttacctcacccgtccctggatgcagtggcaacatctgcaggatgggccaccgtgtgtgtaagaagatctgtcttccacctgatcccatgatgctgaacctcacagagccggccttccaggaaggacgtttgctcagacgcctggccaccgaggatgagcaggtgtgccaggatctcagtgcagggtccacgctggccctgctgctgtgttcagtgagggatggatatgttgtgtttgcagcagggactcagaacacaaatgcttttgtggaagtgctgatctcagagggacactagcgcaggttgtgaattaagagcaaagtaaatatccaactaaacacaaagtataagtgaagccacatctagacaccattgtatctgagtaatttttgtgccaataaatgacatcagaattttaaaagta

SEQ ID NO: 8099 - protein, 2549 aa, Rattus norvegicus
  ref <308>: DATABASE ACCESSION NUMBER: SWISS-Prot / P42346
  ref <309>: DATABASE ENTRY DATE: 2001-10-16
MLGTGPATATAGAATSSNVSVLQQFASGLKSRNEETRAKAAKELQHYVTMELREMSQEESTRFYDQLNHHIFELVSSSDANERKGGILAIASLIGVEGGNSTRIGRFANYLRNLLPSSDPVVMEMASKAIGRLAMAGDTFTAEYVEFEVKRALEWLGADRNEGRRHAAVLVLRELAISVPTFFFQQVQPFFDNIFVAVWDPKQAIREGAVAALRACLILTTQREPKEMQKPQWYRHTFEEAEKGFDETLAKEKGMNRDDRIHGALLILNELVRISSMEGERLREEMEEITQQQLVHDKYCKDLMGFGTKPRHITPFTSFQAVQPQQSNALVGLLGYSSHQGLMGFGASPSPTKSTLVESRCCRDLMEEKFDQVCQWVLKCRSSKNSLIQMTILNLLPRLAAFRPSAFTDTQYLQDTMNHVLSCVKKEKERTAAFQALGLLSVAVRSEFKVYLPRVLDIIRAALPPKDFAHKRQKTVQVDATVFTCISMLARAMGPGIQQDIKELLEPMLAVGLSPALTAVLYDLSRQIPQLKKDIQDGLLKMLSLVLMHKPLRHPGMPKGLAHQLASPGLTTLPEASDVASITLALRTLGSFEFEGHSLTQFVRHCADHFLNSEHKEIRMEAARTCSRLLTPSIHLISGHAHVVSQTAVQVVADVLSKLLVVGITDPDPDIRYCVLASLDERFDAHLAQAENLQALFVALNDQVFEIRELAICTVGRLSSMNPAFVMPFLRKMLIQILTELEHSGIGRIKEQSARMLGHLVSNAPRLIRPYMEPILKALILKLKDPDPDPNPGVINNVLATIGELAQVSGLEMRKWVDELFVIIMDMLQDSSLLAKRQVALWTLGQLVASTGYVVEPYRKYPTLLEVLLNFLKTEQNQGTRREAIRVLGLLGALDPYKHKVNIGMIDQSRDASAVSLSESKSSQDSSDYSTSEMLVNMGNLPLDEFYPAVSMVALMRIFRDQSLSHHHTMVVQAITFIFKSLGLKCVQFLPQVMPTFLNVIRVCDGAIREFLFQQLGMLVSFVKSHIRPYMDEIVTLMREFWVMNTSIQSTIILLIEQIVVALGGEFKLYLPQLIPHMLRVFMHDNSQGRIVSIKLLAAIQLFGANLDDYLHLLLPPIVKLFDAPEVPLPSRKAALETVDRLTESLDFTDYASRIIHPIVRTLDQSPELRSTAMDTLSSLVFQLGKKYQIFIPMVNKVLVRHRINHQRYDVLICRIVKGYTLADEEEDPLIYQHRMLRSSQGDALASGPVETGPMKKLHVSTINLQKAWGAARRVSKDDWLEWLRRLSLELLKDSSSPSLRSCWALAQAYNPMARDLFNAAFVSCWSELNEDQQDELIRSIELALTSQDIAEVTQTLLNLAEFMEHSDKGPLPLRDDNGIVLLGERAAKCRAYAKALHYKELEFQKGPTPAILESLISINNKLQQPEAASGVLEYAMKHFGELEIQATWYEKLHEWEDALVAYDKKMDTNKDDPELMLGRMRCLEALGEWGQLHQQCCEKWTLVNDETQAKMARMAAAAAWGLGQWDSMEEYTCMIPRDTHDGAFYRAVLALHQDLFSLAQQCIDKARDLLDAELTAMAGESYSRAYGAMVSCHMLSELEEVIQYKLVPERREIIRQIWWERLQGCQRIVEDWQKILMVRSLVVSPHEDMRTWLKYASLCGKSGRLALAHKTLVLLLGVDPSRQLDHPLPTVHPQVTYAYMKNMWKSARKIDAFQHMQHFVQTMQQQAQHAIATEDQQHKQELHKLMARCFLKLGEWQLNLQGINESTIPKVLQYYSAATEHDRSWYKAWHAWAVMNFEAVLHYKHQNQARDEKKKLRHASGANITNATTTATTAASAAAATSTEGSNSESEAESNESSPTPSPLQKKVTEDLSKTLLLYTVPAVQGFFRSISLSRGNNLQDTLRVLTLWFDYGHWPDVNEALVEGVKAIQIDTWLQVIPQLIARIDTPRPLVGRLIHQLLTDIGRYHPQALIYPLTVASKSTTTARHNAANKILKNMCEHSNTLVQQAMMVSEELIRVAILWHEMWHEGLEEASRLYFGERNVKGMFEVLEPLHAMMERGPQTLKETSFNQAYGRDLMEAQEWCRKYMKSGNVKDLTQAWDLYYHVFRRISKQLPQLTSLELQYVSPKLLMCRDLELAVPGTYDPNQPIIRIQSIAPSLQVITSKQRPRKLTLMGSNGHEFVFLLKGHEDLRQDERVMQLFGLVNTLLANDPTSLRKNLSIQRYAVIPLSTNSGLIGWVPHCDTLHALIRDYREKKKILLNIEHRIMLRMAPDYDHLTLMQKVEVFEHAVNNTAGDDLAKLLWLKSPSSEVWFDRRTNYTRSLAVMSMVGYILGLGDRHPSNLMLDRLSGKILHIDFGDCFEVAMTREKFPEKIPFRLTRMLTNAMEVTGLDGNYRTTCHTVMEVLREHKDSVMAVLEAFVYDPLLNWRLMDTNAKGNKRSRTRTDSYSAGQSVEILDGVELGEPAHKKTGTTVPESIHSFIGDGLVKPEALNKKAIQIINRVRDKLTGRDFSHDDTLDVPTQVELLIKQATSHENLCQCYIGWCPFW

SEQ ID NO: 8100 - DNA, 6210 bp, Homo sapiens
  ref <308>: DATABASE ACCESSION NUMBER: EMBL / AK024393
  ref <309>: DATABASE ENTRY DATE: 2002-08-06
ctaaggaagttgggctcggtcccagtgtcaagtgtccatattttctttattttcttttagaaactaaagggaagggaatgaaccatttcagagcatcaaccgaaacaagttaaaagaattgatctttgcttagaagaataactagttgtttcaagtctcatatgctacatactgtgtctttttgaataccaggttatacctcagctcattgcaagaattgatacgcccagacccttggtgggacgtctcattcaccagcttctcacagacattggtcggtaccacccccaggtatgtggagactctgggcagtttctcatctaaccactggtttggtggtcagcctttccaaaagctgccctggcgacacaagcgcaggaactgggagccatgtgttccatcctggcccaggagggtctgtccagccagccgtcccagagggcccgggagccttgctaaaaagaaagcgttccctcgaagactgagccccttcctggtagtctcaagcagatgttaatgtcacactcaccacttgttttgttattctccttaaaattcataccagctcttccccaacccacatttcctttatagatgtttcttctgtttttccctcaggccctcatctacccactgacagtggcttctaagtctaccacgacagcccggcacaatgcagccaacaagattctgaagaacatgtgtgagcacagcaacaccctggtccagcaggccatgatggtgggtcggagccactgtggggcttcatagaccctggtcccttagctggtgggcgcaagtgggattgtttttcttcctcgcattggtgctgtgcacttcctctgactgctggaaatagtacctcctgtgtctccaaaacagacctttctgaggttagctgattcttggtgcttctctccttcttctcttggcttcaggtgagcgaggagctgatccgagtggccatcctctggcatgagatgtggcatgaaggcctggaagaggcatctcgtttgtactttggggaaaggaacgtgaaaggcatgtttgaggtgctggagcccttgcatgctatgatggaacggggcccccagactctgaaggaaacatcctttaatcaggtatggggtaaaaaaacacgaaaggacataaccctgtagaaatattctgccactaaaaaaaaatgaaatgagaaaagtttttatagaatgaaaggacgtgacccaaggcctttgtcagatttcttttcctctggcctttccactgactttaataaaacgagctctgatggaggtcacagagcataaaacatcagaaattagttacagggacccttctgaattttaactggaaaagcccaagatttctcaagaggtcatctcgtctctcctctcacccttccttccctataagccatgctgctggtttggaagctccagggttggaggcctgcacctatgctcttgctttctccagccccctgccagtgttttcaggccacagcgggctcctgaggaatatctgcagtcagcctggggattttgcctcctgggttggttgagactttgataacttgaaaacgtgcctgctttctctctcaggcctatggtcgagatttaatggaggcccaagagtggtgcaggaagtacatgaaatcagggaatgtcaaggacctcacccaagcctgggacctctattatcatgtgttccgacgaatctcaaagcagctgcctcaggtaggatcttcaggctcctggcagggttaactgtcattatagtcctttctgttttactgtctatgaatgttctaacactcattccaaagcatctggttttacttctgctttgggacaagtaattgttattagcaatccactgaaaaatacttaaattgcgtttaaattcttccctggaggcagaacactaaatcctttggtaattatttacagctcacatccttagagctgcaatatgtttccccaaaacttctgatgtgccgggaccttgaattggctgtgccaggaacatatgaccccaaccagccaatcattcgcattcagtccatagcaccgtctttgcaagtcatcacatccaagcagaggccccggaaattgacacttatgggtaaggaccattgtgcacttctgtcacccacttctccctcctacactggctgagaccccttccctcttctgaaattactgcttgccattcccactactcacctatcatagctacatctctcccatgctcattgagaggaaaatagagggcaagcaaatttctcattatgtcctcaggacttagttcattcatgtagttgggcttatgtgaagcatgatcacacataaagggaatgacaaaggcatgcaaggcagagaagtaacagtggaaggcaggtgttggagactgatgaggccagggaggaggcagctgggtgcaagcagggaaggtgctagctcctctgaaatgggggcttctggctcttgaaatttttttctttttttttttaccatcatagtctctgtggtaaatgattgtgtaaaatgaacaagtggattctcacagtgagatttgttaagcaagtgggctctggaatttcccttggggtagagtgttacttatgggggatgttttagtgaggcctgagtgctgtggtggcactttgaggcctctcgctttttttttttttttttgagccagagttttgctcttgttgcccaggctggagtataatggcgcaatcttggctcactgcaacctccacctcccaggttcaagcaattctcctgtctcagcctcccgcgtagctgggattacaggcacgcaccaccacacctagctaatttttgtatttttaatagagttggggtttcaccatgttggccaggctggtctcgaactctgacctcaagtgatcagcctgtctcagccttccaaagtgctgggattacaggtgtgaaccactgcgcccagccacctcttgctctttttttttttttttccccaagacagagtctcactctgttgcccaggctggagtgaggtggtgtgttctcggctcactgcatccccacctcctgagttcaagcgattctcgtgcctcagcctccctaatagctgagattacaggcgcatgccacacaatcagctaatttttatatttttagtagagatgggatttcaccacgttggccaggctggtctcaaactcccgacctgaggtgatccgcccagcttggcctcccacaatgttaggattacaggtgtgagccaccgcgcccagcctcacctctcgctcttaataatgctcaatgtttcttaaatgcagtgattattcaccaacaccaattaatcatggtccacaggtgattatctctgcatgagctgttgtcttctgatacaaaatgtgggtcaggctggttcttggggtgtttaattaaagagagtttaaggaaggaattgtttccagaggtgtaagcaaagctaagagaatcaacaaggagcgctcatgaacaagcacaagtgagaaattgttactcagccctcacccacccccacactccagaactgaaagagcaaggagcccagctagaaccgtcaccatgccagagaggccatctagcagagtctacagtccagagagagtggtagcttctagaactggggccaggctggtgatgggggacacataccctgacctctccctctacccatcctctgacctcctgccagtacccttccaccattggccacgcccaagtgggatcccaggtgatgcggcttgtaggagtcaggcttctcagaacagaggaggacagagtgggtcggaaaacaggaatgatcatttccatgcctaaccgttcctggtcctcaaaaacagattttgttttgttttaatttgaacaacactggtcattgagaaccataaaaggcaaagccactcttttcattaattctaaagattgttttttctttttgtgaggaacgtgtgattaggtaaggcatatgtagtctgtgggatctcttgaatgcagtggtgctctcagctgaagagctgaggacctctgatgtacactcaccgctcccactgttccttacaggcagcaacggacatgagtttgttttccttctaaaaggccaagaagatctgcgccaggatgagcgtgtgatgcagctcttcggcctggttaacacccttctggccaatgacccaacatctcttcggaaaaacctcaggtattcagaaaccctgaaatggcaacaatttgagaagtcttctggttttttcctacatttgtctcgtgtagtcatgtattatatcttaacaaaaaactataaaattagggagccaggcatggtaactcatgcctgtagtcccagaaactccagaggttgaggcagggggatggcttgagcccaggagttcaaggctgcagtgagctgtgattgtgccactgccctccagcctgggtaatagagcaagactgtctctttagaagaaaaaggctgggcatggtggctcgcacctataatcctaatattttgtaatgccaaggtaggaggatcacttgagcccaggaattcaagaccagcctaaacaacatagagagaccccatcactatttatttaaaaaaattaaaaaggtgaccgggcacggtggcccatgcctataatcccagcactttgggaggcccaggcaggtggatcacttgaggtcaggagttcgagaccagcctggccaacatggtgaaaccctgtgtctactaaaaatacaaaaattagctgggcgtggtggcggccacctgtaatcccggctactcaggaggctgaggcacgagaattgcttgaacctgggaggcggaggttgcagtgagccaagattgcaccattgtactccaggctgggcaacaagagtgaaactccatctcaaaaataaataactaaagtaaggaaaaaaaaaattaagtggccaggcatggtggctcacatgtaatcccgacactttggaaggctacagcaggaggattgcttgagaccaggagttcaagaccatcctggacaaaaaagtgagaccctgtctctacaaaaaataaaaaaatcagctgggcatggtggctcatgcctgttgtcccagctccttgggagatggaggcagaagaatcatcttagcccagttggttgaggctgcagtgagacaaggttgtgcctctacactctagcctgggcagcagagcaagaccctttctctcaaaaaataaagataggctgggcacagtgactcacgcctgtaatccctgtctctacaaaaaaaaaaaaaaaaaaagctgggcacagtgtagtcccagctactcagggggctgaggcaggagaatcacttgagcccaggaggtcgaggctacagtgagctgtgatggggcaactgtgctcgagcctaggtaacagcgagaccctatctcaaaaagtaaataatattttttaaatgttttaaaaatgaaaaattaagttataaaattttataatttataaccaagttcttccagagtttttagggtattttcattgggaaatgcctttaacaacctccaaagaatccagcagggagcaatttgtggcgggtagactggagagtctacagatgggatgggtctgaccccttgtgggatgaaagccaaacctttcccatcgtccgtattctggcactcctcttcctgttaaaaccatgagaattcacttgagaggtattttagtcacttgattgttcccccaaagccatgagtttcttgggcaggttgaggagacctgtgttgctttcactgcaccatcagtgcactgtctttctgtgatgccttattcttcacaaagcatccctcaacacacacttcacaccagcctgctgcggcgggggctcattaaaaatagtcagggccgccgggcgcggtggctcacgcctgtaatcccagcactttgggaggccaaggagggtggatcacgaggtcaggagttcgagaccagtctggccaacatagtgaaaccccgtctctactaaaaatacaaaaaattagccgggtgtggtgttgtgcatctgtaatcccagctactcgggaggctgacgcaggagaatcgcttgaacccaggaggcagaggttgcagtgaaccaaaatagtgacactgcattccagcctgggcaacagaacaagactccatct

SEQ ID NO: 8101 - protein, 1417 aa, Homo sapiens
  ref <308>: DATABASE ACCESSION NUMBER: SWISS-Prot / CAB44736
  ref <309>: DATABASE ENTRY DATE: 2002-06-01
MLGTGPAAATTAATTSSNVSVLQQFASGLKSRNEETRAKAAKELQHYVTMELREMSQEESTRFYDQLNHHIFELVSSSDANERKGGILAIASLIGVEGGNATRIGRFANYLRNLLPSNDPVVMEMASKAIGRLAMAGDTFTAEYVEFEVKRALEWLGADRNEGRRHAAVLVLRELAISVPTFFFQQVQPFFDNIFVAVWDPKQAIREGAVAALRACLILTTQREPKEMQKPQWYRHTFEEAEKGFDETLAKEKGMNRDDRIHGALLILNELVRISSMEGERLREEMEEITQQQLVHDKYCKDLMGFGTKPRHITPFTSFQAVQPQQSNALVGLLGYSSHQGLMGFGTSPSPAKSTLVESRCCRDLMEEKFDQVCQWVLKCRNSKNSLIQMTILNLLPRLAAFRPSAFTDTQYLQDTMNHVLSCVKKEKERTAAFQALGLLSVAVRSEFKVYLPRVLDIIRAALPPKDFAHKRQKAMQVDATVFTCISMLARAMGPGIQQDIKELLEPMLAVGLSPALTAVLYDLSRQIPQLKKDIQDGLLKMLSLVLMHKPLRHPGMPKGLAHQLASPGLTTLPEASDVGSITLALRTLGSFEFEGHSLTQFVRHCADHFLNSEHKEIRMEAARTCSRLLTPSIHLISGHAHVVSQTAVQVVADVLSKLLVVGITDPDPDIRYCVLASLDERFDAHLAQAENLQALFVALNDQVFEIRELAICTVGRLSSMNPAFVMPFLRKMLIQILTELEHSGIGRIKEQSARMLGHLVSNAPRLIRPYMEPILKALILKLKDPDPDPNPGVINNVLATIGELAQVSGLEMRKWVDELFIIIMDMLQDSSLLAKRQVALWTLGQLVASTGYVVEPYRKYPTLLEVLLNFLKTEQNQGTRREAIRVLGLLGALDPYKHKVNIGMIDQSRDASAVSLSESKSSQDSSDYSTSEMLVNMGNLPLDEFYPAVSMVALMRIFRDQSLSHHHTMVVQAITFIFKSLGLKCVQFLPQVMPTFLNVIRVCDGAIREFLFQQLGMLVSFVKSHIRPYMDEIVTLMREFWVMNTSIQSTIILLIEQIVVALGGEFKLYLPQLIPHMLRVFMHDNSPGRIVSIKLLAAIQLFGANLDDYLHLLLPPIVKLFDAPEAPLPSRKAALETVDRLTESLDFTDYASRIIHPIVRTLDQSPELRSTAMDTLSSLVFQLGKKYQIFIPMVNKVLVRHRINHQRYDVLICRIVKGYTLADEEEDPLIYQHRMLRSGQGDALASGPVETGPMKKLHVSTINLQKAWGAARRVSKDDWLEWLRRLSLELLKDSSSPSLRSCWALAQAYNPMARDLFNAAFVSCWSELNEDQQDELIRSIELALTSQDIAEVTQTLLNLAEFMEHSDKGPLPLRDDNGIVLLGERAAKCRAYAKALHYKELEFQKGPTPAILESLI

SEQ ID NO: 8102 - DNA, 1723 bp, Rattus norvegicus
  ref <308>: DATABASE ACCESSION NUMBER: EMBL / U11685
  ref <309>: DATABASE ENTRY DATE: 2000-03-04
taatgtccagggctccaggaagagatgtccttgtggctggaggccgcagtgcctgatgtttctcctgactctgcaacggagttgtggaagacagaacctcaagatgcaggagaccagggaggcaacacttgcatccttagggaggaagccaggatgccccaatcaactgggggtgctttaaggatagggttggagtcatccgagcctacagccctgctccccagggcagagaccctcccagagcctacagaacttcgtccacagaagcggaaaaaggggccagcccccaaaatgctggggaacgagctatgcagtgtatgtggggacaaggcctctgcgttccattacaatgtgctgagctgcgagggctgcaagggattcttccgccgcagtgtcatcaagggagcacgctacatttgccatagcggtggccactgccccatggacacctacatgcggcggaaatgccaggagtgtcgccttcgcaaatgccgccacgcaggcatgagggaggagtgtgtcttatcagaagaacagatccgcttgaagaaactgaagcgtcaagaagaggagcaggctcaagccacatcggtgtccccaagggtttcctcaccgccccaggtcctgccacagctcagcccagaacaactgggcatgattgagaagttggtggctgcccagcaacagtgtaacaggcgctccttctctgaccgacttcgagtcacgccttggcccattgcacccgaccctcagagccgggaagcccgccaacagcgctttgcccactttactgagctggccatcgtgtccgtgcaggagattgttgactttgccaaacagctccctggcttcctacagctgagcagggaggaccagatcgccttgctgaagacctctgcgatcgaggtgatgcttctggagacatcgcggaggtacaaccctgggagtgagagcatcaccttcctcaaggatttcagttacaaccgggaagactttgccaaagcagggctgcaggtggagttcattaaccccatctttgagttctccagatccatgaatgaactgcaactcaatgatgctgaatttgctctgctcatagccatcagcatcttctctgcagaccggcccaacgtgcaggaccagctccaagtagagagactgcaacacacatatgtggaggccctgcatgcctatgtctccatcaaccacccccacgaccgactgatgttcccacggatgctaatgaagctggtgagcctccggactttgagcagcgtccattcagagcaagtgtttgcacttcgcctgcaggacaaaaaacttccccctctgctctccgagatctgggatgtccacgaatgactgtttctccgtgtcctctgtgttggccacgcagctgaagcttactgactgcttcctagaggtggagcagactgaggagggcaaacattcctgggcgctgggtgaaagagacccttgcatggcactaaagagagtcaaagggttgggtgttttgtggctgctgggcagttggggacctactaacgttgtatgccatctgaaggccttgttgacccaaccaaataaactagccaggagagccactttgtgcagggttcttcaggccctgcccaaaaaaaaaaaaaaaaaacgactaacgttgtatgccatctgaaggccttgttgacccaaccaaataaactagccaggagagccactttgt

SEQ ID NO: 8103 - protein, 445 aa, Rattus norvegicus
  ref <308>: DATABASE ACCESSION NUMBER: SWISS-Prot / Q62685
  ref <309>: DATABASE ENTRY DATE: 2001-10-16
MSLWLEAAVPDVSPDSATELWKTEPQDAGDQGGNTCILREEARMPQSTGGALRIGLESSEPTALLPRAETLPEPTELRPQKRKKGPAPKMLGNELCSVCGDKASAFHYNVLSCEGCKGFFRRSVIKGARYICHSGGHCPMDTYMRRKCQECRLRKCRHAGMREECVLSEEQIRLKKLKRQEEEQAQATSVSPRVSSPPQVLPQLSPEQLGMIEKLVAAQQQCNRRSFSDRLRVTPWPIAPDPQSREARQQRFAHFTELAIVSVQEIVDFAKQLPGFLQLSREDQIALLKTSAIEVMLLETSRRYNPGSESITFLKDFSYNREDFAKAGLQVEFINPIFEFSRSMNELQLNDAEFALLIAISIFSADRPNVQDQLQVERLQHTYVEALHAYVSINHPHDRLMFPRMLMKLVSLRTLSSVHSEQVFALRLQDKKLPPLLSEIWDVHE

SEQ ID NO: 8104 - DNA, 1524 bp, Homo sapiens
  ref <308>: DATABASE ACCESSION NUMBER: EMBL / BC008819
  ref <309>: DATABASE ENTRY DATE: 2001-07-13
ggcacgaggcctgcttgtgctcagctccagctcactggctggccaccgagacttctggacaggaaactgcaccatcctcttctcccagcaagggggctccagagactgcccacccaggaagtctggtggcctggggatttggacagtgccttggtaatgaccagggctccaggaagagatgtccttgtggctgggggcccctgtgcctgacattcctcctgactctgcggtggagctgtggaagccaggcgcacaggatgcaagcagccaggcccagggaggcagcagctgcatcctcagagaggaagccaggatgccccactctgctgggggtactgcaggggtggggctggaggctgcagagcccacagccctgctcaccagggcagagcccccttcagaacccacagagatccgtccacaaaagcggaaaaaggggccagcccccaaaatgctggggaacgagctatgcagcgtgtgtggggacaaggcctcgggcttccactacaatgttctgagctgcgagggctgcaagggattcttccgccgcagcgtcatcaagggagcgcactacatctgccacagtggcggccactgccccatggacacctacatgcgtcgcaagtgccaggagtgtcggcttcgcaaatgccgtcaggctggcatgcgggaggagtgtgtcctgtcagaagaacagatccgcctgaagaaactgaagcggcaagaggaggaacaggctcatgccacatccttgccccccagggcttcctcacccccccaaatcctgccccagctcagcccggaacaactgggcatgatcgagaagctcgtcgctgcccagcaacagtgtaaccggcgctccttttctgaccggcttcgagtcacggtgatgcttctggagacatctcggaggtacaaccctgggagtgagagtatcaccttcctcaaggatttcagttataaccgggaagactttgccaaagcagggctgcaagtggaattcatcaaccccatcttcgagttctccagggccatgaatgagctgcaactcaatgatgccgagtttgccttgctcattgctatcagcatcttctctgcagaccggcccaacgtgcaggaccagctccaggtagagaggctgcagcacacatatgtggaagccctgcatgcctacgtctccatccaccatccccatgaccgactgatgttcccacggatgctaatgaaactggtgagcctccggaccctgagcagcgtccactcagagcaagtgtttgcactgcgtctgcaggacaaaaagctcccaccgctgctctctgagatctgggatgtgcacgaatgactgttctgtccccatattttctgttttcttggccggatggctgaggcctggtggctgcctcctagaagtggaacagactgagaagggcaaacattcctgggagctgggcaaggagatcctcccgtggcattaaaagagagtcaaaggaaaaaaaaaaaaaaaaaaaaaaaaaaaaaaaaaaa

SEQ ID NO: 8105 - protein, 447 aa, Homo sapiens
  ref <308>: DATABASE ACCESSION NUMBER: SWISS-Prot / Q13133
  ref <309>: DATABASE ENTRY DATE: 2002-06-15
MSLWLGAPVPDIPPDSAVELWKPGAQDASSQAQGGSSCILREEARMPHSAGGTAGVGLEAAEPTALLTRAEPPSEPTEIRPQKRKKGPAPKMLGNELCSVCGDKASGFHYNVLSCEGCKGFFRRSVIKGAHYICHSGGHCPMDTYMRRKCQECRLRKCRQAGMREECVLSEEQIRLKKLKRQEEEQAHATSLPPRRSSPPQILPQLSPEQLGMIEKLVAAQQQCNRRSFSDRLRVTPWPMAPDPHSREARQQRFAHFTELAIVSVQEIVDFAKQLPGFLQLSREDQIALLKTSAIEVMLLETSRRYNPGSESITFLKDFSYNREDFAKAGLQVEFINPIFEFSRAMNELQLNDAEFALLIAISIFSADRPNVQDQLQVERLQHTYVEALHAYVSIHHPHDRLMFPRMLMKLVSLRTLSSVHSEQVFALRLQDKKLPPLLSEIWDVHE

SEQ ID NO: 8106 - DNA, 783 bp, Rattus norvegicus
  ref <308>: DATABASE ACCESSION NUMBER: EMBL / U12568
  ref <309>: DATABASE ENTRY DATE: 2000-03-04
ctcggcttgaggatgggcttgctctctattttgcgcaaattgaaaagtgcaccagaccaggaggtgcgaatcctcctcctgggcttggacaacgctggcaagacgaccctgctgaagcagcttgcatctgaagacatcagccacatcacacctacacagggatttaacatcaaaagtgtacagtcacaaggttttaaactgaatgtatgggacattggcggacagaggaaaatcagaccatactggagaagctattttgaaaacactgatattcttatatacgtaattgacagtgcagacagaaaaagatttgaagagacgggtcaggagctaacggaattgctggaggaagaaaagctgagctgtgtgccagtgctcgtctttgctaacaagcaggatctgctcacggcggccccagccgcagagatcgcagaagggctaaacctacacaccattcgggaccgcgtctggcagatccagtcctgctcagcgctcacaggcgagggcgtccaggacggcatgaactgggtctgcaagaatgtcaacgcaaagaagaagtaagatgccgagggaggcgcggagctcgggagctggtcccgccctgagaaagaaacactgcgtgcgctttctgaccaaaggctttcccatctgcacggccacagctgtgtggtgggcggggacagcagcttaagaggaacccccattccagcagtagattttaactgatctcagaggttcagtatcgtttttcaaataaaggaattatattgtttcctctgcata

SEQ ID NO: 8107 - protein, 182 aa, Rattus norvegicus
  ref <308>: DATABASE ACCESSION NUMBER: SWISS-Prot / P37996
  ref <309>: DATABASE ENTRY DATE: 2001-10-16
MGLLSILRKLKSAPDQEVRILLLGLDNAGKTTLLKQLASEDISHITPTQGFNIKSVQSQGFKLNVWDIGGQRKIRPYWRSYFENTDILIYVIDSADRKRFEETGQELTELLEEEKLSCVPVLVFANKQDLLTAAPAAEIAEGLNLHTIRDRVWQIQSCSALTGEGVQDGMNWVCKNVNAKKK

SEQ ID NO: 8108 - DNA, 870 bp, Homo sapiens
  ref <308>: DATABASE ACCESSION NUMBER: EMBL / BC009841
  ref <309>: DATABASE ENTRY DATE: 2001-07-13
ggcacgaggctggtaacgggggaggcagcaggaggaggaggaggaggagggactcggcgggaggatgggcttgctctcaattttgcgcaagttgaaaagtgcaccagaccaggaggtgagaatacttctcctgggcttggataatgctggcaagaccactcttctgaagcagcttgcatctgaagacatcagccacatcacacctacacagggtttcaacatcaaaagtgtacaatcacaaggttttaaactgaatgtatgggacattggtggacagaggaaaatcagaccatactggaagaattattttgaaaataccgatattcttatatatgtaatcgacagtgcagacagaaaaagatttgaagagacgggtcaggaactagcggaattactggaggaagaaaaactaagttgtgtgccagtgctcatctttgctaataagcaggatttgctcacagcagcccctgcctctgaaattgcagaaggactgaacctgcataccatccgcgaccgagtctggcagatccagtcttgctcagctctcacaggagagggcgttcaggatggcatgaactgggtctgcaaaaatgtcaatgcaaagaagaaataaaatctagacgaatggagatgcaggagctgcgggagccgaattcggtcctgaaaaacactaatttgctgctttctgaccaaatgtttttccatctgtgtacagctccagctgtttgaagagagggaacaacatggtttagaaagaatccccattccagcagtagatttaactgatctctgaggttcagtatcatttttcaaataaaggaattatattatttcctctgcataaaaaaaaaaaaaaaaaaaaaaaaaaaa

SEQ ID NO: 8109 - protein, 182 aa, Homo sapiens
  ref <308>: DATABASE ACCESSION NUMBER: SWISS-Prot / P36405
  ref <309>: DATABASE ENTRY DATE: 2002-06-15
MGLLSILRKLKSAPDQEVRILLLGLDNAGKTTLLKQLASEDISHITPTQGFNIKSVQSQGFKLNVWDIGGQRKIRPYWKNYFENTDILIYVIDSADRKRFEETGQELAELLEEEKLSCVPVLIFANKQDLLTAAPASEIAEGLNLHTIRDRVWQIQSCSALTGEGVQDGMNWVCKNVNAKKK

SEQ ID NO: 8110 - DNA, 915 bp, Rattus norvegicus
  ref <308>: DATABASE ACCESSION NUMBER: EMBL / U13176
  ref <309>: DATABASE ENTRY DATE: 2000-03-04
aattccgcgccggccccttccccgtccctcccccgtccccgtccccgcccggccagccgccaccgtttcccaccatggctctgaagagaatccacaaggaattgaatgacctggctcgagatcctccagcacagtgttcagcaggtcctgttggagatgatatgtttcattggcaggctacaataatggggccaaatgacagcccctatcagggtggagtatttttcttgactattcatttcccaacagattaccccttcaaaccgcctaaggttgcatttacaacaagaatttatcatccaaatattaacagtaatggcagcatttgtcttgatattctacggtcacagtggtctccagcactaactatttcaaaagtacttttgtccatctgttctctgttgtgtgatcccaatccagatgatcctttagtgcctgagattgctcggatctacaaaacagatagagaaaagtacaacagaatagctcgggaatggactcagaagtatgccatgtaattaaagaaattattggataacctctacaaataaagctaggagaactctgaaagagagaaagtccttttgatttccatttgactgctttctatgagcccaccgcctcatcttcccctgtgcacatgtttacctgacacagcagtgctgcgttgttgtacatacttggaacaacaaactagaaatactgtacttctgtaccaacattgcctcctagcagagaagtgtgtgtgtgagaagccagttctccgggcgtaacctaggcctatttcgatgtaagggtgaacattcatttgatggaaacacttgtgtatatttaaagacccagtgcttcctctggagcttgtacgttcaagaatgattaatctgtgtaataaactgattactacagtcattacgg

SEQ ID NO: 8111 - protein, 147 aa, Rattus norvegicus
  ref <308>: DATABASE ACCESSION NUMBER: SWISS-Prot / P51669
  ref <309>: DATABASE ENTRY DATE: 2002-06-15
MALKRIHKELNDLARDPPAQCSAGPVGDDMFHWQATIMGPNDSPYQGGVFFLTIHFPTDYPFKPPKVAFTTRIYHPNINSNGSICLDILRSQWSPALTISKVLLSICSLLCDPNPDDPLVPEIARIYKTDREKYNRIAREWTQKYAM

SEQ ID NO: 8112 - DNA, 2011 bp, Homo sapiens
  ref <308>: DATABASE ACCESSION NUMBER: EMBL / AF317220
  ref <309>: DATABASE ENTRY DATE: 2001-08-24
cccggtcctgttggagatgatatgttccattggcaagctacaataatggggccaaatgacagtccctatcagggtggagtatttttcttgacaattcatttcccaacagattaccccttcaaaccacctaaggttgcatttacaacaagaatttatcatccaaatattaacagtaatggcagcatttgtcttgatattctacgatcacagtggtctccagcactaactatttcaaaagtactcttgtccatctgttctctgttgtgtgatcccaatccagatgatcctttagtgcctgagattgctcggatctacaaaacagatagagaaaagtacaacagaatagctcgggaatggactcagaagtatgcgatgtaattaaagaaattattggataacctctacaaataaagataggggaactctgaaagagaaagtccttttgatttccatttgactgctttctatgagcccacgcctcatcttcccctgtgcacatgtttacctgatacagcagtgctgcgtgttgtacatacttggaacaacaaactagaaatactgtacttctgtaccaacattgcctcctagcagagaagtgtgtgtgtgacaagccagttctacaggcattacctaggtgtgagactaaaagcttttcttattgacttaaatttggataacagcaaggtgtgaggggggtggtgggtatggtgtgtgcttggatgggaaagaaaaggctccactcacctataggagattatttttaagtggaatccatttaaactcaaaacagttatgaaaagcaaggtgaagaacatgaagctgtgtctgtattcattttattccgaaggagctacgtcttaggtgaaagttatgaccaaccagattaaactctacccacatcctgcattttaaggtctaagtttaactggtcaacatttaaatggattggagctattagtacatcaagtgtgatgggctttgttcccaactcttttacatctccctaccccttcaacctttggcctttcagcccttctttctctcttccatattctttggtttgtatgtggtttctcagttaatacatagctaatagctcttatttttcttatgtttttaaccgcttaggtctatttggatgtaagggtgaaaattcatttgatggaaatacttgtgtatatttaaagacccaattgctcctctggagcttgtactttcaagaatgattaatctgtgtaataaactggttactacagtcattacatataattttgtgtgaataggctttttcatttttaagaagttgttactaaatagggggattttttccccttttgaaagttcattaaaggggcatttttaagatcatgaaacaattccagttacattgtaaaaaggatatcttacgagtaattttattgaacaagttagaggcataagcttaagagcatttccatgaaacaacacatgcagcattccaggaacttgattgttaaattcaataagaaatttgctttattaatgaaactaagctgcatttcatcaaaaccttgtgacattcccttggtacataggacataaaacacagaggcattgctatttggtaagttaagcttctgtgattgtaattataaaagagcaacattgaccaaacctgggaaacaagagcacagtcttgtttggagagtctacataattactttgcactaacatttgcaggatgttcacacaattttaaattgtactgtatgtggctttttgaagtcttcccttgaccctagtaaaatatagcttgaaacttgtaaacaactgtgtttgccagaaacatcattcatgtgaactaggcaagttaccttttttccccccttcttttcctaattgtaaactaggccaacctgaaagccatggctgatgctctagccatcaggttctttcaaatgcatctttacactcttgcacaaaagttaaggaataaatgtccactgcttttggttttaaaaaaaaaaaaaaa

SEQ ID NO: 8113 - protein, 147 aa, Homo sapiens; identical to SEQ ID NO: 8111

SEQ ID NO: 8114 - DNA, 901 bp, Rattus norvegicus
  ref <308>: DATABASE ACCESSION NUMBER: EMBL / U13177
  ref <309>: DATABASE ENTRY DATE: 2000-03-04
tccgatgccgtttcaggtctggaatcagcagggtcctctgagccttggcagtgctgatctgctcgtttgcaaaggcgcctgtgtctcagagccggtgtgagaagaagagagaatccttcccgccgccgggagtaatcaagagttttggccggacctttgagtacacatcgggatagtgagaagcccggcgaaaagcacagactatggcgctgaaacggattaataaggaacttagtgatttggcccgtgaccctccagcacaatgttctgcaggtccagttggagatgacatgtttcattggcaagccacaattatgggacctaatgacagcccatatcaaggtggtgtattctttttgacaattcattttcctacagactaccccttcaaaccacctaaggttgcatttacaacaagaatttatcatccaaatattaacagtaatggcagcatttgtcttgatattctaagatcacagtggtctcctgctttaactatttctaaagttcttttatccatttgttcactgctatgtgatccaaacccagatgaccccctagtgccagagattgcacggatctataaaacagacagagacaagtacaacagaatatctcgggaatggactcagaagtatgccatgtgatgctaccttaaagtcagaataacctgcattatagctggaataaactttaaattacttttgagttttataatctttattgagcttctgttacagaaggggtgtgacatttgcccttatggtgagttagtctggatgcgtgttctcagcccgaatgagaagtaaaatcttaacagagcacagaatagaaaggaccttggggatcacttagcccagcccattattttcatggaggaaatgaaaccaaagaaaggaga

SEQ ID NO: 8115 - protein, 147 aa, Rattus norvegicus; identical to SEQ ID NO: 6237
  ref <308>: DATABASE ACCESSION NUMBER: SWISS-Prot / P47986
  ref <309>: DATABASE ENTRY DATE: 2002-06-15

SEQ ID NO: 8116 - DNA, 724 bp, Homo sapiens; identical to SEQ ID NO: 6238
  ref <308>: DATABASE ACCESSION NUMBER: EMBL / U39318
  ref <309>: DATABASE ENTRY DATE: 2000-03-04

SEQ ID NO: 8117 - protein, 147 aa, Homo sapiens; identical to SEQ ID NO: 6237

SEQ ID NO: 8118 - DNA, 429 bp, Rattus norvegicus
  ref <308>: DATABASE ACCESSION NUMBER: EMBL / U13895
  ref <309>: DATABASE ENTRY DATE: 2001-02-16
aagaggatgagaaggacgacaagcccatccgagctctggatgaaggggatatcgccttgttgaaaacttatggccagagtacttattcgaggcagatcaagcaggttgaagatgacattcagcaacttcttaaaaaaattaatgagctcactggtatcaaagagtccgacactgggctggcccctccagcactctgggatttggctgcagacaaacagacacttcagagtgaacagcctctacaggttgcaagatgtaccaagataatcaacgccgattcagaggacccgaaatacatcatcaacgtgaagcagtttgccaagttcgtggtggatctcagtgatcaggtggcacctactgacattgaggaagggatgagagtcggcgtggacagaaataaataccaaattcacattccattgcctccta

SEQ ID NO: 8119 - protein, 142 aa, Rattus norvegicus
  ref <308>: DATABASE ACCESSION NUMBER: SWISS-Prot / AAC53589
  ref <309>: DATABASE ENTRY DATE: 2001-06-01
EDEKDDKPIRALDEGDIALLKTYGQSTYSRQIKQVEDDIQQLLKKINELTGIKESDTGLAPPALWDLAADKQTLQSEQPLQVARCTKIINADSEDPKYIINVKQFAKFVVDLSDQVAPTDIEEGMRVGVDRNKYQIHIPLPP

SEQ ID NO: 8120 - DNA, 1478 bp, Homo sapiens
  ref <308>: DATABASE ACCESSION NUMBER: Refseq / NM_002803
  ref <309>: DATABASE ENTRY DATE: 2002-10-30
ccattgtgctctaaagggaaggtgctgtgtaatcattaaggagcggaggcttttggagctgctaaaatgccggattacctcggtgccgatcagcggaagaccaaagaggatgagaaggacgacaagcccatccgagctctggatgagggggatattgccttgttgaaaacttatggtcagagcacttactctaggcagatcaagcaagttgaagatgacattcagcaacttctcaagaaaattaatgagctcactggtattaaagaatctgacactggcctggccccaccagcactctgggatttggctgcagataagcagacactccagagtgaacagcctttacaggttgccaggtgtacaaagataatcaatgctgattcggaggacccaaaatacattatcaacgtaaagcagtttgccaagtttgtggtggaccttagtgatcaggtggcacctactgacattgaagaagggatgagagtgggcgtggatagaaataaatatcaaattcacattccattgcctcctaagattgacccaacagttaccatgatgcaggtggaagagaaacctgatgtcacatacagtgatgttggtggctgtaaggaacagattgagaaactgcgagaagtagttgaaaccccattacttcatccagagaggtttgtgaaccttggcattgagcctcccaagggcgtgctgctctttggtccacccggtacaggcaagacactctgtgcgcgggcagttgctaatcggactgatgcgtgcttcattcgagttattggatctgagcttgtacagaaatacgtcggtgagggggctcgaatggttcgtgaactctttgaaatggccagaacaaaaaaagcctgccttatcttctttgatgaaattgatgctattggaggggctcgttttgatgatggtgctggaggtgacaatgaagtgcagagaacaatgttggaactgatcaatcagcttgatggttttgatcctcgaggcaatattaaagtgctgatggccactaacagacctgatactttggatccagcactgatgaggccagggagattggatagaaaaattgaatttagcttgcccgatctagagggtcggacccacatatttaagattcacgctcgttcaatgagtgttgaaagagatatcagatttgaactgttagcacgactgtgtccaaatagcactggtgctgagattagaagcgtctgcacagaggctggtatgtttgccatcagagcacggcgaaaaattgctaccgagaaggatttcttggaagctgtaaataaggtcattaagtcttatgccaaattcagtgctactcctcgttacatgacatacaactgaaccctgaaggctttcaagtgaaaactttaaattggaatcctaaccttatatagacttgttaataaccaattcataaacaaataaatggcttcaactttagagcacaatgg

SEQ ID NO: 8121 - protein, 433 aa, Homo sapiens; identical to SEQ ID NO: 701
  ref <308>: DATABASE ACCESSION NUMBER: SWISS-Prot / P35998
  ref <309>: DATABASE ENTRY DATE: 2002-06-15

SEQ ID NO: 8122 - DNA, 4056 bp, Rattus norvegicus
  misc_feature (1)..(4056): n=a, c, g or t
  ref <308>: DATABASE ACCESSION NUMBER: EMBL / U14005
  ref <309>: DATABASE ENTRY DATE: 2000-03-04
ggatcccccctgcaacaatcagagatgctcagtgtgtcgtctttgagcaaggagtaccttcccagaaacatttattttcttaattcacgctgagccttttgctttaaagacgctgttctcaaacgttctaaaactcagtaggaacaagcagatccgaacaaaggcaaataaatcgaatcctgcaaagtaacaaagcagacgccttttcccaacagccagcacaaagctaaatgaaaaatatcagtcatccactagatacagtatttcccccactagacaggagctggggcctgtagatcccccctcccccaaacaggaggccgagaaggtacaaaacaaagtattcattcctaaacgagtcatcacttcgagctgcaccttctacctctccgcactcgcggtttgaaagacctcggctgttacttctctgtacctgcctccaaacacacgtggaggtggtggcgagagggagggagcccaccgccacgtatgcataaggcgagggaggaggggattggggctgagggcagttccctgaggacagttagtgctgcctaaagtgcaaggctcccccattcctctgtaccccgaaactggaggaaacagtgtgggggcctggggacgcctgtccacggtccaggcagagccctggaaccctgagctttgatgctgcagcagcgatcgcctgtgggcacctgggtttctggggggcggggcctcccccaggtgtgcggagagcgaaggccaccagagccagcccagaggaccccaggagcctcctccgggggacacggtacaaaagagcggctcgtcggtgcccccagcagcaggcaccgggccccacgggcctggctccgggaaggggcgcccgcgcggcggcaccgagggggttaaccgggcggcccgcggccgnagcgcgcttaaccctcggtcagccgcgccagcccgggggtggcggcgtccgagtcgcgcgccgtggagcccggggggcgcgtgggccgcaggccggcagctggggcgcggcgcggccggtgggaggcccgggcgcgcgggggagggcgggggacggcggcggcgggcgcgcagcgtcgccaggacgaanccggcgtgcagcgcggcgcggcgggcgcggagcgggcgggcgggcgggcgagcgcctccgtccccggatgtgagctccggctgcccgcggtcccgagccagcggcggcgcgggcggcgacggcggcggcggggcaccgggcaccggggcgggcgggcggacgggcggcatggggggcgcgtcgagcggccccggcggccgggcgggcaccaccgcggtgtccctccgctagaggaggggaccaagccaattctcctttgcagcaaaaaaagagaaaaaagaaaaaaaagaaaaatttacttgtatatattactaagataatatatacatctgattttattttttacaaaaagtttattttgctccatttttcaaaaaaagaaggagcgtgggtggcaggcggtttttataaattattcttattttgattatttgtctctgtccttccccaccccctgctgaagcgaaaatagggcagggaccgcggctcctacctatcagtaacctcccatacccgttcctccccctccctaacgctgagcatagtgccctgcacacagtaggcgctcaataaatgttcgtggatgatgatgatgatgatgatgaaaaaaatgcagcatcaacggcagcagcaagaggaccacgcgaacggtgagcagccagagcccgggtacccgctgccaaacctcatcctatcaggatcctactcttcccactccccaacccccatctccgatgcgttgggtgggttgagggggttggagatgatgcttttggcttggtgtcatctacatagaaaggggtgatgcgcggcagctacttcgttctcctcttcaggccctgaatgtcagagttaattctgcatttgctggggtggggcggccattgggtgtgtggagtactgtgcagccaaggggcgagagtgaggtgattcgggttcaagtgccctcgggctcaacttttctctttcattgcccctgagcgatggaagaggtgttagtcttcagcctgaaccccttttccagcctccccccccacccccacgcctctggttgactaagaggaaggtctttagtagcatcaggaaaattctaggattgctccgcttttactcgttgggtcacttggtaaagtgcacatccatcatctcatgggagaagccccccggtcttgggatctgggggaacagggtcaggtggagcgagtattcccgctcgctccctgtgcctcctgtgcacacgtcgtcggtaacctagcaatgcccagagagttgctgccgctgtggggctctgcaactcagccctggccatggcaccacgtgcagtttccacaccagcggggctgggtctgagaaggttgggttgcttttggctaggttccctccgtggaggtcgttggcatctcccaaccctgttttcttgaagccttttccggtgagcacttctcaaagggaaagcttggcaaaattagttcctgatctcagattgagtgccacctgcctgctttgctgctgtcccaggctcataggacagtggggcaggagacctgtgcttgctttgactctttgcttagtgataattagctttgcaaacgcctggatctccaacctctctccacccttctcactttgacatctgcttcagcagaggtgatgatggtggcccaacgtgggcacctgtgagaccgtctgagggatggccagacccatagtgaggcgggctccgcacatgaagagacccgacccccccccccccccccgcgccccacctttgagtattttgccttgtgtgtacctggatgctactctacgccgagataattcttgaataggccttgaggttccctggcataacgcaccctgtctcttaggtgtaggggtgcaggctggcttggctgctactgctgcaattaaaaaaaaaaaaaaagccctaaagatgtttttctgttttcggaagcttgtggaggaaatgagtcccaagcaccatgaattttcatttgtaggaagtgttagtgcataatctagatatttgttatggggcttttgctattgcctggtgccagtgaggagtttgttttttttttcttctacgtagaaaaaatgcatttatggctgtggagagctgttggaaggacaccctaaaaatggttaagactgttgaatttattggctctgtgtgtgtgtgtgtgtgtgtgtgtgtgtgtgtgttggtaataaattttagagaaaggcagctgtatagatgtatctgttaagccatgagagatacgtgtgttttcaaagtcaggaaaagacacaggataaattcgagaatagccccagtttgtcagaagagaggcactcatggcttccctttgaagacacaggtatgggagagtaccagtgtggctaggtgtggtgcagcaacgcatgtctagtgctcagggcagagctctgctgacttctgcattgcctggccaaaccccactacttgtgacacaaggttcaaaatgggaaacacaagatgggagacacttttgcttttttaaaaagatagtatagatcaaggtctttcttttttttttttttcttccccaaagaaaaataatctcttttctccttctcctcagaggcaaactatgcaagaggcaccagactccctatttctggtgaaggaccaacttctcagccgaacagctccaagcaaaccgtcctgtcttggcaagctgcaattgatgctgctagacaggccaaggccgcccagaccatgagcacgtctgcacccccacctgtaggatctctctcccaaagaaaacgtcagcaatacgccaagagcaaaaaacagggtaactcgtctaacagccgacctgcccgtgccctcttctgtttatccctcaataaccccatccgaagagcctgcattagtatagtggattggaagtatcctttttctgtgggaaagtctttcaaaaggatcc

SEQ ID NO: 8123 - protein, 2203 aa, Rattus norvegicus
  ref <308>: DATABASE ACCESSION NUMBER: SWISS-Prot / AAB60515
  ref <309>: DATABASE ENTRY DATE: 2002-06-15
MMMMMMMKKMQHQRQQQEDHANEANYARGTRLPISGEGPTSQPNSSKQTVLSWQAAIDAARQAKAAQTMSTSAPPPVGSLSQRKRQQYAKSKKQGNSSNSRPARALFCLSLNNPIRRACISIVDWKPFDIFILLAIFANCVALAIYIPFPEDDSNSTNHNLEKVEYAFLIIFTVETFLKIIASGLLLHPNASVRNGWNLLDFVIVIVGLFSVILEQLTKETEGGNHSSGKSGGFDVKALRAFRVLRPLRLVSGVPSLQVVLNSIIKAMVPLLHIALLVLFVIIIYAIIGLELFIGKMHKTCFFADSDIVAEEDPAPCAFSGNGRQCAANGTECRSGWVGPNGGITNFDNFAFAMLTVFQCITMEGWTDVLYWVNDAIGWEWPWVYFVSLIILGSFFVLNLVLGVLSGEFSKEREKAKARGDFQKLREKQQLEEDLKGYLDWITQAEDIDPENEEEGGEEGKRNTSMPTSETESVNTENVSGEGETQGCCGSLWCWWKRRGAAKTGPSGCRRWGQAISKSKLRSHGAREALCVCRCSLESLVKLWTSRFSAHLQAAYVRPYSRRWRRWNRFNRRRCRAAVKSVTFYWLVIVLVFLNTLTISSEHYNQPDWLTQIQDIANKVLLALFTCEMLVKMYSLGLQAYFVSLFNRFDCFVVCGGITETILVELELMSPLGVSVFRCVRLLRIFKVTRHWTSLSNLVASLLNSMKSIASLLLLLFLFIIIFSLLGMQLFGGKFNFDETQTKRSTFDNFPQALLTVFQILTGEDWNAVMYDGIMAYGGPSSSGMIVCIYFIILFICGNYILLKLFLAIAVDNLADAESLNTAQKEEAEEKERKKIARKESLENKKNNKPEVNQIANSDNKVTIDDYQEEAEDKDPYPPCDVPVGEEEEEEEEDEPEVPAGPRPRRISELNMKEKIAPIPEGSAFFILSKTNPIRVGCHKLINHHIFTNLILVFIMLSSAALAAEDPIRSHSFRNTILGYFDYAFTAIFTVEILLKMTTFGAFLHKGAFCRNYFNLLDMLVVGVSLVSFGIQSSAISVVKILRVLRVLRPLRAINRAKGLKHVVQCVFVAIRTIGNIMIVTTLLQFMFACIGVQLFKGKFYRCTDEAKSNPEECRGLFILYKDGDVDSPVVRERIWQNSDFNFDNVLSAMMALFTVSTFEGWPALLYKAIDSNGENVGPVYNYRVEISIFFIIYIIIVAFFMMNIFVGFVIVTFQEQGEKEYKNCELDKNQRQCVEYALKARPLRRYIPKNPYQYKFWYVVNSSPFEYMMFVLIMLNTLCLAMQHYEQSKMFNDAMDILNMVFTGVFTVEMVLKVIAFKPKGYFSDAWNTFDSLIVIGSIIDVALSEADNSEESNRISITFFRLFRVMRLVKLLSRGEGIRTLLWTFIKSFQALPYVALLIAMLFFIYAVIGMQMFGKVAMRDNNQINRNNNFQTFPQAVLLLFRCATGEAWQEIMLACLPGKLCDPDSDYNPGEEYTCGSNFAIVYFISFYMLCAFLIINLFVAVIMDNFDYLTRDWSILGPHHLDEFKRIWSEYDPEAKGRIKHLDVVTLLRRIQPPLGFGKLCPHRVACKRLVAMNMPLNSDGTVMFNATLFALVRTALKIKTEGNLEQANEELRAVIKKIWKKTSMKLLDQVVPPAGDDEVTVGKFYATFLIQDYFRKFKKRKEQGLVGKYPAKNTTIALQAGLRTLHDIGPEIRRAISCDLQDDEPEDSKPEEEDVFKRNGALLGNYVNHVNSDRRESLQQTNTTHRPLHVQRPSIPPASDTEKPLFPPAGNSVCHNHHNHNSIGKQVPTSTNANLNNANMSKAAHGKRPSIGDLEHVSENGHYSYKHDRELQRRSSIKRTRYYETYIRSESGDEQLPTIFREDPEIHGYFRDPRCFGEQEYFSSEECCEDDSSPTWSRQNYSYYNRYPGSSMDFERPRGYHHPQGFLEDDDSPIGYDSRRSPRRRLLPPTPPSHRRSSFNFECLRRQNSQDDVLPSPALPHRAALPLHLMQQQIMAVAGLDSSKAQKYSPSHSTRSWATPPATPPYRDWTPCYTPLIQVDRSESMDQVNGSLPSLHRSSWYTDEPDISYRTFTPASLTVPSSFRNKNSDKQRSADSLVEAVLISEGLGRYARDPKFVSATKHEIADACDLTIDEMESAASTLLNGSVCPRANGDMGPISHRQDYELQDFGPGYSDEEPDPGREEEDLADEMICITTL

SEQ ID NO: 8124 - DNA, 7635 bp, Homo sapiens
  ref <308>: DATABASE ACCESSION NUMBER: EMBL / M76558
  ref <309>: DATABASE ENTRY DATE: 2000-03-04
gggcgagcgcctccgtccccggatgtgagctccggctgcccgcggtcccgagccagcggcgcgcgggcggcggcggcgggcaccgggcaccgcggcgggcgggcagacgggcgggcatggggggagcgccgagcggccccggcggccgggccggcatcaccgcggcgtctctccgctagaggaggggacaagccagttctcctttgcagcaaaaaattacatgtatatattattaagataatatatacattggattttatttttttaaaaagtttattttgctccatttttgaaaaagagagagcttgggtggcgagcggtttttttttaaaatcaattatccttattttctgttatttgtccccgtccctccccacccccctgctgaagcgagaataagggcagggaccgcggctcctacctcttggtgatccccttccccattccgcccccgccccaacgcccagcacagtgccctgcacacagtagtcgctcaataaatgttcgtggatgatgatgatgatgatgatgaaaaaaatgcagcatcaacggcagcagcaagcggaccacgcgaacgaggcaaactatgcaagaggcaccagacttcctctttctggtgaaggaccaacttctcagccgaatagctccaagcaaactgtcctgtcttggcaagctgcaatcgatgctgctagacaggccaaggctgcccaaactatgagcacctctgcacccccacctgtaggatctctctcccaaagaaaacgtcagcaatacgccaagagcaaaaaacagggtaactcgtccaacagccgacctgcccgcgcccttttctgtttatcactcaataaccccatccgaagagcctgcattagtatagtggaatggaaaccatttgacatatttatattattggctatttttgccaattgtgtggccttagctatttacatcccattccctgaagatgattctaattcaacaaatcataacttggaaaaagtagaatatgccttcctgattatttttacagtcgagacatttttgaagattatagcgtatggattattgctacatcctaatgcttatgttaggaatggatggaatttactggattttgttatagtaatagtaggattgtttagtgtaattttggaacaattaaccaaagaaacagaaggcgggaaccactcaagcggcaaatctggaggctttgatgtcaaagccctccgtgcctttcgagtgttgcgaccacttcgactagtgtcaggagtgcccagtttacaagttgtcctgaactccattataaaagccatggttcccctccttcacatagcccttttggtattatttgtaatcataatctatgctattataggattggaactttttattggaaaaatgcacaaaacatgtttttttgctgactcagatatcgtagctgaagaggacccagctccatgtgcgttctcagggaatggacgccagtgtactgccaatggcacggaatgtaggagtggctgggttggcccgaacggaggcatcaccaactttgataactttgcctttgccatgcttactgtgtttcagtgcatcaccatggagggctggacagacgtgctctactggatgaatgatgctatgggatttgaattgccctgggtgtattttgtcagtctcgtcatctttgggtcatttttcgtactaaatcttgtacttggtgtattgagcggagaattctcaaaggaaagagagaaggcaaaagcacggggagatttccagaagctccgggagaagcagcagctggaggaggatctaaagggctacttggattggatcacccaagctgaggacatcgatccggagaatgaggaagaaggaggagaggaaggcaaacgaaatactagcatgcccaccagcgagactgagtctgtgaacacagagaacgtcagcggtgaaggcgagaaccgaggctgctgtggaagtctctgtcaagccatctcaaaatccaaactcagccgacgctggcgtcgctggaaccgattcaatcgcagaagatgtagggccgccgtgaagtctgtcacgttttactggctggttatcgtcctggtgtttctgaacaccttaaccatttcctctgagcactacaatcagccagattggttgacacagattcaagatattgccaacaaagtcctcttggctctgttcacctgcgagatgctggtaaaaatgtacagcttgggcctccaagcatatttcgtctctcttttcaaccggtttgattgcttcgtggtgtgtggtggaatcactgagacgatcttggtggaactggaaatcatgtctcccctggggatctctgtgtttcggtgtgtgcgcctcttaagaatcttcaaagtgaccaggcactggacttccctgtgcaacttagtggcatccttattaaactccatgaagtccagtgcttcgctgttgcttctgctttttctcttcattatcatcttttccttgcttgggatgcagctgtttggcggcaagtttaattttgatgaaacgcaaaccaagcggagcacctttgacaatttccctcaagcacttctcacagtgttccagatcctgacaggcgaagactggaatgctgtgatgtacgatggcatcatggcttacgggggcccatcctcttcaggaatgatcgtctgcatctacttcatcatcctcttcatttgtggtaactatattctactgaatgtcttcttggccatcgctgtagacaatttggctgatgctgaaagtctgaacactgctcagaaagaagaagcggaagaaaaggagaggaaaaagattgccagaaaagagagcctagaaaataaaaagaacaacaaaccagaagtcaaccagatagccaacagtgacaacaaggttacaattgatgactatagagaagaggatgaagacaaggacccctatccgccttgcgatgtgccagtaggggaagaggaagaggaagaggaggaggatgaacctgaggttcctgccggaccccgtcctcgaaggatctcggagttgaacatgaaggaaaaaattgcccccatccctgaagggagcgctttcttcattcttagcaagaccaacccgatccgcgtaggctgccacaagctcatcaaccaccacatcttcaccaacctcatccttgtcttcatcatgctgagcagtgctgccctggccgcagaggaccccatccgcagccactccttccggaacacgatactgggttactttgactatgccttcacagccatctttactgttgagatcctgttgaagatgacaacttttggagctttcctccacaaaggggccttctgcaggaactacttcaatttgctggatatgctggtggttggggtgtctctggtgtcatttgggattcaatccagtgccatctccgttgtgaagattctgagggtcttaagggtcctgcgtcccctcagggccatcaacagagcaaaaggacttaagcacgtggtccagtgcgtcttcgtggccatccggaccatcggcaacatcatgatcgtcaccaccctcctgcagttcatgtttgcctgtatcggggtccagttgttcaaggggaagttctatcgctgtacggatgaagccaaaagtaaccctgaagaatgcaggggacttttcatcctctacaaggatggggatgttgacagtcctgtggtccgtgaacggatctggcaaaacagtgatttcaacttcgacaacgtcctctctgctatgatggcgctcttcacagtctccacgtttgagggctggcctgcgttgctgtataaagccatcgactcgaatggagagaacatcggcccaatctacaaccaccgcgtggagatctccatcttcttcatcatctacatcatcattgtagctttcttcatgatgaacatctttgtgggctttgtcatcgttacatttcaggaacaaggagaaaaagagtataagaactgtgagctggacaaaaatcagcgtcagtgtgttgaatacgccttgaaagcacgtcccttgcggagatacatccccaaaaacccctaccagtacaagttctggtacgtggtgaactcttcgcctttcgaatacatgatgtttgtcctcatcatgctcaacacactctgcttggccatgcagcactacgagcagtccaagatgttcaatgatgccatggacattctgaacatggtcttcaccggggtgttcaccgtcgagatggttttgaaagtcatcgcatttaagcctaaggggtattttagtgacgcctggaacacgtttgactccctcatcgtaatcggcagcattatagacgtggccctcagcgaagcagacccaactgaaagtgaaaatgtccctgtcccaactgctacacctgggaactctgaagagagcaatagaatctccatcacctttttccgtcttttccgagtgatgcgattggtgaagcttctcagcaggggggaaggcatccggacattgctgtggacttttattaagttctttcaggcgctcccgtatgtggccctcctcatagccatgctgttcttcatctatgcggtcattggcatgcagatgtttgggaaagttgccatgagagataacaaccagatcaataggaacaataacttccagacgtttccccaggcggtgctgctgctcttcaggtgtgcaacaggtgaggcctggcaggagatcatgctggcctgtctcccagggaagctctgtgaccctgagtcagattacaaccccggggaggagcatacatgtgggagcaactttgccattgtctatttcatcagtttttacatgctctgtgcatttctgatcatcaatctgtttgtggctgtcatcatggataatttcgactatctgacccgggactggtctattttggggcctcaccatttagatgaattcaaaagaatatggtcagaatatgaccctgaggcaaagggaaggataaaacaccttgatgtggtcactctgcttcgacgcatccagcctcccctggggtttgggaagttatgtccacacagggtagcgtgcaagagattagttgccatgaacatgcctctcaacagtgacgggacagtcatgtttaatgcaaccctgtttgctttggttcgaacggctcttaagatcaagaccgaagggaacctggagcaagctaatgaagaacttcgggctgtgataaagaaaatttggaagaaaaccagcatgaaattacttgaccaagttgtccctccagctggtgatgatgaggtaaccgtggggaagttctatgccactttcctgatacaggactactttaggaaattcaagaaacggaaagaacaaggactggtgggaaagtaccctgcgaagaacaccacaattgccctacaggcgggattaaggacactgcatgacattgggccagaaatccggcgtgctatatcgtgtgatttgcaagatgacgagcctgaggaaacaaaacgagaagaagaagatgatgtgttcaaaagaaatggtgccctgcttggaaaccatgtcaatcatgttaatagtgataggagagattcccttcagcagaccaataccacccaccgtcccctgcatgtccaaaggccttcaattccacctgcaagtgatactgagaaaccgctgtttcctccagcaggaaattcggtgtgtcataaccatcataaccataattccataggaaagcaagttcccacctcaacaaatgccaatctcaataatgccaatatgtccaaagctgcccatggaaagcggcccagcattgggaaccttgagcatgtgtctgaaaatgggcatcattcttcccacaagcatgaccgggagcctcagagaaggtccagtgtgaaaagaacccgctattatgaaacttacattaggtccgactcaggagatgaacagctcccaactatttgccgggaagacccagagatacatggctatttcagggacccccactgcttgggggagcaggagtatttcagtagtgaggaatgctacgaggatgacagctcgcccacctggagcaggcaaaactatggctactacagcagatacccaggcagaaacatcgactctgagaggccccgaggctaccatcatccccaaggattcttggaggacgatgactcgcccgtttgctatgattcacggagatctccaaggagacgcctactacctcccaccccagcatcccaccggagatcctccttcaactttgagtgcctgcgccggcagagcagccaggaagaggtcccgtcgtctcccatcttcccccatcgcacggccctgcctctgcatctaatgcagcaacagatcatggcagttgccggcctagattcaagtaaagcccagaagtactcaccgagtcactcgacccggtcgtgggccacccctccagcaacccctccctaccgggactggacaccgtgctacacccccctgatccaagtggagcagtcagaggccctggaccaggtgaacggcagcctgccgtccctgcaccgcagctcctggtacacagacgagcccgacatctcctaccggactttcacaccagccagcctgactgtccccagcagcttccggaacaaaaacagcgacaagcagaggagtgcggacagcttggtggaggcagtcctgatatccgaaggcttgggacgctatgcaagggacccaaaatttgtgtcagcaacaaaacacgaaatcgctgatgcctgtgacctcaccatcgacgagatggagagtgcagccagcaccctgcttaatgggaacgtgcgtccccgagccaacggggatgtgggccccctctcacaccggcaggactatgagctacaggactttggtcctggctacagcgacgaagagccagaccctgggagggatgaggaggacctggcggatgaaatgatatgcatcaccaccttgtagcccccagcgaggggcagactggctctggcctcaggtggggcgcaggagagccaggggaaaagtgcctcatagttaggaaagtttaggcactagttgggagtaatattcaattaattagacttttgtataagagatgtcatgcctcaagaaagccataaacctggtaggaacaggtcccaagcggttgagcctggcagagtaccatgcgctcggccccagctgcaggaaacagcaggccccgccctctcacagaggatgggtgaggaggccagacctgccctgccccattgtccagatgggcactgctgtggagtctgcttctcccatgtaccagggcaccaggcccacccaactgaaggcatggcggcggggtgcaggggaaagttaaaggtgatgacgatcatcacacctgtgtcgttacctcagccatcggtctagcatatcagtcactgggcccaacatatccatttttaaaccctttcccccaaatacactgcgtcctggttcctgtttagctgttctgaaatacggtgtgtaagtaagtcagaacccagctaccagtgattattgcgagggcaatgggacctcataaataaggttttctgtgatgtgacgccagtttacataagagaatatcac

SEQ ID NO: 8125 - protein, 2161 aa, Homo sapiens [sequence omitted]

SEQ ID NO: 8126 - DNA, 4056 bp, Rattus norvegicus; identical to SEQ ID NO: 8122
  misc_feature (1)..(4056): n=a, c, g or t
  ref <308>: DATABASE ACCESSION NUMBER: EMBL / U14005
  ref <309>: DATABASE ENTRY DATE: 2000-03-04

SEQ ID NO: 8127 - protein, 2203 aa, Rattus norvegicus; identical to SEQ ID NO: 8123
  ref <308>: DATABASE ACCESSION NUMBER: SWISS-Prot / AAB60515
  ref <309>: DATABASE ENTRY DATE: 2002-06-15

SEQ ID NO: 8128 - DNA, 7635 bp, Homo sapiens; identical to SEQ ID NO: 8124
  ref <308>: DATABASE ACCESSION NUMBER: EMBL / M76558
  ref <309>: DATABASE ENTRY DATE: 2000-03-04

SEQ ID NO: 8129 - protein, 2161 aa, Homo sapiens [sequence omitted]

SEQ ID NO: 8130 - DNA, 2060 bp, Rattus norvegicus
  ref <308>: DATABASE ACCESSION NUMBER: EMBL / U14398
  ref <309>: DATABASE ENTRY DATE: 2000-03-04
gctgcaggaattccctcttactttcaatcagtgaaattgaccttccggtgaagaggctggaatctcccaataagacgagaagacccaacaggaacagggcagggtggcacattgctgatagagagcgcggaccttcctccagcccctcccgctgccgctgccggtccccggatcccccgtgtttcccctggaagccttgtttcagggtccttccaggtgaatctgcctggagttctttcagcacctcggacagagcacgcagaaaacatggctcctatcaccaccagccgcgtggaattcgatgaaattcccacagtggtgggcatcttcagtgcttttggcctggtcttcactgtgtctctctttgcctggatctgctgccagagaagatccgctaagtccaacaagactcctccatacaagtttgtgcacgtgcttaaaggagttgatatctacccagaaaacctaagtagcaaaaagaagtttggaggagatgacaagagtgaagcaaagcgtaaagcagctttgcctaacctttccctgcaccttgatctcgagaagcgagacctcaatggcaatttccccaaaaccaaccccaaagctggcagctcttctgatctggaaaatgtcaccccaaagctctttccggagacggaaaaggaggccgtctcccctgagagcttgaagtccagcacttccctcacttcagaggagaaacaagagaagctgggcactctcttcttgtctctagagtacaacttcgagaagaaagcatttgtggtgaacatcaaggaagcccagggcttaccagccatggatgaacaatccatgacctctgacccatacatcaagatgacaatcttaccagagaagaagcacaaagtgaaaaccagagtgctgaggaagacgctggaccccgtgtttgacgaaaccttcacattctatggggtcccttatccccacatccaagagctgtccctgcacttcaccgtcctgagttttgacaggttctcaagagatgatgtcattggagaagtcctcgttcctctttcagggattgaattgtcagacgggaaaatgttaatgaccagagagatcatcaagagaaatgctaagaagtcttctggacggggtgaacttctggtctccctctgttatcagtccactacaaacacgctcactgtggttgtcttaaaagcgcggcacctaccgaaatctgatgtgtctggactttcagatccctacgtcaaagtgaacctgtaccatgccaagaagagaatctctaaaaagaagactcacgtgaaaaagtgcactcccaacgcagtgttcaacgaactgtttgtctttgatattccttgtgagagtcttgaagaaataagtgttgaatttttagttttggattctgaaaggggatcccgaaatgaggtgatcgggcggttggtcctgggtgccacagcagaaggaagtggtggggggcactggaaggagatctgtgacttccccaggagacaaattgctaagtggcatatgctctgtgatggttagcttcctggccaccagctacaacttaaaggtttttactaggcgagaagcaattttctttcttatacgcgattgtaagcttgtggcccagcaagctactttactatttatttgttttggttagaagtggattaaattagtagaccagaagatagctgtaaatgtgtattatgataatttcctcttttattagaggcgttggccaagttttcataagatactgtttccctctgtgtgtattaagtgggccaaccaagcctgttatgagcattctagcttaacctcaagtcacagatgtgtgttgtgggtgatttcattttttgccttggtagtggaaatcaggtgattgttaagagttaaaagtgggaaaaaaaacaaacctaagctagaatttcagttaggaatacagttgttttttatataaaaatctatcagtgtacaagtgtattttcaagattgtctttccccctcacagtggacatggccacctaagttttttaacttactctttcccaggc

SEQ ID NO: 8131 - protein, 425 aa, Rattus norvegicus
  ref <308>: DATABASE ACCESSION NUMBER: SWISS-Prot / P50232
  ref <309>: DATABASE ENTRY DATE: 2001-10-16
MAPITTSRVEFDEIPTVVGIFSAFGLVFTVSLFAWICCQRRSAKSNKTPPYKFVHVLKGVDIYPENLSSKKKFGGDDKSEAKRKAALPNLSLHLDLEKRDLNGNFPKTNPKAGSSSDLENVTPKLFPETEKEAVSPESLKSSTSLTSEEKQEKLGTLFLSLEYNFEKKAFVVNIKEAQGLPAMDEQSMTSDPYIKMTILPEKKHKVKTRVLRKTLDPVFDETFTFYGVPYPHIQELSLHFTVLSFDRFSRDDVIGEVLVPLSGIELSDGKMLMTREIIKRNAKKSSGRGELLVSLCYQSTTNTLTVVVLKARHLPKSDVSGLSDPYVKVNLYHAKKRISKKKTHVKKCTPNAVFNELFVFDIPCESLEEISVEFLVLDSERGSRNEVIGRLVLGATAEGSGGGHWKEICDFPRRQIAKWHMLCDG

SEQ ID NO: 8132 - DNA, 6471 bp, Homo sapiens
  misc_feature (1)..(6471): n=a, c, g or t
  ref <308>: DATABASE ACCESSION NUMBER: EMBL / X96783
  ref <309>: DATABASE ENTRY DATE: 1997-06-02
ggcccaggcaccggtgggccccggagcgagcctgccccgccgggactccgcgtctgtgcgtcagccccgcccgttgtcctggcaacaacccgttgcccgggcaaccagctttgctcttaccccgcttgagaggagcccggctgttgctctgggcaacgcggtctgctggttcccacgtctgccttcgcccgcttccggttcagaccctgcggaggggcgaggacgaggcagaagtcagcgggatgcctgtggggccgtggaggaagagggtatccctttaggatggaactaggtcctggacaccccctctcaagtgcggggaggctgatactacaactcccagcatgactcgcggtggctgtccggtttctgcgcggctgttcgcgcaaaggcctcatgggagttggagttctttgttgtgcgtggggctcaaaggacgtctggggtgggaatgggggactagggtgcttgagtgtctctgcagaaaagactccaggaccccgccaccatgttcccggagcccccaaccccggggcctccatcgcccgacacgcctcccgactccagtcgcatcagccacggcccaggtgagcaagacccgggggtggggggccgagcagagagaaagcctggccaggattccgaggggcgggattcggacgggtgtactcgggcaggcgggctggaaaatccggctgggatcccgggtcgtcatcctggactggaatgcgaacgaaatggggtaaaaggaaggaacagatttgcaaaaaaaaaaaaaaaaaaaaaaaaaaaaatcgaaaccggatcaaggggtgttgcatggaatgggatcttagaattggaaggtccacctagctcttcttttacagataaggaaacaggcccgatgaggagcagggcttcttgtaaaagcatcaggagttgagcagaaatggggggcggggtcgggtaaggaaaggcagaactaacaagcaagcaaanccagatggtgtcagcctgggttggggcatcgaatctctctataggccacattaggtggaagaaaaacacaggaagaaatgcaatgaaaatggctggagggaaaaggaggccagcattccagcttccacgtgtaatcaggactgaatcagcctgcgtgctgcccaggcctcaatgtgtgttgtctccacccctctgcagtgcccccctgggccctggccaccatcgtnctggtctcaggcctcctcatcttcagctgctgtttctgtctctaccggaagagctgtcggaggcggacaggcaagaagagccaggcccaagcccaggtccaccttcaggaagtgaaggggctgggccagagttacatagacaaggtgtggcccagcccagcccctccacctggccccttcccgcaccctgctcctctcaatggcccagctggtcccagtccctgctcccttctgtcctataggaacccaccttactggctcatcctccctgtgtgtctagccctcaactggactctggggacccagagatggaacagaactagttgctattcccaagaacttcccagtctggtgggagagtcaggcactgacacagacactcaccacacagggtaatatgtgccatactacagggtctcataggagcacagaaaaggcatcccactgtatagaaacctacagaaacatataaatatttggctctgggccgggtgcggtggctcacgcctgtaatcctagcacttgggaggctgaggtggacagattgcctgaggtcatgaattcaagactagcctgggcaacatgatgaaaccctgtctctactaaaaatacaaaagccanccatggtggtgtggtataatcccagctactcgagaggctgaggcactgaaaccgggaggtggaggctgcagtgagctgtgatcgcgccactgcactccagcctgggtgacagagcgagactctgtctccaataaatagataaataaataaatggctctgaaagctgaaaaccagctttgtgccagaatactttaaaatatgctgatttttntcagaaaatgggacatatttacagtaggaaaangtttaaaacagagggtcagacagaggaggcttcgtggtggaggtgacttctgcactgagacctgagggacagagttaactgagaccagagagaaggacattctagtccaagttggagcatgtgtngaggccccatatccagattcaggccccatatccagattcngaggcttatttggggaacaaagagtcatttctcacaatagctgcactctggagtgaagtgtctggagaactcagcagtatccatgtcatgaaggtgatgaaggctacaaatatgttttgagcatgagagggacagggtcagatggtgttaggatgactcctctggaaccctgtgtaggacagatctgcggcgagggatccagggacgaggccagtgcagcagcagcctggagaggataaaagacatttgcattggatgaggccgttggaatggaaagtggtcactgcagggtctgaaaattaagtctctcagtgcagagtgcagtggttgcctgggagccagacagccctaggtttccaaccaagaaggaccatttcctggttgtgtgaccttggagaactcactgtccctctctgagcctcaagtctgtggtcactaacttggtatttcccctccttccttctcaataaggagctgttcaattagcatccgtaaaggatgctatttagggtcctggtgtccagccccatccctgtcccttaaaccagtgatgttcaaagaccgtctgcagcagaatcacactgggtacttgttgaaatgcaaattctggcactagcacctgacctatcaagtcagaatccctgaagaggtgacctcagacattttgccacaggattcaggggaattcaggttcacattgaattttaagaattgctggcctaggttaaggagacaccttctgctttttcattcaactttagaatggcaagtacacagtaaatatgccatttctcctccatgttttgctgtgctaagatcacaagtaaacatggcagtttggactagcaccccagtacatccattagcatgtgaaataaaacctgcattattcctgtgggcaatgggacactatcagcacttgttttaatctaagcatgacaagcacatgtctagttcctgcccatagcagacaccactaatcaaaccttcacaaacatactgcatctgtgttaccacgtctatttcctgcctgtggcagacagcactagtcaaatactgaatctgcttagcctgtgagagctcaggtatagcccaagggacctgtgagcctcccttggcttctgagcctgatggatactgctatcaggggaagacttcacccacccttacccctggctccttaaggtgcagccagaagtagaggagctggagccagcaccatccgggccagggcagcaggtgncagacaagcatgagctaggacgactgcagtactccctggattatgacttccagagtggccaggtgggtgtggaggaaggggaagctttggagggaggatcccgggggttccaaccccttctgaaaggagccatggaagggaggctaagactagtgttccccacctcccccactgtgcctgggccctgcagctgctggtgggcattctgcaagcaatgggattggcagccttggatcttggtggctcctcggacccctatgtgcgggtctacctgctgncggacaaacggaggcggtacgagaccaaggtgcatcggcagacgctgaaccctcactttggggagaccttcgccttcaaggtgagctctgcttcaggccccgtgttccatagcctgtgcccagtccctggaacactagggaccgaccccttccgcttttcctggaggcagccacagctcaggtggcagctaccagctctggggctattccactggaccctgggcactactgactcctgggctgtagcctggtccttgggcggtacgatttgggttccactgacccgtgatttttttccgcatggatccctggactttcccatttgagttcccccaactgttcgcttcgaccctcgctgcctcactccacgccttccttctggttgtgctgtgcctcaccctatctctgacttcctgctctctactgcggattctctgtgcactccaggtnccctacgtggagctggggggcagggtgctggtcatggcggtgtacgacttcgaccgcttctctcgcaatgacgccatcggggaggtgcgggtccctatgagctccgtggacctggggcggccagtgcaggcctggcgggagctgcaggcggctccgcgggaggaggtgagcatgcgcggtcgcgccccgagccacgcccccaggcccagtcccgcccacaacatcctgagccaatcagatcataggctttccagaccctcagggcggcgtggattgtacccctgaggaggcatggatgtggagccggggctctggtgatgggcccctctcctttcagcaggagaagcttggggacatctgcttctccctccgctatgtccccacggccgggaagctcaccgtcatcgtcctggaggctaaaaacctgaagaagatggacgtaggaggactgtcaggtgtgtgggaagcaagggagtggggtgtgaggggatggcgtggggtgggttctcgttctgacagtttctgagcctcgagggtttcttcggggacagggaggacctggctgctgtggaaggcatggattttggcatagagctagggagacccgaagggtgtaggcagtgtttctatgttggtccaacaacccagcagtggggagctataagactcctccttcctctccccagatccatacgtcaaggtccacctgctgcagggcggcaaaaaggtgcggaagaagaaaaccaccatcaagaagaacactctgaacccctattacaacgaagctttcagcttcgaggtgccctgtgaccaagtccaggtgagctcaaacctgcccttctccaagagcccagacctttagtaatcgccattgctaggcggagggagactttttagcatctccctagaaaccaggtgagggggtctgaggttatgctctcagtctgtttcctcctatgaggaccaggaagcctcttccactccaggaagagactccttaaaattgggtgtgggtgtcctatctgctctaagcgggaccgggatgctccacccctaagcggaaccaggatgtcccacccctaagcagtaccagatgctccaccctaagcaggatcagtatgccccgccccaccaagcggaaccaggatgctccgcccccaagcaggaccaggatgccccgcccccaagcaggaccaggatgccccgcccccaagcgggaccaggatgccccactcctaagcgggaccagattccccaccctaagcaggaccaggatgccccgccctcctcaggaacgtggttctaagaaaaagagacctcccctcacttctttagggacggcgcctaccctagcccggcccctgttaaagttctgcagctttgcggctcttaggaggctgctcccccaggaggcgccgaacacacccgctccgcaaccgagtcctgagggttcatttccttagaaacctggctgcgcaggaagaaaggcgccagagcctcctcctcgccgcaggctccgtccctctcgtctcccaccccctcccccgtcccgagctccggggccccgagccctcgggtggcagcgagaggtaccctcagccgtgaaaacggacaccgccccttccggggcctcctcccctcacgctcctctctcctcttcctcccgcgcccaccccagaaggtgcaggtggagctgaccgtgctggactacgacaagctgggcaagaacgaggccatcgggagggtggccgtgggggcggccgccggcggggctggcctgcggcactgggcggacatgctggccaacccgcggcggcccattgcccagtggcactcgctgcggcccccggaccgagtgaggctgctgcctgcgccctgactcccaccccaagcccccggccaagcctggactctagcccctgaccccagactcccgagaccggccaaagccaagccagccccacccttaagcttcctctgacggttaccctccccccaccttccaccccaaccatctgaaccattcctgtcttctcacccccaacgatgccaatcacgacaactttccagcacactcccccgaccctcgcggacacacccagatgccccagggaccccgggaagggaaggcagcctggtttctcctgcccccgggtcctgccccctgctttgacaatcagccatcctcgtctgctctcctctctcttccaacacagcccatccctgcactgctcctgaggccaaataaatattcagcagctc

SEQ ID NO: 8133 - protein, 386 aa, Homo sapiens
  misc_feature (1)..(386): Xaa=Unknown amino acid
  ref <308>: DATABASE ACCESSION NUMBER: SWISS-Prot / O00445
  ref <309>: DATABASE ENTRY DATE: 2002-06-15
MFPEPPTPGPPSPDTPPDSSRISHGPVPPWALATIVLVSGLLIFSCCFCLYRKSCRRRTGKKSQAQAQVHLQEVKGLGQSYIDKVQPEVEELEPAPSGPGQQVXDKHELGRLQYSLDYDFQSGQLLVGILQAMGLAALDLGGSSDPYVRVYLLXDKRRRYETKVHRQTLNPHFGETFAFKVPYVELGGRVLVMAVYDFDRFSRNDAIGEVRVPMSSVDLGRPVQAWRELQAAPREEQEKLGDICFSLRYVPTAGKLTVIVLEAKNLKKMDVGGLSDPYVKVHLLQGGKKVRKKKTTIKKNTLNPYYNEAFSFEVPCDQVQKVQVELTVLDYDKLGKNEAIGRVAVGAAAGGAGLRHWADMLANPRRPIAQWHSLRPPDRVRLLPAP

SEQ ID NO: 8134 - DNA, 2060 bp, Rattus norvegicus; identical to SEQ ID NO: 8130
  ref <308>: DATABASE ACCESSION NUMBER: EMBL / U14398
  ref <309>: DATABASE ENTRY DATE: 2000-03-04

SEQ ID NO: 8135 - protein, 425 aa, Rattus norvegicus; identical to SEQ ID NO: 8131
  ref <308>: DATABASE ACCESSION NUMBER: SWISS-Prot / P50232
  ref <309>: DATABASE ENTRY DATE: 2001-10-16

SEQ ID NO: 8136 - DNA, 6471 bp, Homo sapiens; identical to SEQ ID NO: 8132
  misc_feature (1)..(6471): n=a, c, g or t
  ref <308>: DATABASE ACCESSION NUMBER: EMBL / X96783
  ref <309>: DATABASE ENTRY DATE: 1997-06-02

SEQ ID NO: 8137 - protein, 386 aa, Homo sapiens; identical to SEQ ID NO: 8133
  misc_feature (1)..(386): Xaa=Unknown amino acid
  ref <308>: DATABASE ACCESSION NUMBER: SWISS-Prot / O00445
  ref <309>: DATABASE ENTRY DATE: 2002-06-15

SEQ ID NO: 8138 - DNA, 2060 bp, Rattus norvegicus; identical to SEQ ID NO: 8130
  ref <308>: DATABASE ACCESSION NUMBER: EMBL / U14398
  ref <309>: DATABASE ENTRY DATE: 2000-03-04

SEQ ID NO: 8139 - protein, 425 aa, Rattus norvegicus; identical to SEQ ID NO: 8131
  ref <308>: DATABASE ACCESSION NUMBER: SWISS-Prot / P50232
  ref <309>: DATABASE ENTRY DATE: 2001-10-16

SEQ ID NO: 8140 - DNA, 6471 bp, Homo sapiens; identical to SEQ ID NO: 8132
  misc_feature (1)..(6471): n=a, c, g or t
  ref <308>: DATABASE ACCESSION NUMBER: EMBL / X96783
  ref <309>: DATABASE ENTRY DATE: 1997-06-02

SEQ ID NO: 8141 - protein, 386 aa, Homo sapiens; identical to SEQ ID NO: 8133
  misc_feature (1)..(386): Xaa=Unknown amino acid
  ref <308>: DATABASE ACCESSION NUMBER: SWISS-Prot / O00445
  ref <309>: DATABASE ENTRY DATE: 2002-06-15

SEQ ID NO: 8142 - DNA, 2060 bp, Rattus norvegicus; identical to SEQ ID NO: 8130
  ref <308>: DATABASE ACCESSION NUMBER: EMBL / U14398
  ref <309>: DATABASE ENTRY DATE: 2000-03-04

SEQ ID NO: 8143 - protein, 425 aa, Rattus norvegicus; identical to SEQ ID NO: 8131
  ref <308>: DATABASE ACCESSION NUMBER: SWISS-Prot / P50232
  ref <309>: DATABASE ENTRY DATE: 2001-10-16

SEQ ID NO: 8144 - DNA, 6471 bp, Homo sapiens; identical to SEQ ID NO: 8132
  misc_feature (1)..(6471): n=a, c, g or t
  ref <308>: DATABASE ACCESSION NUMBER: EMBL / X96783
  ref <309>: DATABASE ENTRY DATE: 1997-06-02

SEQ ID NO: 8145 - protein, 386 aa, Homo sapiens; identical to SEQ ID NO: 8133
  misc_feature (1)..(386): Xaa=Unknown amino acid
  ref <308>: DATABASE ACCESSION NUMBER: SWISS-Prot / O00445
  ref <309>: DATABASE ENTRY DATE: 2002-06-15

SEQ ID NO: 8146 - DNA, 2807 bp, Rattus norvegicus
  ref <308>: DATABASE ACCESSION NUMBER: EMBL / U14746
  ref <309>: DATABASE ENTRY DATE: 2000-03-04
ccgcgttaaagccggacggagtacttctattgctggcagacctgccccggagcgcgtaaacccgcacgctcgcgccgcccacgtccagctcgcgaatccggaggcgtccggttccaataatgccccggaaggcagctagtccagaggaggcagaaaggatgccgggctctgaagagatagaggctgggcggccgcggccggttttacgctctgtgaactcgcgcgaaccctctcaggtcatcttctgcaaccgcagcccgcgcgtcgtgctgcctttgtggctcaactttgatggtgagcctcagccctacccgaccttaccaccgggcaccggccgccgcatccacagctaccgaggtcacctttggctcttcagggatgcggggacccatgatggacttctggttaaccaaacggaactgtttgtgccatccctcaatgttgatggacagcctatttttgccaacatcacattgccagtgtataccctgaaagagcggtgccttcaggttgtacggagcctggtcaagcctgagaactacaggaggctggacatcgtcaggtcgctctatgaagacttggaagaccacccaaatgtgcggaaagacatacagcggctgacccaagagcacctcgagaatcaggccctgggagaggagcctgaaggagtccactgagattacttggtcctgaatttcggccttgatggtctgaaatcgatctacacataggacaggtcactttctttcggttttaaaatggttcattcttggagtaaaatatccatcatgtaaaagaaagttaactaacatcactgagctttgtagtgtttaagactaaacctgcaaagtgccaccgagtctgccctttctagagcattcatcagaagaagctgttttcagttttgcttcctagtaaggctggatgttcagcataaggatgttagtgtgagcgattcgcgaggagttgctctgtgtcctctaatctgaagaatacagcctcgtatgaacagagccccaccgctcacttggggaaggctgagaaggccctaatgctgggatggacatcctgtagaggcccagtgcctaatgtgtgtggagtcttcagtcagtgttggaggaacaaaccattgggtacttagtgggagagttggagggcctggctctctgtctgaggaaatcttaagtgtacacgtaaaggaacaacttagcagcttctgtttagaaagaactttctcttgagtttccatgtctcagcactttctttctactttgttagtttattttattttatttttgagacttgtgtagcccaggtcagcctcagtcactccggaggggatgctggtcttgaattccggatcctctgggagtgtgtcagcattgggagcacatgggtcgaccacagtctgctctgttcttgcttttcccattttgagacgggctcatactgtagccctgcctggcctcaagctagagtcagccctgtctccccacccagtctggctgcttagactgggtgggcttcccatattcactgccccagacagcagagacgagctgtccttgtgtttaggtctggttttgagagttccttctctgaggaagctgctggcaggagcagggtttctgttccttcccgtcagcccctagcattccagctgggcgccgcactctgctttggcaggcgctagttatgcttcgatgggagaggggagtgaagctccctcagccacacactccaaaccatgggtcccagagcagtctgcaatgagtagtagtttgtgggcagtcacagcttttcttacatattcaaatattgatgttcactacttctatcaaacattttgtagaacataattttttatttgtttttaattcctcagcagagaaaaatgagagaagcttgggcattgtgtgtggcacacaccagaaaggacagtcagctgagagggtgcagaaaggctcttgtgcgctggctctcagctgcatgtagtcctgtaacccagtgttctctctagtacacattttaattggttaaagcactttgtcctggccgagatcataaggtatatacagttttgtggcctgatttttcattgaacttcattgttttgttttcccctctttttcgtttttggttttgtttttggtttgttttttgctttttgttttatcaagatagagtttctctgtgtagcccaggctgtcctggaactccctttgtagaccaaacaactgattactggcctcaaacggagatctgtctgcctctgcctctccagtgctgggattgaagtatgcctaatcttcatctaacttagtaacttgtcttttccatgttactgcacacactgtctaaattccggtgtgctagcctctccctttgagggtgactgttgggagtatttgtctcagtcctgggctccttgagtgcagtctgatgctctaagatcagcaaaatcactgaacttaatactgacactcctgccgccctctcagcgtctctccttagtctgcagcattccgtgagtgaagcggcacaggccagtgtggagcctgtgtgtgggaagtcagcaggtgccgagctattgcaacattggttttattttttaagcctatctctgtctctaaaagatgtaatgtttgtcttatttaactggaagtttgaatactgttctctgtgccttaggacatgagtcacttgtccttgcacatcctgtaagtgtgttcctcagactttgtactctcctttgagttctctgaaaaagctgacctttagtacaataaacggtgctaagtgaagga

SEQ ID NO: 8147 - protein, 185 aa, Rattus norvegicus
  ref <308>: DATABASE ACCESSION NUMBER: SWISS-Prot / AAA86874
  ref <309>: DATABASE ENTRY DATE: 2001-06-01
MPRKAASPEEAERMPGSEEIEAGRPRPVLRSVNSREPSQVIFCNRSPRVVLPLWLNFDGEPQPYPTLPPGTGRRIHSYRGHLWLFRDAGTHDGLLVNQTELFVPSLNVDGQPIFANITLPVYTLKERCLQVVRSLVKPENYRRLDIVRSLYEDLEDHPNVRKDIQRLTQEHLENQALGEEPEGVH

SEQ ID NO: 8148 - DNA, 1810 bp, Homo sapiens
  ref <308>: DATABASE ACCESSION NUMBER: EMBL / L15409
  ref <309>: DATABASE ENTRY DATE: 2000-03-04
cctcgcctccgttacaacagcctacggtgctggaggatccttctgcgcacgcgcacagcctccggccggctatttccgcgagcgcgttccatcctctaccgagcgcgcgcgaagactacggaggtcgactcgggagcgcgcacgcagctccgccccgcgtccgacccgcggatcccgcggcgtccggcccgggtggtctggatcgcggagggaatgccccggagggcggagaactgggacgaggccgaggtaggcgcggaggaggcaggcgtcgaagagtacggccctgaagaagacggcggggaggagtcgggcgccgaggagtccggcccggaagagtccggcccggaggaactgggcgccgaggaggagatggaggccgggcggccgcggcccgtgctgcgctcggtgaactcgcgcgagccctcccaggtcatcttctgcaatcgcagtccgcgcgtcgtgctgcccgtatggctcaacttcgacggcgagccgcagccctacccaacgctgccgcctggcacgggccgccgcatccacagctaccgaggtcacctttggctcttcagagatgcagggacacacgatgggcttctggttaaccaaactgaattatttgtgccatctctcaatgttgacggacagcctatttttgccaatatcacactgccagtgtatactctgaaagagcgatgcctccaggttgtccggagcctagtcaagcctgagaattacaggagactggacatcgtcaggtcgctctacgaagatctggaagaccacccaaatgtgcagaaagacctggagcggctgacacaggagcgcattgcacatcaacggatgggagattgaagatttctgttgaaacttacactgtttcatctcagcttttgatggtactgatgagtcttgatctagatacaggactggttccttccttagtttcaaagtgtctcattctcagagtaaaataggcaccattgcttaaaagaaagttaactgacttcactaggcattgtgatgtttaggggcaaacatcacaaaatgtaatttaatgcctgcccattagagaagtatttatcaggagaaggtggtggcatttttgcttcctagtaagtcaggacagcttgtatgtaaggaggtttatataagtaattcagtgggaattgcagcatatcgtttaattttaagaaggcattggcatctgcttttaatggatgtataatacatccattctacatccgtagcggttggtgacttgtctgcctcctgctttgggaagactgaggcatccgtgaggcagggacaagtctttctcctctttgagaccccagtgcctgcacatcatgagccttcagtcagggtttgtcagaggaacaaaccaggggacactttgttagaaagtgcttagaggttctgcctctatttttgttggggggtgggagaggggaccttaaaatgtgtacagtgaacaaatgtcttaaagggaatcatttttgtaggaagcattttttataattttctaagtcgtgcactttctcggtccactcttgttgaagtgctgttttattactgtttctaaactaggattgacattctacagttgtgataatagcatttttgtaacttgccatccgcacagaaaatacgagaaaatctgcatgtttgattatagtattaatggacaaataagtttttgctaaatgtgagtatttctgttcctttttgtaaatatgtgacattcctgattgatttgggtttttttgttgttgttgttttgttttgttttgtttttttgggatggagg

SEQ ID NO: 8149 - protein, 213 aa, Homo sapiens
  ref <308>: DATABASE ACCESSION NUMBER: SWISS-Prot / P40337
  ref <309>: DATABASE ENTRY DATE: 2002-06-15
MPRRAENWDEAEVGAEEAGVEEYGPEEDGGEESGAEESGPEESGPEELGAEEEMEAGRPRPVLRSVNSREPSQVIFCNRSPRVVLPVWLNFDGEPQPYPTLPPGTGRRIHSYRGHLWLFRDAGTHDGLLVNQTELFVPSLNVDGQPIFANITLPVYTLKERCLQVVRSLVKPENYRRLDIVRSLYEDLEDHPNVQKDLERLTQERIAHQRMGD

SEQ ID NO: 8150 - DNA, 1856 bp, Rattus norvegicus
  ref <308>: DATABASE ACCESSION NUMBER: EMBL / U15550
  ref <309>: DATABASE ENTRY DATE: 2000-03-04
aattccgagatccctcaactgggaggcttgtccgtgactgaggtcagctgggacagccttacactcaactggaccacagatgatctggcctataagcactttatcattcaggtgcaggaggccaacaatgtagaggctgctcagaacctcacagtatctggtagcctcagagttgtggacatcccaggcctcaaggctgataccccttatagagtctccatctatggggtgatccagggctatagaacaccaatgctctctgctgatgtctccacacgcaaagaacctgaaattggaaacttaaatatttctgatgtaactcctgagagcttcaatctctcctggacagctaccgaccggatcttcgacatgtttactatcgaaattattgattctaataggttgctgcagacagcagaacataatatatctggtgctgaacgaactgcccacatctcgggccttccacctagtactgatttcattgtctacctctctggaattgctcccagcatccgtaccaaaaccatcagtaccacagccaccacagaagctgaaccggaagttgacaaccttctagtttcagatgctactccagacggtttctgtctgtcctggactgctgatgaaggcatattcgacagttttgttatcaggatcagagataccaaaaagcaatctgaaccacaagaaataaccctcccttcccccgaccgtaccagggacataacaggtctcagagaggccactgagtacgaaattgaactctatggaataagccgtggaaggcgatcccagccagtcagtgccatagcaacaacagccatgggctctccgaaggaaatcatgttctcagacatcactgaaaatgcagccacagtcagctggagggcaccgactgctcaggtggagagtttccggattacttatgtgcctgtaacaggaggtcccccatccatggtgaccgtggatgggacggatactgagacccgactggtgaggctcacccctggagtggagtaccacgtcagtgtgattgccatgaagggatttgaagaaagtgatccggtctcggggtctctaatcacagctctcgatggtccatctggccttctgacagccaacatcacagactcagaagccttggccatgtggcagccggccattgccactgtggacagttatgtcatctcctacacaggggagagagtgccagaaattacccgcacagtgtctgggaatacagtggagttggaactacatgacctggagcctgccacagagtacacactgagtgtctttgcagagaaaggtcaccagaagagttctaccactgctacgaaatttaccacagacctggattccccaagagaattgactgctactgaggttcagtcagaaactgccttcctcacctggagacctccccgggcatcggtcactggatacctcctggtctatgagtctgtggatggtacagtcaaggaagtcattgtggggcctgacaccacctcctacagcctggcagacctgagcccatccacccactacacagcaagaatccaggcattgagtgggtccctgaggagcaaactgatccaaaccatcttcaccacaattggactcctatatccattccctagggattgctctcaagcaatgttgaatggcgacaccacctctggcctctataccatctatataaatggtgacaagactcaagcactggaagtctactgcgatatgacctctgatggaggtggatggatcgttttcctgagacgcaaaaatggacgtgaggacttctatcgaaactggaaggcctatgccactgggtttggagaccgcagagaagg

SEQ ID NO: 8151 - protein, 619 aa, Rattus norvegicus
  ref <308>: DATABASE ACCESSION NUMBER: SWISS-Prot / AAA50761
  ref <309>: DATABASE ENTRY DATE: 2003-02-01
NSEIPQLGGLSVTEVSWDSLTLNWTTDDLAYKHFIIQVQEANNVEAAQNLTVSGSLRVVDIPGLKADTPYRVSIYGVIQGYRTPMLSADVSTRKEPEIGNLNISDVTPESFNLSWTATDRIFDMFTIEIIDSNRLLQTAEHNISGAERTAHISGLPPSTDFIVYLSGIAPSIRTKTISTTATTEAEPEVDNLLVSDATPDGFCLSWTADEGIFDSFVIRIRDTKKQSEPQEITLPSPDRTRDITGLREATEYEIELYGISRGRRSQPVSAIATTAMGSPKEIMFSDITENAATVSWRAPTAQVESFRITYVPVTGGPPSMVTVDGTDTETRLVRLTPGVEYHVSVIAMKGFEESDPVSGSLITALDGPSGLLTANITDSEALAMWQPAIATVDSYVISYTGERVPEITRTVSGNTVELELHDLEPATEYTLSVFAEKGHQKSSTTATKFTTDLDSPRELTATEVQSETAFLTWRPPRASVTGYLLVYESVDGTVKEVIVGPDTTSYSLADLSPSTHYTARIQALSGSLRSKLIQTIFTTIGLLYPFPRDCSQAMLNGDTTSGLYTIYINGDKTQALEVYCDMTSDGGGWIVFLRRKNGREDFYRNWKAYATGFGDRREG

SEQ ID NO: 8152 - DNA, 7286 bp, Homo sapiens
  ref <308>: DATABASE ACCESSION NUMBER: EMBL / X56160
  ref <309>: DATABASE ENTRY DATE: 1998-06-04
gaattcgctagagccctagagccccagcagcacccagccaaacccacctccaccatgggggccatgactcagctgttggcaggtgtctttcttgctttccttgccctcgctaccgaaggtggggtcctcaagaaagtcatccggcacaagcgacagagtggggtgaacgccaccctgccagaagagaaccagccagtggtgtttaaccacgtttacaacatcaagctgccagtgggatcccagtgttcggtggatctggagtcagccagtggggagaaagacctggcaccgccttcagagcccagcgaaagctttcaggagcacacagtagatggggaaaaccagattgtcttcacacatcgcatcaacatcccccgccgggcctgtggctgtgccgcagcccctgatgttaaggagctgctgagcagactggaggagctggagaacctggtgtcttccctgagggagcaatgtactgcaggagcaggctgctgtctccagcctgccacaggccgcttggacaccaggcccttctgtagcggtcggggcaacttcagcactgaaggatgtggctgtgtctgcgaacctggctggaaaggccccaactgctctgagcccgaatgtccaggcaactgtcaccttcgaggccggtgcattgatgggcagtgcatctgtgacgacggcttcacgggcgaggactgcagccagctggcttgccccagcgactgcaatgaccagggcaagtgcgtgaatggagtctgcatctgtttcgaaggctacgcggctgactgcagccgtgaaatctgcccagtgccctgcagtgaggagcacggcacatgtgtagatggcttgtgtgtgtgccacgatggctttgcaggcgatgactgcaacaagcctctgtgtctcaacaattgctacaaccgtggacgatgcgtggagaatgagtgcgtgtgtgatgagggtttcacgggcgaagactgcagtgagctcatctgccccaatgactgcttcgaccggggccgctgcatcaatggcacctgctactgcgaagaaggcttcacaggtgaagactgcgggaaacccacctgcccacatgcctgccacacccagggccggtgtgaggaggggcagtgtgtatgtgatgagggctttgccggtgtggactgcagcgagaagaggtgtcctgctgactgtcacaatcgtggccgctgtgtagacgggcggtgtgagtgtgatgatggtttcactggagctgactgtggggagctcaagtgtcccaatggctgcagtggccatggccgctgtgtcaatgggcagtgtgtgtgtgatgagggctatactggggaggactgcagccagctacggtgccccaatgactgtcacagtcggggccgctgtgtcgagggcaaatgtgtatgtgagcaaggcttcaagggctatgactgcagtgacatgagctgccctaatgactgtcaccagcacggccgctgtgtgaatggcatgtgtgtttgtgatgacggctacacaggggaagactgccgggatcgccaatgccccagggactgcagcaacaggggcctctgtgtggacggacagtgcgtctgtgaggacggcttcaccggccctgactgtgcagaactctcctgtccaaatgactgccatggccagggtcgctgtgtgaatgggcagtgcgtgtgccatgaaggatttatgggcaaagactgcaaggagcaaagatgtcccagtgactgtcatggccagggccgctgcgtggacggccagtgcatctgccacgagggcttcacaggcctggactgtggccagcactcctgccccagtgactgcaacaacttaggacaatgcgtctcgggccgctgcatctgcaacgagggctacagcggagaagactgctcagaggtgtctcctcccaaagacctcgttgtgacagaagtgacggaagagacggtcaacctggcctgggacaatgagatgcgggtcacagagtaccttgtcgtgtacacgcccacccacgagggtggtctggaaatgcagttccgtgtgcctggggaccagacgtccaccatcatccgggagctggagcctggtgtggagtactttatccgtgtatttgccatcctggagaacaagaagagcattcctgtcagcgccagggtggccacgtacttacctgcacctgaaggcctgaaattcaagtccatcaaggagacatctgtggaagtggagtgggatcctctagacattgcttttgaaacctgggagatcatcttccggaatatgaataaagaagatgagggagagatcaccaaaagcctgaggaggccagagacctcttaccggcaaactggtctagctcctgggcaagagtatgagatatctctgcacatagtgaaaaacaatacccggggccctggcctgaagagggtgaccaccacacgcttggatgcccccagccagatcgaggtgaaagatgtcacagacaccactgccttgatcacctggttcaagcccctggctgagatcgatggcattgagctgacctacggcatcaaagacgtgccaggagaccgtaccaccatcgatctcacagaggacgagaaccagtactccatcgggaacctgaagcctgacactgagtacgaggtgtccctcatctcccgcagaggtgacatgtcaagcaacccagccaaagagaccttcacaacaggcctcgatgctcccaggaatcttcgacgtgtttcccagacagataacagcatcaccctggaatggaggaatggcaaggcagctattgacagttacagaattaagtatgcccccatctctggaggggaccacgctgaggttgatgttccaaagagccaacaagccacaaccaaaaccacactcacaggtctgaggccgggaactgaatatgggattggagtttctgctgtgaaggaagacaaggagagcaatccagcgaccatcaacgcagccacagagttggacacgcccaaggaccttcaggtttctgaaactgcagagaccagcctgaccctgctctggaagacaccgttggccaaatttgaccgctaccgcctcaattacagtctccccacaggccagtgggtgggagtgcagcttccaagaaacaccacttcctatgtcctgagaggcctggaaccaggacaggagtacaatgtcctcctgacagccgagaaaggcagacacaagagcaagcccgcacgtgtgaaggcatccactgaacaagcccctgagctggaaaacctcaccgtgactgaggttggctgggatggcctcagactcaactggaccgcggctgaccaggcctatgagcactttatcattcaggtgcaggaggccaacaaggtggaggcagctcggaacctcaccgtgcctggcagccttcgggctgtggacataccgggcctcaaggctgctacgccttatacagtctccatctatggggtgatccagggctatagaacaccagtgctctctgctgaggcctccacaggggaaactcccaatttgggagaggtcgtggtggccgaggtgggctgggatgccctcaaactcaactggactgctccagaaggggcctatgagtactttttcattcaggtgcaggaggctgacacagtagaggcagcccagaacctcaccgtcccaggaggactgaggtccacagacctgcctgggctcaaagcagccactcattataccatcaccatccgcggggtcactcaggacttcagcacaacccctctctctgttgaagtcttgacagaggaggttccagatatgggaaacctcacagtgaccgaggttagctgggatgctctcagactgaactggaccacgccagatggaacctatgaccagtttactattcaggtccaggaggctgaccaggtggaagaggctcacaatctcacggttcctggcagcctgcgttccatggaaatcccaggcctcagggctggcactccttacacagtcaccctgcacggcgaggtcaggggccacagcactcgaccccttgctgtagaggtcgtcacagaggatctcccacagctgggagatttagccgtgtctgaggttggctgggatggcctcagactcaactggaccgcagctgacaatgcctatgagcactttgtcattcaggtgcaggaggtcaacaaagtggaggcagcccagaacctcacgttgcctggcagcctcagggctgtggacatcccgggcctcgaggctgccacgccttatagagtctccatctatggggtgatccggggctatagaacaccagtactctctgctgaggcctccacagccaaagaacctgaaattggaaacttaaatgtttctgacataactcccgagagcttcaatctctcctggatggctaccgatgggatcttcgagacctttaccattgaaattattgattccaataggttgctggagactgtggaatataatatctctggtgctgaacgaactgcccatatctcagggctaccccctagtactgattttattgtctacctctctggacttgctcccagcatccggaccaaaaccatcagtgccacagccacgacagaggccctgccccttctggaaaacctaaccatttccgacattaatccctacgggttcacagtttcctggatggcatcggagaatgcctttgacagctttctagtaacggtggtggattctgggaagctgctggacccccaggaattcacactttcaggaacccagaggaagctggagcttagaggcctcataactggcattggctatgaggttatggtctctggcttcacccaagggcatcaaaccaagcccttgagggctgagattgttacagaagccgaaccggaagttgacaaccttctggtttcagatgccaccccagacggtttccgtctgtcctggacagctgatgaaggggtcttcgacaattttgttctcaaaatcagagataccaaaaagcagtctgagccactggaaataaccctacttgcccccgaacgtaccagggacataacaggtctcagagaggctactgaatacgaaattgaactctatggaataagcaaaggaaggcgatcccagacagtcagtgctatagcaacaacagccatgggctccccaaaggaagtcattttctcagacatcactgaaaattcggctactgtcagctggagggcacccacggcccaagtggagagcttccggattacctatgtgcccattacaggaggtacaccctccatggtaactgtggacggaaccaagactcagaccaggctggtgaaactcatacctggcgtggagtaccttgtcagcatcatcgccatgaagggctttgaggaaagtgaacctgtctcagggtcattcaccacagctctggatggcccatctggcctggtgacagccaacatcactgactcagaagccttggccaggtggcagccagccattgccactgtggacagttatgtcatctcctacacaggcgagaaagtgccagaaattacacgcacggtgtccgggaacacagtggagtatgctctgaccgacctcgagcctgccacggaatacacactgagaatctttgcagagaaagggccccagaagagctcaaccatcactgccaagttcacaacagacctcgattctccaagagacttgactgctactgaggttcagtcggaaactgccctccttacctggcgacccccccgggcatcagtcaccggttacctgctggtctatgaatcagtggatggcacagtcaaggaagtcattgtgggtccagataccacctcctacagcctggcagacctgagcccatccacccactacacagccaagatccaggcactcaatgggcccctgaggagcaatatgatccagaccatcttcaccacaattggactcctgtaccccttccccaaggactgctcccaagcaatgctgaatggagacacgacctctggcctctacaccatttatctgaatggtgataaggctcaggcgctggaagtcttctgtgacatgacctctgatgggggtggatggattgtgttcctgagacgcaaaaacggacgcgagaacttctaccaaaactggaaggcatatgctgctggatttggggaccgcagagaagaattctggcttgggctggacaacctgaacaaaatcacagcccaggggcagtacgagctccgggtggacctgcgggaccatggggagacagcctttgctgtctatgacaagttcagcgtgggagatgccaagactcgctacaagctgaaggtggaggggtacagtgggacagcaggtgactccatggcctaccacaatggcagatccttctccacctttgacaaggacacagattcagccatcaccaactgtgctctgtctacaaggggcttctggtacaggaactgtcaccgtgtcaacctgatggggagatatggggacaataaccacagtcagggcgttaactggttccactggaagggccacgaacactcaatccagtttgctgagatgaagctgagaccaagcaacttcagaaatcttgaaggcaggcgcaaacgggcataaattggagggaccactgggtgagagaggaataaggcggcccagagcgaggaaaggattttaccaaagcatcaatacaaccagcccaaccatcggtccacacctgggcatttggtgagaatcaaagctgaccatggatccctggggccaacggcaacagcatgggcctcacctcctctgtgatttctttctttgcaccaaagacatcagtctccaacatgtttctgttttgttgtttgattcagcaaaaatctcccagtgacaacatcgcaatagttttttacttctcttaggtggctctgggatgggagaggggtaggatgtacaggggtagtttgttttagaaccagccgtattttacatgaagctgtataattaattgtcattatttttgttagcaaagattaaatgtgtcattggaagccatccctttttttacatttcatacaacagaaaccagaaaagcaatactgtttccattttaaggatatgattaatattattaatataataatgatgatgatgatgatgaaaactaaggatttttcaagagatctttctttccaaaacatttctggacagtacctgattgtattttttttttaaataaaagcacaagtacttttgaaaaaaaa

SEQ ID NO: 8153 - protein, 2201 aa, Homo sapiens
  ref <308>: DATABASE ACCESSION NUMBER: SWISS-Prot / P24821
  ref <309>: DATABASE ENTRY DATE: 2002-06-15
MGAMTQLLAGVFLAFLALATEGGVLKKVIRHKRQSGVNATLPEENQPVVFNHVYNIKLPVGSQCSVDLESASGEKDLAPPSEPSESFQEHTVDGENQIVFTHRINIPRRACGCAAAPDVKELLSRLEELENLVSSLREQCTAGAGCCLQPATGRLDTRPFCSGRGNFSTEGCGCVCEPGWKGPNCSEPECPGNCHLRGRCIDGQCICDDGFTGEDCSQLACPSDCNDQGKCVNGVCICFEGYAGADCSREICPVPCSEEHGTCVDGLCVCHDGFAGDDCNKPLCLNNCYNRGRCVENECVCDEGFTGEDCSELICPNDCFDRGRCINGTCYCEEGFTGEDCGKPTCPHACHTQGRCEEGQCVCDEGFAGLDCSEKRCPADCHNRGRCVDGRCECDDGFTGADCGELKCPNGCSGHGRCVNGQCVCDEGYTGEDCSQLRCPNDCHSRGRCVEGKCVCEQGFKGYDCSDMSCPNDCHQHGRCVNGMCVCDDGYTGEDCRDRQCPRDCSNRGLCVDGQCVCEDGFTGPDCAELSCPNDCHGQGRCVNGQCVCHEGFMGKDCKEQRCPSDCHGQGRCVDGQCICHEGFTGLDCGQHSCPSDCNNLGQCVSGRCICNEGYSGEDCSEVSPPKDLVVTEVTEETVNLAWDNEMRVTEYLVVYTPTHEGGLEMQFRVPGDQTSTIIQELEPGVEYFIRVFAILENKKSIPVSARVATYLPAPEGLKFKSIKETSVEVEWDPLDIAFETWEIIFRNMNKEDEGEITKSLRRPETSYRQTGLAPGQEYEISLHIVKNNTRGPGLKRVTTTRLDAPSQIEVKDVTDTTALITWFKPLAEIDGIELTYGIKDVPGDRTTIDLTEDENQYSIGNLKPDTEYEVSLISRRGDMSSNPAKETFTTGLDAPRNLRRVSQTDNSITLEWRNGKAAIDSYRIKYAPISGGDHAEVDVPKSQQATTKTTLTGLRPGTEYGIGVSAVKEDKESNPATINAATELDTPKDLQVSETAETSLTLLWKTPLAKFDRYRLNYSLPTGQWVGVQLPRNTTSYVLRGLEPGQEYNVLLTAEKGRHKSKPARVKASTEQAPELENLTVTEVGWDGLRLNWTAADQAYEHFIIQVQEANKVEAARNLTVPGSLRAVDIPGLKAATPYTVSIYGVIQGYRTPVLSAEASTGETPNLGEVVVAEVGWDALKLNWTAPEGAYEYFFIQVQEADTVEAAQNLTVPGGLRSTDLPGLKAATHYTITIRGVTQDFSTTPLSVEVLTEEVPDMGNLTVTEVSWDALRLNWTTPDGTYDQFTIQVQEADQVEEAHNLTVPGSLRSMEIPGLRAGTPYTVTLHGEVRGHSTRPLAVEVVTEDLPQLGDLAVSEVGWDGLRLNWTAADNAYEHFVIQVQEVNKVEAAQNLTLPGSLRAVDIPGLEAATPYRVSIYGVIRGYRTPVLSAEASTAKEPEIGNLNVSDITPESFNLSWMATDGIFETFTIEIIDSNRLLETVEYNISGAERTAHISGLPPSTDFIVYLSGLAPSIRTKTISATATTEALPLLENLTISDINPYGFTVSWMASENAFDSFLVTVVDSGKLLDPQEFTLSGTQRKLELRGLITGIGYEVMVSGFTQGHQTKPLRAEIVTEAEPEVDNLLVSDATPDGFRLSWTADEGVFDNFVLKIRDTKKQSEPLEITLLAPERTRDLTGLREATEYEIELYGISKGRRSQTVSAIATTAMGSPKEVIFSDITENSATVSWRAPTAQVESFRITYVPITGGTPSMVTVDGTKTQTRLVKLIPGVEYLVSIIAMKGFEESEPVSGSFTTALDGPSGLVTANITDSEALARWQPAIATVDSYVISYTGEKVPEITRTVSGNTVEYALTDLEPATEYTLRIFAEKGPQKSSTITAKFTTDLDSPRDLTATEVQSETALLTWRPPRASVTGYLLVYESVDGTVKEVIVGPDTTSYSLADLSPSTHYTAKIQALNGPLRSNMIQTIFTTIGLLYPFPKDCSQAMLNGDTTSGLYTIYLNGDKAQALEVFCDMTSDGGGWIVFLRRKNGRENFYQNWKAYAAGFGDRREEFWLGLDNLNKITAQGQYELRVDLRDHGETAFAVYDKFSVGDAKTRYKLKVEGYSGTAGDSMAYHNGRSFSTFDKDTDSAITNCALSYKGAFWYRNCHRVNLMGRYGDNNHSQGVNWFHWKGHEHSIQFAEMKLRPSNFRNLEGRRKRA

SEQ ID NO: 8154 - DNA, 2019 bp, Rattus norvegicus
  ref <308>: DATABASE ACCESSION NUMBER: EMBL / U15734
  ref <309>: DATABASE ENTRY DATE: 2000-03-04
cgctccgccgacgcgacagaggggcggcgtgcatgtggggaacgcagtagtcgccagacttcaggctgtgactgtggcgccccggccgtcgccaccgcagccgctgacgccccccgctccccacatgcagcgccgcccctctgtggcctccggtgaagcaaggctgccaagcccgggctccgcctgcctccctcctcgcggctttccgcgtcctcggcgggcgggcgcgatgcggctgggcccaaggcccgcggtgctggggctgctgctgctgctgtacgccgcggtggccggcgccagcaaggcggaggagctgcattacccgcagggcgagcaccgggcggactacgaccgcgaagcgctgctaggtgtccaggaagacgtcgacgagtatgttaaacttggccacgaagagcagcaaagacgattgcagtcgatcataaagaaaattgactcggactctgatggctttctcactgaaaatgaactcagtcagtggattcagatgtcgtttaagcattacgccatgcaagaagccaagcagcagtttgtggagtatgacaagaacagcgacggcactgtgacgtgggatgagtacaacgtccagatgtatgaccgcgtgattgactttgacgagaacactgctctggatgacaccgaggaggagtcctttaggcagctccatctaaaggataagaagcgatttgaaaaagctaaccaggattctggccctggtctgaatcttgaagagtttattgcatttgaacacccagaagaagttgactatatgacggagttcgtcattcaggaggctttggaagagcatgacaaaaatggtgatgggtttgttagtctggaagaatttcttggcgattacaggcgggatccaactgcaaatgaagacccagaatggatacttgttgaaaaggacagatttgtgaatgattatgacaaagacagcgatggccgccttgatccccaagagctgttgtcctgggtggtgcccaataaccagggcattgcccaagaggaagctcttcatctgattgatgagatggatttgaatagtgacaaaaagctctcggaagaagagattctggaaaaccaagacttgtttctcaccagcgaagccacggattatggcagacagctccacgatgactatttctatcacgatgagctttaaagcaggaagggccttttgtagtttgctaccagctttacatttatgataaaatatggatgttgtgttttacactcctaagtcttaccacatcagatgacctaaacatagattataacttttggccttttagaagaaaaacaagaacttgtcatttatttcaagacgtattgaaggagtaaacattgatattgtgccatatgaccacacagtctctcctaagtactccatctatgtagtgctgtgttgtggaatgtttgagccctgtttccatacttgaagacatggaggactttaaacatgtctgaacaatagtatttaagtagcacgtgatgaagctgtcagttttcgttcttgtactcgtagacttccttttgaaactgacgaaggacagtgtgtttagctttagtgttatatcttaaaacctttaaaggaaccttcagaaggacttaaacctcacatagatgtcgagaaggttctactaatttaaaatggtttctaaaaagggttttgttgtatgaaatagaactttatatttttgcatatgtataaatagtaattatatttaatgtataacaatagcattatggtgagtgggaattgacattgtccagaactcttcaattttgattgattaaaaataaactgtcctatctttttatatgtttgggttttttttaatttttccagataaatcttaaattcagcatgggtttcattatattcaacattattcattcctttattaggtagtgaatgttcttgagattgttaattattgttggtacatagtcttacttgcctttttttttttaaataaaaagaattatgctata

SEQ ID NO: 8155 - protein, 318 aa, Rattus norvegicus
  ref <308>: DATABASE ACCESSION NUMBER: SWISS-Prot / Q62703
  ref <309>: DATABASE ENTRY DATE: 2000-05-30
MRLGPRPAVLGLLLLLYAAVAGASKAEELHYPQGEHRADYDREALLGVQEDVDEYVKLGHEEQQRRLQSIIKKIDSDSDGFLTENELSQWIQMSFKHYAMQEAKQQFVEYDKNSDGTVTWDEYNVQMYDRVIDFDENTALDDTEEESFRQLHLKDKKRFEKANQDSGPGLNLEEFIAFEHPEEVDYMTEFVIQEALEEHDKNGDGFVSLEEFLGDYRRDPTANEDPEWILVEKDRFVNDYDKDSDGRLDPQELLSWVVPNNQGIAQEEALHLIDEMDLNSDKKLSEEEILENQDLFLTSEATDYGRQLHDDYFYHDEL

SEQ ID NO: 8156 - DNA, 1700 bp, Homo sapiens
  ref <308>: DATABASE ACCESSION NUMBER: EMBL / X78669
  ref <309>: DATABASE ENTRY DATE: 1994-09-27
gcagccgcccgggcccccgccagcctccctcctcgcgtccctcggtgtcctccgcgggccggcgcgatgcggctgggcccgaggaccgcggcgttggggctgctgctgctgtgcgccgccgcggccggcgccggcaaggccgaggagctgcactacccgctgggcgagcgccgcagcgactacgaccgcgaggcgctgctgggcgtccaggaagatgtggatgaatatgttaaactcggccacgaagagcagcaaaaaagactgcaggcgatcataaagaaaatcgacttggactcagatggctttctcactgaaagtgaactcagttcatggattcagatgtcttttaagcattatgctatgcaagaagcaaaacaacagtttgttgaatatgataaaaacagtgatgatactgtgacttgggatgaatataacattcagatgtatgatcgtgtgattgactttgatgagaacactgctctggatgatgcagaagaggagtcctttaggaagcttcacttaaaggacaagaagcgatttgaaaaagctaaccaggattcaggtcccggtttgagtcttgaagaatttattgcttttgagcatcctgaagaagttgattatatgacggaatttgtcattcaagaagctttagaagaacatgacaaaaatggtgatggatttgttagtttggaagaatttcttggtgattacaggtgggatccaactgcaaatgaagatccagaatggatacttgttgagaaagacagattcgtgaatgattatgacaaagataacgatggcaggcttgatccccaagagctgttaccttgggtagtacctaataatcagggcattgcacaagaggaggcgcttcatctaattgatgaaatggatttgaatggtgacaaaaagctctctgaagaagagattctggaaaacccggacttgtttctcaccagtgaagccacagattatggcagacagctccatgatgactatttctatcatgatgagctttaatctccgagcctgtctcagtagagtactggctccttttataatttgttaccagctttacttttgtgataaaatattgatgttgtattttacactcttaagtcttaaccacagtcagaattatcttaatgtagaattataattttggctcttttaggaaaaaacaaaatctgatatttttccaaacgtattgagcaacaaaatattaatattgtgccatatgacaacaaagtctttcctaaatactccatctgtttagtactgtattgtggaatatttgagttctatttccagacttgaaaacatggaggattttagagatgcctgaacaatattatttaagtagtatgtgaccgagctataaattttttgtttttgttctaagtagatttaatttgggaactgacaggacaatgtttttaggtttagcattttgtttaaaaacctttaaagaaacctttagaaggacttagacctcacatattaatgttgagaagttctgcttaattttaaaatggtttctataaagggttttattgtatgaaatagaactttatatttttgcatatgtatagaggataattatatttaatgtataactatagcattatggtgagtggaatttgacattgtccaaacctttttcatttttgagtgattaaaaatgaaatgtcctttgtaaa

SEQ ID NO: 8157 - protein, 317 aa, Homo sapiens
  ref <308>: DATABASE ACCESSION NUMBER: SWISS-Prot / Q14257
  ref <309>: DATABASE ENTRY DATE: 1998-07-15
MRLGPRTAALGLLLLCAAAAGAGKAEELHYPLGERRSDYDREALLGVQEDVDEYVKLGHEEQQKRLQAIIKKIDLDSDGFLTESELSSWIQMSFKHYAMQEAKQQFVEYDKNSDDTVTWDEYNIQMYDRVIDFDENTALDDAEEESFRKLHLKDKKRFEKANQDSGPGLSLEEFIAFEHPEEVDYMTEFVIQEALEEHDKNGDGFVSLEEFLGDYRWDPTANEDPEWILVEKDRFVNDYDKDNDGRLDPQELLPWVVPNNQGIAQEEALHLIDEMDLNGDKKLSEEEILENPDLFLTSEATDYGRQLHDDYFYHDEL

SEQ ID NO: 8158 - DNA, 1426 bp, Rattus norvegicus
  ref <308>: DATABASE ACCESSION NUMBER: EMBL / U16245
  ref <309>: DATABASE ENTRY DATE: 2000-03-04
ggcacgaggcaccgcgcgcagagccccgcagacagacgcccgccgctaccagcgccgccccgacggccgccccgcaaccctcccgctgccaccgggcccccaaggcaccatgaaaaaggaggtgtgctcccttgccttcttcaaggcggtgttcgcagagttcctggccaccctcatcttcgtcttctttggcctgggctcagcactcaagtggccctcggctctgcccaccattctgcaaatctcaattgcctttggcctggccataggtaccttagcccaagctctgggacctgtgagtggtggccacatcaatccagccattactctggccctcttaataggaaaccagatctcgctgctccgagctgtcttctacgtggcagcccagctggtgggcgccattgctggggcaggcatcctgtactggctggcgccactcaatgcccggggtaacctggccgtcaatgcgctgaacaacaacacaacgcctggcaaggccatggtggtggagttaatcttgactttccagctagccctctgcatcttctcctccaccgactctcgccgaaccagccctgtgggctccccagccttatccattggcttgtctgtcacactgggccatcttgtggggatctacttcaccggctgttccatgaacccagcccgatctttcggccctgcggtggtcatgaaccggttcagcccctctcactgggtcttctgggtagggcctattgtgggggccatgctggcggccatcctctatttctacctgctcttcccctcctctctgagcctccatgatcgcgtggctgtcgtcaaaggcacatatgagccggaggaggactgggaagatcatcgagaggagaggaagaagaccatcgagctgacggcacactgactggtgccggacaggggccagtccctcagcccctggaccactggagaaaaggaagacgaagagtttgaagcacccctccccaacatcctctcagctggggaagaggcattggatccccatgctgctgcacagggacaggagcagaagcccataatgggacacttgggtgtgggccaagggctggagtctgacagggtcagggacatagccgctttggaatcaggcagaatgtctgccacagctcagacctcagagattcgtgaatgcggtgccaagctcacaggcggtccaggaccacaccagaaagggacgacagcttgcttatctctcccaacccagtatctcaagtgccaaagccggcccccaggtggacagaggggacatttcccccagagctcttcaggagagggatagatggctcacggagtgctattttatttatttctggtcaaggatgggggtggggtggggctgctggtgtttgagctggcgcttcccaataaaccacctatcttcaaa

SEQ ID NO: 8159 - protein, 265 aa, Rattus norvegicus
  ref <308>: DATABASE ACCESSION NUMBER: SWISS-Prot / P47864
  ref <309>: DATABASE ENTRY DATE: 1996-10-01
MKKEVCSLAFFKAVFAEFLATLIFVFFGLGSALKWPSALPTILQISIAFGLAIGTLAQALGPVSGGHINPAITLALLIGNQISLLRAVFYVAAQLVGAIAGAGILYWLAPLNARGNLAVNALNNNTTPGKAMVVELILTFQLALCIFSSTDSRRTSPVGSPALSIGLSVTLGHLVGIYFTGCSMNPARSFGPAVVMNRFSPSHWVFWVGPIVGAMLAAILYFYLLFPSSLSLHDRVAVVKGTYEPEEDWEDHREERKKTIELTAH

SEQ ID NO: 8160 - DNA, 1316 bp, Homo sapiens
  ref <308>: DATABASE ACCESSION NUMBER: Refseq / NM_001651
  ref <309>: DATABASE ENTRY DATE: 2000-10-31
agctagacgccccgaggtcggagtgaagcgccgggaccgagccccgtctcccagggagtccggggcgcacggcaccgaggagagcgcgggagccaacctgggcgcatcatgcgcagggcccgggacgctgggccggtctacaccgccgcctgggtcacgtggcccggacgggccggcggctgccccggccggggggcgggggtcgcgccggggttgcgctggacgacggagagcggcgggcccgcagcggcctggagcctcccaacccgcgccgcgctggccctcgagcgtaggagccgccccctgcccccccgcgccggccccgcgcccggccgcccgccccctatatagcgcgccccagcagggcccgcgccaggccgccagcctcggagtgggcgcgggacagtgcgcggcgccccgcagccaggcccccgcccccgccgcatccacctcctccgccgcctgcgacccaacgggcgccccccgccggcagctcgcgccgggcccccgcggccaccatgaagaaggaggtgtgctccgtggccttcctcaaggccgtgttcgcagagttcttggccaccctcatcttcgtcttctttggcctgggctcggccctcaagtggccgtcggcgctgcctaccatcctgcagatcgcgctggcgtttggcctggccataggcacgctggcccaggccctgggacccgtgagcggcggccacatcaaccccgccatcaccctggccctcttggtgggcaaccagatctcgctgctccgggctttcttctacgtggcggcccagctggtgggcgccattgccggggctggcatcctctacggtgtggcaccgctcaatgcccggggcaatctggccgtcaacgcgctcaacaacaacacaacgcagggccaggccatggtggtggagctgattctgaccttccagctggcactctgcatcttcgcctccactgactcccgccgcaccagccctgtgggctccccagccctgtccattggcctgtctgtcaccctgggccaccttgtcggaatctacttcactggctgctccatgaacccagcccgctcttttggccctgcggtggtcatgaatcggttcagccccgctcactgggttttctgggtagggcccatcgtgggggcggtcctggctgccatcctttacttctacctgctcttccccaactccctgagcctgagtgagcgtgtggccatcatcaaaggcacgtatgagcctgacgaggactgggaggagcagcgggaagagcggaagaagaccatggagctgaccacccgctga

SEQ ID NO: 8161 - protein, 265 aa, Homo sapiens
  ref <308>: DATABASE ACCESSION NUMBER: Refseq / NP_001642
  ref <309>: DATABASE ENTRY DATE: 2000-10-31
MKKEVCSVAFLKAVFAEFLATLIFVFFGLGSALKWPSALPTILQIALAFGLAIGTLAQALGPVSGGHINPAITLALLVGNQISLLRAFFYVAAQLVGAIAGAGILYGVAPLNARGNLAVNALNNNTTQGQAMVVELILTFQLALCIFASTDSRRTSPVGSPALSIGLSVTLGHLVGIYFTGCSMNPARSFGPAVVMNRFSPAHWVFWVGPIVGAVLAAILYFYLLFPNSLSLSERVAIIKGTYEPDEDWEEQREERKKTMELTTR

SEQ ID NO: 8162 - DNA, 2696 bp, Rattus norvegicus
  ref <308>: DATABASE ACCESSION NUMBER: EMBL / U16655
  ref <309>: DATABASE ENTRY DATE: 2000-03-04
gaagcagtcaagtgcaaaggagaaaaggagtcttctcattctcagtggagagcattgtggagctcgggagacgacgctcacagacacaggattactatcctacccacggtgactctggcaccagctggtggagcagtgggggatggcatctcagattcaaaagctactgaccactaatcaggacctgctgctgatgcaaaaaggaacgatgatgcgcaaggtgaggaccaaaagctggaagaagctaagatacttcagacttcaggatgacggcatgacggtctggcatgggcggcaccttgaaagcatatccaagcccactttttcaatctctgatgtggagaggatccgtaagggccaggattctgagctgttgcgctatctggtggaagagttccccctggagcaaggcttcaccattgtctttaatgggcgccgccccaacctggacctagtggccaacagtgttgaagaggcccagacttggatgcgaggactccagctgttggtggatctcgtcgccagaatgaactaccaggagcagctggatcaaatgttgagagaatggttccaacaagcagacagaaaccaggacagccggatgagtttcagagaagctcaacggctgctgcttctgatgaatgtggaaatggatgaagaatatgccttcagtctttttcaggaagcagatgtttcccaatctaatactctggattcagaagaatttgtacagttctataaggccctgactaagcgcactgagattgaagaactatttgagaacttttcatctgacaaacagaagctgaccttgctggaatttgtagatttccttagagaggaacagaaagaaagcgaccattcctctgaccttgctctgaaactcattgaccgctatgagccttctgagaatggcagattgctacgtgtgctgagcaaggatggcttcctcagctacctctgctcagcggatggaaacatcttcaaccccgactgcctccctatctatcaggatatgactcagcctctgagtcactactacatcaactcctctcacaacacctacctactgggtgaccagttttgtggccagagcagcgttgaaggatacatacgggccttgaaacgggggtgccgctgtgtggaggtggatacatgggacggacctgacggagagcccgttgtttatcatgggcgtacactgacctctcgtatcctgttcaaagatgttttggcaacattagcacaatatgccttccagtcgtcagactacccactcatcttatctctggataaccactgcacttgggaacagcagaagaccatggcacaccatctgattgcgatcctgggagagcagctgctgagtaccaccctagaggaacaactgattgatataatgccctcgccagagcagcttcgggggaagatcttggtaaaaggaaagaagttgagaacaattgaggttgttgagtctgacaaggaggaagaagagctggagaaagatgaggggtcagatctggacccagcctccgctgagcttgacatgcagtctcagcccgagtcccaggagcaggcctctgggaacaagagcaagaacaagaagaagtttcttctccagagttccacaaccatcctatgcccagacctatctgccctggttgtctacttgaggactgctcccttctgcagcttcactcactccaaagaaaactaccacatctacgacatttcatccttttctgagtccaaggccaagaacctcatcagggaggcaggcaatgagtttgtacagcacaatgccagacagctatgccgtgtataccccagtggtctgaggacagattcatcgaactataacccccaggaacactggaatgttggctgccaaatggtggccatgaacatgcagactgcaggaagtgcaatggacatctgtgatgggctcttccgccagaatgggggctctggctatgtgctgaagccagaattcctgagagatacccagagttccttcaatcccatgaagcccgttagtctttataaagcccagatccttgtagtccaggtgatcagtggtcaaagactccccaaagtggacaaaaccaaagagacaaccgttgtggatccactggtgagagtagagctctatggtgttcctgaagacacaaagcagcaagagaccagctatgtggagaacaatggtattaatccatactggggggagacattctatttccagatccaggtgcctgaacttgctatgctgcgttttgtggtaaaggattatagcaggacatcccgaaataactttataggccaatacaccctgccttggacctgcatgaaacatggctaccgacatgtatccttgctctccaaagacggcactagcctccatccagcctccatctttgtgtacacctgcatgcaagaagacctggatatggatgagccctgagaaacacagggagggtcttgaagcaggacaatctacagatgcactcttttccaacctacaacttcctcagcatccagagccagccaaaggatcagtggcggaccaaggttcccaggtgaaggttgaggaagaatcctgacccagaactatgactctagagaacagtgcacagccgagtccccactggactgctgctccttagctggtctaaatagagcttctctgtccaacttga

SEQ ID NO: 8163 - protein, 772 aa, Rattus norvegicus
  ref <308>: DATABASE ACCESSION NUMBER: SWISS-Prot / AAC52346
  ref <309>: DATABASE ENTRY DATE: 2003-02-01
MASQIQKLLTTNQDLLLMQKGTMMRKVRTKSWKKLRYFRLQDDGMTVWHGRHLESISKPTFSISDVERIRKGQDSELLRYLVEEFPLEQGFTIVFNGRRPNLDLVANSVEEAQTWMRGLQLLVDLVARMNYQEQLDQMLREWFQQADRNQDSRMSFREAQRLLLLMNVEMDEEYAFSLFQEADVSQSNTLDSEEFVQFYKALTKRTEIEELFENFSSDKQKLTLLEFVDFLREEQKESDHSSDLALKLIDRYEPSENGRLLRVLSKDGFLSYLCSADGNIFNPDCLPIYQDMTQPLSHYYINSSHNTYLLGDQFCGQSSVEGYIRALKRGCRCVEVDTWDGPDGEPVVYHGRTLTSRILFKDVLATLAQYAFQSSDYPLILSLDNHCTWEQQKTMAHHLIAILGEQLLSTTLEEQLIDIMPSPEQLRGKILVKGKKLRTIEVVESDKEEEELEKDEGSDLDPASAELDMQSQPESQEQASGNKSKNKKKFLLQSSTTILCPDLSALVVYLRTAPFCSFTHSKENYHIYDISSFSESKAKNLIREAGNEFVQHNARQLCRVYPSGLRTDSSNYNPQEHWNVGCQMVAMNMQTAGSAMDICDGLFRQNGGSGYVLKPEFLRDTQSSFNPMKPVSLYKAQILVVQVISGQRLPKVDKTKETTVVDPLVRVELYGVPEDTKQQETSYVENNGINPYWGETFYFQIQVPELAMLRFVVKDYSRTSRNNFIGQYTLPWTCMKHGYRHVSLLSKDGTSLHPASIFVYTCMQEDLDMDEP

SEQ ID NO: 8164 - DNA, 3263 bp, Homo sapiens
  ref <308>: DATABASE ACCESSION NUMBER: EMBL / AK023083
  ref <309>: DATABASE ENTRY DATE: 2002-08-06
gctgtagaagaggggaggaaacaagccagtgcaaggggagcaaaagagaaaaggagccaggctgggcttcctgatcccacagcatcgcagagctcgggaggcacagctcacagacacaggaaacacaggactgctattctgctctcctgcccacggtgatctggtgccagctggtggaacagtgggtgatggcgtccctgctgcaagaccagctgaccactgatcaggacttgctgctgatgcaggaaggcatgccgatgcgcaagtctcaatctctgatgtggagacaatacgtaatggccatgattccgagttgctgcgtagcctggcagaggagctccccctggagcagggcttcaccattgtcttccatggccgccgctccaacctggacctgatggccaacagtgttgaggaggcccagatatggatgcgagggctccagctgttggtggatcttgtcaccagcatggaccatcaggagcgcctggaccagtatcggcaggatggagtcagggtgggggtgagggatcacgctatccctgaaggagccagatgcaacaggtttaggaaaggcagcagacacgtcccagtctggaaccctggaaggagaagaattcgtacagttctataaggcattgactaaacgtgctgaggtgcaggaactgtttgaaagtttttcagctgatgggcagaagctgactctgctggaatttttggatttcctccaagaggagcagaaggagagagactgcacctctgagcttgctctggaactcattgaccgctatgaaccttcagacagtggcaaactgcggcatgtgctgagtatggatggcttcctcagctacctctgctctaaggatggagacaccttcaacccagcctgcctccccatctatcaggatatgactcaacccctgaaccactacttcatctgctcttctcataacacctacctagtgggggaccagctttgcggccagagcagcgtcgagggatatatacgggccctgaagcgggggtgccgctgcgtggaggtggatgtatgggatggacctagcggggaacctgtcgtttaccacggacacaccctgacctcccgcatcctgttcaaagatgtcgtggccacagtagcacagtatgccttccagacatcagactacccagtcatcttgtccctggagacccactgcagctgggagcagcagcagaccatggcccgtcatctgactgagatcctgggggagcagctgctgagcaccaccttggatggggtgctgcccactcagctgccctcgcctgaggagcttcggaggaagatcctggtgaaggggaagaagttaacacttgaggaagacctggaatatgaggaagaggaagcagaacctgagttggaagagtcagaattggcgctggagtcccagtttgagactgagcctgagccccaggagcagaaccttcagaataaggacaaaaagaagaaatccaagcccatcttgtgtccagccctctcttccctggttatctacttgaagtctgtctcattccgcagcttcacacattcaaaggagcactaccacttctacgagatatcatctttctctgaaaccaaggccaagcgcctcatcaaggaggctggtcaggaccaaaatggagggatggggagggaagtgggatggataggttcaggcctgatggactggcaggtaagtcccaagaaaaaagacaaggtagctaaggagagatgaaggagttcagaaactccttagagcagacaagggcagaggagttatgaatagtggctcaagggtctaggggcaggaaagctggtctggatggacagagtagagaggcacagtgaaactttctggagccagcttcagatgctggagagaagggtgaagagtaggcagggtccttgggactagggaagtgggagattccaccccacttccatctccctctctatacccttttacaggcaatgagtttgtgcagcacaatacttggcagttaagccgtgtgtatcccagcggcctgaggacagactcttccaactacaacccccaggaactctggaatgcaggctgccagatggtggccatgaatatgcagactgcagggcttgaaatggacatctgtgatgggcatttccgccagaatggcggctgtggctatgtgctgaagccagacttcctgcgtgatatccagagttctttccaccctgagaagcccatcagccctttcaaagcccagactctcttaatccaggtgatcagcggtcagcaactccccaaagtggacaagaccaaagaggggtccattgtggatccactggtgaaagtgcagatctttggcgttcgtctagacacagcacggcaggagaccaactatgtggagaacaatggttttaatccatactgggggcagacactatgtttccgggtgctggtgcctgaacttgccatgctgcgttttgtggtaatggattatgactggaaatcccgaaatgactttattggtcagtacaccctgccttggacctgcatgcaacaaggttaccgccacattcacctgctgtccaaagatggcatcagcctccgcccagcttccatctttgtgtatatctgcatccaggaaggcctggagggggatgagtcctgaggtgggcatttcacgggaagggttggtatgctggctttagacggggagaaacatctggaaggatgctcgagagaacaaatggaggtggtgaaaatcaagctttggattgtgcattcctaggcacaaaattacctcattcttcctaacaagcaatctgggacctgattttccaccttttttctcttttcttcccttcctttgttttcataagcctttggtatctttcctgcccttttcctttgtgtactctatactggagttcccttcttcctcttgctgtaggctcaatcccataccgacatctacaactaatctttcccatcaactctgtgtgaaggcaggttgcaactagaaattcagaggggcttggaatagagaaacctaaagaagcatcatcccctccatccccaacttcctcaaagcccaaagccaagggaaggataaatcaaggctcaaggcttccccagcaaagattagggaaagagacttgaccccaggactgtactacgactcttaagagaacactgcacagcactcaaagtcccccactggactgcttcctccttagccccactggtataaatacatctctctcc

SEQ ID NO: 8165 - protein, 762 aa, Homo sapiens
  ref <308>: DATABASE ACCESSION NUMBER: Refseq / NP_116115
  ref <309>: DATABASE ENTRY DATE: 2002-11-03
MASLLQDQLTTDQDLLLMQEGMPMRKVRSKSWKKLRYFRLQNDGMTVWHARQARGSAKPSFSISDVETIRNGHDSELLRSLAEELPLEQGFTIVFHGRRSNLDLMANSVEEAQIWMRGLQLLVDLVTSMDHQERLDQWLSDWFQRGDKNQDGKMSFQEVQRLLHLMNVEMDQEYAFSLFQAADTSQSGTLEGEEFVQFYKALTKRAEVQELFESFSADGQKLTLLEFLDFLQEEQKERDCTSELALELIDRYEPSDSGKLRHVLSMDGFLSYLCSKDGDIFNPACLPIYQDMTQPLNHYFICSSHNTYLVGDQLCGQSSVEGYIRALKRGCRCVEVDVWDGPSGEPVVYHGHTLTSRILFKDVVATVAQYAFQTSDYPVILSLETHCSWEQQQTMARHLTEILGEQLLSTTLDGVLPTQLPSPEELRRKILVKGKKLTLEEDLEYEEEEAEPELEESELALESQFETEPEPQEQNLQNKDKKKKSKPILCPALSSLVIYLKSVSFRSFTHSKEHYHFYEISSFSETKAKRLIKEAGNEFVQHNTWQLSRVYPSGLRTDSSNYNPQELWNAGCQMVAMNMQTAGLEMDICDGHFRQNGGCGYVLKPDFLRDIQSSFHPEKPISPFKAQTLLIQVISGQQLPKVDKTKEGSIVDPLVKVQIFGVRLDTARQETNYVENNGFNPYWGQTLCFRVLVPELAMLRFVVMDYDWKSRNDFIGQYTLPWTCMQQGYRHIHLLSKDGISLRPASIFVYICIQEGLEGDES

SEQ ID NO: 8166 - DNA, 485 bp, Rattus norvegicus
  ref <308>: DATABASE ACCESSION NUMBER: EMBL / U16686
  ref <309>: DATABASE ENTRY DATE: 2000-03-04
caggtctggacagaagagtgctgtctctcttgctctgctctccgtgattactctcaaagatctgagacccacagccatgaggacgctcactctgcttaccgcccttctcctgctggccctccacacccaggcaaaatctccccaaggaaccgctgaggaggctccagaccaggagcagctggtcatggaggaccaggatatttccatatcctttggaggggataaaggcactgctctccaagatgcagatgtgaaggcaggcgtgacctgctattgcagacgcacacgctgtggttttagagaacggctctctggggcctgtggttaccgtggccgcatctacagactgtgctgccgctgagcactccgaccaagaagaatccatttgtcaaatgatctgagatcttgaacgagactgctatttgtcagatgttatgtccttgagtttcctcttcctttacactcaaataaagttcttacacagc

SEQ ID NO: 8167 - protein, 94 aa, Rattus norvegicus
  ref <308>: DATABASE ACCESSION NUMBER: SWISS-Prot / Q62716
  ref <309>: DATABASE ENTRY DATE: 2002-06-15
MRTLTLLTALLLLALHTQAKSPQGTAEEAPDQEQLVMEDQDISISFGGDKGTALQDADVKAGVTCYCRRTRCGFRERLSGACGYRGRIYRLCCR

SEQ ID NO: 8168 - DNA, 449 bp, Homo sapiens
  ref <308>: DATABASE ACCESSION NUMBER: Refseq / NM_021010
  ref <309>: DATABASE ENTRY DATE: 2001-02-03
atatccactcctgctctccctcctgcaggtgaccccagccatgaggaccatcgccatccttgctgccattctcctggtggccctgcaggcccaggctgagtcactccaggaaagagctgatgaggctacaacccagaagcagtctggggaagacaaccaggaccttgctatctcctttgcaggaaatggactctctgctcttagaacctcaggttctcaggcaagagccacctgctattgccgaaccggccgttgtgctacccgtgagtccctctccggggtgtgtgaaatcagtggccgcctctacagactctgctgtcgctgagcttcctagatagaaaccaaagcagtgcaagattcagttcaaggtcctgaaaaaagaaaaacattttactctgtgtaccttgtgtctttctaaatttctctctccaaaataaagttcaagcatt

SEQ ID NO: 8169 - protein, 94 aa, Homo sapiens
  ref <308>: DATABASE ACCESSION NUMBER: Refseq / NP_066290
  ref <309>: DATABASE ENTRY DATE: 2001-02-03
MRTIAILAAILLVALQAQAESLQERADEATTQKQSGEDNQDLAISFAGNGLSALRTSGSQARATCYCRTGRCATRESLSGVCEISGRLYRLCCR

SEQ ID NO: 8170 - DNA, 2157 bp, Rattus norvegicus
  ref <308>: DATABASE ACCESSION NUMBER: EMBL / U17013
  ref <309>: DATABASE ENTRY DATE: 2000-03-04
ctgacaccagcccagcaacagcttttactacagcaggcccaggcccaggcccagctcctggctgctgcagtgcagcaacactccgccagccaacagcacagtgctgctggggccaccatctcagcctccgctgccacacccatgacgcagatccccctgtctcagcccatacagattgcacaggatcttcaacaattgcaacagcttcagcagcaaaatctcaacttgcaacagttcgtcttggtgcacccaaccaccaacttgcaaccagcacagtttatcatctctcagaccccccagggccagcagggtctcctgcaagcgcaaaatcttttaacgcaactacctcagcaaagccaagccaacctcctacagccacagccaagcatcaccctcacgtcccagcctaccaccccaactcgcacaatagcagcaaccccaattcagacacttccacagagccagacaacaccaaagcgaattgatactcccagcttggaggagcccagtgaccttgaggagcttgagcaatttgccaagacttttaaacaaagacgaatcaaacttggattcactcagggtgatgttgggcttgctatggggaaattatatggaaatgacttcagccaaaccaccatctctcgctttgaagccttgaacctcagctttaagaacatgtgcaagttaaagccccttttagagaagtggctaaatgacgcggagaacctctcatctgattctacagcatctagcccaagtgctttgaattctccagggttgggggctgagggcttgaatcgtaggaggaaaaaacgcaccagcatagagaccaacatccgtgtggccttagaaaagagtttcatggagaatcaaaagcctacctcggaagatatcaccttgattgctgaacagctcaatatggagaaggaggtgattcgtgtttggttttgtaaccgccgccagaaggagaaaagaatcaacccgccaagcagtggtgggaccagcagctcaccaatcaaagcaattttccccagcccaacctcactggtggcaaccactccaagccttgtgacaagcagtacagcaactaccctcacagtcaaccctgtgctccccttaaccagtgctgccatgactaatctttctcttacaggcactacagactccacgtccaacaacacggccaccgtgatttccacagcaccccctgcttcctcagcagtcacatctccctccttgagtccctctccttctgcctcagcctccacctctgaggcctctagtgccagcgagaccagcacaacacagaccacctccacacctctcccctcccctcttggagccagccaggtgatggtgacagcctctggcttacagactgcagccgccgctgctctccaaggagctgcacagttgccagcaaatgccagtcttgctgctatggctgctgctgcaggactcaatccaggcctgatggcaccctcacagtttgctgctggaggtgccttactcagtctcaatccggggaccctgggtggggctctcagcccggccctgatgagcaacagtacactggcaaccattcaagctcttgcttctagtggctctcttccaataacatctctggatgcaactgggaacctggtattcgccaatgcaggaggagcccccaacatcgtgactgcccctctgttcctgaaccctcagaacctctctctgctcaccagcaacccagtaagcttggtttctgccgctgcagcctccacagggaactccgcacctacagccagccttcatgcctcctccacctcaactgagtccatccagaactctctgttcacagtggcctctgccagcggggctgcctccaccaccacagctgcctccaaggcacagtgagctggacgcagagctggggctttcctcactgcagggtgataggctggctatcagctggctaaaacatgacgcctgtcattggcttcctcccaccatgttgtgaggatgaggaagacatggagagaagaaaaaaattacacataacaacaaaaaaaaagaatggagacaggacaacgtttgcctaattttataataaaaacaatgtcttttcaggattgcttcatggattggagaactttctaaccaaaaattttaaaa

SEQ ID NO: 8171 - protein, 632 aa, Rattus norvegicus
  ref <308>: DATABASE ACCESSION NUMBER: SWISS-Prot / AAA53185
  ref <309>: DATABASE ENTRY DATE: 2003-02-01
LTPAQQQLLLQQAQAQAQLLAAAVQQHSASQQHSAAGATISASAATPMTQIPLSQPIQIAQDLQQLQQLQQQNLNLQQFVLVHPTTNLQPAQFIISQTPQGQQGLLQAQNLLTQLPQQSQANLLQPQPSITLTSQPTTPTRTIAATPIQTLPQSQTTPKRIDTPSLEEPSDLEELEQFAKTFKQRRIKLGFTQGDVGLAMGKLYGNDFSQTTISRFEALNLSFKNMCKLKPLLEKWLNDAENLSSDSTASSPSALNSPGLGAEGLNRRRKKRTSIETNIRVALEKSFMENQKPTSEDITLIAEQLNMEKEVIRVWFCNRRQKEKRINPPSSGGTSSSPIKAIFPSPTSLVATTPSLVTSSTATTLTVNPVLPLTSAAMTNLSLTGTTDSTSNNTATVISTAPPASSAVTSPSLSPSPSASASTSEASSASETSTTQTTSTPLPSPLGASQVMVTASGLQTAAAAALQGAAQLPANASLAAMAAAAGLNPGLMAPSQFAAGGALLSLNPGTLGGALSPALMSNSTLATIQALASSGSLPITSLDATGNLVFANAGGAPNIVTAPLFLNPQNLSLLTSNPVSLVSAAAASTGNSAPTASLHASSTSTESIQNSLFTVASASGAASTTTAASKAQ

SEQ ID NO: 8172 - DNA, 2584 bp, Homo sapiens
  ref <308>: DATABASE ACCESSION NUMBER: Refseq / NM_002697
  ref <309>: DATABASE ENTRY DATE: 2002-11-05
gaggagcagcgagtcaagatgagagttcagccgcggcggcagcagcagcagactcaagaatgaacaatccgtcagaaaccagtaaaccatctatggagagtggagatggcaacacaggcacacaaaccaatggtctggactttcagaagcagcctgtgcctgtaggaggagcaatctcaacagcccaggcgcaggctttccttggacatctccatcaggtccaactcgctggaacaagtttacaggctgctgctcagtctttaaatgtacagtctaaatctaatgaagaatcgggggattcgcagcagccaagccagccttcccagcagccttcagtgcaggcagccattccccagacccagcttatgctagctggaggacagataactgggcttactttgacgcctgcccagcaacagttactactccagcaggcacaggcacaggcacagctgctggctgctgcagtgcagcagcactccgccagccagcagcacagtgctgctggagccaccatctccgcctctgctgccacgcccatgacgcagatccccctgtctcagcccatacagatcgcacaggatcttcaacaactgcaacagcttcaacagcagaatctcaacctgcaacagtttgtgttggtgcatccaaccaccaatttgcagccagcgcagtttatcatctcacagacgccccagggccagcagggtctcctgcaagcgcaaaatcttcaaacgcaactacctcagcaaagccaagccaacctcctacagtcgcagccaagcatcaccctcacctcccagccagcaaccccaacacgcacaatagcagcaaccccaattcagacacttccacagagccagtcaacaccaaagcgaattgatactcccagcttggaggagcccagtgaccttgaggagcttgagcagtttgccaagaccttcaaacaaagacgaatcaaacttggattcactcagggtgatgttgggctcgctatggggaaactatatggaaatgacttcagccaaactaccatctctcgatttgaagccttgaacctcagctttaagaacatgtgcaagttgaagccacttttagagaagtggctaaatgatgcagagaacctctcatctgattcgtccctctccagcccaagtgccctgaattctccaggaattgagggcttgagccgtaggaggaagaaacgcaccagcatagagaccaacatccgtgtggccttagagaagagtttcttggagaatcaaaagcctacctcggaagagatcactatgattgctgatcagctcaatatggaaaaagaggtgattcgtgtttggttctgtaaccgccgccagaaagaaaaaagaatcaacccaccaagcagtggtgggaccagcagctcacctattaaagcaattttccccagcccaacttcactggtggcgaccacaccaagccttgtgactagcagtgcagcaactaccctcacagtcagccctgtcctccctctgaccagtgctgctgtgacgaatctttcagttacaggcacttcagacaccacctccaacaacacagcaaccgtgatttccacagcgcctccagcttcctcagcagtcacgtccccctctctgagtccctccccttctgcctcagcctccacctccgaggcatccagtgccagtgagaccagcacaacacagaccacctccactcctttgtcctcccctcttgggaccagccaggtgatggtgacagcatcaggtttgcaaacagcagcagctgctgcccttcaaggagctgcacagttgccagcaaatgccagtcttgctgccatggcagctgctgcaggactaaacccaagcctgatggcaccctcacagtttgcggctggaggtgccttactcagtctgaatccagggaccctgagcggtgctctcagcccagctctaatgagcaacagtacactggcaactattcaagctcttgcttctggtggctctcttccaataacatcacttgatgcaactgggaacctggtatttgccaatgcgggaggagcccccaacatcgtgactgcccctctgttcctgaaccctcagaacctctctctgctcaccagcaaccctgttagcttggtctctgccgccgcagcatctgcagggaactctgcacctgtagccagccttcacgccacctccacctctgctgagtccatccagaactctctcttcacagtggcctctgccagcggggctgcgtccaccaccaccaccgcctccaaggcacagtgagctgggcagagctgggctgccagaagcctttttcactctgcagtgtgattggactgccagccaggttaataaactgaaaaatgtgattggcttcctctcgccgtgttgtgagggcaaaggagagaagggagaaaaaaaaaaaaaaaaccacacacacccatacacaatataccagaaaaggaaggaaggatggagacggaacatttgcctaatttgtaataaaacactgtcttttcagggttgcttcatgggttggaggactttctaaccaaaaattaaaaaaaaaaaaaaaa

SEQ ID NO: 8173 - protein, 743 aa, Homo sapiens
  ref <308>: DATABASE ACCESSION NUMBER: SWISS-Prot / P14859
  ref <309>: DATABASE ENTRY DATE: 2002-06-15
MNNPSETSKPSMESGDGNTGTQTNGLDFQKQPVPVGGAISTAQAQAFLGHLHQVQLAGTSLQAAAQSLNVQSKSNEESGDSQQPSQPSQQPSVQAAIPQTQLMLAGGQITGLTLTPAQQQLLLQQAQAQAQLLAAAVQQHSASQQHSAAGATISASAATPMTQIPLSQPIQIAQDLQQLQQLQQQNLNLQQFVLVHPTTNLQPAQFIISQTPQGQQGLLQAQNLQTQLPQQSQANLLQSQPSITLTSQPATPTRTIAATPIQTLPQSQSTPKRIDTPSLEEPSDLEELEQFAKTFKQRRIKLGFTQGDVGLAMGKLYGNDFSQTTISRFEALNLSFKNMCKLKPLLEKWLNDAENLSSDSSLSSPSALNSPGIEGLSRRRKKRTSIETNIRVALEKSFLENQKPTSEEITMIADQLNMEKEVIRVWFCNRRQKEKRINPPSSGGTSSSPIKAIFPSPTSLVATTPSLVTSSAATTLTVSPVLPLTSAAVTNLSVTGTSDTTSNNTATVISTAPPASSAVTSPSLSPSPSASASTSEASSASETSTTQTTSTPLSSPLGTSQVMVTASGLQTAAAAALQGAAQLPANASLAAMAAAAGLNPSLMAPSQFAAGGALLSLNPGTLSGALSPALMSNSTLATIQALASGGSLPITSLDATGNLVFANAGGAPNIVTAPLFLNPQNLSLLTSNPVSLVSAAAASAGNSAPVASLHATSTSAESIQNSLFTVASASGAASTTTTASKAQ

SEQ ID NO: 8174 - DNA, 2415 bp, Rattus norvegicus
  ref <308>: DATABASE ACCESSION NUMBER: EMBL / U17253
  ref <309>: DATABASE ENTRY DATE: 2000-03-04
ggcacgaggtaagtcacaccagggccatctttattctcttttacaatataaacatgctgctgtggggtgtgcgttctgtgtgccctcagaaggagcaggcagcgatccagcgtttcatccctagcgctccacaaatggttcttgagttctcacagcagtgaaaactctgaccttctctttacagggataaggaggaaggtctcgtgagtgacctcccctgatgatgatgtggagaggggagggaaggcagccccactcctccctgcagtggacctgctatgtctagctgctgcttctcctgaaaacatctgtccaggggcttcttgaccacagcagccattgagaaaactcatggccttctgtcaacgcctccctcgtgactcagcattgagatatattatctctacacagcggccagggcacttaaacttgttcaagaaaatcctaatatttagggaaagcattttaaacgcacgcccaccacgtccctgcccccctcgatgggcgcgggggcgtcccggccgccgcagccgccgcaggagcccggcagagccgttgtcgcggatcgctccgcagccgcgggccgcgttaagcccatccacagtaatggccacagccttacctaggaccctgggagagctgcagctgtatcgaatattgcagaaagctaatctgctttcttactttgatgcctttatccaacaaggtggtgatgatgtccagcaactgtgcgaagctggagaagaagaatttttggaaatcatggcactggtgggcatggcaagcaagccccttcatgttagacggcttcagaaggctttgagagattgggttacaaatcctggccttttcaaccagccattgacttcccttcctgtcagtagcatacccatctataaattaccagagggatcaccaacatggctgggaatatcctgcaatagttatgaaaggagtagcagtgcccgagagccacatttaaaggtccctaaatgcgctgccaccacctgtgttcagagcttgggtcagggcaagtcagaggtgggaagtctagcactgcagagtgtcagtgaatccagactctggcaaggacaccacaccactgaaagcgagcatagtctctccccagcagacctgggctccccagcctccccaaaggaaagcagtgaagccctggatgctgccgccgcgctctctgtggccgagtgtgtggagcggatggcccccacgctgcccaaaagtgacttgaatgaagtgaaagagctgctgaagaacaataagaagttggccaaaatgattggtcacatcttcgagatgagcgacgaggatccacacaaggaggaggagatcagaaagtacagcgccatctatgggcgatttgactccaaaagaaaggatggtaaacacctcacattgcatgagctcacggttaacgaggcagctgctcagctgtgtgtgaaggacaatgccctgctgacgagaagagatgagcttttcgccctggccaggcaggtttctcgagaagttacctacaaatacacttacaggaccaccaggttaaaatgtggtgaaagagatgaattgtctccaaagagaattaaaatggaggatggatttccggacttccaggaatctgtgccaacactcttccagcaggccagagccaaaagtgaagagcttgcaggtctcagttcacaggctgagaaggggatggcaaagcaaatggagctcctgtgtgcccaggccggctatgagaggctgcagcaggagaggagactcatggccgggctctacaggcagagctctggagagcagagccctgatggcggccttccttctgatggctccgatggacaaggagaaaggcctttgaatctccgaattcctagtgtgcagaacagacagccccatcattttgtggtggatggggagctcagtagactttactccaacgaggtgaagtcccactcatcagagagccttgggattctaaaagactatcctcactctgcattcaccttggaaaagaaagttattaaaacagagcccgaagactcaagatagctgagattctccccctgctctctggaaatgacaccagatccgaggatatgctccatcgtagattaagccttaataaccagtgttgcctcattcagctcccagaccatagccaaagcgtaagaactcacacagtcgtctgtgggcaccaggacaaagcaacagccacagaagagggaaccgagatagcactgcaaagtaacgggcaccgaccggttaccttcctgtgtaagttgcttgtgtggaaaggctcaataccgtaggcattcactatttaagaatgtacaatgtgtctgtaatttatagaagcaaatctaggtgttgataccttgcagtctaatagacgtggatccc

SEQ ID NO: 8175 - protein, 485 aa, Rattus norvegicus
  ref <308>: DATABASE ACCESSION NUMBER: SWISS-Prot / Q62722
  ref <309>: DATABASE ENTRY DATE: 2001-10-16
MATALPRTLGELQLYRILQKANLLSYFDAFIQQGGDDVQQLCEAGEEEFLEIMALVGMASKPLHVRRLQKALRDWVTNPGLFNQPLTSLPVSSIPIYKLPEGSPTWLGISCNSYERSSSAREPHLKVPKCAATTCVQSLGQGKSEVGSLALQSVSESRLWQGHHTTESEHSLSPADLGSPASPKESSEALDAAAALSVAECVERMAPTLPKSDLNEVKELLKNNKKLAKMIGHIFEMSDEDPHKEEEIRKYSAIYGRFDSKRKDGKHLTLHELTVNEAAAQLCVKDNALLTRRDELFALARQVSREVTYKYTYRTTRLKCGERDELSPKRIKMEDGFPDFQESVPTLFQQARAKSEELAGLSSQAEKGMAKQMELLCAQAGYERLQQERRLMAGLYRQSSGEQSPDGGLPSDGSDGQGERPLNLRIPSVQNRQPHHFVVDGELSRLYSNEVKSHSSESLGILKDYPHSAFTLEKKVIKTEPEDSR

SEQ ID NO: 8176 - DNA, 1476 bp, Homo sapiens
  ref <308>: DATABASE ACCESSION NUMBER: EMBL / AF045452
  ref <309>: DATABASE ENTRY DATE: 1998-07-02
gttaaacccatccagagtaatggctgcggccttacccaggaccctgggggagttgcagctgtatagaatattacaaaaagccaatctactttcttattttgatgcctttatccaacaaggtggtgatgatgtccagcaactctgtgaagcaggagaagaggagtttttggaaatcatggcactcgtgggcatggctagcaagccccttcatgttagaaggctgcagaaggctttgagagactgggtcacaaaccctgggcttttcaatcagccactgacttcccttcctgtcagtagcatacccatctataaattaccagagggatcaccaacatggctgggaatatcctgcagtagttatgaaaggagtagcaatgcccgggaacctcatttaaaaatccccaaatgtgctgccaccacctgtgtgcagagcttgggacaggggaagtcagatgtggttgggagcctagcactgcagagtgttggtgagtccagactctggcaaggccaccatgccactgagagcgagcacagcctctccccagcagacctgggctcccccgcgtccccaaaggagagcagtgaggcgctggatgctgctgctgcgctctctgtggctgagtgtgtggagcggatggcccccacactgccaaaaagtgacttgaatgaagtgaaagagctgctaaaaaccaacaagaagttggccaaaatgattggtcacatctttgagatgaacgatgatgatccacacaaagaggaggaaattcggaaatacagtgcaatatatggcagatttgactcaaagaggaaggatgggaaacatctcacacttcatgagctcactgttaatgaagcggctgctcaactctgtgtgaaggataatgccctgctgacaagaagagatgagctttttgccttggctcgacagatttctcgagaagtcacctataaatatacttacagaaccaccaagtcaaaatgtggagaaagagatgaattatccccaaagagaattaaagtggagcagcagcctgaaaaggtgatggcaaagcagatggagttcctttgcaaccaagctggctatgagagactgcagcatgccgagaggaggttgtctgcagggctttacaggcagagctcagaagagcacagtcctaacggcttgacttccgataactcagatggacaaggagaaagacctttgaatctccgaatgcctaatttacagaacagacaaccccatcattttgtggtggatggggagctgagcagactttaccccagtgaggcaaagtcccactcatcagagagccttgggattttaaaagactaccctcattcagcttttaccttagaaaagaaagtcatcaaaacagagcctgaagattcaagatagctgtgatttctctcaccgttctctggaaatggcatcagatttaaggataatactccatcatagaaataagccttaataac

SEQ ID NO: 8177 - protein, 486 aa, Homo sapiens
  ref <308>: DATABASE ACCESSION NUMBER: SWISS-Prot / Q13506
  ref <309>: DATABASE ENTRY DATE: 2001-10-16
MAAALPRTLGELQLYRILQKANLLSYFDAFIQQGGDDVQQLCEAGEEEFLEIMALVGMASKPLHVRRLQKALRDWVTNPGLFNQPLTSLPVSSIPIYKLPEGSPTWLGISCSSYERSSNAREPHLKIPNCAATTCVQSLGQGKSDVVGSLALQSVGESRLWQGHHATESEHSLSPADLGSPASPKESSEALDAAAALSVAECVERMAPTLPKSDLNEVKELLKTNKKLAKMIGHIFEMNDDDPHKEEEIRKYSAIYGRFDSKRKDGKHLTLHELTVNEAAAQLCVKDNALLTRRDELFALARQISREVTYKYTYRTTKSKCGERDELSPKRIKVEDGFPDFQDSVQTLFQQARAKSEELAALSSQPEKVMAKQMEFLCNQAGYERLQHAERRLSAGLYRQSSEEHSPNGLTSDNSDGQGERPLNLRMPNLQNRQPHHFVVDGELSRLYPSEAKSHSSESLGILKDYPHSAFTLEKKVIKTEPEDSR

SEQ ID NO: 8178 - DNA, 2488 bp, Rattus norvegicus
  ref <308>: DATABASE ACCESSION NUMBER: EMBL / U17254
  ref <309>: DATABASE ENTRY DATE: 2000-03-04
gcgaaagttggggtagtgtgcgagaaggattgcagagcgcacgcggaaccagactgcgactgggtcctgggtcgctggtcccggccacggggagcgggagccggccggagatgccctgtatccaagctcaatatggaacaccagcaaccagcccaggaccgcgtgaccacctgacaggtgaccccctggcccttgagttcagcaagcccaccatggacctggccagccccgagacggcgcccaccgcacctgccaccctgcccagtttcagcaccttcatggacggcggatacaccggagagtttgacaccttcctataccagctgccggggacagcccagccgtgctcctcggcctcctccacatcttcttcctcgtcctcggccacctctcccgcgtcggcttcctttaagtttgaggactttcaggtgtatggctgctaccctggcaccctgagcggcccattagacgagaccctgtcctccagtggctctgattactatggaagcccctgctcagccccgtcaccacctacacccaacttccagccatcccagctctccccttgggatggttcatttggccacttctcccccagccagacttatgaaggccttcgggtatggactgagcagttgcccaaggcttccgggcctccgccacctccaaccttcttctccttcagtcctcccaccggtcccagccccagcctggcccagagttccctgaagttgttcccagcaccagccacccaccagctaggggagggggagagctattccgtgccagccgctttcccgggcttggcacccacctctccgaactgtgacacttccggcattctggacgcacccgtaacctccaccaaggcccgcagtgggtcttcagggggcagtgagggccgctgtgctgtctgtggagacaacgcttcgtgccagcattatggggtccgcacctgtgagggctgcaaaggcttcttcaagcgcacagtacagaaaagtgccaagtacatctgcctggcaaacaaggactgccctgtggacaagaggcggcggaaccgctgccagttctgtcgcttccagaagtgcctggctgtgggcatggtgaaggaagttgtccggacagacagcctaaaggggcggcggggccggctaccttcaaaacccaagcagcccccagatgcctcccctaccaatctcctcacgtccctcattcgagcacatttggactccgggcctaacactgccaagttggactattccaagttccaggaactggtgctgccccgctttggaaaggaagatgccggtgacgtgcagcaattttatgacttgctctctggctccctggacgtcatccggaagtgggcggaaaagatcccgggcttcattgagctttccccaggagaccaagacctgttgctagagtccgcctttctggagctctttatcctccgcctggcctaccgatctaagcccggtgaggggaagctcatcttctgctcaggcctggtgctacaccggctgcagtgtgcccgcggctttggtgactggatagacaacattctagccttctcacggtccctgcacagcttgggtgttgatgttcctgcctttgcctgcctgtctgctctggtcctcatcactgatcgacatggcctccaggaccctcggcgggtggaggagctgcagaaccgcattgctagctgtctgaaggaacacatggccgccgtggcaggagacccacagccggccagctgcctgtcacgtctgctgggcaaactgcctgagctccggactctgtgcacccaaggcctacagcgcatcttttgcctcaagctggaggacttggtgccccctccacctatcgtggacaagatctttatggacaccttgtctttctgaccctgccccgaacacgcgtgcacactcacgtgcatgttcttcttgtcacccacgtgcctttaagcccatagcccacggacccccagaccaccccaccccccagcctgttttttgagctaagactgatgtatctcctcattccagaagatggacagagagagagagagagctcaagacctgggggggagggtgtgtattcacgggggtgaccccactatttctcttatccctcccagctcagacctggccttccgcgtgtttttgtaagataaaccatttttaacacataccactctgctgtatataagctgacgctgctgtaaatacagaaaggaagaggtcggggtgggggtttgagaggaagggtgggccccccaaccccgccagctgggcaagcctctcgagcctccaacttgagatctcttccgctctccttccatgtgtacatagctgtcactcaagaaggtgattgacagattctgatttatatttgtgtatttttttcctggatttataggatgtgactttttctgattaatatatttaatatattaaataaaaactagacatgtagctgaaaaaaa

SEQ ID NO: 8179 - protein, 597 aa, Rattus norvegicus
  ref <308>: DATABASE ACCESSION NUMBER: SWISS-Prot / P22829
  ref <309>: DATABASE ENTRY DATE: 2000-05-30
MPCIQAQYGTPATSPGPRDHLTGDPLALEFSKPTMDLASPETAPTAPATLPSFSTFMDGGYTGEFDTFLYQLPGTAQPCSSASSTSSSSSSATSPASASFKFEDFQVYGCYPGTLSGPLDETLSSSGSDYYGSPCSAPSPPTPNFQPSQLSPWDGSFGHFSPSQTYEGLRVWTEQLPKASGPPPPPTFFSFSPPTGPSPSLAQSSLKLFPAPATHQLGEGESYSVPAAFPGLAPTSPNCDTSGILDAPVTSTKARSGSSGGSEGRCAVCGDNASCQHYGVRTCEGCKGFFKRTVQKSAKYICLANKDCPVDKRRRNRCQFCRFQKCLAVGMVKEVVRTDSLKGRRGRLPSKPKQPPDASPTNLLTSLIRAHLDSGPNTAKLDYSKFQELVLPRFGKEDAGDVQQFYDLLSGSLDVIRKWAEKIPGFIELSPGDQDLLLESAFLELFILRLAYRSKPGEGKLIFCSGLVLHRLQCARGFGDWIDNILAFSRSLHSLGVDVPAFACLSALVLITDRHGLQDPRRVEELQNRIASCLKEHMAAVAGDPQPASCLSRLLGKLPELRTLCTQGLQRIFCLKLEDLVPPPPIVDKIFMDTLSF

SEQ ID NO: 8180 - DNA, 2481 bp, Homo sapiens
  ref <308>: DATABASE ACCESSION NUMBER: EMBL / D49728
  ref <309>: DATABASE ENTRY DATE: 1999-01-21
cgaacttggggggagtgcacagaagaacttcgggagcgcacgcgggaccagggaccaggctgagactcggggcgccagtccgggcaggggcagcgggagccggccggagatgccctgtatccaagcccaatatgggacaccagcaccgagtccgggaccccgtgaccacctggcaagcgaccccctgacccctgagttcatcaagcccaccatggacctggccagccccgaggcagcccccgctgcccccactgccctgcccagcttcagcaccttcatggacggctacacaggagagtttgacaccttcctctaccagctgccaggaacagtccagccatgctcctcagcctcctcctcggcctcctccacatcctcgtcctcagccacctcccctgcctctgcttccttcaagttcgaggacttccaggtgtacggctgctaccccggccccctgagcggcccagtggatgaggccctgtcctccagtggctctgactactatggcagcccctgctcggccccgtcgccctccacgcccagcttccagccgccccagctctctccctgggatggctccttcggccacttctcgcccagccagacttacgaaggcctgcgggcatggacagagcagctgcccaaagcctctgggcccccacagcctccagccttcttttccttcagtcctcccaccggccccagccccagcctggcccagagccccctgaagttgttcccctcacaggccacccaccagctgggggagggagagagctattccatgcctacggccttcccaggtttggcacccacttctccacaccttgagggctcggggatactggatacacccgtgacctcaaccaaggcccggagcggggccccaggtggaagtgaaggccgctgtgctgtgtgtggggacaacgcttcatgccagcattatggtgtccgcacatgtgagggctgcaagggcttcttcaagcgcacagtgcagaaaaacgccaagtacatctgcctggctaacaaggactgccctgtggacaagaggcggcgaaaccgctgccagttctgccgcttccagaagtgcctggcggtgggcatggtgaaggaagttgtccgaacagacagcctgaaggggcggcggggccggctaccttcaaaacccaagcagcccccagatgcctcccctgccaatctcctcacttccctggtccgtgcacacctggactcagggcccagcactgccaaactggactactccaagttccaggagctggtgctgccccactttgggaaggaagatgctggggatgtacagcagttctacgacctgctctccggttctctggaggtcatccgcaagtgggcggagaagatccctggctttgctgagctgtcaccggctgaccaggacctgttgctggagtcggccttcctggagctcttcatcctccgcctggcgtacaggtctaagccaggcgagggcaagctcatcttctgctcaggcctggtgctacaccggctgcagtgtgcccgtggcttcggggactggattgacagtatcctggccttctcaaggtccctgcacagcttgcttgtcgatgtccctgccttcgcctgcctctctgcccttgtcctcatcaccgaccggcatgggctgcaggagccgcggcgggtggaggagctgcagaaccgcatcgccagctgcctgaaggagcacgtggcagctgtggcgggcgagccccagccagccagctgcctgtcacgtctgttgggcaaactgcccgagctgcggaccctgtgcacccagggcctgcagcgcatcttctacctcaagctggaggacttggtgccccctccacccatcattgacaagatcttcatggacacgctgcccttctgacccctgcctgcctgggaacacgtgtgcacatgcgcactctctcatatgccaccccatgtgcctttagtccacggaccccagagcacccccaagcctgggcttagctgcagaacagagggacctgctcacctgcccaaaggggatgaagggagggaggctcaaggcccttgggggagggggatgccttcatgggggtgacccacgatgtgttcttatcccccccgcctggccaccggcctttatgttttttgtaagataaaccgtttttaacacatagcgccgtgctgtaaataagcccagtactgctgtaaatacaggaagaaagagcttgaggtgggagcgggctgggaggaagggatgggccccggccttcctgggcagcctttccagcctcctgctgggctctctcttcctaccctccttccacatgtacatgtacataaactgtcactctaggaagaagacaaatgacagattctgaccatttatatttgtgtattttccaggatttatagtatgtgacttttctgattaatatatttaatatattgaataaaaaatagacatgtagttgg

SEQ ID NO: 8181 - protein, 598 aa, Homo sapiens
  ref <308>: DATABASE ACCESSION NUMBER: SWISS-Prot / P22736
  ref <309>: DATABASE ENTRY DATE: 2001-10-16
MPCIQAQYGTPAPSPGPRDHLASDPLTPEFIKPTMDLASPEAAPAAPTALPSFSTFMDGYTGEFDTFLYQLPGTVQPCSSASSSASSTSSSSATSPASASFKFEDFQVYGCYPGPLSGPVDEALSSSGSDYYGSPCSAPSPSTPSFQPPQLSPWDGSFGHFSPSQTYEGLRAWTEQLPKASGPPQPPAFFSFSPPTGPSPSLAQSPLKLFPSQATHQLGEGESYSMPTAFPGLAPTSPHLEGSGILDTPVTSTKARSGAPGGSEGRCAVCGDNASCQHYGVRTCEGCKGFFKRTVQKNAKYICLANKDCPVDKRRRNRCQFCRFQKCLAVGMVKEVVRTDSLKGRRGRLPSKPKQPPDASPANLLTSLVRAHLDSGPSTAKLDYSKFQELVLPHFGKEDAGDVQQFYDLLSGSLEVIRKWAEKIPGFAELSPADQDLLLESAFLELFILRLAYRSKPGEGKLIFCSGLVLHRLQCARGFGDWIDSILAFSRSLHSLLVDVPAFACLSALVLITDRHGLQEPRRVEELQNRIASCLKEHVAAVAGEPQPASCLSRLLGKLPELRTLCTQGLQRIFYLKLEDLVPPPPIIDKIFMDTLPF

SEQ ID NO: 8182 - DNA, 2488 bp, Rattus norvegicus; identical to SEQ ID NO: 8178
  ref <308>: DATABASE ACCESSION NUMBER: EMBL / U17254
  ref <309>: DATABASE ENTRY DATE: 2000-03-04

SEQ ID NO: 8183 - protein, 597 aa, Rattus norvegicus; identical to SEQ ID NO: 8179
  ref <308>: DATABASE ACCESSION NUMBER: SWISS-Prot / P22829
  ref <309>: DATABASE ENTRY DATE: 2000-05-30

SEQ ID NO: 8184 - DNA, 2481 bp, Homo sapiens; identical to SEQ ID NO: 8180
  ref <308>: DATABASE ACCESSION NUMBER: EMBL / D49728
  ref <309>: DATABASE ENTRY DATE: 1999-01-21

SEQ ID NO: 8185 - protein, 598 aa, Homo sapiens; identical to SEQ ID NO: 8181
  ref <308>: DATABASE ACCESSION NUMBER: SWISS-Prot / P22736
  ref <309>: DATABASE ENTRY DATE: 2001-10-16

SEQ ID NO: 8186 - DNA, 1812 bp, Rattus norvegicus
  ref <308>: DATABASE ACCESSION NUMBER: EMBL / U17565
  ref <309>: DATABASE ENTRY DATE: 2000-03-04
ctcagagatgaggagcagacagctgagagcattaagaaccaaatgacggtgaaggaatgggaaaaggtgtttgaaatgagtcaggaccaaaacctgtaccacaatctctgcactagcctcttccctacgatccacggcaatgatgaagtaaaacgtggcgtcttgctgatgctgttcggtggcgttcccaagacaacaggggaaggaacctctcttcgtggggatataaatgtttgcattgttggggatccaagtacagctaagagccagtttctcaagcatgtggatgagttcagtcccagagctgtgtataccagtggcaaggcctccagtgcttccggcttgacagcagctgtggtgagagatgaggaatctcacgagtttgtcatcgaggctggagcgttgatgctggctgataacggtgtctgttgcattgatgagtttgataagatggacatgcgggaccaagttgctattcacgaagctatggagcagcagaccatatctatcactaaagccggagtgaaggcaactctgaatgccaggacatccattttagctgcagcaaaccctgtcagcggacactacgacaggtcaaaatctctgaaacagaacatcaatctgtcagcgcccatcatgtcccgctttgacctcttcttcattttggtggatgagtgcaatgaggtgacagattatgctattgccaggcgcatagtagacttgcattcgaggatcgaagaatcgatagaccgggtttattcccttgatgatataagaaggtatcttctcttcgcccgacagtttaagcccaagatttccaaagagtcagaggacttcattgtggagcagtacaaacgcctccgccagagggatggctctgggatcaccaagtcgtcgtggagaatcactgtgagacagcttgagagcatgatccgactctcagaatcgatggcccgcatgcactgctgtgatgaggtccagcctaaacatgtgaaggaagcttttcgattactgaataaatcgatcatccgtgtagaaacgcctgacgtcaatctagatcaagaggaagagatccagatggagacggatgagggaccaggaggcatcaatggtcatgctgacagccctgcccctgtgaacgggttcaatggctctggtgaagatgccagtcaggagaccgttcccaagccctcccttaggttggcctttgctgaatactgccgaatctctaacctcatcgtgcttcacctcaggaaaatggaagaagaggaggatgagtcagccctaaagaggagcgagctggtcaactggtacctgaaggaaatcgagtcggaaatcgactctgaagaagagctcataaataagaagaggatcatagagaaggttgttcatcgtctcacacactacgatcacgttctgattgagctcacccaggctggactgaaaggctccagtgaaggaagcgagagctatgaggaagatccttacctggtagtcaacccgaactacttgcttgaagattgagatatagaaggtgacttacggccaggaaccgggggtggcctaccttagccgggacctgggcatgcactgagaccgtttctggagcgatgcttgggggacagttgagaagagacagctgaacagtgagtaatgccgtgatttcatgctggacatgcgtgggtactttgtgcttttcctacacatgaaataaaaagtatttcagaaaacatgattgggatccaacttcaacaggacaagacaaagtgcccacgcatgtgccagcattaaatccacggccatgaactcagc

SEQ ID NO: 8187 - protein, 507 aa, Rattus norvegicus
  ref <308>: DATABASE ACCESSION NUMBER: SWISS-Prot / Q62724
  ref <309>: DATABASE ENTRY DATE: 1998-12-15
LRDEEQTAESIKNQMTVKEWEKVFEMSQDQNLYHNLCTSLFPTIHGNDEVKRGVLLMLFGGVPKTTGEGTSLRGDINVCIVGDPSTAKSQFLKHVDEFSPRAVYTSGKASSASGLTAAVVRDEESHEFVIEAGALMLADNGVCCIDEFDKMDMRDQVAIHEAMEQQTISITKAGVKATLNARTSILAAANPVSGHYDRSKSLKQNINLSAPIMSRFDLFFILVDECNEVTDYAIARRIVDLHSRIEESIDRVYSLDDIRRYLLFARQFKPKISKESEDFIVEQYKRLRQRDGSGITKSSWRITVRQLESMIRLSESMARMHCCDEVQPKHVKEAFRLLNKSIIRVETPDVNLDQEEEIQMETDEGPGGINGHADSPAPVNGFNGSGEDASQETVPKPSLRLAFAEYCRISNLIVLHLRKMEEEEDESALKRSELVNWYLKEIESEIDSEEELINKKRIIEKVVHRLTHYDHVLIELTQAGLKGSSEGSESYEEDPYLVVNPNYLLED

SEQ ID NO: 8188 - DNA, 2917 bp, Homo sapiens
  ref <308>: DATABASE ACCESSION NUMBER: EMBL / D84557
  ref <309>: DATABASE ENTRY DATE: 1997-04-25
ggaaaaaagcgacttgtggcggtcgagcgtggcgcaggcgaatcctcggcactaagcaaatatggacctcgcggcggcagcggagccgggcgccggcagccagcacctggaggtccgcgacgaggtggccgagaagtgccagaaactgttcctggacttcttggaggagtttcagagcagcgatggagaaattaaatacttgcaattagcagaggaactgattcgtcctgagagaaacacattggttgtgagttttgtggacctggaacaatttaaccagcaactttccaccaccattcaagaggagttctatagagtttacccttacctgtgtcgggccttgaaaacattcgtcaaagaccgtaaagagatccctcttgccaaggatttttatgttgcattccaagacctgcctaccagacacaagattcgagagctcacctcatccagaattggtttgctcactcgcatcagtgggcaggtggtgcggactcacccagttcacccagagcttgtgagcggaacttttctgtgcttggactgtcagacagtgatcagggatgtagaacagcagttcaaatacacacagccaaacatctgccgaaatccagtttgtgccaacaggaggagattcttactggatacaaataaatcaagatttgttgattttcaaaaggttcgtattcaagagacccaagctgagcttcctcgagggagtatcccccgcagtttagaagtaattttaagggctgaagctgtggaatcagctcaagctggtgacaagtgtgactttacagggacactgattgttgtgcctgacgtctccaagcttagcacaccaggagcacgtgcagaaactaattcccgtgtcagtggtgttgatggatatgagacagaaggcattcgaggactccgggcccttggtgttagggacctttcttataggctggtctttcttgcctgctgtgttgcgccaaccaacccaaggtttggggggaaagagctcagagatgaggaacagacagctgagagcattaagaaccaaatgactgtgaaagaatgggagaaagtgtttgagatgagtcaagataaaaatctataccacaatctttgtaccagcctgttccctactatacatggcaatgatgaagtaaaacggggtgtcctgctgatgctctttggtggcgttccaaagacaacaggagaagggacctctcttcgaggggacataaatgtttgcattgttggtgacccaagtacagctaagagccaatttctcaagcacgtggaggagttcagccccagagctgtctacaccagtggtaaagcgtccagtgctgctggcttaacagcagctgttgtgagagatgaagaatctcatgagtttgtcattgaggctggagctttgatgttggctgataatggtgtgtgttgtattgatgaatttgataagatggacgtgcgggatcaagttgctattcatgaagctatggaacagcagaccatatccatcactaaagcaggagtgaaggctactctgaacgcccggacgtccattttggcagcagcaaacccaatcagtggacactatgacagatcaaaatcattgaaacagaatataaatttgtcagctcccatcatgtcccgattcgatctcttctttatccttgtggatgaatgtaatgaggttacagattatgccattgccaggcgcatagtagatttgcattcaagaattgaggaatcaattgatcgtgtctattccctcgatgatatcagaagatatcttctctttgcaagacagtttaaacccaagatttccaaagagtcagaggacttcattgtggagcaatataaacatctccgccagagagatggttctggagtgaccaagtcttcatggaggattacagtgcgacagcttgagagcatgattcgtctctctgaagctatggctcggatgcactgctgtgatgaggtccaacctaaacatgtgaaggaagctttccggttactgaataaatcaatcatccgtgtggaaacacctgatgtcaatctagatcaagaggaagagatccagatggaggtagatgagggtgctggtggcatcaatggtcatgctgacagccctgctcctgtgaacgggatcaatggctacaatgaagacataaatcaagagtctgctcccaaagcctccttaaggctgggcttctctgagtactgccgaatctctaaccttattgtgcttcacctcagaaaggtggaagaagaagaggacgagtcagcattaaagaggagcgagcttgttaactggtacttgaaggaaatcgaatcagagatagactctgaagaagaacttataaataaaaaaagaatcatagagaaagttattcatcgactcacacactatgatcatgttctaattgagctcacccaggctggattgaaaggctccacagagggaagtgagagctatgaagaagatccctacttggtagttaaccctaactacttgctcgaagattgagatagtgaaagtaactgaccagagctgaggaactgtggcacagcacctcgtggcctggagcctggctggagctctgctagggacagaagtgtttctggaagtgatgcttccaggatttgttttcagaaacaagaattgagttgatggtcctatgtgtcacattcatcacaggtttcataccaacacaggcttcagcacttcctttggtgtgtttcctgtcccagtgaagttggaaccaaataatgtgtagtctctataaccaatacctttgttttcatgtgtaagaaaaggcccattacttttaaggtatgtgctgtcctattgagcaaataactttttttcaattgccagctactgcttttattcatcaaaataaaataacttgttctg

SEQ ID NO: 8189 - protein, 821 aa, Homo sapiens
  ref <308>: DATABASE ACCESSION NUMBER: SWISS-Prot / Q14566
  ref <309>: DATABASE ENTRY DATE: 2001-10-16
MDLAAAAEPGAGSQHLEVRDEVAEKCQKLFLDFLEEFQSSDGEIKYLQLAEELIRPERNTLVVSFVDLEQFNQQLSTTIQEEFYRVYPYLCRALKTFVKDRKEIPLAKDFYVAFQDLPTRHKIRELTSSRIGLLTRISGQVVRTHPVHPELVSGTFLCLDCQTVIRDVEQQFKYTQPNICRNPVCANRRRFLLDTNKSRFVDFQKVRIQETQAELPRGSIPRSLEVILRAEAVESAQAGDKCDFTGTLIVVPDVSKLSTPGARAETNSRVSGVDGYETEGIRGLRALGVRDLSYRLVFLACCVAPTNPRFGGKELRDEEQTAESIKNQMTVKEWEKVFEMSQDKNLYHNLCTSLFPTIHGNDEVKRGVLLMLFGGVPKTTGEGTSLRGDINVCIVGDPSTAKSQFLKHVEEFSPRAVYTSGKASSAAGLTAAVVRDEESHEFVIEAGALMLADNGVCCIDEFDKMDVRDQVAIHEAMEQQTISITKAGVKATLNARTSILAAANPISGHYDRSKSLKQNINLSAPIMSRFDLFFILVDECNEVTDYAIARRIVDLHSRIEESIDRVYSLDDIRRYLLFARQFKPKISKESEDFIVEQYKHLRQRDGSGVTKSSWRITVRQLESMIRLSEAMARMHCCDEVQPKHVKEAFRLLNKSIIRVETPDVNLDQEEEIQMEVDEGAGGINGHADSPAPVNGINGYNEDINQESAPKASLRLGFSEYCRISNLIVLHLRKVEEEEDESALKRSELVNWYLKEIESEIDSEEELINKKRIIEKVIHRLTHYDHVLIELTQAGLKGSTEGSESYEEDPYLVVNPNYLLED

SEQ ID NO: 8190 - DNA, 1203 bp, Rattus norvegicus
  ref <308>: DATABASE ACCESSION NUMBER: EMBL / U17607
  ref <309>: DATABASE ENTRY DATE: 2000-03-04
gggggataggagtgacttaaattctccctgtccgaggagatataaataactccatgtaaaattaatgcagttctcggtgtcaaaatgtccacagaaggagggtttggcagtaccagcagcagtgatgcccagcaaagcctccagtccttctggcccagagtcatggaagaaatccgaaacttaacagtgaaagatttccgagtacaagaactaccactggctcgtattaagaagattatgaaactggatgaagatgtgaagatgatcagtgcagaagcccctgtgctgtttgctaaggcagcccagatcttcatcacagagctgactcttcgagcctggatccacacagaggataacaagcgtcgtactcttcagaggaatgatattgctatggcaattacaaaatttgatcagtttgactttctcatcgacattgttccaagagatgaactgaaacctccaaagcgccaggaggaggtacgccagtctgtgactcccgcggagcctgtccagtactacttcacgctggctcagcagcccactgctgtccaggtccagggacagcagcaaggccagcagaccaccagttctacgaccaccatccagcctggccagatcatcattgcgcagcctcaacagggtcagaccacacccgtgaccatgcaggttggagaaggtcagcaggtgcagattgtgcaggcccaacctcagggtcaggcccagcaggcccagagtggtactggacagaccatgcaggtgatgcagcagatcattaccaacacaggagagatccaacagatcccggtgcagctgaatgccggccagttgcagtatatccgcttagcccagcctgtatcaggcacccaagttgtgcagggacagatccagacccttgctaccaatgcccaacagatcacacagacagaggtccaacaaggacagcagcagttcagccagttcacagacggacagcagctgtaccagatccagcaagtcaccatgcctgcaggccaagaccttgcccagcccatgtttattcagtcagccaaccagccctctgatgggcagaccccccaggtgactggagactgaggcctgagctgcaaagccaaggaaccccaacacaatatttgccatagagcccccaggcgatggggacacaccttccctcaccagaggacccgggacttcattgcctcctgc

SEQ ID NO: 8191 - protein, 335 aa, Rattus norvegicus; identical to SEQ ID NO: 5239
  ref <308>: DATABASE ACCESSION NUMBER: SWISS-Prot / Q62725
  ref <309>: DATABASE ENTRY DATE: 2002-06-15

SEQ ID NO: 8192 - DNA, 2684 bp, Homo sapiens; identical to SEQ ID NO: 5240
  ref <308>: DATABASE ACCESSION NUMBER: EMBL / AK055329
  ref <309>: DATABASE ENTRY DATE: 2002-08-06

SEQ ID NO: 8193 - protein, 458 aa, Homo sapiens
  ref <308>: DATABASE ACCESSION NUMBER: SWISS-Prot / BAA12818
  ref <309>: DATABASE ENTRY DATE: 2002-06-15
MSTEGGFGGTSSSDAQQSLQSFWPRVMEEIRNLTVKDFRVQELPLARIKKIMKLDEDVKMISAEAPVLFAKAAQIFITELTLRAWIHTEDNKRRTLQRNDIAMAITKFDQFDFLIDIVPRDELKPPKRQEEVRQSVTPAEPVQYYFTLAQQPTAVQVQGQQQGQQTTSSTTTIQPGQIIIAQPQQGQTTPVTMQVGEGQQVQIVQAQPQGQAQQAQSGTGQTMQVMQQIITNTGEIQQIPVQLNAGQLQYIRLAQPVSGTQVVQGQIQTLATNAQQGQRNASQGKPRRCLKETLQITQTEVQQGQQQFSQFTDGQRNSVQQARVSELTGEAEPREVKATGNSTPCTSSLPTTHPPSHRAGASCVCCSQPQQSSTSPPPSDALQWVVVEVSGTPNQLETHRELHAPLPGMTSLSPLHPSQQLYQIQQVTMPAGQDLAQPMFIQSANQPSDGQAPQVTGD

SEQ ID NO: 8194 - DNA, 2383 bp, Rattus norvegicus
  ref <308>: DATABASE ACCESSION NUMBER: EMBL / U17697
  ref <309>: DATABASE ENTRY DATE: 2000-03-04
gctaataagtgtgtcctttgctgacggtaccgagaaaccccgccccgtctgtacgtcctggtggcgcgcgggccggctgtgggtgtgggaagggcccgggtcagtcgacacccggaaggccggggccgcctcccgacgcccacctactagcttctccagctccatctttcccgagaagcggcagggacctccggcctccagcttaccgggcggatcgaagcagcggtcgggatgtactgctgggcttgctgcagtcaggcggctcggtgctcgggcaggcgatggagcaggtgacaggaggcaacctgctttccacgctgctcatcgcctgcgccttcacgcttagccttgtctacctgttccgcctcgcagtgggccacatggtccagctgcccgctggagcgaaaagtccgccatatatttactctccaattccgttccttggccacgcgatagcatttgggaaaagtccaattgagttcctggaaaatgcatatgagaagtacggacctgtgtttagctttaccatggtgggcaagactttcacttaccttttggggagtgacgcagccgccctgctcttcaacagtaagaacgaagacctgaatgcggaagaggtctacggtcggctgacaacgcccgtgtttgggaagggagttgcatacgacgtgccaaatgcagttttcctggaacagaagaaaatactaaaaagcggccttaacatagcccacttcaagcagtatgtttctatcattgaaaaagaagcgaagaagtactttaaaagttggggagaaagcggagaaagaaatgtgtttgaagcgctgtctgagctcataattttaacagctagccattgcttacatggaaaggaaattagaagtcagctcaacgagaaggtggctcagctgtacgcagacctggatggaggctttagccatgccgcctggctgttgccaggctggctgcccctgccgagtttcaggcgcagggacagagcccatcgagagatcaagaatattttctacaaggccatccagaaacgtaggctgtcaaaagaaccagccgaggacattcttcaaactttactggattctacatacaaggatgggcgtcctctgacggacgacgagatcgcagggatgctcatcggactgctgctggccggacagcacacatcctccaccaccagtgcctggatgggcttctttctggccagagataaaccacttcaagacaaatgctacttagaacagaaaacggtgtgcggggaggatctgcctcccttaacttatgagcagttgaaggatctgaatttacttgatagatgcataaaagaaacactaagactgaggcctcctataatgaccatgatgagaatggccaagacccctcagactgtggctgggtacaccattcctccaggacatcaggtgtgtgtttctccaactgtcaatcaaagactgaaagactcctgggtagaacgcttggacttcaatcctgaccgctacctacaggacaacccagcgtcgggagagaagtttgcctatgtgccgtttggagccgggcgccatcgttgtattggagaaaattttgcctatgttcaaattaagacaatttggtccactatgcttcgtttatatgaatttgacctcatcaatggatattttcccagtgtgaattatacaacaatgattcataccccagaaaacccagtaatccgttacaaacgaagatcaaaatgaagaaaggaacaaggagccagtgtggagacgggactgcaagctgcagcttggcagagaatgaagctttgacacagctttcatactgtactgttttttaagtgtgtggttctgaaagccagtttgattttaatgttttattaactcggtgatttttgtcagacctaatggcatttgaaacagttataatagttctgataggatttcagggaagccaagtttatgttagaaatcgtttaggggagcctcggtattcagagatgatacagaatatagcatccaggtaactaacttcagaagcacacgttgccgtagggagattccggcttggaactagtttgggaagttttaagcctggtcagatgctacagaggcaatgggtcattggtgtggttgggccacttctgtgcgtaaagatgtgagagggtgaaggataagttttctgcgaacgtctagatggtgtgagtgccctttgtagtgttaactgagagcaccactccagcgagatggcagcaatcttggaccttatcttgataaccttatttcctaaaaataataaatactaaagagtacttatgttattggttccagaaaaatccaaaatcaaatccttgtggaatttttaattttaattaaactcgtgc

SEQ ID NO: 8195 - protein, 503 aa, Rattus norvegicus [sequence omitted]

SEQ ID NO: 8196 - DNA, 798 bp, Homo sapiens; identical to SEQ ID NO: 6458
  ref <308>: DATABASE ACCESSION NUMBER: EMBL / BG567904
  ref <309>: DATABASE ENTRY DATE: 2001-04-11

SEQ ID NO: 8197 - protein, 503 aa, Homo sapiens [sequence omitted]

SEQ ID NO: 8198 - DNA, 2446 bp, Rattus norvegicus
  ref <308>: DATABASE ACCESSION NUMBER: EMBL / U17834
  ref <309>: DATABASE ENTRY DATE: 2000-03-04
ccaggagtgagcagctgctcccggttggccctgacggacagacaaaccgacagcctgacatcctagtccaccaactaaccagcctgtacctggctgcttccccctccccaggaacattgaccatgcgtcccctgtggctactcaccttgctgctggctctgagccaggccttgccctttgagcagaagggcttctgggacttcaccttggatgatgggctgctcatgatgaatgatgaggaggcttcaggctcagacaccacttcaggtgtccctgacctggactctctcacacctaccttcagtgccatgtgtccttttggctgccactgccacctgcgggttgttcagtgctctgacttgggtctgaagactgtgcccaaggagatctcacctgataccacactgctagacctgcagaacaatgacatctctgaactccgcaaggatgacttcaaaggcctccagcacctctatgctctggtcctggtaaacaataagatctccaagatccatgagaaggcctttagccctctgcggaagctgcagaaactctacatctccaagaaccacctggtggagattcctcccaacctgcccagctccctggtagagctacgaatccatgacaaccgtatccgcaaagtgcccaagggcgtgttcagtgggctccggaacatgaactgcattgagatgggtgggaatcccctggagaacagtggctttgaacccggagcctttgatggcctgaagctcaactacctgcgcatctcagaggccaagctcactggcatccccaaagatctccctgagaccctgaatgaacttcacttggaccacaacaaaatccaggctatcgagttggaggatctacttcgctactccaagctgtacaggctgggcttaggacacaatcagatccgaatgattgagaatgggagcctgagttttctgcctaccctgagggaacttcacttggacaacaacaagctgtcccgggtgcctgctggcctcccagatctcaaactcctccaggttgtctatctgcactccaacaacatcaccaaggtgggcatcaacgatttctgccccatgggctttggagtcaagagggcctactataatggcatcagcctcttcaacaaccctgtgccctactgggaagtgcagcctgccaccttccgctgcgtcactgaccgcctggccatccaatttggaaattataagaagtagaagcagtggtagccaccatggctcgttggtgagagtctctgaggaacatagccagttgttccacaggggaaggggaacaaagaagcaacacctttgttccccaatattaactcactgcccaccacagcttcctctggctcctaagcatgcacatatgcacatggcctggcctctcccattcccctcagcctttgagatttaacactcacccaccatgtccactcagagactccctataaatcttttttcttgctcatcctgaaactcagatgtttgtgggaagaatggacagagcacatggccacagttactgttccatccgggcatgtattcctcctcttccttacccatgtctgacttctagctctcctgggctctgctgctgcccttatcctctggtgatctctcttcaacaagttcactacctgtccatccaagccgccacctggctctactaactcctggatccttccctctctccaactctgttatgcttcctggcacttttcttccttctggggttatagatctgtccctgccatctctggacctggttcatatctttctgtctttgtctctttctgtatttctttgcctatatctctgtctgtctctatttctgtttctgtctctctgtctttatatctgcctctctctctctctctctctctctctctctctctctctctctctcacacacacacacacacacacacaaacacacaaacacaaacacacacacacacacacacacacacacacacacacacacacacacacacacaccgtcttctccaggctgctttctgtttcacaggtctctggccagtccctgcacaaacaaatatagggaaactattttcctgactgccctacctggcacttgatctcccatccctggaggaagctggaagctggaggcccagaatcctatccatattgtccaggaaagggtccatactctgttatcaagatgaggatcaggaagcttcctagcccctggagaggctcagcaggccaccagaggcccccaccccgaaccagtttgcattggcccctgccctctccccaagatggctaggtcccctccctcacccctgggtccctgctgtggcaggaggtggtggtcagttgtacccagcaggagggagtgctgcttatgaggtcagttgtctctcaattaaagaaacactgtgcaataaaaaaaaaaaaaa

SEQ ID NO: 8199 - protein, 369 aa, Rattus norvegicus
  ref <308>: DATABASE ACCESSION NUMBER: SWISS-Prot / P47853
  ref <309>: DATABASE ENTRY DATE: 2002-06-15
MRPLWLLTLLLALSQALPFEQKGFWDFTLDDGLLMMNDEEASGSDTTSGVPDLDSLTPTFSAMCPFGCHCHLRVVQCSDLGLKTVPKEISPDTTLLDLQNNDISELRKDDFKGLQHLYALVLVNNKISKIHEKAFSPLRKLQKLYISKNHLVEIPPNLPSSLVELRIHDNRIRKVPKGVFSGLRNMNCIEMGGNPLENSGFEPGAFDGLKLNYLRISEAKLTGIPKDLPETLNELHLDHNKIQAIELEDLLRYSKLYRLGLGHNQIRMIENGSLSFLPTLRELHLDNNKLSRVPAGLPDLKLLQVVYLHSNNITKVGINDFCPMGFGVKRAYYNGISLFNNPVPYWEVQPATFRCVTDRLAIQFGNYKK

SEQ ID NO: 8200 - DNA, 875 bp, Homo sapiens
  ref <308>: DATABASE ACCESSION NUMBER: EMBL / BC001754
  ref <309>: DATABASE ENTRY DATE: 2001-07-13
cgggattcggatgggggcgggtgggggacgctgcagctggggccatttgaggggagcccatggggcctgaaaggcatctgtcaggcgcccctgcccggatggcaacagtagttctaggaggagacaccatgggccctgagcgtatcttccccaatcagactgaggaactgggacatcagggcccttcagaaggcactggggattggagcagtgaggagcctgaggaagagcaggaggaaacggggtcgggcccagctggctactcctaccagcccctgaaccaagatcctgaacaagaggaggtggaactggcaccagtgggggatggagatgtagttgctgacatccaggatcgaatccaggccctggggcttcatttgccagacccaccattagagagtgaagatgaagatgaggagggagctacagcgttgaacaaccacagctctattcccatggacccagaacatgtagagctggtgaaaaggacaatggctggagtaagcctgcctgcgccaggggttcctgcctgggctcgggagatatcggatgcccagtgggaagatgtggtacagaaagccctccaagcccggcaggcatcccctgcctggaagtgaccacagtgagagctgccttatattcctacattccaggccagaaccagcacaggactgaacacatccctggttgtaatgtccatttccatcttccccgtctccctttccacatcaaggcacatcagacttctcagagacccactttattcagttctgtacatatggggacatcggtccaagcccaacccaccttagcatgtatcactctgtggagaataaagcaccctatgtacacaaaaaaaaaaaaaaaaaaaaaaa

SEQ ID NO: 8201 - protein, 172 aa, Homo sapiens
  ref <308>: DATABASE ACCESSION NUMBER: SWISS-Prot / Q16626
  ref <309>: DATABASE ENTRY DATE: 2002-06-15
MATVVLGGDTMGPERIFPNQTEELGHQGPSEGTGDWSSEEPEEEQEETGSGPAGYSYQPLNQDPEQEEVELAPVGDGDVVADIQDRIQALGLHLPDPPLESEDEDEEGATALNNHSSIPMDPEHVELVKRTMAGVSLPAPGVPAWAREISDAQWEDVVQKALQARQASPAWK

SEQ ID NO: 8202 - DNA, 627 bp, Rattus norvegicus
  ref <308>: DATABASE ACCESSION NUMBER: EMBL / U17919
  ref <309>: DATABASE ENTRY DATE: 2000-03-04
gaggagccagccaacacactgcagcctcatcgtcatctccccacctaaggccaccagcgtctgaggagctatgagccagagcaaggatttgcagggaggaaaagcttttggactgctgaaagcccagcaggaagagaggttggatgggatcaacaagcacttcctcgatgatcccaagtacagcagtgatgaggatctgcagtccaaactggaggccttcaagacgaagtacatggagtttgatctgaatggcaatggagatatcgatattatgtccttgaagcgaatgctggagaaacttggggttcccaagacccatctagagctgaagaaattaattagagaggtgtccagtggctccgaggagacgttcagttactctgactttctcagaatgatgctgggcaagagatctgccatcttgagaatgattctgatgtatgaggagaaaaacaaagaacaccagaagccaactggtcccccagccaagaaagctatttctgagttgccctaattggaggtggatataacacggtgggaccgaggaccttctaatgacagcagcatgggaaaagaagaagcagttgtgagccagagtcaaactaaataaataatgctccctagtgc

SEQ ID NO: 8203 - protein, 147 aa, Rattus norvegicus
  ref <308>: DATABASE ACCESSION NUMBER: SWISS-Prot / P55009
  ref <309>: DATABASE ENTRY DATE: 2002-06-15
MSQSKDLQGGKAFGLLKAQQEERLDGINKHFLDDPKYSSDEDLQSKLEAFKTKYMEFDLNGNGDIDIMSLKRMLEKLGVPKTHLELKKLIREVSSGSEETFSYSDFLRMMLGKRSAILRMILMYEEKNKEHQKPTGPPAKKAISELP

SEQ ID NO: 8204 - DNA, 1235 bp, Homo sapiens
  ref <308>: DATABASE ACCESSION NUMBER: EMBL / U95213
  ref <309>: DATABASE ENTRY DATE: 1998-06-29
gaggaaaagctttcggactgctgaaggcccagcaggaagagaggctggatgagatcaacaaggcaattcctagacgatcccaaatatagcagtgatgaggatctgccctccaaactggaaggcttcaaaggtgagggggaaactgtaggcggtggagacagggctgggggtaggagggttaggatttccacaagaacaaggcaggaacagcagagataaaaagtttacttttgtggtagcaaaaggggaacctgcctttattgccctcctgccacactgcggtccctttcccgggcctgcctctctcagcatcccctctagctccttacaacctagcggggccctcaactcccaaccccacttcctctgcctgcccctcctcctccttccacgttgtctcctccacctagcagttggttggcaaccccttcctcacctcacccagagaaatacatggagtttgaccttaatggaaatggcgatattggtgagaaacgggtgatttgcgggggcagggtggtgtgcaggcctaagaagacagaggtctctcctacatgctccattcctcatgatttgggagggggcccacctaccacagtgggaggaaggagaatggggatgcggaagtgggagaggagagagagggtctccccaccttctccccatccccatcctctgcccccagatatcatgtccctgaaacgaatgctggagaaacttggagtccccaagactcacctagagctaaagaaattaattggagaggtgtccagtggctccggggagacgttcagctaccctgactttctcaggatgatgctgggcaagagatctgccatcctaaaaatgtgagtgtcaatttccaacctcccctgtacttacctgttttctcctcccccatccctacccttgtccacaggctcaacatttctacacgttgcccatcatcccttcttccatccttagagggacccttccaaggtcccgaccccatccctatccatagtcctggtccccagaaactccaacccctgcccttcctcttcccccttccaccctcacatccccatccccttctagcctttcctagcaccctatgatttattcccttgagaggagtgttccctgatccctgtgcctcttcccatctcaaccaggatcctgatgtatgaggaaaaagcgagagaaaaggaaaagccaacaggccccccagccaagaaagctatctctgagtt

SEQ ID NO: 8205 - protein, 147 aa, Homo sapiens
  ref <308>: DATABASE ACCESSION NUMBER: SWISS-Prot / P55008
  ref <309>: DATABASE ENTRY DATE: 2002-06-15
MSQTRDLQGGKAFGLLKAQQEERLDEINKQFLDDPKYSSDEDLPSKLEGFKEKYMEFDLNGNGDIDIMSLKRMLEKLGVPKTHLELKKLIGEVSSGSGETFSYPDFLRMMLGKRSAILKMILMYEEKAREKEKPTGPPAKKAISELP

SEQ ID NO: 8206 - DNA, 1098 bp, Rattus norvegicus
  ref <308>: DATABASE ACCESSION NUMBER: EMBL / U18771
  ref <309>: DATABASE ENTRY DATE: 2000-03-04
gatagtgaattcgtgttgctttcaaggtcatgctggtgggggattccggtgtggggaagacgtgcctgctcgtgcgcttcaaggatggggccttcctggctggtaccttcatctccactgtgggcatcgacttccggaataaagttctggatgtggatggcatgaaggtgaagctgcagatctgggacacggctggtcaggagcggttccgaagtgtcacccatgcctactaccgggatgctcacgcactgttgctgctctacgacatcaccaacaaagattccttcgacaacatccaggcctggttgacagaaatccaggaatatgcccagcaggacgtggtgctcatgctgttggggaacaaggttgactctactcaagaacgagtggtaaagagggaagatggggagaaattagccaaggagtatgggctgccattcatggagaccagcgccaagagcggcctcaatgtggacttggcttttacagccatagcaaaggagctgaaacaaagatccaccaaggctcccagtgagccgcgcttcaggctgcatgactatgtgaagagggagggccgaggggtctcctgctgtcgactctgaacctagctgaatttcggttctacgctggaggcagctgtttgggataccataggtgatggatgccagaatgtcttccttttcaagacacctgaggctgatgctcttcagccccttggcctcaggggccatcacagaaagcatacaaaccacactatggcctgtggctgccctcttctgggcactcccagcaggaaggatggcaccacattcgtgcctcctatgaaaagccatgcttactgcacacggcctgggaaggaccccacacacgaccaaaggctacaagaatcatgttgtccatttgttgggttgcttccaagtcaactagtaggctctgatgtaggaaaccacaggaagattgggctgatagaaccaggtcactacttagcaggctggcccagtccttcccaccttgtactaaagtcaccagactacaaatgttgtgtgaaaacctgtccccattaataaaggtgtttctgcccgggaattcgcggtcacc

SEQ ID NO: 8207 - protein, 190 aa, Rattus norvegicus
  ref <308>: DATABASE ACCESSION NUMBER: SWISS-Prot / P51156
  ref <309>: DATABASE ENTRY DATE: 1997-11-01
MLVGDSGVGKTCLLVRFKDGAFLAGTFISTVGIDFRNKVLDVDGMKVKLQIWDTAGQERFRSVTHAYYRDAHALLLLYDITNKDSFDNIQAWLTEIQEYAQQDVVLMLLGNKVDSTQERVVKREDGEKLAKEYGLPFMETSAKSGLNVDLAFTAIAKELKQRSTKAPSEPRFRLHDYVKREGRGVSCCRL

SEQ ID NO: 8208 - DNA, 1513 bp, Homo sapiens
  ref <308>: DATABASE ACCESSION NUMBER: EMBL / BC007681
  ref <309>: DATABASE ENTRY DATE: 2001-07-13
ggcacgaggcaagagcaaaggggccagcacccccgctgcctccacgctgcccaccgccaacggggcccgaccggcgcgctccgggactgcgctttccggccccgacgcgccgcccaacgggccttgcagcccggccggccctcgcttggcggcggtgtcgacttctacgacgtcgccttcaaggtcatgctggtgggggactcgggtgtggggaagacctgtctgctggtgcgattcaaggatggtgctttcctggcggggaccttcatctccaccgtaggcattgacttccggaacaaagttctggacgtggatggtgtgaaggtgaagctgcagatgtgggacacagctggtcaggagcggttccgcagtgttacccatgcctactaccgggatgctcatgctctgctgctgctctacgatgtcaccaacaaggcctcctttgacaacatccaggcctggctgaccgagatccacgagtacgcccagcacgacgtggcgctcatgctgctggggaacaaggtggactctgcccatgagcgtgtggtgaagagggaggacggggagaagctggccaaggagtatggactgcccttcatggagaccagcgccaagacgggcctcaacgtggacttggccttcacagccatagcaaaggagttgaagcagcgctccatgaaggctcccagcgagccgcgcttccggctgcatgattacgttaagagggagggtcgaggggcctcctgctgccgcccttgaacctggctgagctcagtcctctggaggaagccgcccagtccctagaaggctggacagagggtctccaggcccttctgactttgttgcccagtggccaacgcccgagtgtctgttttcaggagccccaggtcaagccttgtcccttcctcctcccagcaacagtcccaacaagcaggcttctgagagcccgtggccgcacactggccgccacggaaaagcagtcttctgcacgggacggggagcggcaagtggacagactttgccacggtgctctgctgccccctcctgggcacgtccaggtgagggagggctggggctggcaccacgcacagtgcctaaccctagaaaagccatgtcttcagccgcacatgctcaggcagctaagggaggacgcctgcccacgcctgggacagaaggcttcactgctaatcacatcgtgcatctgtgtgtcctgggagctgcctgctcccggcccaccctctaggaggctctggctcaaacagcaatagggtcttcctcactgaccttggaggatgcctgtggccttgtgataaaatgtgggaaatcacagaaaacaccagaaacaacaactgccagcccggcctggccacaggtgaggtctgtgatttccgagcacgctccaccttgcactcaacttggccttttgattgcacaagcctttgttttcagtcctagtgaataaagttgtgttttctggaaaaaaaaaaaaaaaaaaaaaaaaaaaaaaaaaaaa

SEQ ID NO: 8209 - protein, 190 aa, Homo sapiens
  ref <308>: DATABASE ACCESSION NUMBER: SWISS-Prot / Q9ULW5
  ref <309>: DATABASE ENTRY DATE: 2002-06-15
MLVGDSGVGKTCLLVRFKDGAFLAGTFISTVGIDFRNKVLDVDGVKVKLQMWDTAGQERFRSVTHAYYRDAHALLLLYDVTNKASFDNIQAWLTEIHEYAQHDVALMLLGNKVDSAHERVVKREDGEKLAKEYGLPFMETSAKTGLNVDLAFTAIAKELKQRSMKAPSEPRFRLHDYVKREGRGASCCRP

SEQ ID NO: 8210 - DNA, 2310 bp, Rattus norvegicus
  ref <308>: DATABASE ACCESSION NUMBER: EMBL / U19614
  ref <309>: DATABASE ENTRY DATE: 2000-03-04
tagaatcgaaccgcggaaagtccatcgtccctatcgaccaacagctacgtaaacaactatggcgggagagaggtggcgggccgaggggctgggagaaggatgggccatctacgtcacacccagagcccccatccgggagggaaggcggaggctcgccactcaaaatggcgacgggagtgacgcgcctgcgtacgaaactcatccgtcgcgccacggacgacgggaagtgaggttttcagaagagccgccagaagtgtacggcgacttcgagccccgggcggccaaagaaaggtctccgggggaaagacgaaccccgccagaaaagttccggtcggattctgcgaaagaggaagtgagagaaagcgcttacaatcttcggtctcgacaacggaggcagcggggaccccaggaagccgaggagatgaagacgcggaggtctactcgtctggagcagcactcacagcaggcgcagcagcagctgtcaccggctacgagcgggcgaggattacgggacgctcagtccttaagtgaggaccgcggagaggatgaaccttcttcccaacctgttacaagccaaacagtctcaaagaaaactgtcaggacaccagagacttcagtgatgagtgaagatcctatcagtaacttatgcagacccccattaagaagcccaagacctgacgcttccattgtccaacacatcaacccctttgaggaagatgaagccgcagtagcagccggtcaccatccagactcactgtgggggttaccacacagtcggggggacttcacagctcatgagaatcaaccctcactgctgcccacaggatgtcaaaaaaaccctcaagagtgggttgaacaagctgtgagaatgaggactagaatggcatataacaacattcagaaatcagactttggaaaccaatctccatcaacctccaggcaacaagcagctgtacaacccccagatgagtcttctgtcaagataaaatggtggctgctgatacttgttgctgctctggccatgggaatatattggttctttcatactcctgtagtagaaatcactgcagctcaggatgctgcggaagtgctcaagtgtctgagtgaacagatcgccgatgcctactcttccttccgcagtgtccgtgccatccggatcgacggagcaggcaaagctgctcaagacagtgacctcgttaagcacgaagtcgatcaggaactgacagatggatttagaaatggccagaatgcagctgtggtccaccgcttcgaatccctgcctgcaggctcaaccttgatcttctataaatactgtgaccatgaaaacgcagccttcaaagatgtggccctcgtcttgacggtactgttggaggagcagacgctggaagccagtctaggcctaaaggaaattgaggagaaagtgagggatttccttaaagtcaagttcaccagctctgacacggccaactcctacaaccacatggacccagacaagctcaatggactctggagccgcatctcccacctcgtgctgcccgtgcagcctgagaatgctctgaaagcaggcagctgcttatgagggaaagaagcggaaatcctgtctcgagtttgaaccattttcagactttgtaaccagagacggattttggagcagtttttgaaaactggtttctttttaaaggaagtaaagttcatacataaaggtggaataactaaatcatttatgcagcctacttctctgtgatttgggagaatcgtttttctatttccacctagaaccatgttaaagatatttagcatagtgcacagtatatgcagtccccgagtgtctgctaccttgattctggccgaatcattcttgctgtgtgaccagcgagaagggctaggttcctctctcaagcaatcagctttctattgaattttggatttgtgtttgtgaccttattaatgtctgacaaccccctaattgtagctatggatttccctgttacttcttctctcataccattgaaatgtgtggtccttagtttctacctataaaaataaaactgggtgtgcagtttagccagcccctcccccactggtttgtagagagggagacaagggtgtgggaggtagaaagagaagagaaattgtttaatagggaagggaaggaaggaaggtaaaaagatgttgcaagctgggcatggtaagccagcctgttatcccagtattgtcccagtagtcaggaggagcagaggttcaaggtcagcctcatctatagagtgagttttctgccacctggactacatgagacactgtcttaaaaac

SEQ ID NO: 8211 - protein, 507 aa, Rattus norvegicus
  misc_feature (1)..(507): Xaa=Unknown amino acid
MAGERWRAEGLGEGWAIYVTPRAPIREGRRRLATQNGDGSDAPAYETHPSRHGRREVRFSEEPPEVYGDFEPRAAKERSPGERRTPPEKFRSDSAKEEVRESAYNLRSRQRRQRGPQEAEEMKTRRSTRLEQHSQQAQQQLSPATSGRGLRDAQSLSEDRGEDEPSSQPVTSQTVSKKTVRTPETSVMSEDPISNLCRPPLRSPRPDASIVQHINPFEEDEAAVAAGHHPDSLWGLPHSRGDFTAHENQPSLLPTGCQKNPQEWVEQAVRMRTRMAYNNIQKSDFGNQSPSTSRQQAAVQPPDESSVKIKWWLLILVAALAMGIYWFFHTPVVEITAAQDAAEVLKCLSEQIADAYSSFRSVRAIRIDGAGKAAQDSDLVKHEVDQELTDGFRNGQNAAVVHRFESLPAGSTLIFYKYCDHENAAFKDVALVLTVLLEEQTLEASLGLKEIEEKVRDFLKVKFTSSDTANSYNHMDPDKLNGLWSRISHLVLPVQPENALKAGSCLX

SEQ ID NO: 8212 - DNA, 1653 bp, Homo sapiens
  ref <308>: DATABASE ACCESSION NUMBER: EMBL / AK021613
  ref <309>: DATABASE ENTRY DATE: 2002-08-06
ctagaagagttccggtccgattctgcgaaagaggaagtgagagaaagcgcgtactaccttcggtctaggcagcggaggcagccgcgaccccaggaaaccgaggaaatgaagacgcgaaggactacccgccttcagcagcagcactcagagcagcctccgctacagccgtctcctgttatgaccaggagagggctgcgggactctcattcctctgaagaggttgaagcatcttcccaaactgatttaagccaaacgatctcaaagaaaactgtcaggagcatacaagaggctccagtgagtgaagatcttgtaatcaggttacgtcgaccccctctaagatacccaagatatgaagccaccagtgtccaacagaaggtcaatttctctgaagaaggagaaactgaagaagatgatcaagacagctctcacagcagtgtcactactgttaaggccagatccagggattctgatgaatctggagataaaaccaccagatcatctagtcaatatatagaatcattttggcagtcatcacaaagtcaaaacttcacagctcatgataagcaaccttcagtgctaagctcaggatatcaaaaaactccccaggaatgggccccacaaactgcaagaataaggaccaggatgcaaaatgacagcattctgaaatcagagcttggaaaccagtcaccatcaacctccagccgacaagtgactggacaaccccaaaatgcatcttttgtcaagaggaaccggtggtggctacttcctctgatagctgctcttgcctctgggagtttttggttctttagtactcctgaggtagaaaccactgctgttcaagagttccagaaccagatgaatcaacttaagaataagtaccaaggtcaagatgagaagctgtggaaaaggagccaaacattcctggaaaaacatcttaatagctcccatcctcggtctcagcctgctatcttactgctcactgctgcccgagatgctgaagaagcacttaggtgtctgagtgaacaaattgctgatgcctattcttcttttcgtagtgtccgtgccatccggattgatgggacagataaagctactcaagacagtgatactgtcaaactagaggtagaccaagaactgagcaatgggtttaagaatggccagaatgcagctgtggtacaccgctttgagtcatttcccgcaggctctactttgatcttctacaaatattgtgaccatgaaaacgcagccttcaaagatgtagccttagtcctgactgtcttattggaggaagagacacttggaacaagtctaggcctaaaggaagttgaagaaaaagtaagagattttcttaaagtcaagttcaccaattctaacacacccaactcctacaatcatatggacccagacaaactgaatggcctctggagccgtatttctcacttagttctgcctgtgcaacctgaaaatgccctgaaaaggggcatctgcttataagaagtgagagagaagaaaaatcatgtcccaagttctgagaattgttcacactttctaaccagagacagaattcagagctctttttgaaagaactagtttctttttaaagaagttaagtgcttacataaacatggaacatataaatcattcattcaacct

SEQ ID NO: 8213 - protein, 180 aa, Homo sapiens
  ref <308>: DATABASE ACCESSION NUMBER: SWISS-Prot / CAB43282
  ref <309>: DATABASE ENTRY DATE: 2002-10-01
RSQPAILLLTAARDAEEALRCLSEQIADAYSSFRSVRAIRIDGTDKATQDSDTVKLEVDQELSNGFKNGQNAAVVHRFESFPAGSTLIFYKYCDHENAAFKDVALVLTVLLEEETLGTSLGLKEVEEKVRDFLKVKFTNSNTPNSYNHMDPDKLNGLWSRISHLVLPVQPENALKRGICL

SEQ ID NO: 8214 - DNA, 2310 bp, Rattus norvegicus; identical to SEQ ID NO: 8210
  ref <308>: DATABASE ACCESSION NUMBER: EMBL / U19614
  ref <309>: DATABASE ENTRY DATE: 2000-03-04

SEQ ID NO: 8215 - protein, 507 aa, Rattus norvegicus; identical to SEQ ID NO: 8211
  misc_feature (1)..(507): Xaa=Unknown amino acid

SEQ ID NO: 8216 - DNA, 1653 bp, Homo sapiens; identical to SEQ ID NO: 8212
  ref <308>: DATABASE ACCESSION NUMBER: EMBL / AK021613
  ref <309>: DATABASE ENTRY DATE: 2002-08-06

SEQ ID NO: 8217 - protein, 180 aa, Homo sapiens; identical to SEQ ID NO: 8213
  ref <308>: DATABASE ACCESSION NUMBER: SWISS-Prot / CAB43282
  ref <309>: DATABASE ENTRY DATE: 2002-10-01

SEQ ID NO: 8218 - DNA, 2310 bp, Rattus norvegicus; identical to SEQ ID NO: 8210
  ref <308>: DATABASE ACCESSION NUMBER: EMBL / U19614
  ref <309>: DATABASE ENTRY DATE: 2000-03-04

SEQ ID NO: 8219 - protein, 507 aa, Rattus norvegicus; identical to SEQ ID NO: 8211
  misc_feature (1)..(507): Xaa=Unknown amino acid

SEQ ID NO: 8220 - DNA, 1653 bp, Homo sapiens; identical to SEQ ID NO: 8212
  ref <308>: DATABASE ACCESSION NUMBER: EMBL / AK021613
  ref <309>: DATABASE ENTRY DATE: 2002-08-06

SEQ ID NO: 8221 - protein, 180 aa, Homo sapiens; identical to SEQ ID NO: 8213
  ref <308>: DATABASE ACCESSION NUMBER: SWISS-Prot / CAB43282
  ref <309>: DATABASE ENTRY DATE: 2002-10-01

SEQ ID NO: 8222 - DNA, 2310 bp, Rattus norvegicus; identical to SEQ ID NO: 8210
  ref <308>: DATABASE ACCESSION NUMBER: EMBL / U19614
  ref <309>: DATABASE ENTRY DATE: 2000-03-04

SEQ ID NO: 8223 - protein, 507 aa, Rattus norvegicus; identical to SEQ ID NO: 8211
  misc_feature (1)..(507): Xaa=Unknown amino acid

SEQ ID NO: 8224 - DNA, 1653 bp, Homo sapiens; identical to SEQ ID NO: 8212
  ref <308>: DATABASE ACCESSION NUMBER: EMBL / AK021613
  ref <309>: DATABASE ENTRY DATE: 2002-08-06

SEQ ID NO: 8225 - protein, 180 aa, Homo sapiens; identical to SEQ ID NO: 8213
  ref <308>: DATABASE ACCESSION NUMBER: SWISS-Prot / CAB43282
  ref <309>: DATABASE ENTRY DATE: 2002-10-01

SEQ ID NO: 8226 - DNA, 3032 bp, Rattus norvegicus
  ref <308>: DATABASE ACCESSION NUMBER: EMBL / U19866
  ref <309>: DATABASE ENTRY DATE: 2000-03-04
agtgctctggcgagtagtcctccctcagccgcagtctctgggcctcttcagcttgagcggcggcgagcctgccacactcgctaagctcctccggcaccgcgcacttgccactgccactgccgcttcgcgcccgctgcagccgccggctctgaatccttctggcttccgcctcagaggagttcttagcctgtcccgaaccgtaaccccggcgagcagatggagctggaccatatgacgaccggcggcctccacgcctaccctgccccgcggggtgggccggccgccaaacccaatgtgatcctgcagattggtaagtgccgagctgagatgctggagcacgtacggaggacccaccggcatctgttgaccgaagtgtccaagcaggtggagcgagagctgaaagggttgcacaggtcggtgggcaagctggagaacaacttggacggctatgtgcccacgggcgactcacagcgctggaagaagtccatcaaggcctgtctctgccgctgccaggagaccatcgccaacctggagcgctgggtcaagcgtgagatgcacgtgtggagggaggtcttctaccgtctggagaggtgggccgaccgcctggagtccatgggcggcaagtacccagtgggcagcgagccggcccgccacactgtctctgtaggtgtggggggtccagagccctactgccaggaagctgatggctacgactacactgttagcccctatgccatcaccccgccacctgccgcaggagagctgcctgagcaggagtcagttggggctcagcaataccagtcttgggtgccaggtgaggatgggcaaccaagcccaggtctggatacccagatctttgaggacccacgggagttcctgagccacctggaagagtacctgcggcaggtgggtggctctgaagaatattggctgtcccagatccagaaccacatgaatgggccagccaagaagtggtgggagttcaaacagggctcggtgaagaactgggtggagttcaagaaggagtttctgcagtacagtgagggtacgctctcccgcgaagccattcagcgggagctggacctgccacagaagcagggtgagccacttgaccagttcctctggcgtaagcgggacctgtaccagacactgtatgtggacgctgaggaggaggagatcattcagtatgtggtgggcaccctgcagcccaagttcaagcgctttctgcgccacccacttcccaagaccctggagcagctcatccagaggggcatggaagttcaggacggcctggagcaggcagctgagccttctgtcacccctctgcccacagaggatgagactgaggcactcacgcctgctcttaccagcgagtcagtagccagtgacaggacccagcctgaatagaggggccagcccagggtccccagcctgcctgccacacccagtctgtggcttttgtcaactaggacttgattgagctggggctgacacccaaggggatgccctgtccagccagacaccttctcacccactggcctgactcacaactgccacacaaccatgattcatggacatcaagaagcccctctcccatagggctcccacctgccacctacccctcacctgtctgccctagtcctggccctgtctccagtggcctcaccctctacactctcagaccatcacagaacacctttggcttcctcattctgcatcagtgtccagggccctttgggtagtcaagaaatcaagtgtctgaaaggcaatgaaaagtaggcaccaaacccaaggggcatcccagggcagatgctaaagcagaatcagagatggccgaaggaacctctacttccggggatgcagcccgctcctacagacacagcagatccagctggtgccctacctgcctcccagagcaactggccagtcttgggcagcatagctcccctctcagggtgagctgaagcagcagacctgacgcgctggcgcctcctggcccccagcagtgattcataccagtgaagaaaagcagacttcggctccatgactcagccatgccaggcggagggtcccagaggggctgagtcctcagccccagctgaggcagcagctggagtcttcagagccaggtgaatgacaccaggtctcaagctgctgagaagtctttccggccatgtctggaaggggtaccaccccagcaccagcaccgtcccctcctctcttgaagctgcctgcacagaggttccaagacactttcaaggcagagaaaataggattacaaagaggaggtgccttggcagagggcagcacccagctcagcctcagagctgaaggtgaagacaagccagcgtgaaaccccgggtctgccacgaatgcccgctccgctggccactcaccagctgcctgccacaagccactgcagcttgagcagggtctgtgccctctcagcacagagcccagttcgctgcgtggcctttggcccccgccagaaccttgcaggagccttaaggttcgggccctagcccagcctgaccttacctgctgtgccctgcctgctggtcaagtccagtcccaggagaccccatgccttggctcctaggctgttccaggcacttccctgacctgccgggtgattgcccagctggaacctcatccacaccccagcaccaaccacctcgtgttggtaactgctcgtgtctgtagtctgagtaggccatgttgaggttcctccatctgcctggtccattggtgttctgagaccagttccactgctgttctgacagatcccccaccctgtgcccctgccagcccccacaggtttatttttgcacataaaccatgacccatactaatttggctagctctggggactagggagaccctggagatctcaagagtgtggctatcccctattttcaccaagccttcaatatccagccaggccatctggcccacaccatcttacctcaaagacagacatatatatatatatacatatatatgattttgttaataaaactatgaaatttaaa

SEQ ID NO: 8227 - protein, 396 aa, Rattus norvegicus
  ref <308>: DATABASE ACCESSION NUMBER: SWISS-Prot / AAA68695
  ref <309>: DATABASE ENTRY DATE: 1998-11-01
MELDHMTTGGLHAYPAPRGGPAAKPNVILQIGKCRAEMLEHVRRTHRHLLTEVSKQVERELKGLHRSVGKLENNLDGYVPTGDSQRWKKSIKACLCRCQETIANLERWVKREMHVWREVFYRLERWADRLESMGGKYPVGSEPARHTVSVGVGGPEPYCQEADGYDYTVSPYAITPPPAAGELPEQESVGAQQYQSWVPGEDGQPSPGLDTQIFEDPREFLSHLEEYLRQVGGSEEYWLSQIQNHMNGPAKKWWEFKQGSVKNWVEFKKEFLQYSEGTLSREAIQRELDLPQKQGEPLDQFLWRKRDLYQTLYVDAEEEEIIQYVVGTLQPKFKRFLRHPLPKTLEQLIQRGMEVQDGLEQAAEPSVTPLPTEDETEALTPALTSESVASDRTQPE

SEQ ID NO: 8228 - DNA, 2935 bp, Homo sapiens
  ref <308>: DATABASE ACCESSION NUMBER: EMBL / D87468
  ref <309>: DATABASE ENTRY DATE: 2001-10-10
cggacgcgtgggccgcagcagccgagccggacctgcctccccgggcgtgctccgccggccccgccgccggcccgcagcgacagacaggcgctccccgcagctccgcacgggacccaggccgccggaccccagcgccggaccaccgtccgtccgccccgaggagtttgccgcctgccggagcacctgcgcacagatggagctggaccaccggaccagcggcgggctccacgcctaccccgggccgcggggcgggcaggtggccaagcccaacgtgatcctgcagatcgggaagtgccgggccgagatgctggagcacgtgcggcggacgcaccggcacctgctggccgaggtgtccaagcaggtggagcgcgagctgaaggggctgcaccggtcggtcgggaagctggagagcaacctggacggctacgtgcccacgagcgactcgcagcgctggaagaagtccatcaaggcctgcctgtgccgctgccaggagaccatcgccaacctggagcgctgggtcaagcgcgagatgcacgtgtggcgcgaggtgttctaccgcctggagcgctgggccgaccgcctggagtccacgggcggcaagtacccggtgggcagcgagtcagcccgccacaccgtttccgtgggcgtggggggtcccgagagctactgccacgaggcagacggctacgactacaccgtcagcccctacgccatcaccccgcccccagccgctggcgagctgcccgggcaggagcccgccgaggcccagcagtaccagccgtgggtccccggcgaggacgggcagcccagccccggcgtggacacgcagatcttcgaggaccctcgagagttcctgagccacctagaggagtacttgcggcaggtgggcggctctgaggagtactggctgtcccagatccagaatcacatgaacgggccggccaagaagtggtgggagttcaagcagggctccgtgaagaactgggtggagttcaagaaggagttcctgcagtacagcgagggcacgctgtcccgagaggccatccagcgggagctggacctgccgcagaagcagggcgagccgctggaccagttcctgtggcgcaagcgggacctgtaccagacgctctacgtggacgcggacgaggaggagatcatccagtacgtggtgggcaccctgcagcccaagctcaagcgtttcctgcgccaccccctgcccaagaccctggagcagctcatccagaggggcatggaggtgcaggatgacctggagcaggcggccgagccggccggcccccacctcccggtggaggatgaggcggagaccctcacgcccgcccccaacagcgagtccgtggccagtgaccggacccagcccgagtagagggcatcccggagcccccagcctgcccactacatccagcctgtggctttgcccaccaggacttttgagctggggctgactcctgcaggggaagccctggtccagctgggtgccccctcgagctccgggcggactcgcacacactcgtgtcatccagatgtgagcaccgcacccagcggcaaagagccctcccccctgcagggctccacccatcaccctccctccgtctgtctttccggcctggaccccaccctccacactctcaggccatcacagaacaccccagcttcctcattctgctacaacacccaggccctctggacatccagaaaaccaagtgtccggatggcaggggccagcggccaccaagctcatgggacacccagagcagaagctagggcagagccaatgctgagggagcctcgacttccggcgccgccgccctctcccggcatccgcagagccagctgacgccctccctgcctcccagggcagctggccagcctcgggcagcgcggccccctcctcccaggggagagtagaagtcgcacacgcagcagagcagacctgatgtcccggtgcttcctggcccctcagctccagtgattcacgcccgcctggagaagaatcagagctcagctcatgactcacccatggcaggcggagggtcccagaggggctgagtcctcaaatccggctgaggcagcagctggcaccatcagagccaggagagtgacaacaggtctcaaggttcccacaaagtctttgctgctgtgctgggcaccacccacccctcaccttgcaggctgcctgcgtgggaggcgaagtcccaggacagcccagaggggggctacagagaggagtcggctgcagcagagggcaggagccccagcttagccctgagcgccagcgcgaggaccagggcctgccactaagcccgccccgctggccgccagctgcccgtccccagagccactgcagcaggagtcgggccctgcctccctcccagcagggaaaccccgcccgctgccaggccatcctctctgccagaggctttcatgagccccaaggctggggccacagctcctacccctgcccagcagccctgagctcagctgcaggaaggacatcccagaagccatggctcctggggcgcttccaggcattctgccctgccccaacaccagaaccctggtgctggtgggccactagcgtctgcagcctaagcaggtgctggctcagggttcatcgttctgccttgtccactgggggaccagccctgcagaccactctgacaagtcttcagcccacaccctgccagccccacagattttatttttgcacataagccataaccaatcctcaaggctggcacaggctttggggaagccctggagcctgtgaagaccctggaaacctcatgaggctgtggccaacccctgccccttgccccacacagaccaggccttaaatgtcggtccaggccctgtgcaccttaccccagagacagactctttttgtaagattttgttaataaaacactgaaacttc

SEQ ID NO: 8229 - protein, 396 aa, Homo sapiens
  ref <308>: DATABASE ACCESSION NUMBER: Refseq / NP_056008
  ref <309>: DATABASE ENTRY DATE: 2002-10-31
MELDHRTSGGLHAYPGPRGGQVAKPNVILQIGKCRAEMLEHVRRTHRHLLAEVSKQVERELKGLHRSVGKLESNLDGYVPTSDSQRWKKSIKACLCRCQETIANLERWVKREMHVWREVFYRLERWADRLESTGGKYPVGSESARHTVSVGVGGPESYCHEADGYDYTVSPYAITPPPAAGELPGQEPAEAQQYQPWVPGEDGQPSPGVDTQIFEDPREFLSHLEEYLRQVGGSEEYWLSQIQNHMNGPAKKWWEFKQGSVKNWVEFKKEFLQYSEGTLSREAIQRELDLPQKQGEPLDQFLWRKRDLYQTLYVDADEEEIIQYVVGTLQPKLKRFLRHPLPKTLEQLIQRGMEVQDDLEQAAEPAGPHLPVEDEAETLTPAPNSESVASDRTQPE

SEQ ID NO: 8230 - DNA, 2996 bp, Rattus norvegicus
  ref <308>: DATABASE ACCESSION NUMBER: EMBL / U19893
  ref <309>: DATABASE ENTRY DATE: 2000-03-04
gtggggcgggctgaaagcagctgaagcggcggccgagtcgtaggctccgacataggggcggcagctgagcggtagcggaccggctggcgggctacgaaaagacgagggatggtggactatcacgccgcgaaccaggcgtaccagtacggcccaagcagcggcggcaatggacacgggcggcggcggaggcatgggcgactacatgcgcccaggaggagactgggaccgggacctgctgttggacccggcctgggagaagcagcagcgcaagaccttcacagcctggtgcaactcccatctgcggaaggctggcactcagatcgagaacatcgatgaggacttccgggatggcttaaacttcatgcttctgctggaggtcatttcaggggagcggttgcctaagccagagcgggggaagatgcgagtgcacaagatcaacaatgtaaacaaagccctggacttcatcgccagcaagggagtcaagctggtgtccattggggcagaagagatcgtggatggcaatgcaaagatgaccctgggaatgatctggaccatcatcctcaggttcgccatccaagacatctctgtggaagagacctctgccaaggaaggactcctcctctggtgccagagaaagacagccccgtataaaaacgtcaacgtccagaacttccatatcagctggaaggatggtctggccttcaacgcgctcatccaccggcacagacctgagctgattgagtatgacaaactgaggaaggatgatccagtcaccaacctaaacaatgcatttgaagtggctgagaaataccttgatatccccaagatgttggatgctgaagacatcgtgaacacaggccggcccgacgagaaggccataatgacatatgtgtccagcttttaccatgccttttcaggagcgcagaaggcgagactggtgccaaccggcatcttgaaggtgctggttgtgaaccaggaaaatgcgcacctgatggaagattacgagcggctggcagtggatcttctagagtggatccggcgcaccatcccctggctggaagaccgtgtgcctcagaagaccatccaggagatgcagcagaagctggaggacttccgagactataggcgtgtgcacaagccccccaaggtacaggagaagtgtcagctggagatcaacttcaacaccctgcagaccaagctgcgggtgagcaaccggcctgccttcatgccctccgagggcaggatggtctcggacatcaacaatgggtggcaacatctggagcaggctgagaagggctatgaagaatggctcttgaatgaaatcccgaggctggaacgactgatcaacctggcagagaaatcccggcagaaggcttccatccatgaaggctggaccgatgggaaggaggccattctgcagcaccgggactatgagacagccaccctgtcagacatcaaagctctgatcccaaaacatgaggcctttgagagtgacctggcggcgcaccaggaccgcgtggagcagatcgcggctattgcccaggagctcaacgaactggactactatgactcccacaacgtcaacacacggtgccagaagatctgtgaccagtgggataacctgggctctctgacccacagtcgcagggaagccttggagaaaacagagaaacagctggagaccatcgaccagctacacttggagtatgctaagcgggccgcgcccttcaacaactggatggagagtgccatggaggacctgcaggacatgttcatcgtccacaccatcgaggagatcgagggcctgatctcagcccacgaccagttcaagtccaccctgccagatgccgacagggagcgtgaggccatcctggccatccacaaagaggcccaaaggatcgctgagagcaatcacatcaagctgtcgggcagcaacccctacaccagcgttacaccccagatcatcaactccaaatgggagaaggtgcagcagctggtgccgaagcgggaccacgcactcctggaagagcagagcaagcagcaatccaatgagcaccttcgccgacagtttgccagccaagccaatatggtggggccctggatccagaccaagatggaggagattgggcgcatctccatcgagatgaacgggactctggaagaccagctgagtcacttgaagcagtacgagcgcagcattgtggactacaagcccaacctggacttgctggagcagcagcaccagctcatccaggaggccctcatcttcgacaacaagcacaccaactacacaatggagcacctccgtgtgggctgggagcagctgctcaccaccattgcccgcaccatcaacgaggtagagaatcagatcctcacccgagatgccaagggcatcagccaggagcaaatgcaggagttcagagcctccttcaaccactttgacaaggaccatggcggggcactggggcctgaggagttcaagggctgcctcatcagcctgggctacgacgtggagaatgaccggcagggtgatgctgagttcaaccggatcatgagtgtggtcgaccccaaccatagtggcctcgtgaccttccaagccttcattgacttcatgtcaaaggagaccacagacacagacaccgccgatcaggtcatcggctccttcaaggtcctggccggggacaagaacttcatcactgctgaggaacttcggagagagctgccccctgaccaggctgagtattgcatcgcccgcatggccgcctaccagggccctgatgctgctccaggcgcccttgactacaagtccttctctacagccctctatggggagagcgacctgtgagccctcagccaccctgaacagactcccttggcctccggagggctgaggagccctgccccaccctgactcagtatctatgctaagagctctttgtggtctctagggtcagaggcagggaggggctaggcaggcctcttttctcagtctggta

SEQ ID NO: 8231 - protein, 911 aa, Rattus norvegicus
  ref <308>: DATABASE ACCESSION NUMBER: SWISS-Prot / Q9QXQ0
  ref <309>: DATABASE ENTRY DATE: 2001-10-16
MVDYHAANQAYQYGPSSGGNGTGGGGGMGDYMAQEDDWDRDLLLDPAWEKQQRKTFTAWCNSHLRKAGTQIENIDEDFRDGLKLMLLLEVISGERLPKPERGKMRVHKINNVNKALDFIASKGVKLVSIGAEEIVDGNAKMTLGMIWTIILRFAIQDISVEETSAKEGLLLWCQRKTAPYKNVNVQNFHISWKDGLAFNALIHRHRPELIEYDKLRKDDPVTNLNNAFEVAEKYLDIPKMLDAEDIVNTGRPDEKAIMTYVSSFYHAFSGAQKAETAANRICKVLAVNQENEHLMEDYERLASDLLEWIRRTIPWLEDRVPQKTIQEMQQKLEDFRDYRRVHKPPKVQEKCQLEINFNTLQTKLRLSNRPAFMPSEGRMVSDINNGWQHLEQAEKGYEEWLLNEIPRLERLDHLAEKFRQKASIHEAWTDGKEAMLKHRDYETATLSDIKALIRKHEAFESDLAAHQDRVEQIAAIAQELNELDYYDSHNVNTRCQKICDQWDNLGSLTHSRREALEKTEKQLETIDQLHLEYAKRAAPFNNWMESAMEDLQDMFIVHTIEEIEGLISAHDQFKSTLPDADREREAILAIHKEAQRIAESNHIKLSGSNPYTSVTPQIINSKWEKVQQLVPKRDHALLEEQSKQQSNEHLRRQFASQANMVGPWIQTKMEEIGRISIEMNGTLEDQLSHLKQYERSIVDYKPNLDLLEQQHQLIQEALIFDNKHTNYTMEHLRVGWEQLLTTIARTINEVENQILTRDAKGISQEQMQEFRASFNHFDKDHGGALGPEEFKGCLISLGYDVENDRQGDAEFNRIMSVVDPNHSGLVTFQAFIDFMSKETTDTDTADQVIGSFKVLAGDKNFITVEELRKELPPDQAEYCIARMAPYQGPDAAPGALDYKSFSTALYGESDL

SEQ ID NO: 8232 - DNA, 2996 bp, Rattus norvegicus; identical to SEQ ID NO: 8230
  ref <308>: DATABASE ACCESSION NUMBER: EMBL / U19893
  ref <309>: DATABASE ENTRY DATE: 2000-03-04

SEQ ID NO: 8233 - protein, 911 aa, Rattus norvegicus; identical to SEQ ID NO: 8231
  ref <308>: DATABASE ACCESSION NUMBER: SWISS-Prot / Q9QXQ0
  ref <309>: DATABASE ENTRY DATE: 2001-10-16

SEQ ID NO: 8234 - DNA, 567 bp, Rattus norvegicus
  ref <308>: DATABASE ACCESSION NUMBER: EMBL / U20195
  ref <309>: DATABASE ENTRY DATE: 2000-03-04
ccaggggggcccaatggagattttggaattaaattcaatatttctaatgggggtcctgctccagaagcaatcactgataaaattttccaaatcagcaagacaatcgaagaatatgccatttgccctgacttgaaggtagacctcagtgttctggggaagcagcagtttgacttggaaaacaagttcaagcccttcacagtggagatcgtggactcagtcgaggcctatgccacaatgctgagaaacatctttgatttcaacgcactgaaggagctactctctggcccaaacagactgaagatccgcatcgacgccatgcacggagttgtgggaccgtacgcaaagaagatcctctgtgaagaacttggtgcccccgcaaactcagctgtgaactgtgttcccctggaggattttggaggccaccaccctgaccccaacctcacctacgctgctgacctagtggaaaccatgaagtcaggagagcatgatttcggggctgcctttgatggtgatggggataggaacatgattctgggcaagcacgggttctttgtgaacccttctgac

SEQ ID NO: 8235 - protein, 189 aa, Rattus norvegicus
  ref <308>: DATABASE ACCESSION NUMBER: SWISS-Prot / AAA82891
  ref <309>: DATABASE ENTRY DATE: 2002-10-01
PGGPNGDFGIKFNISNGGPAPEAITDKIFQISKTIEEYAICPDLKVDLSVLGKQQFDLENKFKPFTVEIVDSVEAYATMLRNIFDFNALKELLSGPNRLKIRIDAMHGVVGPYAKKILCEELGAPANSAVNCVPLEDFGGHHPDPNLTYAADLVETMKSGEHDFGAAFDGDGDRNMILGKHGFFVNPSD

SEQ ID NO: 8236 - DNA, 3628 bp, Rattus norvegicus
  ref <308>: DATABASE ACCESSION NUMBER: EMBL / U20796
  ref <309>: DATABASE ENTRY DATE: 2000-03-04
cgctccaactgtgatgccaacggcaaccccaagaacacggatgtctctagcattgacggtgttctcaagagcgaccgcacagactgtcctgtgaaaacaggcaaacctggtgcccctggcatgaccaagagtcacagcggaatgacaaaatttagtggcatggttctgctatgtaaagtctgtggggatgtggcctcaggattccactatggagttcatgcttgtgaaggctgtaagggcttcttcaggaggagcattcagcagaacatccagtacaagaagtgcctgaagaacgagaattgctccatcatgaggatgaacaggaaccgctgccagcagtgccgcttcaagaagtgtctgtccgtgggaatgtcgcgggacgctgttcgatttgggcggattcccaagcgtgaaaaacagagaatgctaattgagatgcaaagtgcaatgaagaccatgatgagcacccagttcggtggccacctgcagagtgacaccttagcagagccgcatgagcagtcagtaccaccggctcaggagcagctgcggcccaagccccagctggagcaagaaaacatcaaaagcacccctcctccttctgattttgcaaaggaggaagtgattggcatggtgaccagagcccacaaggatacctttctgtataatcaggaacatcgagaaaactcatctgagagcatgccaccccatagaggagaacggattcccaggaatgtggagcaatataatttaaatcatgaccatcgtggcggtgggcttcacagccacttcccctgtagtgagagccagcagcatctcagtggacagtacaaagggaggaacatgatgcactacccaaacgggcataccgtttgtatttcgaatggacactgtgtgaacttctccagtgcttaccctcaaagagtctgtgataggattccagtaggtggatgttctcagactgagagcaggaatagctacctgtgcagcactggagggaggatgcatctggtttgtcctatgagcaagtctccatatgtggatcctcagaaatctggacatgaaatctgggaagaattttcaatgagttttaccccagcagtaaaagaggtggtagaatttgcaaaacgtattcctggcttccgagatctgtctcagcatgatcaggtcaacctgttaaaagctgggacttttgaggttttaatggtgcgatttgcttcgttatttgatgcaaaggagcggactgtcaccttcctgagtggtaagaagtacagtgtggatgacctgcactccatgggagcaggcgatctgctcagctctatgtttgagttcagcgagaagctgaatggcctccagctcagcgacgaggaaatgagcttgttcacagctgttgttctggtgtctgcagatcgatctggaattgaaaatgtcaactcagtggaggctctgcaggaaacactcatccgtgcactaaggaccttaataatgaaaaaccatccaaatgaggcctccatttttacaaaattacttctaaagttgccagatcttcgatctttaaacaacatgcactctgaggaactcttggcctttaaagttcatccttaaggcctttgaacatgaactgatgctaatgtacattttatgctgagatgtttatttatatgtgtataccatattgtgaaaatagaaaaggacttagcgccaggtcctggactgtctgtagtcagtcaccagtagctgttcagatgagaactcattgtcttgttagacattggcccaccctccctgtagaccaaccagctgtgttgcacttagactggagaagttacactgaattataatcacactgaatgttagactttttcatctgccaaagccaaaataccatgttgatctccccggggtataaatctagcgcacattggagatatagggaggacttaaacattacccctgtgtgacaggattcgggtgccccacaagattgatatgtggtaaaggagactgagagacaagaggtgtgctctggcactgacaaagaacatggtcctgggagtcccctgggttgtgggaaatgataattgatagtgtccccaatgtcctgcctcacagagatactgaaaaaatgtccataaagcgtctttacctcttgggagataggcactatgtaaataaggtgaagtttttattataattgctcataataatattcttgtcttatctctaagcatttctgggaaactttgagagtccacaccaatttattcagggttccagctcaagtggggttccctactgataaacacatattccaggtttatggacacgtcagatagtatgtgtacatagtgtgtatgtgaatataattatatataaaatcttacttcacaatattttaaactgtgaagaactttatcatacaataaacttaaacaagaggtgtcaaggacccaaattaggtgcattttacctgttgctgctgatgtataaccattgctttatgatgtttagatggtagaatactgaagttaattctcatatttttgtttaagcaacatttaatgtaaaagtgtaatgagcagtcaaatccaggtcagaaaaaacatggattttagaatacatctttgatacaatctgcagttgaaggtaatagatgtttcagtgtttcagatttctaccttgcgctattaatagaggtggtgttgctgcttcttacctgctgcaggtggatggcagatttggattctgtgtggaggatgttttgtttggggaaaacctttgtgacctattggcatgtctgtgcccaagtccacttttctttctttcccttaaataacactacagggattttgtcaatttagatttaatataatttgaaaaacctttaataagtgacctacctacaggcttagagatcgtggtaggagaggtagccaaagttaaagattcgtgaacaacacccctgttcccccctgagctgtaattcattgtattttgggggcaaaattattttctgtgtaatgctagattatgtgaaattgtaaagacattaagaacatgctttactatttaaagcatgcctattacttttatgacatgtaagcagaatgccttattttgtagttctaacttgttgctacaggatttgaacttctgtggtacagttaagagagcttgaaaaagataaacccctgttgtcgaagaagaaagctgatggtgcgtctgttatgcagtagggaccataactgctgtttacattcagtgggtatggctttcgtgggatacacagctagggtttgtgaattctttacatgatagcattatcattttatatttttttcaaggataaaccaatgcatagttttcttctatgggggatagagagctttgtgaagtaatactgaaaacctcaaaggttatgttgattcttcatttttgcctttttcataagtgtctttataacatgtatctttaaagcagtttgcgtctttggaaatatgtaaccagagctgttagtgttgcttgtgatgcttgagttagggtcagtatatacatgtacacacctagatagaagcatgtagatttgtattttgtctcgtaaaattttatttcaataaattcttcctgaagt

SEQ ID NO: 8237 - protein, 578 aa, Rattus norvegicus
  ref <308>: DATABASE ACCESSION NUMBER: SWISS-Prot / Q63504
  ref <309>: DATABASE ENTRY DATE: 2000-05-30
MELNAGGVIAYISSSSSASSPASCHSEGSENSFQSSSSSVPSSPNSSNCDANGNPKNTDVSSIDGVLKSDRTDCPVKTGKPGAPGMTKSHSGMTKFSGMVLLCKVCGDVASGFHYGVHACEGCKGFFRRSIQQNIQYKKCLKNENCSIMRMNRNRCQQCRFKKCLSVGMSRDAVRFGRIPKREKQRMLIEMQSAMKTMMSTQFGGHLQSDTLAEPHEQSVPPAQEQLRPKPQLEQENIKSTPPPSDFAKEEVIGMVTRAHKDTFLYNQEHRENSSESMPPHRGERIPRNVEQYNLNHDHRGGGLHSHFPCSESQQHLSGQYKGRNMMHYPNGHTVCISNGHCVNFSSAYPQRVCDRIPVGGCSQTESRNSYLCSTGGRMHLVCPMSKSPYVDPQKSGHEIWEEFSMSFTPAVKEVVEFAKRIPGFRDLSQHDQVNLLKAGTFEVLMVRFASLFDAKERTVTFLSGKKYSVDDLHSMGAGDLLSSMFEFSEKLNGLQLSDEEMSLFTAVVLVSADRSGIENVNSVEALQETLIRALRTLIMKNHPNEASIFTKLLLKLPDLRSLNNMHSEELLAFKVHP

SEQ ID NO: 8238 - DNA, 2017 bp, Homo sapiens
  ref <308>: DATABASE ACCESSION NUMBER: EMBL / L31785
  ref <309>: DATABASE ENTRY DATE: 1999-07-02
ggaggtgaatgcaggaggtgtgattgcctatatcagttcttccagctcagcctcaagccctgcctcttgtcacagtgagggttctgagaatagtttccagtcctcctcctcttctgttccatcttctccaaatagctctaattctgataccaatggtaatcccaagaatggtgatctcgccaatattgaaggcatcttgaagaatgatcgaatagattgttctatgaaaacaagcaaatcgagtgcacctgggatgacaaaaagtcatagtggtgtgacaaaatttagtggcatggttctactgtgtaaagtctgtggggatgtggcgtcaggattccactatggagttcatgcttgcgaaggctgtaagggtttctttcggagaagtattcaacaaaacatccagtacaagaagtgcctgaagaatgaaaactgttctataatgagaatgaataggaacagatgtcagcaatgtcgcttcaaaaagtgcctgtctgttggaatgtcaagagatgctgttcggtttggtcgtattcctaagcgtgaaaaacagaggatgctaattgaaatgcaaagtgcaatgaagaccatgatgaacagccagttcagtggtcacttgcaaaatgacacattagtagaacatcatgaacagacagccttgccagcccaggaacagctgcgacccaagccccaactggagcaagaaaacatcaaaagctcttctcctccatcttctgattttgcaaaggaagaagtgattggcatggtgaccagagctcacaaggatacctttatgtataatcaagagcagcaagaaaactcagctgagagcatgcagccccagagaggagaacggattcccaagaacatggagcaatataatttaaatcatgatcattgcggcaatgggcttagcagccattttccctgtagtgagagccagcagcatctcaatggacagttcaaagggaggaatataatgcattacccaaatggtcatgccatttgtattgcaaatggacattgtatgaacttctccaatgcttatactcaaagagtatgtgatagagttccgatagatggattttctcagaatgagaacaagaatagttacctgtgcaacactggaggaagaatgcatctggtttgtccaatgagtaagtctccatatgtggatcctcataaatcaggacatgaaatctgggaagaattttcgatgagcttcactccagcagtgaaagaagtggtggaatttgcaaagcgtattcctgggttcagagatctctctcagcatgaccaggtcaaccttttaaaggctgggacttttgaggttttaatggtacggttcgcatcattatttgatgcaaaggaacgaactgtcacctttttaagtggaaagaaatatagtgtggatgatttacactcaatgggagcaggggatctgctaaactctatgtttgaatttagtgagaagctaaatgccctccaacttagtgatgaagagatgagtttgtttacagctgttgtcctggtatctgcagatcgatctggaaatagaaaaaacgtcaactctgtggaggctttgcaggaaactctcattcgtgcactaaggaccttaataatgaaaaaccatccaaatgaggcctctatttttacaaaactgcttctaaagttgccagatcttcgatctttaaacaacatgcactctgaggagctcttggcctttaaagttcacccttaaggcctttgtttatttaaacatgaactgatggtaactgtacattttgtgctaaaatgcatatttatatgtgtataccatatgtggagatagaaaagacctttaagcaataaaagattgtaggctatctctgtaatcatgcaatagctgttcggattgagaactcttcagccatgattagacgttgactgcatctccctgatagaccaatcagctgtgtcgcacttaaactggagaagttacactgaagtataatcacactgaatgttagaccttttc

SEQ ID NO: 8239 - protein, 579 aa, Homo sapiens
  ref <308>: DATABASE ACCESSION NUMBER: SWISS-Prot / Q14995
  ref <309>: DATABASE ENTRY DATE: 2002-06-15
MEVNAGGVIAYISSSSSASSPASCHSEGSENSFQSSSSSVPSSPNSSNSDTNGNPKNGDLANIEGILKNDRIDCSMKTSKSSAPGMTKSHSGVTKFSGMVLLCKVCGDVASGFHYGVHACEGCKGFFRRSIQQNIQYKKCLKNENCSIMRMNRNRCQQCRFKKCLSVGMSRDAVRFGRIPKREKQRMLIEMQSAMKTMMNSQFSGHLQNDTLVEHHEQTALPAQEQLRPKPQLEQENIKSSSPPSSDFAKEEVIGMVTRAHKDTFMYNQEQQENSAESMQPQRGERIPKNMEQYNLNHDHCGNGLSSHFPCSESQQHLNGQFKGRNIMHYPNGHAICIANGHCMNFSNAYTQRVCDRVPIDGFSQNENKNSYLCNTGGRMHLVCPMSKSPYVDPHKSGHEIWEEFSMSFTPAVKEVVEFAKRIPGFRDLSQHDQVNLLKAGTFEVLMVRFASLFDAKERTVTFLSGKKYSVDDLHSMGAGDLLNSMFEFSEKLNALQLSDEEMSLFTAVVLVSADRSGIENVNSVEALQETLIRALRTLIMKNHPNEASIFTKLLLKLPDLRSLNNMHSEELLAFKVHP

SEQ ID NO: 8240 - DNA, 3980 bp, Rattus norvegicus
  ref <308>: DATABASE ACCESSION NUMBER: EMBL / U21101
  ref <309>: DATABASE ENTRY DATE: 2000-03-04
cgggccgggctggaggggcgggcgggcggctacgagcatggtcctggtgttgcaccacatcctcatcgctgttgtccaattcctcaggcggggccagcaggtcttcctcaagccggacgaaccgccgccgcagccatgcgccgacagcctgcaggatgctttgctgagcctgggcgccgttatcgacatcgcgggccttcgacaggctgccaaggatgccctctcggccgtgctccccaaagtggagactgtctacacctacctggtagatggggagtccaggctggtgtgtgaggacccccctcatgagctgccacaggaaggaaaaattcgagaggctgtgatttctcggaagcggctgagctgcgatgggctgggaccttcagacctactaggaaagcccttggccaggctggtggctccactggcccctgacacgcaagtgctggtcatacccctgctggacaaggagactggaactgtggcagccgtcatcttggtgcactgtggccagctgagtgacagtgaggagcagagcctgcaggtggtggagaagcatgctctggtggccctgcagagggtgcaggccctgcagcagcgcaggcctgaagctgttcagaacacctcagcggatccctctgaagatcaaaaggatgagaagggatacaccgcccatgaccgaaagatcctgcaactgtgtggagaactctatgacttggatgccacttctctgcagctcaaagtccttcgatatcttcagcaggagacacaggccactcactgctgcctcctgctggtgtcagaggacaacctgcagctttcctgcaaggtcattggagagaaagtgctgggagaagaggtcagctttccattgaccatgggacgcctgggccaggtggtggaggacaaacagtgtatccagttgaaggacctaacctctgacgatgtgcaacagctacaaaacatgttgggctgtgagcttcgggctatgctatgtgtccctgtcatcagtcgagccactgaccaggtggtggccctggcttgcgccttcaacaagcttggaggagacttcttcacagatgaggatgaacgtgcgatccaacactgcttccactacacaggcacggtgctcaccagtaccttggccttccagaaggagcagaagctcaagtgtgagtgccaggctcttctccaagtggcaaagaacctcttcacccacctggatgacgtctctgtcctgctacaggagatcatcacagaggccagaaacctcagcaacgcagagatctgctccgtgttcctgctggatcagaatgagctggttgccaaggtgttcgatggcggtgtagtggacgatgagagttatgagatccgcatccctgcggaccaaggcatcgcgggccacgtggcgaccacgggccagatcctgaacatcccagatgcatacgcccatccgcttttctatcgcggcgtagacgacagcactggcttccgcacgcgcaacattctctgcttccctatcaagaacgagaaccaagaggtcatcggtgtggctgagctagtgaacaagatcaatgggccatggttcagcaaatttgatgaggacctggccacagccttctccatctactgtggcattagcatcgctcactctctcctatacaaaaaggtgaatgaagcccagtaccgcagccacctggccaacgagatgatgatgtaccatatgaaggtctctgacgatgaatacaccaaacttctccatgatggcatccaacctgtggccgccattgactccaactttgccaacttcacctatactcctcggtctctgcctgaggacgatacttctatggccatcctgagcatgctgcaagacatgaacttcatcaataactacaaaattgactgcccaactctggcccggttctgcctgatggtgaagaaaggctaccgggatccgccctaccacaactggatgcacgccttctctgtctctcacttttgctacttgctctacaagaatctggagctctccaactacctcgaggacatcgagatctttgcgttgtttatttcctgcatgtgtcacgacctggaccacagaggcacaaacaactccttccaggtggcctcgaaatctgtgctggctgcactctacagctcagagggctctgtcatggagaggcaccactttgctcaggccattgctatcctcaacacccatggctgtaatatctttgaccacttctctcggaaggactatcagcgaatgctggacctgatgagggacatcatcttggccacggacctggcacaccacctccgcatcttcaaggacctgcagaagatggctgaagtgggttatgaccgaaacaacaagcaacaccacaggcttcttctatgcctccttatgacctcctgtgacctctctgaccagacaaagggctggaagaccaccagaaagattgcggagctgatctacaaagagttcttctcccaaggagacttggagaaggccatgggcaaccgaccaatggagatgatggatcgggagaaggcctacatccctgaacttcagatcagctttatggagcacatcgccatgcccatctacaagctgttacaagacctgttccccaaggcagcagagctgtatgaacgcgtggcctccaatcgtgagcactggaccaaggtgtcccacaagttcaccatccgaggcctccccagtaacaactcgctggatttcctggatgaggaatatgaggtccctgatttggacgtcaccagggctcctgtcaatggctgctgcagcctcgagggctgagtgatcccctctagggaccctccctgcccggccctcctttcacaactctctaccagtctgtctgatgcattgggaaccagagccatgggtcctgggttctagaccaggatgtcccctgtgacctggcacatgccacccttcctgggcttcgtctttctcatctgcagaaggaattcgagattcgcagtctcacacagacttggccgtttgttcttcaagagcacagtagtgaccagtggcagtgggcttccttctgcacctctgactgtaccgtgcccagttctgcccaagccactccatctttgagccacagaaccttctgtgaacccattagagccccattacgtcagtatccttgttttcctggaggaatcccaggtctctggagacttcgagatcctcatggaagaaggagaggccaccgagagagcagagggtataaatcagtcaccagctagaagtcgccatagggtgaagggaccctgagggtgcctctgtgcttctggcaggactgggaccctggaggaagctgacagccaggttgctcagtgctctgcaggaggcagtgctccagcagagaaggcaggaataagggacagaaggatcctcaagctgggagacagtccctacacacccctgcccttcaggtgttgtgacctgaagtgagttcctttccctagctagccaagacaggatcattagacagcctattctctctttagatcaaagtctccgtcattctgtggagtccgtgagtggttgtggcatgctctgccaccctgaggcacagagagcctaacctcctttcctctgagtgtatccccctggtctgagcccctctcccattcctgccatcagagaggggcctggcctctctccacagggcttctctcctcttcaaggccatatccacacctgccccccggagggctcaggagactctcccagggctgggcctcttgggtgagtggccactagcttctccttctgttttgttctgtatgtattgtgggtgggggagggggccacctgccttacctactctgagttgcctttagagagatgcatttttctaggactctgtgcacctgttgttgtatgtagtcctgtgggctgagtgctttgtacatgagaataaatctatttctttctacca

SEQ ID NO: 8241 - protein, 928 aa, Rattus norvegicus
  ref <308>: DATABASE ACCESSION NUMBER: SWISS-Prot / Q01062
  ref <309>: DATABASE ENTRY DATE: 2002-06-15
MVLVLHHILIAVVQFLRRGQQVFLKPDEPPPQPCADSLQDALLSLGAVIDIAGLRQAAKDALSAVLPKVETVYTYLVDGESRLVCEDPPHELPQEGKIREAVISRKRLSCDGLGPSDLLGKPLARLVAPLAPDTQVLVIPLLDKETGTVAAVILVHCGQLSDSEEQSLQVVEKHALVALQRVQALQQRRPEAVQNTSADPSEDQKDEKGYTAHDRKILQLCGELYDLDATSLQLKVLRYLQQETQATHCCLLLVSEDNLQLSCKVIGEKVLGEEVSFPLTMGRLGQVVEDKQCIQLKDLTSDDVQQLQNMLGCELRAMLCVPVISRATDQVVALACAFNKLGGDFFTDEDERAIQHCFHYTGTVLTSTLAFQKEQKLKCECQALLQVAKNLFTHLDDVSVLLQEIITEARNLSNAEICSVFLLDQNELVAKVFDGGVVDDESYEIRIPADQGIAGHVATTGQILNIPDAYAHPLFYRGVDDSTGFRTRNILCFPIKNENQEVIGVAELVNKINGPWFSKFDEDLATAFSIYCGISIAHSLLYKKVNEAQYRSHLANEMMMYHMKVSDDEYTKLLHDGIQPVAAIDSNFANFTYTPRSLPEDDTSMAILSMLQDMNFINNYKIDCPTLARFCLMVKKGYRDPPYHNWMHAFSVSHFCYLLYKNLELSNYLEDIEIFALFISCMCHDLDHRGTNNSFQVASKSVLAALYSSEGSVMERHHFAQAIAILNTHGCNIFDHFSRKDYQRMLDLMRDIILATDLAHHLRIFKDLQKMAEVGYDRNNKQHHRLLLCLLMTSCDLSDQTKGWKTTRKIAELIYKEFFSQGDLEKAMGNRPMEMMDREKAYIPELQISFMEHIAMPIYKLLQDLFPKAAELYERVASNREHWTKVSHKFTIRGLPSNNSLDFLDEEYEVPDLDVTRAPVNGCCSLEG

SEQ ID NO: 8242 - DNA, 4240 bp, Homo sapiens
  ref <308>: DATABASE ACCESSION NUMBER: EMBL / U67733
  ref <309>: DATABASE ENTRY DATE: 2000-03-04
cagcagagctggattggggtgttgagtccaggctgagtagggggcagcccactgctcttggtccctgtgcctgctgggggtgccctgccctgaactccaggcagcggggacagggcgaggtgccaccttagtctggctggggaggcggacgatgaggagtgatggggcaggcatgcggccactccatcctctgcaggagccagcagtacccggcagcgcgaccggctgagccgcggggccagcaggtcttcctcaagccggacgagccgccgccgccgccgcagccatgcgccgacagcctgcaggacgccttgctgagtctgggctctgtcatcgacatttcaggcctgcaacgtgctgtcaaggaggccctgtcagctgtgctcccccgagtggaaactgtctacacctacctactggatggtgagtcccagctggtgtgtgaggaccccccacatgagctgccccaggaggggaaagtccgggaggctatcatctcccagaagcggctgggctgcaatgggctgggcttctcagacctgccagggaagcccttggccaggctggtggctccactggctcctgatacccaagtgctggtcatgccgctagcggacaaggaggctggggccgtggcagctgtcatcttggtgcactgtggccagctgagtgataatgaggaatggagcctgcaggcggtggagaagcataccctggtcgccctgcggagggtgcaggtcctgcagcagcgcgggcccagggaggctccccgagccgtccagaaccccccggaggggacggcggaagaccagaagggcggggcggcgtacaccgaccgcgaccgcaagatcctccaactgtgcggggaactctacgacctggatgcctcttccctgcagctcaaagtgctccaatacctgcagcaggagacccgggcatcccgctgctgcctcctgctggtgtcggaggacaatctccagctttcttgcaaggtcatcggagacaaagtgctcggggaagaggtcagctttcccttgacaggatgcctgggccaggtggtggaagacaagaagtccatccagctgaaggacctcacctccgaggatgtacaacagctgcagagcatgttgggctgtgagctgcaggccatgctctgtgtccctgtcatcagccgggccactgaccaggtggtggccttggcctgcgccttcaacaagctagaaggagacttgttcaccgacgaggacgagcatgtgatccagcactgcttccactacaccagcaccgtgctcaccagcaccctggccttccagaaggaacagaaactcaagtgtgagtgccaggctcttctccaagtggcaaagaacctcttcacccacctggatgacgtctctgtcctgctccaggagatcatcacggaggccagaaacctcagcaacgcagagatctgctctgtgttcctgctggatcagaatgagctggtggccaaggtgttcgacgggggcgtggtggatgatgagagctatgagatccgcatcccggccgatcagggcatcgcgggacacgtggcgaccacgggccagatcctgaacatccctgacgcatatgcccatccgcttttctaccgcggcgtggacgacagcaccggcttccgcacgcgcaacatcctctgcttccccatcaagaacgagaaccaggaggtcatcggtgtggccgagctggtgaacaagatcaatgggccatggttcagcaagttcgacgaggacctggcgacggccttctccatctactgcggcatcagcatcgcccattctctcctatacaaaaaagtgaatgaggctcagtatcgcagccacctggccaatgagatgatgatgtaccacatgaaggtctccgacgatgagtataccaaacttctccatgatgggatccagcctgtggctgccattgactccaattttgcaagtttcacctatacccctcgttccctgcccgaggatgacacgtccatggccatcctgagcatgctgcaggacatgaatttcatcaacaactacaaaattgactgcccgaccctggcccggttctgtttgatggtgaagaagggctaccgggatcccccctaccacaactggatgcacgccttttctgtctcccacttctgctacctgctctacaagaacctggagctcaccaactacctcgaggacatcgagatctttgccttgtttatttcctgcatgtgtcatgacctggaccacagaggcacaaacaactctttccaggtggcctcgaaatctgtgctggctgcgctctacagctctgagggctccgtcatggagaggcaccactttgctcaggccatcgccatcctcaacacccacggctgcaacatctttgatcatttctcccggaaggactatcagcgcatgctggatctgatgcgggacatcatcttggccacagacctggcccaccatctccgcatcttcaaggacctccagaagatggctgaggtgggctacgaccgaaacaacaagcagcaccacagacttctcctctgcctcctcatgacctcctgtgacctctctgaccagaccaagggctggaagactacgagaaagatcgcggagctgatctacaaagaattcttctcccagggagacctggagaaggccatgggcaacaggccgatggagatgatggaccgggagaaggcctatatccctgagctgcaaatcagcttcatggagcacattgcaatgcccatctacaagctgttgcaggacctgttccccaaagcggcagagctgtacgagcgcgtggcctccaaccgtgagcactggaccaaggtgtcccacaagttcaccatccgcggcctcccaagtaacaactcgctggacttcctggatgaggagtacgaggtgcctgatctggatggcactagggcccccatcaatggctgctgcagccttgatgctgagtgatcccctccaggacacttccctgcccaggccacctcccacagccctccactggtctggccagatgcactgggaacagagccacgggtcctgggtcctagaccaggacttcctgtgtgaccctggacaagtactaccttcctgggcctcagctttctcgtctgtataatggaagcaagacttccaacctcacggagactttgtaatttgcttctctgagagcacaggggtgaccaatgagcagtgggccctactctgcacctctgaccacaccttggcaagtctttcccaagccattctttgtctgagcagcttgatggtttctccttgccccatttctgccccaccagatctttgctcctttccctttgaggactcccaccctttgggtctccaggatcctcatggaaggggaaggtgagacatctgagtgagcagagtgtggcatcttggaaacagtccttagttctgtgggaggactagaaacagccgcggcgaaggccccctgaggaccactactatactgatggtgggattgggacctgggggatacaggggccccaggaagaagctggccagaggggcagctcagtgctctgcagagaggggccctggggagaagcaggatgggattgatgggcaggagggatccccgcactgggagacaggcccaggtatgaatgagccagccatgcttcctcctgcctgtgtgacgctgggcgagtctcttcccctgtctgggccaaacagggagcgggtaagacaatccatgctctaagatccattttagatcaatgtctaaaatagctctatggctctgcggagtcccagcagaggctatggaatgtttctgcaaccctaaggcacagagagccaaccctgagtgtctcagaggccccctgagtgttccccttggcctgagccccttacccattcctgcagccagtgagagacctggcctcagcctggcagcgctctcttcaaggccatatccacctgtgccctggggcttgggagaccccataggccgggactcttgggtcagcccgccactggcttctctctttttctccgtttcattctgtgtgcgttgtggggtgggggagggggtccacctgccttacctttctgagttgcctttagagagatgcgtttttctaggactctgtgcaactgtcgtatatggtcccgtgggctgaccgctttgtacatgagaataaatctatttctttctaccaaaaaaaaaaaaaaaaaaa

SEQ ID NO: 8243 - protein, 941 aa, Homo sapiens
  ref <308>: DATABASE ACCESSION NUMBER: SWISS-Prot / O00408
  ref <309>: DATABASE ENTRY DATE: 2002-06-15
MGQACGHSILCRSQQYPAARPAEPRGQQVFLKPDEPPPPPQPCADSLQDALLSLGSVIDISGLQRAVKEALSAVLPRVETVYTYLLDGESQLVCEDPPHELPQEGKVREAIISQKRLGCNGLGFSDLPGKPLARLVAPLAPDTQVLVMPLADKEAGAVAAVILVHCGQLSDNEEWSLQAVEKHTLVALRRVQVLQQRGPREAPRAVQNPPEGTAEDQKGGAAYTDRDRKILQLCGELYDLDASSLQLKVLQYLQQETRASRCCLLLVSEDNLQLSCKVIGDKVLGEEVSFPLTGCLGQVVEDKKSIQLKDLTSEDVQQLQSMLGCELQAMLCVPVISRATDQVVALACAFNKLEGDLFTDEDEHVIQHCFHYTSTVLTSTLAFQKEQKLKCECQALLQVAKNLFTHLDDVSVLLQEIITEARNLSNAEICSVFLLDQNELVAKVFDGGVVDDESYEIRIPADQGIAGHVATTGQILNIPDAYAHPLFYRGVDDSTGFRTRNILCFPIKNENQEVIGVAELVNKINGPWFSKFDEDLATAFSIYCGISIAHSLLYKKVNEAQYRSHLANEMMMYHMKVSDDEYTKLLHDGIQPVAAIDSNFASFTYTPRSLPEDDTSMAILSMLQDMNFINNYKIDCPTLARFCLMVKKGYRDPPYHNWMHAFSVSHFCYLLYKNLELTNYLEDIEIFALFISCMCHDLDHRGTNNSFQVASKSVLAALYSSEGSVMERHHFAQAIAILNTHGCNIFDHFSRKDYQRMLDLMRDIILATDLAHHLRIFKDLQKMAEVGYDRNNKQHHRLLLCLLMTSCDLSDQTKGWKTTRKIAELIYKEFFSQGDLEKAMGNRPMEMMDREKAYIPELQISFMEHIAMPIYKLLQDLFPKAAELYERVASNREHWTKVSHKFTIRGLPSNNSLDFLDEEYEVPDLDGTRAPINGCCSLDAE

SEQ ID NO: 8244 - DNA, 428 bp, Rattus norvegicus
  ref <308>: DATABASE ACCESSION NUMBER: EMBL / U21719
  ref <309>: DATABASE ENTRY DATE: 2000-03-04
caccctaacctaaaccttttgaattttgaattaatgggtaccctatagaaaaaatgacctgcggaaaaccaaacagtgaagggaaagaaggaaagaattccaattgacacaatttaaataaaatatggcttttcaaataaaggaagagaagtttcttttgggcacacaatctaaacaatatttatgtataattcagctcttatttggcttaaatgggcttagtgggaaatgttatcatttttactattttctacagagaaaatattttccagtttatcaagtaactctggactttggaattacctgtttttatgttccagctgtctatatagttgtttctctgaaattgtacataaaatgtttttacattaaaatgaattactgtataaagtactgcattatgcataataaagatactaatgctttat

SEQ ID NO: 8245 - protein, 805 aa, Rattus norvegicus
  ref <308>: DATABASE ACCESSION NUMBER: Refseq / NP_062426
  ref <309>: DATABASE ENTRY DATE: 2002-01-07
MEEAVSSKAKKTNKKGPSEDDVDPPKSRKAKKQEEEPQDDTASTSKTSKKKKEPLEKQADSETKEIITEEPSEEEADMPKPKKMKKGKEANGDAGEKSPKLKNGLSQPSEEEADIPKPKKMKKGKEANGDAGEKSPKLKNGLSQPSEEEVDIPKPKKMKKGKEASGDAGEKSPRLKDGLSQPSEPKSNSSDAPGEESSSETEKEIPVEQKEGAFSNFPISEETVKLLKARGVNFLFPIQAKTFHHVYSGKDLIAQARTGTGKTFSFAIPLIEKLQGGLQERKRGRAPQVLVLAPTRELANQVSKDFSDITKKLSVACFYGGTPYGGQIERMRSGIDILVGTPGRIKDHLQNGKLDLTKLKHVVLDEVDQMLDMGFADQVEEILCVAYKKDSEDNPQTLLFSATCPHWVFNVAKKYMKSTYEQVDLIGKKTQKAAITVEHLAIKCHWTERAAVIGDVIRVYSGHQGRTIIFCETKKDAQELSQNTCIKQDAQSLHGDIPQKQREITLKGFRNGNFGVLVATNVAARGLDIPEVDLVVQSCPPKDVESYIHRSGRTGRAGRTGVCICFYQNKEEYQLAQVEQKAGIKFKRIGVPSATEIIKASSKDAIRLLDSVPPTAISHFKQSAEKLIEEKGAVEALAAALAHISGATSVDQRSLINSQAGFVTMILRCSIEMPNISYAWKELKEQLGESIDAKVKGMVFLKGKLGVCFDVRTEAVTEIQEKWHDSRRWQLTVATEQPELEGPPDGYRGRMGQRDGSRGAFRGQRGGSRNFRGQGQRGGSRNFRGQRPGGGNRGQKRSFSKAFGQ

SEQ ID NO: 8246 - DNA, 3319 bp, Homo sapiens
  ref <308>: DATABASE ACCESSION NUMBER: Refseq / NM_004728
  ref <309>: DATABASE ENTRY DATE: 2001-10-06
ctacctcttcctctccacgcggttgagaagaccggtcggcctgggcaacctgcgctgaagatgccgggaaaactccgtagtgacgctggtttggaatcagacaccgcaatgaaaaaaggggagacactgcgaaagcaaaccgaggagaaagagaaaaaaagagaagccaaaatctgataagactgaagagatagcagaagaggaagaaactgttttccccaaagctaaacaagttaaaaagaaagcagagccttctgaagttgacatgaattctcctaaatccaaaaaggcaaaaaagaaagaggagccatctcaaaatgacatttctcctaaaaccaaaagtttgagaaagaaaaaggagcccattgaaaagaaagtggtttcttctaaaaccaaaaaagtgacaaaaaatgaggagccttctgaggaagaaatagatgctcctaagcccaagaagatgaagaaagaaaaggaaatgaatggagaaactagagagaaaagccccaaactgaagaatggatttcctcatcctgaaccggactgtaaccccagtgaagctgccagtgaagaaagtaacagtgagatagagcaggaaatacctgtggaacaaaaagaaggcgctttctctaattttcccatatctgaagaaactattaaacttctcaaaggccgaggagtgaccttcctatttcctatacaagcaaagacattccatcatgtttacagcgggaaggacttaattgcacaggcacggacaggaactgggaagacattctcctttgccatccctttgattgagaaacttcatggggaactgcaagacaggaagagaggccgtgcccctcaggtactggttcttgcacctacaagagagttggcaaatcaagtaagcaaagacttcagtgacatcacaaaaaagctgtcagtggcttgtttttatggtggaactccctatggaggtcaatttgaacgcatgaggaatgggattgatatcctggttggaacaccaggtcgtatcaaagaccacatacagaatggcaaactagatctcaccaaacttaagcatgttgtcctggatgaagtggaccagatgttggatatgggatttgctgatcaagtggaagagattttaagtgtggcatacaagaaagattctgaagacaatccccaaacattgcttttttctgcaacttgccctcattgggtatttaatgttgccaagaaatacatgaaatctacatatgaacaggtggacctgattggtaaaaagactcagaaaacggcaataactgtggagcatctggctattaagtgccactggactcagagggcagcagttattggggatgtcatccgagtatatagtggtcatcaaggacgcactatcatcttttgtgaaaccaagaaagaagcccaggagctgtcccagaattcagctataaagcaggatgctcagtccttgcatggagacattccacagaagcaaagggaaatcaccctgaaaggttttagaaatggtagttttggagttttggtggcaaccaatgttgctgcacgtgggttagacatccctgaggttgatttggttatacaaagctctccaccaaaggatgtagagtcctacattcatcgatccgggcggacaggcagagctggaaggacgggggtgtgcatctgcttttatcagcacaaggaagaatatcagttagtacaagtggagcaaaaagcgggaattaagttcaaacgaataggtgttccttctgcaacagaaataataaaagcttccagcaaagatgccatcaggcttttggattccgtgcctcccactgccattagtcacttcaaacaatcagctgagaagctgatagaggagaagggagctgtggaagctctggcagcagcactggcccatatttcaggtgccacgtccgtagaccagcgctccttgatcaactcaaatgtgggttttgtgaccatgatcttgcagtgctcaattgaaatgccaaatattagttatgcttggaaagaacttaaagagcagctgggcgaggagattgattccaaagtgaagggaatggtttttctcaaaggaaagctgggtgtttgctttgatgtacctaccgcatcagtaacagaaatacaggagaaatggcatgattcacgacgctggcagctctctgtggccacagagcaaccagaactggaaggaccacgggaaggatatggaggcttcaggggacagcgggaaggcagtcgaggcttcaggggacagcgggacggaaacagaagattcagaggacagcgggaaggcagtagaggcccgagaggacagcgatcaggaggtggcaacaaaagtaacagatcccaaaacaaaggccagaagcggagtttcagtaaagcatttggtcaataattagaaatagaagatttatatagcaaaaagagaatgatgtttggcaatatagaactgaacattatttttcatgcaaagttaaaagcacattgtgcctccttttgaccacttgccaagtccctgtctctttcagacacagacaagcttcatttaaattatttcatctgatcattatcatttataactttattgttacttcatcagtttttccttttgaaaggtgtatgaattcattacatttttattctaatgtattatctgtagattagaagataaaatcaagcatgtatctgcctatactttgtgagttcacctgtctttatactcaaaagtgtcccttaatagtgtccttccctgaaataaatacctaagggagtgtaacagtctctggaggaccactttgagcctttggaagttaaggtttcctcagccacctgccgaacagtttctcatgtggtcctattatttgtctactgagacttaatactgagcaatgttttgaaacaagatttcaaactaatctgggttgtaatacagtttataccagtgtatgctctagacttggaagatgtagtatgtttgatgtggattacctatacttatgttcgttttgatacatttttagcttctcattataaggtgattcatgctttagtgaattcttcatagatagtatatataaaagtacattttaatagaaagccagggttttaaggaatttcacatgtataaggtggctccatagctttatttgtaagtaggctggataaatggtgcttaaatggtaatgtactccacttcttcctattggaagattaacattatttaccaagaaggacttaagggagtaaggggcgcagattagcattgctcaagagtatgtaaaaaaaaaaaaaaaaaaaaaaa

SEQ ID NO: 8247 - protein, 715 aa, Homo sapiens
  ref <308>: DATABASE ACCESSION NUMBER: SWISS-Prot / Q9NR30
  ref <309>: DATABASE ENTRY DATE: 2002-06-15
MNSPKSKKAKKKEEPSQNDISPKTKSLRKKKEPIEKKVVSSKTKKVTKNEEPSEEEIDAPKPKKMKKEKEMNGETREKSPKLKNGFPHPEPDCNPSEAASEESNSEIEQEIPVEQKEGAFSNFPISEETIKLLKGRGVTFLFPIQAKTFHHVYSGKDLIAQARTGTGKTFSFAIPLIEKLHGELQDRKRGRAPQVLVLAPTRELANQVSKDFSDITKKLSVACFYGGTPYGGQFERMRNGIDILVGTPGRIKDHIQNGKLDLTKLKHVVLDEVDQMLDMGFADQVEEILSVAYKKDSEDNPQTLLFSATCPHWVFNVAKKYMKSTYEQVDLIGKKTQKTAITVEHLAIKCHWTQRAAVIGDVIRVYSGHQGRTIIFCETKKEAQELSQNSAIKQDAQSLHGDIPQKQREITLKGFRNGSFGVLVATNVAARGLDIPEVDLVIQSSPPKDVESYIHRSGRTGRAGRTGVCICFYQHKEEYQLVQVEQKAGIKFKRIGVPSATEIIKASSKDAIRLLDSVPPTAISHFKQSAEKLIEEKGAVEALAAALAHISGATSVDQRSLINSNVGFVTMILQCSIEMPNISYAWKELKEQLGEEIDSKVKGMVFLKGKLGVCFDVPTASVTEIQEKWHDSRRWQLSVATEQPELEGPREGYGGFRGQREGSRGFRGQRDGNRRFRGQREGSRGPRGQRSGGGNKSNRSQNKGQKRSFSKAFGQ

SEQ ID NO: 8248 - DNA, 463 bp, Rattus norvegicus
  ref <308>: DATABASE ACCESSION NUMBER: EMBL / U21721
  ref <309>: DATABASE ENTRY DATE: 2000-03-04
cccacctccggctgccggcgacaccggtctttgcagtctgggaccccgtgcgatctttagcccggtgcacgatgcccccgaaaaagggaggagatggacttaaaccgcctccgatcattggaaggtttggaacctcactgaaaattggtactgttggattgccaaatgttgggaagtctaccttcttcaatgtgttaaccaatagtcaggcctcagcagaaaacttccctttctgcactattgaccctaacgagagcagagtgcctgtgccagacgagaggtttgacttccttttgccagtgtcacaagccagcaagcaagattcctgcttttccttaatgttagtgggattattgctgggccttgtgaaaggagctcacaaatgggcaggggtttgggggaattgccttccttcttcaaatttaagggccgtgatggggattttcaccttaacgcgttcttt

SEQ ID NO: 8249 - DNA, 1754 bp, Homo sapiens
gttccaccgctgtcgccgccgtagtgcggcatgccgctcggcggaggggccgggcctgcgttctctcctccttcctccccgcctctggctgccggcaggacctttctctcgctgctactgggaccccgtgtcatagcccaggctgagcacgatgccccctcaaaagggaggtgatggaattaaaccacccccaatcattggaagatttggaacctcactgaaaattggtattgttggattgccaaatgttgggaaatctactttcttcaatgtattaaccaatagtcaggcttcagcagaaaacttcccattctgcactattgatcctaatgagagcagagtacctgtgccagatgaaaggtttgactttctttgccaatatcacaaaccagcaagcaaaattcctgcctttctaaatgtagtggatattgctggccttgtgaaaggagctcacaatgggcagggcctggggaatgcttttttatctcattttagtgcttgtgatggcatctttcatctaacacgtgcttttgaagatgatgatatcacacatgttgaagaaagtgtagatcctattcgagatatagaaataatacatgaagagcttcagcttaaagatgaggaatgactgggcccattatagataaactagaaaaggtggctgtgagaggaggagataaaaaactaaaacccaaatatgatataatgtgcaaagtaaaatcctgggttatagatcaaaagaacctgttcgcttctatcatgattggaatgacaaagagattgaagtgttgaataaacacttatttttgacttcaaaaccaatggtctacttggttaatctttctgaaaaagactacattagaaagaaaaacaaatggctgataaaaattaaagagtgggtggacaagtatgacccaggtgccttggtcattccttttagtggggccttggaactcaagttgcaagaattgagtgctgaggagagacagcagtatctggaagcgaacatgacacaaagtgctttgccaaagatcattaaggctgggtttgcagcactccaactaaaatactttttcactgcaggcccagatgaagtgcgtgcacggaccatcaggaaagggactaaggctcctcaggctgcaggaaagattcacacagattttgaaaagggattcattatggctgaagtaatgaaatatgaagattttaaagaggaaggttctgaaaatgcagtcaaggctgctggaaagtacagacaacaaggcagaaattatattgttgaagatggagatattatcttcttcaaatttaacacaccttaacaactgaagaagaaataaaatttagttactgctcagataaacatacaacttccaaaaggcatctgattttttaaaaattaaaatttctgaaaaccaatgggacaaataaagttggggagatgggaatctttgacaaacaaattatttttgttttaaaattaaaatactgtgtaccctctccccccaatgaaatgcaagttcactaaatgtgaacacctttgcttttcatgtgattaagaccctactccaaattatagaagcttttcaagaaccatgttactctcatgatacttcattaatctccatcatgtatgccaagcctaacacatttgacagtgagaacaatgtggcttgctcctttttgaatctacagataatgcatgttttatagtactccagatgtctacactcaataaaacatttgacaaaacc

SEQ ID NO: 8250 - protein, 166 aa, Homo sapiens [sequence omitted]

SEQ ID NO: 8251 - DNA, 463 bp, Rattus norvegicus; identical to SEQ ID NO: 8248
  ref <308>: DATABASE ACCESSION NUMBER: EMBL / U21721
  ref <309>: DATABASE ENTRY DATE: 2000-03-04

SEQ ID NO: 8252 - DNA, 1754 bp, Homo sapiens; identical to SEQ ID NO: 8249

SEQ ID NO: 8253 - protein, 166 aa, Homo sapiens [sequence omitted]

SEQ ID NO: 8254 - DNA, 6160 bp, Rattus norvegicus
  ref <308>: DATABASE ACCESSION NUMBER: EMBL / U23146
  ref <309>: DATABASE ENTRY DATE: 2000-03-04
cgggccggcgggagtagaagagccactgagccatgggcgcaggcagttccaccgagcagcggagccccgagcagccggcggggagcgacacgccgagcgagctggtgctcagtggccatgggcccgcagctgaagcctcgggagcagctggagaccccgccgacgcggaccccgccaccaagctcccacagaagaatggccagctgtcttctgtcaacggcgtagctgaacaaggagatgtccatgtccaagaggaaaaccaggaggggcaggaggaagaagtcgttgatgaggatgttggacagcgagagtcagaagatgtgagagaaaaagaccgagttgaagaaatggcggccaactccacagctgttgaagatatcacaaaggatgggcaggaggagacatcagaaataattgaacagatccctgcttcagaaaacaatgtggaagaaatggtacagcctgctgagtcccaggctaatgatgttggcttcaagaaagtatttaaatttgttggttttaaattcacggtgaagaaggataaaaatgaaaagtcagatactgtccaactactcactgtcaagaaggatgaaggcgaaggggcagaagcctctgtcggagctggagaccaccaggagcccagtgtggagactgccgtcggagagtcagcatccaaagaaagtgagctgaagcaatccacagagaagcaagaaggcaccctgaagcaagaacagagcagcacagaaatcccccttcaagccgaatctgatcaagcggctgaggaagaagccaaagatgaaggagaagaaaaacaagagaaagagcccaccaagtccccagaatccccgagcagcccagtcaacagtgagacaacatcttccttcaagaagttcttcactcacggttgggccggctggcgcaagaagaccagcttcaagaaatcaaaagaggatgatctggaaactgccgagaagagaaaggagcaagaggcagaaaaagtagacgaggaagaaaaggaaaagacagagccagcctcggaggagcaggagccggcagaagacacagaccaggccaggttgtcagcagactacgagaaggtggagctgcctttggaagaccaggttggtgacctggaggcatcgtcagaggagaagtgtgctcctttggcaacggaagtgtttgatgagaagatggaagcccaccaagaagttgttgcagaggtccacgtgagcaccgtggagaagacagaggaggagcagggaggaggaggagaggctgaagggggcgtggtggtagaaggaacaggagaatccttgccccctgagaaactggctgagccccaggaggtcccccaggaagctgagcctgctgaggagctgatgaagagcagagagatgtgtgtctctggaggagaccacactcaactgacagacctaagtcctgaagagaagacgctgcccaaacacccagaaggcattgtcagtgaggtggagatgctgtcctctcaggaaagaatcaaggtacagggaagtcccttgaagaaactcttcagtagctcaggcttaaagaagctgtctgggaagaagcagaaggggaaacgaggaggtgggggagacgaagagcctggagaataccaacacattcacaccgaatccccagagagtgctgatgagcagaagggagagagctctgcgtcgtcccccgaggagcctgaggagaccacgtgtctggagaaagggccgctggaagcaccccaggatggggaagctgaggaaggaactacttccgatggagagaagaagagagaagggatcactccctgggcatccttcaaaaagatggtgacacccaagaaacgggtccgaagaccttctgagagtgacaaggaggaagagctggagaaggtcaagagcgccaccttgtcctccactgatagcacagtgtcagaaatgcaagatgaagtcaaaactgttggtgaggaacaaaagccagaggaaccaaagcgtagggtggatacttcagtgtcttgggaagcactgatttgtgtcggatcatccaagaagagagcaaggaaggcatcctcttcagatgatgaaggagggccaaggacactgggaggggacagtcacagagcagaggaggccagcaaagacaaagaagccggaacagacgctgttcctgccagcacccaggagcaggaccaagcgcaaggaagttcctcacccgagccagcgggaagcccttccgaaggggaaggtgtctccacttgggagtcatttaaaagattagtcactccaagaaaaaaatccaagtcaaaactggaagagaaagccgaagactctagtgtagagcagttgtccactgagatcgaaccgagtagagaagaatcttgggtttccattaagaaattcatccccggacggcggaagaaaagggcagacgggaagcaagaacaagccactgtggaagactcagggccagtggagataaatgaggacgaccctaatgtcccagccgtcgtgcctctgtctgagtataatgcagtggagagggagaagatggaagcccaggggaatacggagctgccccagctgctgggggctgtgtacgtgtccgaggagctcagtaagactctggtccacactgtgagtgtcgcagtcattgatgggaccagggcagtcaccagtgtcgaagagcggtctccttcgtggatatccgcttccgtaacagaacctcttgaacacacagcgggagaagccatgccacctgttgaagaggtcactgaaaaagacatcattgcagaagaaactcctgtgctcacccagacgttaccagagggtaaagatgcccatgacgacatggtcaccagtgaagtggatttcacctcagaagctgtgacagccacagagacctcagaggctctccgtactgaagaagttaccgaagcatcgggggccgaagagaccacagacatggtgtccgcagtttcccagctgactgactccccagacaccacagaggaagccaccccagttcaggaggtagagagtggtgtgctagatacagaagaagaggagcgccagacgcaggccatcctccaagccgttgcagacaaggtgaaagaggagtcccaggtgcctgcaacccagactgtgcagagaacggggtcaaaagcactggagaaggttgaggaggtagaggaggactccgaagtgctggcttcggagaaagagaaggacgttatgccgaaaggacccgtgcaggaagctggagctgagcatcttgcacagggctctgagactggacaggctactccagagagccttgaagttcctgaagtcacggcagatgtagaccatgtcgccacgtgccaggttatcaagctccagcagctgatggaacaggccgtggcccctgagtcatccgaaaccttgacagacagtgagacaaatggaagcactcccttagcagattcagacactgcagatgggacacagcaagatgaaaccattgacagccaggacagtaaagccactgcagctgtcaggcagtcacaggtcacagaagaagaggcggctactgctcagaaagaggagccttcgacactacctaataatgttccagcccaggaagaacatggggaagaaccaggaagagatgttcttgaacctacacagcaagagcttactgctgcagccgtgcccgttctggcaaagactgaggtgggtcaagagggtgaggttgactggttggatggagaaaaagtcaaagaagaacaggaggtgtttgtacactctggacccaacagtcaaaaggctgctgatgtgacatatgacagtgaagtgatgggagtggccgggtgtcaggaaaaggagagtactgaagtgcagagtcttagcctggaggagggagagatggaaactgacgttgaaaaggagaaaagggagacaaagccagagcaagtgagtgaagaaggtgagcaggaaacagccgctcctgagcatgaaggaacctacgggaagccagtcctgacacttgacatgcccagctcagagagggggaaggcactgggaagccttggaggaagcccttctctcccagaccaagacaaagcaggttgcatagaggttcaagttcaaagcctggacacaacagtcactcaaacagcagaagctgtggaaaaggtcatagaaacggttgtgatttcagagacaggtgaaagtccagagtgtgtaggtgcacacttattaccagctgagaagtcctctgcaacgggtggccactggactcttcagcatgcagaggacacggtacccctggggcctgagtctcaggcagaatccatcccaatcatagtaactcctgctcctgaaagcaccctacatcctgacctacaaggagaaataagcgcatcccagagagagcgatcagaggaagaggacaagccagatgctggtcctgatgctgacggcaaggagagtacagcaatcgaaaaagtcctcaaggctgaacctgagatcctggaacttgagagtaagagcaacaagattgtgctgaacgtcattcagacagccgttgaccagttcgcacgtacagaaacagcccccgaaactcatgcttatgattcacagacccaggttcctgcatgcaggcttgacagcagggagcccaacagatgctggacaaaaatgaaagatgccaagatgaaacacccagtgccgcagcccagagaggacttgcaagtcctgaccgttctggaggcatgggctcagcctcggaaatgcttgccgcgcttgcagttgaaagcgccggtgtcaaagtaagcattgagaagctgcctcctcaacccaaagatccaaaaggagcatgctgctgatggccctcagctccaaagcttagcccaggcagaggccagtgcctctggaaacctaaccaaagaatccccagacaccaacggaccaaagctaaccgaggagggcgatcccccaaaagttgaggtccaggaagaagaaatgtctaccaagtcagtcaaagagaacaaggcccaggcagaagaggacctgcaggagccaaagggagacctggcagaatcctaagatgttagttgctcattgtacatctgtaagaccagaatgtgaaaacaagtcacagaacaagatgctgctgttgggaccttgagaccaagatttcagagcccatgagatccagagagcagggccgtccaatgatttccacccagtagagcaccccgacaattctgaggcttcatcgggagctagagccagctaacatttcctcgtttcaagactgcctttgatttgccccttgatgccgtccgtgtatttctaacatttcctcgtttcaagactgcctttgatttgccccttgatgccgtccgtgtatttcggatttaaggtcctgcgttctcaacctggaaccaattctgccatacctagttccacttctcaaactggagcatcctcctttatgtatttatatgtatgttttatgtagtcctcctcctgtacctattgtatatttttttctaacgtttaagcacatgctttttgtattatgcaatatataacgggtgtgcagccatagcgacgctttgaaaagctccaagcctcaactgtaacctgcagcaaacagataacattcctggcaagaagagacaagtcttttttaaagtttactgatgcttagatctgtgggcttctagtcctctgaaagtggttgttttcctatgcacagcgagctcagaaataaaaaccccattttgaaacatccaggatgtcccaatattaccatgattttttcccccctttttgctaatccagtccaggttggaaagaagtctcctctgtgtcagattaagccctgtctcttaatgatatggacaaatgagtgtgcctaaggccatgagatgtttcctaatgcagaaggaatctgttgtacgtttttttgattgtactcttctatgctggaccgaattcatatgcagatcgaagtgagtcctgttctttacagatggtattttgatagatactggagtttgtctgtgttatatctgtgccccttctttaagaacaatgttgcattatgttcctttggataaattgtgatttgacaactgatttaaataaacatatttgactac

SEQ ID NO: 8255 - protein, 1596 aa, Rattus norvegicus
  ref <308>: DATABASE ACCESSION NUMBER: SWISS-Prot / AAA79517
  ref <309>: DATABASE ENTRY DATE: 2002-10-01
MGAGSSTEQRSPEQPAGSDTPSELVLSGHGPAAEASGAAGDPADADPATKLPQKNGQLSSVNGVAEQGDVHVQEENQEGQEEEVVDEDVGQRESEDVREKDRVEEMAANSTAVEDITKDGQEETSEIIEQIPASENNVEEMVQPAESQANDVGFKKVFKFVGFKFTVKKDKNEKSDTVQLLTVKKDEGEGAEASVGAGDHQEPSVETAVGESASKESELKQSTEKQEGTLKQEQSSTEIPLQAESDQAAEEEAKDEGEEKQEKEPTKSPESPSSPVNSETTSSFKKFFTHGWAGWRKKTSFKKSKEDDLETAEKRKEQEAEKVDEEEKEKTEPASEEQEPAEDTDQARLSADYEKVELPLEDQVGDLEASSEEKCAPLATEVFDEKMEAHQEVVAEVHVSTVEKTEEEQGGGGEAEGGVVVEGTGESLPPEKLAEPQEVPQEAEPAEELMKSREMCVSGGDHTQLTDLSPEEKTLPKHPEGIVSEVEMLSSQERIKVQGSPLKKLFSSSGLKKLSGKKQKGKRGGGGDEEPGEYQHIHTESPESADEQKGESSASSPEEPEETTCLEKGPLEAPQDGEAEEGTTSDGEKKREGITPWASFKKMVTPKKRVRRPSESDKEEELEKVKSATLSSTDSTVSEMQDEVKTVGEEQKPEEPKRRVDTSVSWEALICVGSSKKRARKASSSDDEGGPRTLGGDSHRAEEASKDKEAGTDAVPASTQEQDQAQGSSSPEPAGSPSEGEGVSTWESFKRLVTPRKKSKSKLEEKAEDSSVEQLSTEIEPSREESWVSIKKFIPGRRKKRADGKQEQATVEDSGPVEINEDDPNVPAVVPLSEYNAVEREKMEAQGNTELPQLLGAVYVSEELSKTLVHTVSVAVIDGTRAVTSVEERSPSWISASVTEPLEHTAGEAMPPVEEVTEKDIIAEETPVLTQTLPEGKDAHDDMVTSEVDFTSEAVTATETSEALRTEEVTEASGAEETTDMVSAVSQLTDSPDTTEEATPVQEVESGVLDTEEEERQTQAILQAVADKVKEESQVPATQTVQRTGSKALEKVEEVEEDSEVLASEKEKDVMPKGPVQEAGAEHLAQGSETGQATPESLEVPEVTADVDHVATCQVIKLQQLMEQAVAPESSETLTDSETNGSTPLADSDTADGTQQDETIDSQDSKATAAVRQSQVTEEEAATAQKEEPSTLPNNVPAQEEHGEEPGRDVLEPTQQELTAAAVPVLAKTEVGQEGEVDWLDGEKVKEEQEVFVHSGPNSQKAADVTYDSEVMGVAGCQEKESTEVQSLSLEEGEMETDVEKEKRETKPEQVSEEGEQETAAPEHEGTYGKPVLTLDMPSSERGKALGSLGGSPSLPDQDKAGCIEVQVQSLDTTVTQTAEAVEKVIETVVISETGESPECVGAHLLPAEKSSATGGHWTLQHAEDTVPLGPESQAESIPIIVTPAPESTLHPDLQGEISASQRERSEEEDKPDAGPDADGKESTAIEKVLKAEPEILELESKSNKIVLNVIQTAVDQFARTETAPETHAYDSQTQVPACRLDSREPNRCWTKMKDAKMKHPVPQPREDLQVLTVLEAWAQPRKCLPRLQLKAPVSK

SEQ ID NO: 8256 - DNA, 817 bp, Rattus norvegicus
  ref <308>: DATABASE ACCESSION NUMBER: EMBL / U23407
  ref <309>: DATABASE ENTRY DATE: 2000-03-04
cggaattccgatctgttctgcaaaggggacagcaaggtacctttaggctaaaggactcggcgtccagtattctagttgaagatctaaagagaaagccaccttgctgccactatgcctaacttttctggcaactggaagatcatccgatcggaaaactttgaagaaatgctaaaagctctgggggtgaacatgatgatgaggaagattgctgtggctgcagcctccaagccagcagtggagatcaaacaggagaatgatgacactttctacatcaaaacctccaccactgttcgaaccacggagattaacttcaagatcggggaggaatttgaagagcagactgtggatgggagaccctgtaagagtttggtgaaatgggagagtgaaaacaaaatggtgtgcgaacagaggcttctgaagggggagggccccaaaacctcctggagccgagaactgaccaatgatggagagctaatcctgaccatgacagcagacgacgttgtatgcaccagggtctacgtccgagagtgagtgcctatgtcccaagaacttcttctgggaggcccaccaaacctccctccctcccatgtccattttacaaactagctctccccttactcctgagggtcactctctatgccagagaggggcagactaccaaagctcagaacccttccatttgcctggtcagaagtcccagctccataccaggatccttcctggaagagactgtctctctggcctctactctttatccttgtagtccaagtgatttagaatatttattggttaattttattaaaatgttttaaaatgg

SEQ ID NO: 8257 - protein, 138 aa, Rattus norvegicus
  ref <308>: DATABASE ACCESSION NUMBER: SWISS-Prot / P51673
  ref <309>: DATABASE ENTRY DATE: 1996-10-01
PNFSGNWKIIRSENFEEMLKALGVNMMMRKIAVAAASKPAVEIKQENDDTFYIKTSTTVRTTEINFKIGEEFEEQTVDGRPCKSLVKWESENKMVCEQRLLKGEGPKTSWSRELTNDGELILTMTADDVVCTRVYVRE

SEQ ID NO: 8258 - DNA, 924 bp, Homo sapiens
  ref <308>: DATABASE ACCESSION NUMBER: EMBL / M68867
  ref <309>: DATABASE ENTRY DATE: 2000-03-04
cctgacgacccggcgacggcgacgtctcttttgactaaaagacagtgtccagtgctccagcctaggagtctacggggaccgcctcccgcgccgccaccatgcccaacttctctggcaactggaaaatcatccgatcggaaaacttcgaggaattgctcaaagtgctgggggtgaatgtgatgctgaggaagattgctgtggctgcagcgtccaagccagcagtggagatcaaacaggagggagacactttctacatcaaaacctccaccaccgtgcgcaccacagagattaacttcaaggttggggaggagtttgaggagcagactgtggatgggaggccctgtaagagcctggtgaaatgggagagtgagaataaaatggtctgtgagcagaagctcctgaagggagagggccccaagacctcgtggaccagagaactgaccaacgatggggaactgatcctgaccatgacggcggatgacgttgtgtgcaccagggtctacgtccgagagtgagtggccacaggtagaaccgcggccgaagcccaccactggccatgctcaccgccctgcttcactgccccctccgtcccaccccctccttctaggatagcgctccccttaccccagtcacttctgggggtcactgggatgcctcttgcagggtcttgctttctttgacctcttctctcctcccctacaccaacaaagaggaatggctgcaagagcccagatcacccattccgggttcactccccgcctccccaagtcagcagtcctagccccaaaccagcccagagcagggtctctctaaaggggacttgagggcctgagcaggaaagactggccctctagcttctaccctttgtccctgtagcctatacagtttagaatatttatttgttaattttattaaaatgcttta

SEQ ID NO: 8259 - protein, 137 aa, Homo sapiens
  ref <308>: DATABASE ACCESSION NUMBER: SWISS-Prot / P29373
  ref <309>: DATABASE ENTRY DATE: 2002-06-15
PNFSGNWKIIRSENFEELLKVLGVNVMLRKIAVAAASKPAVEIKQEGDTFYIKTSTTVRTTEINFKVGEEFEEQTVDGRPCKSLVKWESENKMVCEQKLLKGEGPKTSWTRELTNDGELILTMTADDVVCTRVYVRE

SEQ ID NO: 8260 - DNA, 1392 bp, Rattus norvegicus
  ref <308>: DATABASE ACCESSION NUMBER: EMBL / U23769
  ref <309>: DATABASE ENTRY DATE: 2000-03-04
ccgggatccctgcgcgccgtggtgttctgtgccttgccggtctgttccctccgattgtgcctagcaatgaccacccagcagattgttctccagggcccgggaccctggggtttccgactcgtgggcggcaaggactttgagcaacctctcgccatttcccgggtcactcccgggagcaaggctgctatagctaacttatgcataggagatttgatcacagccattgatggggaagataccagcagtatgacacacttggaagctcagaacaaaatcaagggctgcgtagacaacatgacgctcacagtatccaggtctgagcagaagatttggtctcctctagtgaccgaggaggggaaacgtcacccctacaagatgaatttagcgtcggaaccccaagaagtcctgcacatcggaagtgcccacaaccgtagtgctatgccatttaccgcctcacctgctcctggcacccgggtcatcacaaaccagtacaacagccctaccggcctctactcatctgaaaacatctctaacttcaacaatgcagtggagtcaaagacctcagccagtggggaggaggcgaacagcaggccctcggctcagcctcatccctccggcggccttatcatcgacaaggaatccgaagtttacaagatgcttcaggagaagcaagagttaaacgagccccccaaacagtccacatcattcctggttctgcaggagatcctggagtcggatgggaaaggggaccccaacaagccatcaggatttagaagtgttaaagctccagtcaccaaagtggctgcatctgttggaaatgctcagaagctgcccatctgtgacaaatgtggaaccggcattgttggtgtgtttgtgaagctgagggaccatcatccccaccctgaatgttatgtgtgcaccgactgtggcatcaacctgaaacagaagggccatttctttgtaggggatcagatttattgtgaaaagcatgcccgggagagggtcacaccacctgagggctatgatgtggtcacagtgttccccaagtgatcgagaggacctgccctgtctgctgccctccagcctgcctgctgcacctggttgtcagaatgttctggttctctcctccctgacagtcctgtgcttagtgttagtcctgctcagtaaacattgagtttctcctgtactgactgaccctgactggcagtgtgacacctgcttttacattaccgggaggtggttttgtccctgtcccctcacccacaccacaatgcaccttcttcccttggagtcttccctgctgaaaatggacattggtcacattggaattaagccaaatgttttatctctgatgttactttgttttacttaataaatttagactttaaagcc

SEQ ID NO: 8261 - protein, 327 aa, Rattus norvegicus
  ref <308>: DATABASE ACCESSION NUMBER: SWISS-Prot / P52944
  ref <309>: DATABASE ENTRY DATE: 2001-10-16
MTTQQIVLQGPGPWGFRLVGGKDFEQPLAISRVTPGSKAAIANLCIGDLITAIDGEDTSSMTHLEAQNKIKGCVDNMTLTVSRSEQKIWSPLVTEEGKRHPYKMNLASEPQEVLHIGSAHNRSAMPFTASPAPGTRVITNQYNSPTGLYSSENISNFNNAVESKTSASGEEANSRPSAQPHPSGGLIIDKESEVYKMLQEKQELNEPPKQSTSFLVLQEILESDGKGDPNKPSGFRSVKAPVTKVAASVGNAQKLPICDKCGTGIVGVFVKLRDHHPHPECYVCTDCGINLKQKGHFFVGDQIYCEKHARERVTPPEGYDVVTVFPK

SEQ ID NO: 8262 - DNA, 1462 bp, Homo sapiens
  ref <308>: DATABASE ACCESSION NUMBER: EMBL / BC000915
  ref <309>: DATABASE ENTRY DATE: 2002-09-02
gcccgcgccgcgccgctctttctccgacagctgccgggggtgccctgcaagctgttccgcgcgtcctgcccgtctgtccccgcgggtcgtcgcccgccacagccgcgccatgaccacccagcagatagacctccagggcccggggccgtggggcttccgcctcgtgggcggcaaggacttcgagcagcctctcgccatttcccgggtcactcctggaagcaaggcggctctagctaatttatgtattggagatgtaatcacagccattgatggggaaaatactagcaatatgacacacttggaagctcagaacagaatcaaaggctgcacagacaacttgactctcactgtagccagatctgaacataaagtctggtctcctctggtgacggaggaagggaagcgtcatccatacaagatgaatttagcctctgaaccccaggaggtcctgcacataggaagcgcccacaaccgaagtgccatgccctttaccgcctcgcctgcctccagcactactgccagggtcatcacaaaccagtacaacaacccagctggcctctactcttctgaaaatatctccaacttcaacaatgccctggagtcaaagactgctgccagcggggtggaggcgaacagcagacccttagaccatgctcagcctccaagcagccttgtcatcgacaaagaatctgaagtttacaagatgcttcaggagaaacaggagttgaatgagcccccgaaacagtccacgtctttcttggttttgcaggaaatcctggagtctgaagaaaaaggggatcccaacaagccctcaggattcagaagtgttaaagctcctgtcactaaagtggctgcgtcgattggaaatgctcagaagttgcctatgtgtgacaaatgtggcactgggattgttggtgtgtttgtgaagctgcgggaccgtcaccgccaccctgagtgttatgtgtgcactgactgtggcaccaacctgaaacagaagggccatttctttgtggaggatcaaatctactgtgagaagcatgcccgggagcgagtcacaccacctgagggttatgaagtggtcactgtgttccccaagtgagccagcagatctgaccactgttctccagcaggcctctgctgcagctttttctctcagtgttctggccctctcctctcttgaaagttctctgcttactttggttttccctctgcttgtaaaacattgagtcccctccctgccttggttaattgactcacaccagctgtgcgatgcccgcttttacaattaaaggaaaactgttttgttcagtgtcaccttgtcagcaacactgtgtcccttcgccccaccgttcttctctgctgcatttggacatcagccaaatttgaacccaatcaaatataacgtgtctgacactgattttgtttttactcaataaatgtatagactacaaaaaaaaaaaaa

SEQ ID NO: 8263 - protein, 329 aa, Homo sapiens
  ref <308>: DATABASE ACCESSION NUMBER: SWISS-Prot / O00151
  ref <309>: DATABASE ENTRY DATE: 2002-06-15
MTTQQIDLQGPGPWGFRLVGGKDFEQPLAISRVTPGSKAALANLCIGDVITAIDGENTSNMTHLEAQNRIKGCTDNLTLTVARSEHKVWSPLVTEEGKRHPYKMNLASEPQEVLHIGSAHNRSAMPFTASPASSTTARVITNQYNNPAGLYSSENISNFNNALESKTAASGVEANSRPLDHAQPPSSLVIDKESEVYKMLQEKQELNEPPKQSTSFLVLQEILESEEKGDPNKPSGFRSVKAPVTKVAASIGNAQKLPMCDKCGTGIVGVFVKLRDRHRHPECYVCTDCGTNLKQKGHFFVEDQIYCEKHARERVTPPEGYEVVTVFPK

SEQ ID NO: 8264 - DNA, 793 bp, Rattus norvegicus
  ref <308>: DATABASE ACCESSION NUMBER: EMBL / U24489
  ref <309>: DATABASE ENTRY DATE: 2000-03-04
tcaaagaccaccaccatcttcctcaatggcaaccgcgagcggcccttggatgtgttttgtgacatgcagactgacggaggaggttggctggtgttccagcgccgcatggacggacagacagacttctggagagactgggaggagtacgcccatggttttgggaacatctccagggaattctggctgggcaatgaggcccttcacagcctcacgcaggctggagactactctatgcgtgtggacctgcgggccggaaaggaagccgtgttcgcccagtatgacttcttccgagtagactcagcgaaggagaactatcgtctacacctagggggctaccatgggaccgcgggtgactctatgagctaccacagcggcagtgccttttctgcccgtgatcgagaccccaataacttgctcatctcctgcgctgtctcctatcgtggggcttggtggtacagggactgtcactacgccaatctcaatgggctctatgggagcacagtggatcaccagggagtgagctggtaccactggaagggcttcgagttctcggtgcccttcacggaaatgaagctgagacccagaaacttccaggcccccaccaggggcacctgagcctgctgcccacctcactcacaccctggtatgactgccgagcactgaggggttgtgcccagagaagagccagtgtgtctctactgtgcctagctcaccgaggaagccttctctgccacagtctcacagcaccatgtttacaggggggaggggagggaaatggagcaataaaggagaa

SEQ ID NO: 8265 - DNA, 4042 bp, Homo sapiens
  ref <308>: DATABASE ACCESSION NUMBER: EMBL / M26856
  ref <309>: DATABASE ENTRY DATE: 2000-03-04
tcgacagctagatttccaggctggaatcctgccctccacaacatgcgaacaatacccgtgttgcatatagagcatggctgtgaagagttgagtgagtgcccacaaagcacttagagcagtgtctggtacatgctattactccgcagcgggaaaccacttcctcctttgtcttctgggcacttttgtgagtgaaaggaggcactaataacaatcacactgggatacctgtatatactggaatgccccaggcaaaccaggcttaaactgtattactctatctgtagcttaaactaacaaacaacccacacaaatcacattttgttcttcaggcgattcaggaaggcctattaggcagggactgccattttctctctgagacaaacatcatgccagtaaactggcccacggtggggtggcagagggagagggcccaggtgggggcggacactattgcctgcacaggtgatgtggaaccagaaagctgactctggatgcaggaaaaaggtcagggttgcatttcccttccttgcttcttgatgggtgatcaatttttttgaaatacggacgtcccaaggccaatgagactggtgtcattccagaaaagggccactctgtgggcgggtcggtgggagggtacctgaaggtggggtcaagggaggccccaaaacagtctacacagcaggagggatggctggggctcttgagctataagtggcacctcagggccctgacgggcgtctcgccatgctgctcctgggcctgctgctgctgctgcccctgctggctggcgcccgcctgctgtggaactggtggaagctccggagcctccacctcccgcctcttgccccgggcttcttgcacttgctgcagcccgacctcccaatctatctgcttggcctgactcagaaattcgggcccatctacaggctccaccttgggctgcaaggtgagaggctgatctcgctctggccctcaccataggagggggcggaggtgacggagagggtcctctctccgctgacgctgctttggctgtctcccagatgtggtggtgctgaactccaagaggaccattgaggaagccatggtcaaaaagtgggcagactttgctggcagacctgagccacttacctgtaagggctgggggcattttttctttcttaaaaaaatttttttttaagagatgggttcttgctatgctgcccaggctggtcttaaattcctagtctcaaatgatcctcccacctcagcctcaagtgtgagccacctttggggcatccccaatccaggtccctggaagctcttgggggggcatatctggtggggagaaagcaggggttggggaggccgaagaaggtcaggccctcagctgccttcatcagttcccaccctccagcccccacctcctcctgcagacaagctggtgtctaggaactacccggacctgtccttgggagactactccctgctctggaaagcccacaagaagctcacccgctcagccctgctgctgggcatccgtgactccatggagccagtggtggagcagctgacccaggagttctgtgaggtaaggctgggctcctgaggccacctcgggtcagccttgcctctcacagtagcccccgccctgcccgctgcacagcggcctgctgaactcacactgtttctccacagcgcatgagagcccagcccggcacccctgtggccattgaggaggaattctctctcctcacctgcagcatcatctgttacctcaccttcggagacaagatcaaggtgcctcacagcccctcaggcccacccccagcccctccctgagcctctccttgtcctgaactgaaagtactccctccttttctggcaggacgacaacttaatgcctgcctattacaaatgtatccaggaggtgttaaaaacctggagccactggtccatccaaattgtggacgtgattccctttctcagggtgaggacctggagcctagacacccctgggttgtaggggagaggctggggtggagggagaggctccttcccacagctgcattctcatgcttcctgccgcagttcttccccaatccaggtctccggaggctgaagcaggccatagagaagagggatcacatcgtggagatgcagctgaggcagcacaaggtggggactgtacgtggacggcctcccctcggcccacagccagtgatgctaccggcctcagcattgctatgaggcgggttcttttgcataccccagttatgggcctgttgccactctgtactcctctccccaggccagccgctcagcccgctcctttcaccctctgcaggagagcctcgtggcaggccagtggagggacatgatggactacatgctccaaggggtggcgcagccgagcatggaagagggctctggacagctcctggaagggcacgtgcacatggctgcagtggacctcctgatcggtggcactgagaccacagcaaacaccctctcctgggccgtggtttttttgcttcaccaccctgaggtgcgtcctggggacaagcaaaaggctccttcccagcaacctggccagggcggtgggcaccctcactcagctctgagcactgtgcggctggggctgtgcttgcctcaccggcactcaggctcactgggttgctgagggagcggctggaggctgggcagctgtgggctgctggggcaggactccacccgatcattccccagattcagcagcgactgcaggaggagctagaccacgaactgggccctggtgcctccagctcccgggtcccctacaaggaccgtgcacggctgcccttgctcaatgccaccatcgccgaggtgctgcgcctgcggcccgttgtgcccttagccttgccccaccgcaccacacggcccagcaggtgactcccgagggttggggatgagtgaggaaagcccgagcccagggaggtcctggccagcctctaactccagcccccttcagcatctccggctacgacatccctgagggcacagtcatcattccgaacctccaaggcgcccacctggatgagacggtctgggagaggccacatgagttctggcctggtatgtggggggccgggggcctgccgtgaaaatgtggtggaggctggtccccgctgccgctgaacgcctccccacccacctgtccacccgcccgcagatcgcttcctggagccaggcaagaactccagagctctggccttcggctgcggtgcccgcgtgtgcctgggcgagccgctggcgcgcctggagctcttcgtggtgctgacccgactgctgcaggccttcacgctgctgccctccggggacgccctgccctccctgcagcccctgccccactgcagtgtcatcctcaagatgcagcctttccaagtgcggctgcagccccgggggatgggggcccacagcccgggccagaaccagtgatggggcaggaccgatgccagccgggtacctcagtttctcctttattgctcctgtacgaacccctcccctcccccctgtaaacacagtgctgcgagatcgctggcagagaaggcttcctccagcggctgggtggtgaaggaccctggctcttctctcggggcgacccctcagtgctcggcagtcatactggggtgcgagagaggtgggcagcagctcagcctccccccgctggggagcgaaagtttcttggtctcagcttcatttccgtgaagggcaccgagaactcgaagcccttccagtggtaccagctcactccctgggaaaggggttgtcaagagagagtcaaagccggatgtcccatctgctcttcccgttccccttaaggaggtagctcccagcactcaaccaacctccccgcagagctcccttcctgaccctccgctgcagaggattgaggcttaattctgagctggccctttccagccaataaatcaactccagctccctctgcgaggctggcatgattgttccatttcacccagccactcagtcccttgcctgttacactgtggggctgaaacctagg

SEQ ID NO: 8266 - DNA, 3285 bp, Rattus norvegicus
  ref <308>: DATABASE ACCESSION NUMBER: EMBL / U24652
  ref <309>: DATABASE ENTRY DATE: 2000-03-04
tcctagagctcaaagcccaagctccaagaggcctgctccagcatccaggaggtccgaccctgcacacgcctggagatgccggacaacctctacacctttgtgttgaaggtgcagggccagacagacatcatctttgaggtgggagatgaacagcagctgaactcatggctggcagaactcagggcaagcacaggcctagggttggagcacctggacacagagttacctctttccttagtggcagagcctggcccagctatatccccaaggggaagcacggactccctggaccaaggtgcttcacctggggtgatgttggacccagcctgccagaaaacagatcacttcctgtcctgctacccctggttccacggccccatctccagggtgagggctgcacagctggttcagctgcagggccctgatgcccacggtgtgttcctggtgcggcagagtgagtcccggagaggggaatatgtactcacattcaacttacaggggagagccaagcacctccgcctggtgctcacagagcgtggacagtgccgggtgcaacacctgcacttcccctcggtggtggatatgctccgccacttccagcgctcccccatcccacttgaatgtggagcagcctgtgatgtccgactctctggctatgtggtagtcgtctctcaggcaccagagctgggccatccccacctcagctctgctggctgtccccctggccatggtgcagaggctctccgtggccaagtgacacctcctgagcagatcttccacctggtgccttctcctgaggaactggccaacagtctgcggcagctggagcttgagtctgtgagcagtgcccgggactcagactatgaaatggactcctcctcacggagccaccttcgggccattgacaaccagtacacccctctctcacagctgtgcagagaggcaaacttgtgaatgtaaccattttccttccctccagagaactacaggctgctgctgtcagccttccccagctcagatgtgcctgcttccaccacacacaaggctgtcacaggcttctgtcagccacagctagcctggcttcttcccactgtctgtagatgtagttcttgtgcacaggtgccactagctggcaccaaggcctcgttcccaacccagaggaggcggggctgcaggcccagagctggcagtggaaactgacagagctgatgacagacttcttaccaggtagggtcatcgggaagcacaaaacactaacagtccctggattctcacatggtgtccttccctgtagcttcattctgtggcaagtctaagtcccatgtcacaggcgtaggacacttcataatcctgcttctactcttagctttggacagaagctctgccagaggggcaagcttaaagatcaaaaatgatttaaacattttacctcagagtaattatttttaaagggttcaggtttccacttgatattatagcttacttcactgcactgccctgctaccccctgccactgtaaagttggggggagctgagtccccctgctttgcttaccttgagccaggctagcatgctagtgtccttgtctgctcaccctcaggacagttgcctgctacggggtagacactgtcctccctaatgtagagaatgaagtgtgtcaccctctcagggaaatccaggcagcttgcagagagaggagggtggcaggggacattccaccccagtgccttatgcattaaaaacaaaatcaggactgtggtttacagcagcgttagaggatgagatgaatgggtgggggaagacaaacacagatggaaggcctctaggcttctttagtgaacccacattttactccccccaaccccctcccagcatctaggggcttagtgagtttggcccatgctatgaagaaactcctgtaaccgctcctaggtgttcttatccatacaatctttccatctagacagagccaaaaactgtcatctttcctaagggatgcagttcacagggactggagcaggctgttcatggcacaaacagtgcttacagcagtggctttgggaaaccacaacttaattccttgaacattgagaggcagccatgctgctgccctgctgcagacagcagtgctgactccccctctgctcaccttgcactcgggaagcctgcgtgggctttggtgatggaagcagctgcacctcagcttcgacacccaccacaggtgtggacctgtgctcatcttaggacagcgccttccttcactgcacatcaggtatgaaccagagacgtgagcagtaacagccagtgggccaggccggctctaatccacacaggatgcgtggacggctgtgccctgcacctggccaggagctaaacccacttcaaacttggggcactcatttctcctgggccttcaaagagagacttgctaggtgctgtaagccagcaccttggccccttagtgctgggattcactcactgtggacagctttgtttcaaaaaatgtccaagatatcagaaaacaaggtaaaaaagtctcatgactctgtgacagagtgacaacactaagccagcaccttttctttaagctaaagtaggtcagttggctgacggggacagacgggtaccgggtatgagaactcctgggccagataccctgtgtcaaagccaggccccactcccaccctcagcagtgtcttctggccacacaaggcaggatgggtcagtggccactagagacagagcagctcaacagtcctgaacccctgctcccttctcccgagtactcaactcagactaacaagcaccagcaccaaagagttaggtcaactaacctgccttgtctttaccagcatccacatggctttatctgtataaatcttctgcctttgatcatttctggatggtgtaggaaaaaaggaatagtgaccattacagtcttgggccagacaacactatttttacctaagtctcttaacctaaattacgtcgcctcttcctgaggctcagtctcttgtttaaatgttaccttggtgcaaataaaagtgataaactgtcccccactgcctcctgacgagacacatctgtctaatggccagcgtgtggctggaataagcagcattgtgaccacaggatcaggggacttcatcttctatcattagagcagaaggtatttggcaaatctttgttttatgtactgtacgagtaacttattcttgaataatgcaaattttcctacaatgtacaaattgctgtatgtgaattaaaaaggttttcagaattaca

SEQ ID NO: 8267 - protein, 368 aa, Rattus norvegicus; identical to SEQ ID NO: 6347
  ref <308>: DATABASE ACCESSION NUMBER: SWISS-Prot / P50745
  ref <309>: DATABASE ENTRY DATE: 2001-10-16

SEQ ID NO: 8268 - DNA, 5423 bp, Homo sapiens; identical to SEQ ID NO: 6348
  ref <308>: DATABASE ACCESSION NUMBER: Refseq / NM_005475
  ref <309>: DATABASE ENTRY DATE: 2000-11-01

SEQ ID NO: 8269 - protein, 575 aa, Homo sapiens; identical to SEQ ID NO: 6349
  ref <308>: DATABASE ACCESSION NUMBER: SWISS-Prot / Q9UQQ2
  ref <309>: DATABASE ENTRY DATE: 2001-10-16

SEQ ID NO: 8270 - DNA, 4359 bp, Rattus norvegicus
  ref <308>: DATABASE ACCESSION NUMBER: EMBL / U25281
  ref <309>: DATABASE ENTRY DATE: 1996-03-01
gccaggcgcgcagaagcaacgccaggcactgccggcagatcaactgggatcctcgaggcggcaagaggacagggacagcggggaccgcgactccagtaaaagtccagtcggcccggttacggccagctgcagaccagaacctactctcttggagccatttgtaagcaagagacgccaacgctgtgtgacatatgccggtgccaccaccaccacccccacctcttcctccaccccctccacctctgggagctcctccccctccacccccaccagggcccccgatcagcacagacgctcccagcttaaggaagtcagatctgaaaggtcggagtgcactgttggctgatatccagcaaggaacacgcctgcgaaaagtcacccagatcaatgaccgcagtgccccacaaatcgagagttcaaaaggaaccagcaaagagggaggagctgctggcagcaatgcccgtggaggaagcacgccccctgccctgggagatctctttgctggtggctttcctgtgttgaggccagcaggccagcgggatgtggcaggtggcaagaccggacagggccctggctcccgagcgccttctccccggctccccaccaaagccatcagcggcccccttcccgctcctgcatcccccaggctaggcaatgcctcagatacacacagctctgccaggccagtccctcctcgccccagtgtacctgccccaccgcctcccactacacccccacccccgcctccacctccacctccacctccacctccacccctccccccagcctcccccatcaaagccccatcggtgtccccacctgtccctccaaccaaggggaatccgtctgcggtgccagcccctataccctgcgtacctccccttccgccccctcccccgactccgccccctctgcccccagcctcagcactcagtgagaaggcagtgaggccccaactagccccgctgcacctgccacccataccacctccgcttcctctcctgccaccctatgggtacccggcgctccactcagagcccagcagccctgcccaggacgtgagagagccaccagctcctcctccaccaccgccaccaccaccaccacctccaccaccaccgctccccacctacgcctcttgctctccaagggccgctgtggccccgcccccgccccctttgccaggctccagcaacagcggcagcgagactcctcccccgctgccccccaagtcccccagcttccagacgcagaaagccttgcccacacctccaggtgctcccggccctcagatcatcctgcagaagaagcgtcgaggcccaggagccggtgggggaaagctaaacccacctccagccccacctgcaagatcgcccaccactgagctctccagcaaaacccagcagcctggaggacagctgcggaatggaggccagcacgtgattggccgcacacctggttcctggctccaagctgaggcagctgggcagagctctgatgacatcaaaaccagaaattctcagttatctctaaaggcactccggtgagaagatggtgacgtcaaggtcctggggttctggactagacaccaggacaactccttgagactctactgtactcaagatctactcctttgaatgcaggcaccgaactgagcatttattttttttgtaaataatgatttgcatgaagcccttaggcaccatgttagtcaactttcatttgagtaacattttaatatttttaaaacaagcaccctgacatttgtccgtcttgtacagatggctcccgatcccgccctgtggtgtccactgtgactagaacatatgcttgcaggctggtccttcgaggattctgaaaccttttccagagcatccttagttttcgagtagtccaaaagtcataactatccacaacagcttcttattggcatgactctcatcactccaaccgcaaaatcaaaccaaataatgccttataaaccacgcagctcagaggaagcagtgtgtcgccaggtcctggtgttgccactcagcttccagtgagcgagaagccatgtctcgcttccttttagcagtacagggacgtcattttgctgcctaatgtgtgtatatatatatatatttatatcccaaggtaaaggctagagtgggcgtggcccctcccatgccttccgcagggccccttttgtaactgaattcttttacaggtagccaatgctcttactgtttacagcatccccagcgccagtctttaccgctttccttcaacacctccaagttcccagctccatgctggtagccagggtaaagtcagctttatgagattttgatatcctcccatccctgtagactacggttgtatatagctcatgattatgaataagtttatttttacctcagaagtctccctccccaaactctactcagagtgtaagatttacatggaaaatacaacatatatttaaaaagaacaagaataaaaggaggctggagaaatagacccactggtaacatgcctgctaaggacatacacacagagctggatgtggtaacacacacttgttattccattactgggggagcagaggcaggcagatccctgtgactcactggccagccaagctattcaaggagcctcaggttccagaaagtggcattgtctcaaaatacaaggtggcaactcctgaggccacaacacccaaagttgacctctggcctcttacaggttcacgcatgacatgtgtgcacacatcccacacagggacatacacactcatacagaaacacatagcaaagagcagagcagctcttggagcatatctcaaatatcctgccccattggtaggagtctcagaatacccatcagcccaaaggaccttctctctgagcttcatctgagagcgcagatggctctgttgcctggtggcgtgtgcctgggatgcccagcagtaataggcagcgagttcagctgtcctgaatagacagagggccacgcaggctggggctgctctctgcacccttctttgaatctcaagggagaaaagtatgcttttgcttcttgtcaggccccaaatgctcccatccactggagaggggaggctgtagcagaggagggggaaatgggaggaaacagtccgatccctcactgtattcagaatagctgcagacagaagagaggggaaatgaaacaatggtgttgctttggagcactccgaccacaagaacattagcccaggccgggccatcaggggccaatggattaggagagtgttcagctgtgtgtctgcacacacctgactattgtttggagcaaatgtcctgcattagtgtcatgctttctcctgccagataggagaaactgagccagggtcaagtttccaaaatctctggggcagtgactcaaggccgtagttacagccacatcagcagacatgacggttctacgttgctggtttgttacggtggctctggaagtgtgcagaaaggtcagaagccacactactcttctcctagccatgcagagtaataatcattaaaaagctttcataactacgatgagggccatcaggaaggcagtcctgcctttggaatcagtgaattgttcacatacggtgtatgttcaccatgtattcacatggtgatgttctatactgctggcacaggaatttaaactattcaagagtgggggagatgtctctgtctgtagacatcctgctgcccaagcatgaggaccggaattcatatccccaggacctatataaaagtcaggcatgggggaagcatgtctgtaatcctagaagttgggtagaggcatctgccccaggaaggtcggtggccagccaacctagcaaaatttgcaagttgcaagctgcaggtttagtgagaataagatagagatagaccaaaaaagatacctgtagatggcctttgggcttcacatgcatgtgcacacatgtgccttgttcatatgcacacacacacacacacacacacacacccgtatatataatacataaatattttttacaaacttatttaagggcataaggaaggaacaagcagaaaccaaaaaatagcaagcaaggagcattctcagggatctggcctagcagctctcctcaagacctgtcacggagcctaccacctccaagttcaagtgggtacgttcggttcccaccagcagtgtacaggttaggcctttgactgtgaactcacgcatggagttgtccctgctatccttgcccacccccacattgcagactgtgaccctgccccatgtctctgcctgtattttatatttattggtgtctcctgctgcagattcattcctttgtacctaataaactttaataagtga

SEQ ID NO: 8271 - protein, 451 aa, Rattus norvegicus
  ref <308>: DATABASE ACCESSION NUMBER: SWISS-Prot / AAA87791
  ref <309>: DATABASE ENTRY DATE: 2003-02-01
MPVPPPPPPPLPPPPPPLGAPPPPPPPGPPISTDAPSLRKSDLKGRSALLADIQQGTRLRKVTQINDRSAPQIESSKGTSKEGGAAGSNARGGSTPPALGDLFAGGFPVLRPAGQRDVAGGKTGQGPGSRAPSPRLPTKAISGPLPAPASPRLGNASDTHSSARPVPPRPSVPAPPPPTTPPPPPPPPPPPPPPPLPPASPIKAPSVSPPVPPTKGNPSAVPAPIPCVPPLPPPPPTPPPLPPASALSEKAVRPQLAPLHLPPIPPPLPLLPPYGYPALHSEPSSPAQDVREPPAPPPPPPPPPPPPPPPLPTYASCSPRAAVAPPPPPLPGSSNSGSETPPPLPPKSPSFQTQKALPTPPGAPGPQIILQKKRRGPGAGGGKLNPPPAPPARSPTTELSSKTQQPGGQLRNGGQHVIGRTPGSWLQAEAAGQSSDDIKTRNSQLSLKALR

SEQ ID NO: 8272 - DNA, 340 bp, Homo sapiens
  ref <308>: DATABASE ACCESSION NUMBER: EMBL / AA972141
  ref <309>: DATABASE ENTRY DATE: 2000-03-03
tttttttttcaattaaaatactgctttaaagcccgtgcaaatcacatatttacaataaataaattctcaattccaagcctgtatgccaactgaattacagcttgagcatggggtgggtggggtctgacatgttgttctgcaacctggaaccccaggaccttcgcttcatctgccttctcaccgaagagtctttagagataactgagaatttctgcctttgatgtcatcagagctctgcccgactgcttccgcttggagccagggaccaggtgtacggcttctggggatcttgctggggtaaatcttctggcatggtttatattcatccggagggggaaag

SEQ ID NO: 8273 - DNA, 3531 bp, Rattus norvegicus
  ref <308>: DATABASE ACCESSION NUMBER: EMBL / U25746
  ref <309>: DATABASE ENTRY DATE: 2000-03-04
cacgctctgatggcggtcactgctggagctttggccatttcgtagggccggtcctcgctcggtactgtgaggacttggtgcctccctcctttgtcctcttcaccggtctgcgcatcgtccccaagggcgcaggccttccgctggctggcagcatgggcagggagtctcgccattaccgaaaacggtcagcatctcgaggtcgctctggaagtcggtctaggagtcgctcaccctctgacaaaagaagcaaacgtggagatgacaggcgttccaggagtagagacagagacagaaggagagagaggtctcggagcagggacaaaaggagatctcggtcacgggacaggaaacgcctgagacgttccagaagtagagagcgtgacagaagccgagagcgaagaagatctcgaagccgggatagaaggcgctcaaggagtcggagccggggcaggcggtcccggtcttccagtcctggcagcaaaagcaagaaggctgagaacaggtctaggtccaaagagaaagcagaaggtggggacagctccaaggagaagaagaaagacaaggacgacaaggaggacgagaaagagaaggatgctgggaattttgaccagaataagctggaagaagaaatgagaaaacgaaaagaaagggttgaaaaatggcgagaagagcagcgtaaaaaggcgatggagaacataggggagctgaagaaggagatcgaggagatgaagcaggggaagaagtggagcctggaagatgacgacgatgatgaagatgaccctgccgaggctgagaaggaagggaatgaaatggaggacgaggagctggacccattagatgcctacatggaggaagtgaaagaagaggtaaaaaagtttaacatgaggagcgtgaaaggcggcgcaggaaatgagaagaagtccggaccgactgtcacgaaagtggttactgtggtaacaaccaagaaagcagtagtagatgccgacaagaagaagggagagctgatggagaatgaccaggacgccatggagtactcctcggaggaggaagaggttgaccttcagacggccctcacaggctaccagacaaaacagagaaagcttctagagccagtggatcatgggaaaattgagtatgagccattcagaaaaaacttttacgttgaagttccagaattagcgaaaatgtctcaagaagaggtgaatgtgtttcggttggaaatggagggcattacagttaaaggaaaaggttgccccaagccaattaaatcatgggtccagtgtggaatttccatgaagatactgaattccctcaaaaagcatggctatgaaaagcccacaccaatccaaactcaagcaattcctgctataatgtctggacgagatttgattggcattgccaagacaggaagtggaaaaaccattgcttttcttttgcccatgtttagacacatcatggatcagaggtcattggaagaaggagagggaccaatcgctgtcatcatgactccaactcgagaactggctttacaaatcactaaagaatgtaagaagttttcgaagaccttgggactgagagtggtctgtgtgtatggagggacaggaatcagcgagcagattgctgagctgaagagaggcgctgagatcattgtttgcacacctggccggatgatcgacatgctggcagctaacagtggtcgggtcacaaatcttcgaagagtgacatatgttgttttagatgaagcagacagaatgtttgacatgggttttgaaccacaggtcatgcgcattgtggacaatgtccgtcctgaccgacagacagttatgttctcagctactttcccaagagctatggaagcgttggcccgcaggatcttgagcaagcccattgaagttcaggttggaggccggagtgtggtttgctcagatgtggaacaacaagtgattgtgattgaagaagagaagaaattcttgaaattgctggagcttttaggccattatcaggagtcaggatctgtcattatatttgtggataagcaggaacacgctgatggtcttctgaaggacttgatgagagcttcctacccttgcatgtctcttcacggaggtattgatcagtatgacagggacagtatcataaatgactttaagaatggaacctgcaaacttctcgtagccacgtctgttgccgcccgtggtctagatgtgaaacatctcattcttgtagtaaattacagctgccccaatcattacgaagattacgtgcacagggctgggcggactggaagagcaggcaacaagggttatgcctacaccttcatcacagaagaccaagctcgatatgctggggacatcattaaagctcttgaactgtcggggacggcggtgcctcctgacctagagaaactatggagtgacttcaaagatcagcagaaagctgaaggaaaaataattaaaaagagcagcggcttctctggcaaggggttcaagtttgatgagacagagcaggctttagccaatgagaggaaaaagctacaaaaagctgcccttggcctgcaggattctgatgacgaggacgccgcagttgatattgacgagcagattgaaagcatgtttaattccaagaagagagtgaaagacatggctgctcccggcacatccagtgcgcctgctccgactgcgggcaatgctgagaagctagagattgccaagaggttggcgcttagaatcaacgctcagaagaacctgggcatcgagtctcaggtagatgtgatgcagcaggccacaaatgccatcctcagaggtggccctcttctggctcccaccgtgtctgcaaaaaccatcgcagagcagcttgccgagaagatcaatgccaagctcaattacgtgcctttggagaaacaggaagaagagagacaggagggtgggcagagcgaatctttcaagagatacgaggaagaattagaaattaatgacttcccacagacggcgaggtggaaagttacctctaaggaagccttgcagaggatcagtgagtactcggaagccgccatcacaatcagagggacctacttcccgcctggcaaagagcccaaggaaggagagcggaagatctacttggcgattgaaagtgccaacgagctggctgtgcagaaagcaaaggcagagatcaccaggctcataaaagaggagctgatccgactgcaaaattcataccaacccaccaacaaaggacgatacaaagtattataaacaccggagccactttgtacccgtgctatctgtgacgtttacagtgtattgtaaagtaagacttttaaaattctgtcttgcttattttttaagtacaagaaaccagtgtttgttcaagaggtcatctgtaagtactaccctatacccatccaaactccatttaaatcagagctgttttcagagtgtgatgttcttcgatgtaaaccttagataccaacactttaaatatctggagacattgggattttgtactgaatgcagtaataaagtgtgtcaggca

SEQ ID NO: 8274 - protein, 1033 aa, Rattus norvegicus
  misc_feature (1)..(1033): Xaa=Unknown amino acid
MGRESRHYRKRSASRGRSGSRSRSRSPSDKRSKRGDDRRSRSRDRDRRRERSRSRDKRRSRSRDRKRLRRSRSRERDRSRERRRSRSRDRRRSRSRSRGRRSRSSSPGSKSKKAENRSRSKEKAEGGDSSKEKKKDKDDKEDEKEKDAGNFDQNKLEEEMRKRKERVEKWREEQRKKAMENIGELKKEIEEMKQGKKWSLEDDDDDEDDPAEAEKEGNEMEDEELDPLDAYMEEVKEEVKKFNMRSVKGGAGNEKKSGPTVTKVVTVVTTKKAVVDADKKKGELMENDQDAMEYSSEEEEVDLQTALTGYQTKQRKLLEPVDHGKIEYEPFRKNFYVEVPELAKMSQEEVNVFRLEMEGITVKGKGCPKPIKSWVQCGISMKILNSLKKHGYEKPTPIQTQAIPAIMSGRDLIGIAKTGSGKTIAFLLPMFRHIMDQRSLEEGEGPIAVIMTPTRELALQITKECKKFSKTLGLRVVCVYGGTGISEQIAELKRGAEIIVCTPGRMIDMLAANSGRVTNLRRVTYVVLDEADRMFDMGFEPQVMRIVDNVRPDRQTVMFSATFPRAMEALARRILSKPIEVQVGGRSVVCSDVEQQVIVIEEEKKFLKLLELLGHYQESGSVIIFVDKQEHADGLLKDLMRASYPCMSLHGGIDQYDRDSIINDFKNGTCKLLVATSVAARGLDVKHLILVVNYSCPNHYEDYVHRAGRTGRAGNKGYAYTFITEDQARYAGDIIKALELSGTAVPPDLEKLWSDFKDQQKAEGKIIKKSSGFSGKGFKFDETEQALANERKKLQKAALGLQDSDDEDAAVDIDEQIESMFNSKKRVKDMAAPGTSSAPAPTAGNAEKLEIAKRLALRINAQKNLGIESQVDVMQQATNAILRGGPLLAPTVSAKTIAEQLAEKINAKLNYVPLEKQEEERQEGGQSESFKRYEEELEINDFPQTARWKVTSKEALQRISEYSEAAITIRGTYFPPGKEPKEGERKIYLAIESANELAVQKAKAEITRLIKEELIRLQNSYQPTNKGRYKVLX

SEQ ID NO: 8275 - DNA, 3746 bp, Homo sapiens
  ref <308>: DATABASE ACCESSION NUMBER: EMBL / AF106680
  ref <309>: DATABASE ENTRY DATE: 1999-07-08
cccgcgctgggatggccgccacagctgtaggtgctgctagtgtttagcgctggtctttgccgggcgttgagggcagctcagcctccttgtttgtccggttcgcctgtgcgtggtactcaagggcaccagtattcccgcggtcggcagcatgggtcgggagtcacgccactatcgaaaacgatcggcatcccggggtcgctctggaagtcggtctagaagtcgctcaccctcagacaaaagaagtaaacgtggagatgacagacggtctagaagtagagatagagataggaggagagagaggtctcgtagcagggataaaagaagatctcggtcaagggacaggaagcgtctgagacgttccagaagtagagagagagacagaagccgagagcgaagaagatctcgaagtagagacaggagacgctcaaggagtagaagccggggccggcgatcccgatcctccagtcctggcagcaaaagcaagaaggctgagaacaggtctaggtccaaagagaaagcagaaggtggggacagctccaaggagaagaagaaagacaaggacgacaaggaggacgagaaagagaaggatgctgggaattttgaccagaataagctggaagaagaaatgagaaaacgaaaagaaagggttgaaaaatggcgagaagagcagcgtaaaaaggcgatggagaacataggggagctgaagaaggagatcgaggagatgaagcaggggaagaagtggagcctggaagatgacgacgatgatgaagatgaccctgccgaggctgagaaggaagggaatgaaatggaggacgaggagctggacccattagatgcctacatggaggaagtgaaagaagaggtaaaaaagtttaacatgaggagcgtgaaaggcggcgcaggaaatgagaagaagtccgggccaacggtcacaaaagttgtcactgttgtgacaaccaaaaaagcagttgtggattctgataagaagaaaggtgagctgatggagaatgaccaggatgccatggagtattcttcagaggaggaagaagttgatcttcagacagcccttacagggtatcaaacaaaacagcgaaaacttctagaaccagttgatcatggaaaaattgagtatgagccatttaggaaaaacttctatgttgaagttccagaactagcaaaaatgtctcaagaagaggtaaatgtgtttcgattggaaatggagggcattacagttaaaggaaaaggttgccccaaaccaattaaatcctgggtccagtgtggaatttccatgaagatcttaaattccctcaagaagcatggctatgaaaagcccacgcccatccaaacccaagctattcctgctataatgtctggacgagatttgattggcattgccaaaacaggaagtggaaagaccattgcttttctgttgcccatgtttagacacatcatggatcagaggtcattagaggaaggagaggggccattagctgtcatcatgactcccactcgagaactggctttacagatacctaagggtgtaagaagtttcaagactttgggacttagagtggtctgtgtttacggaggaacaggaatcagtgagcagattgctgagctgaaaagaggtgctgaaattattgtttgcacacctggtcgaatgattgacatgttagccgctaacagtggtcgggtcacaaatcttcgaagagtgacatatgttgttttagatgaagcagacagaatgtttgacatgggttttgaaccccaggtcatgcgcatcgtggataatgttcgtcctgatcgacagacggttatgttttcagctactttcccaagagctatggaagcgttggcccgcaggatcttgagcaagcccattgaagttcaggttggaggccggagtgtggtttgctcagatgtggaacaacaagtgattgtgattgaagaagagaagaaattcttgaaattgctggagcttttaggccattatcaggagtcaggatctgtcattatatttgtggataagcaggaacacgctgatggtcttctgaaggatttaatgagagcatcttatccttgcatgtctcttcatggaggcattgatcaatatgacagagatagcatcataaatgactttaagaatgggacctgcaaacttcttgtggctacctctgttgctgcccgaggtctagatgtgaaacatctgattcttgtagtaaattatagctgccccaaccattatgaggattatgtacacagagcagggcggactggaagagcaggaaacaagggttatgcttatacttttatcacagaggatcaagctcgctatgctggtgacataattaaagctcttgaattgtcggggactgcggtgcctcctgacctagagaaactatggagtgacttcaaagatcagcagaaagctgaaggaaaaataattaaaaagagcagcggcttctctggcaaggggttcaagtttgatgagacagagcaggctttagccaatgagaggaaaaagctacaaaaagctgcccttggcctgcaagattcagatgatgaggatgctgcagttgatattgatgagcaaattgaaagcatgtttaattcaaagaagagagtaaaggatatggctgctcctggaacatcaagtgttcctgctccaactgcaggaaatgctgagaaattagaaattgctaagagattggctcttagaatcaatgcccagaagaatttgggcatcgagtctcaggtagatgtgatgcagcaggccaccaatgcaattcttaggggtggcaccattctggctcccactgtttctgcaaaaaccattgcagaacaacttgctgaaaagatcaatgccaagctcaattatgtgccgttagagaaacaagaagaagagagacaggatggtggacagaatgaatcttttaagagatatgaagaagaattagagatcaatgacttcccacagactgctaggtggaaagttacctctaaggaagctctgcagagaatcagtgaatactctgaagccgcaattacaatcagaggaacctacttccctcctggcaaagaacccaaggaaggcgagcggaagatttacttggcaattgaaagtgccaatgaactggctgtgcagaaagcaaaggcagaaatcaccaggctcataaaagaagagctgatccggctgcaaaattcataccaaccaacaaataaaggaagatacaaagtcttatagacatccggaaaaaagatttttacctgtgctggtctatgatgtatgtggcagttgctgtctgcagtttacaatgtattgtaaatgaagattttttaaattctatcttgctgattttttttaaatataagaaactggtacttggtaaagaaatctgtccgtaagtacccccacaatcagtcaaactatatttaaagccagcctgttttcagagtatgatgtcctttaatgtaaactcaaatatcaatattttaaatgtccggataatattctagaggtttaaaaaatggaaatatttgaactttctattgaagacaataaagtacacaagtcgttaaggggctattcactttatcctgtactttcaatgaaattgtgatcatttcctaagaaaaggtaaaattcactatcatattttgtgtccccaccttgatgttacatgactctggaacaatatgaactggatttaagaatgttataatagaagtcttacaaaatggaaaaa

SEQ ID NO: 8276 - protein, 1032 aa, Homo sapiens
  ref <308>: DATABASE ACCESSION NUMBER: SWISS-Prot / BAA34521
  ref <309>: DATABASE ENTRY DATE: 2003-02-01
MGRESRHYRKRSASRGRSGSRSRSRSPSDKRSKRGDDRRSRSRDRDRRRERSRSRDKRRSRSRDRKRLRRSRSRERDRSRERRRSRSRDRRRSRSRSRGRRSRSSSPGNKSKKTENRSRSKEKTDGGESSKEKKKDKDDKEDEKEKDAGNFDQNKLEEEMRKRKERVEKWREEQRKKAMENIGELKKEIEEMKQGKKWSLEDDDDDEDDPAEAEKEGNEMEGEELDPLDAYMEEVKEEVKKFNMRSVKGGGGNEKKSGPTVTKVVTVVTTKKAVVDSDKKKGELMENDQDAMEYSSEEEEVDLQTALTGYQTKQRKLLEPVDHGKIEYEPFRKNFYVEVPELAKMSQEEVNVFRLEMEGITVKGKGCPKPIKSWVQCGISMKILNSLKKHGYEKPTPIQTQAIPAIMSGRDLIGIAKTGSGKTIAFLLPMFRHIMDQRSLEEGEGPIAVIMTPTRELALQITKECKKFSKTLGLRVVCVYGGTGISEQIAELKRGAEIIVCTPGRMIDMLAANSGRVTNLRRVTYVVLDEADRMFDMGFEPQVMRIVDNVRPDRQTVMFSATFPRAMEALARRILSKPIEVQVGGRSVVCSDVEQQVIVIEEEKKFLKLLELLGHYQESGSVIIFVDKQEHADGLLKDLMRASYPCMSLHGGIDQYDRDSIINDFKNGTCKLLVATSVAARGLDVKHLILVVNYSCPNHYEDYVHRAGRTGRAGNKGYAYTFITEDQARYAGDIIKALELSGTAVPPDLEKLWSDFKDQQKAEGKIIKKSSGFSGKGFKFDETEQALANERKKLQKAALGLQDSDDEDAAVDIDEQIESMFNSKKRVKDMAAPGTSSVPAPTAGNAEKLEIAKRLALRINAQKNLGIESQVDVMQQATNAILRGGTILAPTVSAKTIAEQLAEKINAKLNYVPLEKQEEERQDGGQNESFKRYEEELEINDFPQTARWKVTSKEALQRISEYSEAAITIRGTYFPPGKEPKEGERKIYLAIESANELAVQKAKAEITRLIKEELIRLQNSYQPTNKGRYKVL

SEQ ID NO: 8277 - DNA, 3531 bp, Rattus norvegicus; identical to SEQ ID NO: 8273
  ref <308>: DATABASE ACCESSION NUMBER: EMBL / U25746
  ref <309>: DATABASE ENTRY DATE: 2000-03-04

SEQ ID NO: 8278 - protein, 1033 aa, Rattus norvegicus; identical to SEQ ID NO: 8274
  misc_feature (1)..(1033): Xaa=Unknown amino acid

SEQ ID NO: 8279 - DNA, 3746 bp, Homo sapiens; identical to SEQ ID NO: 8275
  ref <308>: DATABASE ACCESSION NUMBER: EMBL / AF106680
  ref <309>: DATABASE ENTRY DATE: 1999-07-08

SEQ ID NO: 8280 - protein, 1032 aa, Homo sapiens; identical to SEQ ID NO: 8276
  ref <308>: DATABASE ACCESSION NUMBER: SWISS-Prot / BAA34521
  ref <309>: DATABASE ENTRY DATE: 2003-02-01

SEQ ID NO: 8281 - DNA, 3531 bp, Rattus norvegicus; identical to SEQ ID NO: 8273
  ref <308>: DATABASE ACCESSION NUMBER: EMBL / U25746
  ref <309>: DATABASE ENTRY DATE: 2000-03-04

SEQ ID NO: 8282 - protein, 1033 aa, Rattus norvegicus; identical to SEQ ID NO: 8274
  misc_feature (1)..(1033): Xaa=Unknown amino acid

SEQ ID NO: 8283 - DNA, 3746 bp, Homo sapiens; identical to SEQ ID NO: 8275
  ref <308>: DATABASE ACCESSION NUMBER: EMBL / AF106680
  ref <309>: DATABASE ENTRY DATE: 1999-07-08

SEQ ID NO: 8284 - protein, 1032 aa, Homo sapiens; identical to SEQ ID NO: 8276
  ref <308>: DATABASE ACCESSION NUMBER: SWISS-Prot / BAA34521
  ref <309>: DATABASE ENTRY DATE: 2003-02-01

SEQ ID NO: 8285 - DNA, 3531 bp, Rattus norvegicus; identical to SEQ ID NO: 8273
  ref <308>: DATABASE ACCESSION NUMBER: EMBL / U25746
  ref <309>: DATABASE ENTRY DATE: 2000-03-04

SEQ ID NO: 8286 - protein, 1033 aa, Rattus norvegicus; identical to SEQ ID NO: 8274
  misc_feature (1)..(1033): Xaa=Unknown amino acid

SEQ ID NO: 8287 - DNA, 3746 bp, Homo sapiens; identical to SEQ ID NO: 8275
  ref <308>: DATABASE ACCESSION NUMBER: EMBL / AF106680
  ref <309>: DATABASE ENTRY DATE: 1999-07-08

SEQ ID NO: 8288 - protein, 1032 aa, Homo sapiens; identical to SEQ ID NO: 8276
  ref <308>: DATABASE ACCESSION NUMBER: SWISS-Prot / BAA34521
  ref <309>: DATABASE ENTRY DATE: 2003-02-01

SEQ ID NO: 8289 - DNA, 3531 bp, Rattus norvegicus; identical to SEQ ID NO: 8273
  ref <308>: DATABASE ACCESSION NUMBER: EMBL / U25746
  ref <309>: DATABASE ENTRY DATE: 2000-03-04

SEQ ID NO: 8290 - protein, 1033 aa, Rattus norvegicus; identical to SEQ ID NO: 8274
  misc_feature (1)..(1033): Xaa=Unknown amino acid

SEQ ID NO: 8291 - DNA, 3746 bp, Homo sapiens; identical to SEQ ID NO: 8275
  ref <308>: DATABASE ACCESSION NUMBER: EMBL / AF106680
  ref <309>: DATABASE ENTRY DATE: 1999-07-08

SEQ ID NO: 8292 - protein, 1032 aa, Homo sapiens; identical to SEQ ID NO: 8276
  ref <308>: DATABASE ACCESSION NUMBER: SWISS-Prot / BAA34521
  ref <309>: DATABASE ENTRY DATE: 2003-02-01

SEQ ID NO: 8293 - DNA, 3531 bp, Rattus norvegicus; identical to SEQ ID NO: 8273
  ref <308>: DATABASE ACCESSION NUMBER: EMBL / U25746
  ref <309>: DATABASE ENTRY DATE: 2000-03-04

SEQ ID NO: 8294 - protein, 1033 aa, Rattus norvegicus; identical to SEQ ID NO: 8274
  misc_feature (1)..(1033): Xaa=Unknown amino acid

SEQ ID NO: 8295 - DNA, 3746 bp, Homo sapiens; identical to SEQ ID NO: 8275
  ref <308>: DATABASE ACCESSION NUMBER: EMBL / AF106680
  ref <309>: DATABASE ENTRY DATE: 1999-07-08

SEQ ID NO: 8296 - protein, 1032 aa, Homo sapiens; identical to SEQ ID NO: 8276
  ref <308>: DATABASE ACCESSION NUMBER: SWISS-Prot / BAA34521
  ref <309>: DATABASE ENTRY DATE: 2003-02-01

SEQ ID NO: 8297 - DNA, 643 bp, Rattus norvegicus
  ref <308>: DATABASE ACCESSION NUMBER: EMBL / U26310
  ref <309>: DATABASE ENTRY DATE: 2000-03-04
aacccccatgctagctgccaccattgttcacttcaaggtctctgcccaaggaatcacactgactgacaatcaaagaaagctcttcttcagacgacattaccccctcaacactgtcaccttctgtgacctggatccacaagaaaggaagtggatgaagacagagggaggtgcccctgctaagctcttcggcttcgtggcccggaagcagggcagcaccacagacaacgcttgccacctcttcgcagagcttgaccccaaccagcctgcgtctgccattgtcaacttcgtctccaaggtcatgctgagtgctggccaaaagagatgaacgaatcctggagcccttgcccaaggctggggcactggggacggggtgtgtggggagggatctgcgaatcctgaccaccttgaatccagaacgagggctttgggtcgaccgtggagaaggagagaagaaagtgcaatgctgggagagggaagtgaattgtggagggagggaggggaacaggaggaagaggaaggaaggaagaagagaggaactcgaaatcccctgtacagatggaagccacacctcccaaagcctctccagctagctggggcccctccccctcacctcccaaagcctctccagctagcatgggggttc

SEQ ID NO: 8298 - protein, 107 aa, Rattus norvegicus
  ref <308>: DATABASE ACCESSION NUMBER: SWISS-Prot / AAA67648
  ref <309>: DATABASE ENTRY DATE: 2003-02-01
TPMLAATIVHFKVSAQGITLTDNQRKLFFRRHYPLNTVTFCDLDPQERKWMKTEGGAPAKLFGFVARKQGSTTDNACHLFAELDPNQPASAIVNFVSKVMLSAGQKR

SEQ ID NO: 8299 - DNA, 7267 bp, Homo sapiens
  ref <308>: DATABASE ACCESSION NUMBER: Refseq / NM_022648
  ref <309>: DATABASE ENTRY DATE: 2001-12-26
ctgctccttgcaccccgctccctgcctggacacaggctcactcgctgccttcttctgggggaaaccagcttcttgccagccacagctgctgcctccgccactggccaccgcccctgtcctgggagtcccttggcccagacacccacctgacttagtggctcctctgcaggaaaggtggctgccccctgcgttcctccatccaaccatgagctggtgcccatcaccactgagaatgcaccaaagaatgtagtggacaagggagaaggagcctcccggggtggaaacacacggaaaagcctcgaggacaacggctccaccagggtcaccccgagtgtccagccccacctccagcccatcagaaacatgagtgtgagccggaccatggaggacagctgtgagctggacctggtgtacgtcacagagaggatcatcgctgtctccttccccagcacagccaatgaggagaacttccggagcaacctccgtgaggtggcgcagatgctcaagtccaaacatggaggcaactacctgctgttcaacctctctgagcggagacctgacatcacgaagctccatgccaaggtactggaatttggctggcccgacctccacaccccagccctggagaagatctgcagcatctgtaaggccatggacacatggctcaatgcagaccctcacaatgtcgttgttctacacaacaagggaaaccgaggcaggataggagttgtcatcgcggcttacatgcactacagcaacatttctgccagtgcggaccaggctctggaccggtttgcaatgaagcggttctatgaggataagattgtgcccattggccagccatcccaaagaaggtacgtgcattacttcagtggcctgctctccggctccatcaaaatgaacaacaagcccttgtttctgcaccacgtgatcatgcacggcatccccaactttgagtctaaaggaggatgtcggccatttctccgcatctaccaggccatgcaacctgtgtacacatctggcatctacaacatcccaggagacagccagactagcgtctgcatcaccatcgagccaggactgctcttgaagggagacatcttgctgaagtgctaccacaagaagttccgaagcccagcccgagacgtcatcttccgtgtgcagttccacacctgtgccatccatgacctgggggttgtctttgggaaggaggaccttgatgatgctttcaaagatgatcgatttccagagtatggcaaagtggagtttgtattttcttatgggccagagaaaattcaaggcatggagcacctggagaacgggccgagcgtgtctgtggactataacacctctgaccccctcatccgctgggactcctacgacaacttcagtgggcatcgagatgacggcatggaggaggtggtgggacacacgcaggggccactagatgggagcctgtatgctaaggtgaagaagaaagactccctgcacggcagcaccggggctgttaatgccacacgtcctacactgtcggccacccccaaccacgtggaacacacgctttctgtgagcagcgactcgggcaactccacagcctccaccaagaccgacaagaccgacgagcctgtccccggggcctccagtgccactgctgccttgagtccccaggagaagcgggagctggaccgcctgctgagtggctttggcttagagcgagagaagcaaggcgccatgtaccacacccagcacctcaggtcccgcccagcagggggctcggctgtgccctcctctggacgccacgttgtcccagcccaggttcatgtcaatggtggggcgttagcatctgagcgggagacagacatcctggacgatgaattgccaaaccaggatggtcacagtgcgggcagcatgggcacactctcttctctggacggggtcaccaacaccagtgaggggggctacccagaggccctgtccccactgaccaacggtctggacaagtcctaccccatggagcctatggtcaatggaggaggctacccctacgagtctgccagccgggcggggcctgcccatgctggccacacggcccccatgcggccctcctactctgcacaggagggtttagctggctaccagagggaggggccccacccagcctggccacagccagtgaccacctcccactatgcccatgaccccagcggtatgttccgctctcaatccttttcggaagctgaaccccagctgcccccagctccggtccgagggggaagcagccgggaggctgtgcaaaggggactgaattcatggcagcagcagcagcagcagcagcagcagcctcgcccacctccacgccagcaggaaagagcccacttggagagtcttgtagccagcaggcccagccctcagccattggcagagacccccatccccagtctccctgagttcccgcgagcagcctcccagcaggagattgaacagtccatcgaaacactcaatatgctgatgctggacctggagccagcctccgctgctgccccactacacaagtcccagagtgtccccggggcctggccaggggcttctccactctcctcccagcccctctctggatcctcccgtcagtcccatccactgacccagtccagatctggctatatccccagtgggcattcgttgggaacccctgagccagccccacgggcctctctggagtctgtccctcctggcaggtcttactcaccttatgactatcagccatgtttggctgggcctaaccaggatttccattcaaagagcccagcctcttcctccttgcctgccttccttccgaccacccacagccctccagggcctcagcaacccccagcctctctccctggcctcactgctcagcctctgctctcaccaaaggaagcgacttcagacccctcccggactccagaggaggagccattgaatttagaagggctggtggcccacagggtagcaggggtacaggctcgggagaagcagcctgcagagcccccagcccctctgcggaggcgggcggccagtgatggacagtatgagaaccagtctccagaagccacatcccctcgtagccctggggttcgctcccctgtccagtgtgtctccccggagctggctcttaccatcgctctcaatcctggagggcggcccaaagagccccatttgcacagctacaaggaggccttcgaggagatggagggaacctccccgagcagcccaccacccagtggggtgcggtcccccccgggtctggccaagacacccctgtctgctctgggcctgaaacctcacaacccagcggacatcctgttgcaccccacaggagttaccagaagacggatccagccagaggaagatgaggggaaggtggtggtcaggctgtcagaagagccccggagctatgtggagtctgtggcacggacagcggtggctggaccccgagctcaggactctgagcccaagagctttagtgctccagccacccaggcctatggccatgagatacccctgaggaacgggaccctgggtggctcctttgtctcccccagccccctctccaccagcagccccatcctcagtgctgacagcacttcagtggggagtttcccgtcgggagagagcagtgaccagggtccccggacgcccacccagcctctgttggagtctggcttccgctcaggcagcctgggacagcccagcccgtctgcccagagaaactaccagagctcttctcctctcccgactgtgggcagtagctacagcagccccgactactcacttcagcatttcagctcctctccggaaagccaggctcgagctcagttcagtgtggctggcgtccacacggtgcctgggagccctcaggcgcgccacagaacagtgggcaccaacactccccctagtcctggcttcggctggcgggccatcaatcccagcatggctgcccccagcagtcccagtttgagccatcaccagatgatgggtccaccaggcactggcttccatggtagcactgtctccagcccccagagcagtgcagcgaccaccccggggagccccagcctgtgtcggcacccagcaggggtctaccaggtttctggcctccacaacaaagtggccaccaccccggggagtcccagcctgggccggcaccctggggctcaccaaggcaacctggcctccggtcttcatagcaatgcaatagccagccctggaagccccagcctgggccgtcacctcggagggtctggatctgtggttcccggcagcccctgcttggaccggcatgtggcctatggcggctattctaccccggaggatcggagacccacactgtcccggcagagcagtgcctctggctaccaggctccttccacgccctccttccctgtctcccctgcctactaccctggcctgagcagccctgccacctccccgtcaccagactccgcagccttccggcaagggagcccaacaccagccttgccagagaagcgaaggatgtcagtgggagaccgggcaggcagcctccccaactatgccaccatcaatgggaaggtgtcttcgcctgtcgccagcggcatgtccagtcccagcgggggcagcaccgtctccttctcccacactctgcccgacttctccaagtactccatgccagacaacagcccggagacgcgggctaaagtgaagtttgtccaggacacttctaagtattggtacaagcctgagatctccagggagcaggccatcgcgctcctcaaggaccaggagccgggggccttcatcatccgcgacagtcactccttccgaggcgcgtacgggctggccatgaaggtgtcttcgccacctccaaccatcatgcagcagaataaaaaaggagacatgacccatgagctggtcaggcattttctgatagagactggccccagaggagtcaagctcaagggctgccccaatgagccaaacttcggatcgctgtctgccctggtctaccagcactccatcatcccattggccctgccttgcaagctggtcattccaaaccgagaccccacagatgaatcgaaagatagctccggccctgccaactcaactgcagacctgctgaaacaaggggcagcctgcaatgtgctcttcatcaactctgtggacatggagtcactcactgggccacaggccatctctaaagccacatctgagacgttggctgcagaccccacgccagctgccaccatcgttcacttcaaagtctctgcccagggaatcactctgactgacaaccagagaaagctctttttcagacgccactaccctctcaacactgtcaccttctgtgacctggatccacaggaaagaaagtggatgaaaacagagggtggtgcccctgctaagctcttcggcttcgtggcccggaagcagggcagcaccacggacaacgcctgccacctctttgctgagcttgaccccaaccagccggcctctgccatcgtcaacttcgtctccaaggtcatgctgaatgccggccaaaagagatgaaccctgccccttgcccagggccagtgccatggggaaggggcttgtggggaggggacccatgaatcctgaccactcttgaacccagaaggaggactttgggccaatttcggaggagagaagaaagtgcaacgtggggagagggaagtgaattgcagaggggagggggaaaagagagagagagagagagagagagagagagagagagagaaagatggaggagaagaacttggattcccctgggtagatggaaactgcaaaaacccaaagcctccaaaactaaccaggtccacctaacaccccctccctcccctaagaagatggatgtcctcaaaagagaaggaacaaacctccttgggaatccacattttttgggggaatggaaaagctctgtctccctaactcaactgctttgcaaggggaaatcaagctgggagaatctttttctggccacctgtagggtaggttgtcaaaccaaacagagccaccgtgggacatcaagtggaagaacttgtttgcttgaaagtatctcagacccaaggcacctcaggtctctttgctgtgcctccactatattgtcgtgtgggtgtgtgtctgcacccacatcctcacacattgatctagatctgcctttatccactcgaattataaacagctcggcttgtccttgtcccatgtgtttgtagacacacatgcatactgtccaaagattagggttggtggtggcagtgcagcaggggagggacaaacaaccaagctatgggtgacagaggctctctcctggtgcctgcacctgcactctagtgaccctgggtgccgccagacccttctcttctacaaagaccccagcaggagtgggagggtctgcaatggcatcgccctgtcctgccttggccagaagcctggagctttggtttgaggaggtagagatatgtgtatccataggaagagatctgtcagaacaggcagctgttgagctcggggtgtcttccccaaggcatgtggctcagcagcaagaaaggcaagttgctcctgctggggccctggactctgccttagctcccacctctcagccttgttattgggtttcatgcccctggaccagccttatctcagacctgcttacctgcatgatgcctttttgggggctggggattgagtcttgctgctctgcccagccctgttctattctgcagggtccctgtgttggaattctccctggggaacctactttctgctcagtgaggctccggccagaaacctggagtccttatcctcccctctgtaagtgttttagggtctggcttttgcaggcaccctctgacctcagcagagctcctgggcctgctgcctgcacaccacatcgcctacctacaatgccaaagcctcactgtcaccctttctgccttggtttccctagctgagccacgctgcccatgcagcagagggcagaaggcttgcacttgggccaaagggcctaaggtccactggacagttgggaaaacacctgaccaccatttaaggactctaagccagaatggaaaattcaccaggactccattcttaagcctatgcgagtcccctagagagaggcattgtactgatatataaatattatataatatatacatgagacatactgacagaatctgtaagctaataaaatgtaagaaaaggttaaaaaaagaaaaaaaaaaaa

SEQ ID NO: 8300 - protein, 1735 aa, Homo sapiens
  ref <308>: DATABASE ACCESSION NUMBER: Refseq / NP_072174
  ref <309>: DATABASE ENTRY DATE: 2001-12-26
MSVSRTMEDSCELDLVYVTERIIAVSFPSTANEENFRSNLREVAQMLKSKHGGNYLLFNLSERRPDITKLHAKVLEFGWPDLHTPALEKICSICKAMDTWLNADPHNVVVLHNKGNRGRIGVVIAAYMHYSNISASADQALDRFAMKRFYEDKIVPIGQPSQRRYVHYFSGLLSGSIKMNNKPLFLHHVIMHGIPNFESKGGCRPFLRIYQAMQPVYTSGIYNIPGDSQTSVCITIEPGLLLKGDILLKCYHKKFRSPARDVIFRVQFHTCAIHDLGVVFGKEDLDDAFKDDRFPEYGKVEFVFSYGPEKIQGMEHLENGPSVSVDYNTSDPLIRWDSYDNFSGHRDDGMEEVVGHTQGPLDGSLYAKVKKKDSLHGSTGAVNATRPTLSATPNHVEHTLSVSSDSGNSTASTKTDKTDEPVPGASSATAALSPQEKRELDRLLSGFGLEREKQGAMYHTQHLRSRPAGGSAVPSSGRHVVPAQVHVNGGALASERETDILDDELPNQDGHSAGSMGTLSSLDGVTNTSEGGYPEALSPLTNGLDKSYPMEPMVNGGGYPYESASRAGPAHAGHTAPMRPSYSAQEGLAGYQREGPHPAWPQPVTTSHYAHDPSGMFRSQSFSEAEPQLPPAPVRGGSSREAVQRGLNSWQQQQQQQQQPRPPPRQQERAHLESLVASRPSPQPLAETPIPSLPEFPRAASQQEIEQSIETLNMLMLDLEPASAAAPLHKSQSVPGAWPGASPLSSQPLSGSSRQSHPLTQSRSGYIPSGHSLGTPEPAPRASLESVPPGRSYSPYDYQPCLAGPNQDFHSKSPASSSLPAFLPTTHSPPGPQQPPASLPGLTAQPLLSPKEATSDPSRTPEEEPLNLEGLVAHRVAGVQAREKQPAEPPAPLRRRAASDGQYENQSPEATSPRSPGVRSPVQCVSPELALTIALNPGGRPKEPHLHSYKEAFEEMEGTSPSSPPPSGVRSPPGLAKTPLSALGLKPHNPADILLHPTGVTRRRIQPEEDEGKVVVRLSEEPRSYVESVARTAVAGPRAQDSEPKSFSAPATQAYGHEIPLRNGTLGGSFVSPSPLSTSSPILSADSTSVGSFPSGESSDQGPRTPTQPLLESGFRSGSLGQPSPSAQRNYQSSSPLPTVGSSYSSPDYSLQHFSSSPESQARAQFSVAGVHTVPGSPQARHRTVGTNTPPSPGFGWRAINPSMAAPSSPSLSHHQMMGPPGTGFHGSTVSSPQSSAATTPGSPSLCRHPAGVYQVSGLHNKVATTPGSPSLGRHPGAHQGNLASGLHSNAIASPGSPSLGRHLGGSGSVVPGSPCLDRHVAYGGYSTPEDRRPTLSRQSSASGYQAPSTPSFPVSPAYYPGLSSPATSPSPDSAAFRQGSPTPALPEKRRMSVGDRAGSLPNYATINGKVSSPVASGMSSPSGGSTVSFSHTLPDFSKYSMPDNSPETRAKVKFVQDTSKYWYKPEISREQAIALLKDQEPGAFIIRDSHSFRGAYGLAMKVSSPPPTIMQQNKKGDMTHELVRHFLIETGPRGVKLKGCPNEPNFGSLSALVYQHSIIPLALPCKLVIPNRDPTDESKDSSGPANSTADLLKQGAACNVLFINSVDMESLTGPQAISKATSETLAADPTPAATIVHFKVSAQGITLTDNQRKLFFRRHYPLNTVTFCDLDPQERKWMKTEGGAPAKLFGFVARKQGSTTDNACHLFAELDPNQPASAIVNFVSKVMLNAGQKR

SEQ ID NO: 8301 - DNA, 1686 bp, Rattus norvegicus
  ref <308>: DATABASE ACCESSION NUMBER: EMBL / U26356
  ref <309>: DATABASE ENTRY DATE: 2001-11-22
gatccaagaatgggtgccgtggctgcctgaaaggccagtgcggaaagacgaaagggtccagaacaggcaacagttttgcaggttagcttcacatcggaaatcacttttgtctgagcatccttttagagtgtctgtcttagggatgcctctgtagtggtctctccatgtggtaaccactctacctgtgggagtctttcttcggagtcctctgaatgtgccaacatcccctgtaggctctattctaaaggccccttctcactctctgtcttagggtcaagaggttatctgtctccaactttgatttatattgagacaggaatctccaccctccccacatactggttactgttcctggtagagaagtctagggctggcaaaggcacaattgaagtcagggctggctcaatcgggccatcttctctgccccataccctccctacctctggctaagggggtcggagtgtgctcagcacaagaacccatcgaccttccccgctactgtccatggttgacaaggtctagaaaggagctctccaaactcaagtccgcaacccacaaagtgtttggcctggacaccagggccacgggggtccaggaacggaagaaacatgcctactcatccccctcatttatgtccatccgtcatttatgtcccacataatcctgcaaggaccgttgcttgctttcctaaagtcacttcctgactaatctctgcctgagcccgcttggaaggagggacccgggagctgataaagaaaagaaggtctccaggctctctgcagagtcagaaagtgtaactcaccggggcaagaagatgggacgcagctaaccgatctggagcccttgaggctgaagtttttaagcaccagggaaaggagaaagccactcccaagtccaaagtgtcaagtttcctcctccgctgattcgagagagggagccgcccctgctgtactagccaccccaccacaggcctgcgactggacacagcttgatgaggagggatcataggtccttatctctcccaattatgagtgctactcgggagtctgtgttagaagggactgctgctgctgctgctgctgctgctgctgctgctgctgctgctgctgctgctgctgctgcttgaaaaaattaaaaacaaaacaaaaccaaatgtacttggggaaatcagcactgggaagccccttctgagaaattcgaggtccaaaggcacttggagagccccaaactaaagccccgtagtgggacccctattgaaattctccactgagttctaagacagaagcccctcttggagacgcacaggctaagcactcctgggcagaatccttccctttccctgctcagccggtaccgcagcacccagcaccacagcacccttcccacgacctccttctctttcacctccttcacgcaagattcggggaggtggtgcaagcaggagtggaaagaaacagcagacatccattccctcctgggagacagagggcgcctctgtccactcctggccctagcccttcgggtgtcgtttgtgaaggggtggagccgtcgggaggagggtcggcagtaaagacaggtctccccacactgctccggggccacatttgcagcgcgcccttctgtcaagaacctgctccgacgtcagccgaggccaaccgtgagtatcctaccctgcttagataatcg

SEQ ID NO: 8302 - DNA, 2817 bp, Rattus norvegicus
  ref <308>: DATABASE ACCESSION NUMBER: EMBL / U27186
  ref <309>: DATABASE ENTRY DATE: 2000-03-04
taagtgaagtgagaacctggattattctgtggccctgtgcgcttgtcctcccggtgtgtctcctcggggacggatctgcgccggggagaagtgggcgacggtggaagcggcggcggaggcggcggccggtcctttctagctgggctctgcctgaggtggcgctgctcgggattcctggacccatctcagctgcttgtggagccccagaagagtctagcttcccatgagagcctggcagaggagctgtaattagagatgtccagtgtcctgaagccttaaatgcttgcttcccagagccctgcctgaaagagaagagaacgatgaccaagttacaggaggcagtgacgttcagggacgtggccgtggtcttcagtaaggaggagatggggctgctggacgctgcccagaggaagctgtaccacgatgtgatgctggagaacctcaggaacctcctggcagtgggaggccagagtccaaataagatgaagactgttgatgcaacaggagtgaggtgccttttactggggcagcttctgtactgggaaataacaggccacgatgccaacaaactggccagagctccggaagctgtagtccacactcaaggaaagggttctcacttcctggagcaaggccactcctcctgccacagggaagcagaggagcctcgccggccttctgaggatgacagttctctcgacagtctgacacgtgaccattccagcactactgaaaatcaggaatttctgtctgggagagcccaggggtcttggtgtaaaacacatcttaggaaaagacagaaccatcagaaacactgtctgcagactctgatgaaaaacaagccagagctgttgactcagcattcccctgtacaaagaacacaggaggacagcaggcatagctctagcgtccccattcaacaaagtgttcatccaggaagaaagcgctactggtgtcatgagtgtggcaagggtttcagtcagagctcagctctccagactcaccggagagtgcacacgggggagaagccctgcagggacaacagctgtaggaaaagcttcagtcgtagctctggtcttagcatccaccgccaagtacacactggagagagaccttaccggtgtaaagtgtgtgggaagggtttcttgcggtggtcacacctccaggcccacgagagaattcacacaggagagaagccatataagtgtggagaatgtggtaaacgcttcagctgtatttcaaaccttcacacccaccagagattccacagcaaggagaaaccatacaagtgtgacaagtgtgggaagtgcttcagcttgaacttcaaccttcacattcatcagcgggtccacacaggagagaaaccgtataaatgtgaagagtgtgggaagtgtttcagcttgagcttcaacctccacagccatcagcgggtccacacaggagagaagccatataaatgtgaagagtgtgggaagtgtttcagttcagcctcaagtttccaaagacaccggcagatccatataaaagagaagacacttcatcgtgatgtgtgtggaaagggcagcagccgggactcgaatcttcagactcaccagagagtgcacatacaggagaagccctatcggtgcaacagctgtgggaagagcttccgctgtagcatggatctcaacatccaccgccgagtacatactggagagaaaccttacaagtgtgaggtgtgtgggaagggcttcaattatttgtcacacctccaggcccacgagaaaattcatgcagatcagaagccatataagtgtgaatactgtggcagacgcttcagctatagttcaaaccttcacacccaccagagagttcacacgggagagaaaccctataaatgtgaggagtgtgggaaaagcttcagtctagcgtctagtctacaggctcatcaaagagtccaaactggcaagaagccattcaaatgcaatgcatgccaaaagcgattcagtcaggcctggaacctccaggcccaccagagagtgcacactggggagaagccctacaagtgtgacacgtgtgggaaagccttcggccagaggtccagtcttcaaatccatcagagaattcacactggggagaagccattcaaatgtgaggagtgtgggaaggagttcagcttgaattcagggcttactgctcaccggagggtccacacgggagagaagccctatgaatgcacagagtgtgggaaaggctttagtcttgcctcaagtctacgaactcatcagcgaattcacaccggcgagaaacccttccaatgcaatgagtgccagaagaggttcagtcaggtctcacacctccagtcccaccagagggttcacacaggggagaagccttacaaatgtgacacctgtgggaaggccttcagtcaaaagtctggtctccaagtccatcggagaattcacactggggagaagccgttcaagtgtgaggagtgtgggaaggaattcatctggagctcagggcttagtgctcaccggagggtccacacaggagaaaaaaccctgcacggttagcagtgtgggaagggcttcagtcagacctcacacttccgattaacagtctgatccaatgtaaacacagcaggatcattatatcaaggctgttacaaaataattgaaaacaaagtgtaaggtagctagtatacaatgagaaaaagcagtatgacacatggtgaaattatacaattagtcagatagcatcctggtaggaaatgacacatatagatttatatttaacaattttgcatcccctgtatcccctggatatagaattaaa

SEQ ID NO: 8303 - protein, 744 aa, Rattus norvegicus
  ref <308>: DATABASE ACCESSION NUMBER: SWISS-Prot / AAB60512
  ref <309>: DATABASE ENTRY DATE: 2003-02-01
MTKLQEAVTFRDVAVVFSKEEMGLLDAAQRKLYHDVMLENLRNLLAVGGQSPNKMKTVDATGVRCLLLGQLLYWEITGHDANKLARAPEAVVHTQGKGSHFLEQGHSSCHREAEEPRRPSEDDSSLDSLTRDHSSTTENQEFLSGRAQGSWCKTHLRKRQNHQKHCLQTLMKNKPELLTQHSPVQRTQEDSRHSSSVPIQQSVHPGRKRYWCHECGKGFSQSSALQTHRRVHTGEKPCRDNSCRKSFSRSSGLSIHRQVHTGERPYRCKVCGKGFLRWSHLQAHERIHTGEKPYKCGECGKRFSCISNLHTHQRFHSKEKPYKCDKCGKCFSLNFNLHIHQRVHTGEKPYKCEECGKCFSLSFNLHSHQRVHTGEKPYKCEECGKCFSSASSFQRHRQIHIKEKTLHRDVCGKGSSRDSNLQTHQRVHIQEKPYRCNSCGKSFRCSMDLNIHRRVHTGEKPYKCEVCGKGFNYLSHLQAHEKIHADQKPYKCEYCGRRFSYSSNLHTHQRVHTGEKPYKCEECGKSFSLASSLQAHQRVQTGKKPFKCNACQKRFSQAWNLQAHQRVHTGEKPYKCDTCGKAFGQRSSLQIHQRIHTGEKPFKCEECGKEFSLNSGLTAHRRVHTGEKPYECTECGKGFSLASSLRTHQRIHTGEKPFQCNECQKRFSQVSHLQSHQRVHTGEKPYKCDTCGKAFSQKSGLQVHRRIHTGEKPFKCEECGKEFIWSSGLSAHRRVHTGEKTLHG

SEQ ID NO: 8304 - DNA, 1888 bp, Homo sapiens
  ref <308>: DATABASE ACCESSION NUMBER: Refseq / NM_003445
  ref <309>: DATABASE ENTRY DATE: 2000-11-01
ctgctacttaacaaggtggtttgagccaagtatgtgtcttgcgggtccttgcgaaagtgaaccagttattaggggcgcctaacgacctggggggtcaactaaggggactgtggcacgtttcaggcaggattcctccttcattcaaactgcatcacccaggagtctgcaaattccccaaagtaggaggaaaaatgaccacattcaaggaggcagtgaccttcaaggatgtggctgtggtcttcactgaggaggagctggggctgctggaccctgcccagaggaagctgtaccgagatgtgatgctggagaacttcaggaacctgctctcagtggggcatcaaccgttccaccaagatacttgccacttcctaagggaagaaaagttttggatgatggggacagcaacccaaagagaagggaattcaggaggcaagatccaaactgagttggagtctgttccagaagcaggagcacatgaagagtggtcctgccagcaaatctgggaacaaattgcaaaagacttaaccaggtctcaggactctatcataaataactctcagttctttgaaaatggtgatgtcccctcccaggttgaagcaggactacccacaattcatacaggacagaaaccttcccagggtgggaagtgtaaacagtccttcagtgatgttcccatctttgatcttcctcagcagtcatactcagaagagaagtcttatacatgtgatgagtgtggaaaaagcatctgttacatctcagctcttcatgttcatcagagagtccacgtgggagagaaactctttatgtgtgatgtgtgtggcaaggaatttagtcaaagctcacatctgcaaactcatcagagagtccacactggagagaaaccattcaaatgtgagcaatgtgggaaaggtttcagtcgtagatcagcacttaatgttcatcataaattacacacaggagagaaaccttacatttgtgaggcatgtgggaaggctttcattcatgattcccagcttaaggaacataagagaatccatactggggagaaaccattcaaatgtgatatatgtggtaagaccttctattttaggtcaagacttaagagccattccatggttcacacaggagaaaaaccatttaggtgtgatacatgtgataagagctttcatcagagatcagcacttaataggcattgcatggtccacacaggagagaaaccgtacagatgtgagcagtgtggaaaaggctttattggtaggctagatttttataagcatcaggtggtccacacaggagagaaaccatataattgtaaagaatgtgggaagagcttcagatggtcctcatgccttttgaaccatcagcgagtccacagtggagaaaaaagcttcaaatgtgaagaatgtgggaagggattttatacaaattcacaactgtcttcccatcagagatcccacagtggtgaaaagccatataaatgtgaggagtgtgggaagggctatgttactaagtttaatcttgacttgcaccagagggtccacacgggagagagaccttataattgtaaggaatgtgggaagaactttagccgggcctcaagtattttgaatcataagagactccactgccagaaaaaaccattcaaatgtgaggactgtggaaagaggcttgtacacaggacataccgtaaagaccagccgagagactatagtggggaaaacccatccaaatgtgaggattgtgggagacgctacaagaggcgcttgaatctggatatacttttatcattatttctaaatgacacataactgttcatatttatggggtacaacgtgctattttaatgtgtgcatacaatttatagtgatccaatcagtgtaattggtgt

SEQ ID NO: 8305 - protein, 538 aa, Homo sapiens
  ref <308>: DATABASE ACCESSION NUMBER: SWISS-Prot / Q12901
  ref <309>: DATABASE ENTRY DATE: 2001-10-16
MTTFKEAVTFKDVAVVFTEEELGLLDPAQRKLYRDVMLENFRNLLSVGHQPFHQDTCHFLREEKFWMMGTATQREGNSGGKIQTELESVPEAGAHEEWSCQQIWEQIAKDLTRSQDSIINNSQFFENGDVPSQVEAGLPTIHTGQKPSQGGKCKQSFSDVPIFDLPQQSYSEEKSYTCDECGKSICYISALHVHQRVHVGEKLFMCDVCGKEFSQSSHLQTHQRVHTGEKPFKCEQCGKGFSRRSALNVHHKLHTGEKPYICEACGKAFIHDSQLKEHKRIHTGEKPFKCDICGKTFYFRSRLKSHSMVHTGEKPFRCDTCDKSFHQRSALNRHCMVHTGEKPYRCEQCGKGFIGRLDFYKHQVVHTGEKPYNCKECGKSFRWSSCLLNHQRVHSGEKSFKCEECGKGFYTNSQLSSHQRSHSGEKPYKCEECGKGYVTKFNLDLHQRVHTGERPYNCKECGKNFSRASSILNHKRLHCQKKPFKCEDCGKRLVHRTYRKDQPRDYSGENPSKCEDCGRRYKRRLNLDILLSLFLNDT

SEQ ID NO: 8306 - DNA, 704 bp, Rattus norvegicus
  ref <308>: DATABASE ACCESSION NUMBER: EMBL / U27201
  ref <309>: DATABASE ENTRY DATE: 2000-03-04
accatgactccctggcttgggcttgtcgtgctcctgagctgctggagccttgggcactggggaacggaagcgtgcacatgctcgcccagccatccccaggatgccttctgcaactccgacatcgtgatccgggccaaagtggtgggaaagaagctggtgaaggaagggccctttggcactctggtctacactattaagcaaatgaagatgtaccgaggattcagtaagatgccccatgtgcagtacattcacacggaagcctctgaaagtctctgtggccttaagctagaagtcaacaaataccagtacctgctgacagggcgcgtgtatgaaggcaagatgtacacagggctgtgcaactttgtggagaggtgggaccacctcacactgtcccagcgcaagggcctcaattaccgctaccacctgggttgcaattgcaagatcaagtcctgctactacttgccttgctttgtgacctccaagaaagaatgtctctggaccgacatgctctccaatttcgggtaccctggctatcagtccaaacactacgcctgcatccggcagaagggtggctactgcagctggtaccgaggatgggcccccccagacaagagcatcagcaatgccacagacccctgaacccagacctgtcccacctcacctccttcccatcccgctgagcgtcccggacactaatcttgcca

SEQ ID NO: 8307 - protein, 211 aa, Rattus norvegicus
  ref <308>: DATABASE ACCESSION NUMBER: SWISS-Prot / P48032
  ref <309>: DATABASE ENTRY DATE: 2001-10-16
MTPWLGLVVLLSCWSLGHWGTEACTCSPSHPQDAFCNSDIVIRAKVVGKKLVKEGPFGTLVYTIKQMKMYRGFSKMPHVQYIHTEASESLCGLKLEVNKYQYLLTGRVYEGKMYTGLCNFVERWDHLTLSQRKGLNYRYHLGCNCKIKSCYYLPCFVTSKKECLWTDMLSNFGYPGYQSKHYACIRQKGGYCSWYRGWAPPDKSISNATDP

SEQ ID NO: 8308 - DNA, 5487 bp, Homo sapiens
  ref <308>: DATABASE ACCESSION NUMBER: Refseq / NM_000362
  ref <309>: DATABASE ENTRY DATE: 2002-11-05
tctgtcgacttgccccagagctgatccttgtctttgtccacttctcagcgaggatggcacttcagggagcccttcccttactatcgcagagagagcaggccctccccagtcatgtccaacccagaactctgttttgttttcttcatagccctagcatcacagaaaatcaccctgtgcattcatggatgtccacgggggcaagggctttgtgttgcttaacccagcatcctgaaccgtgtttgttgaatgaatacagaaccccgtttgctctgggagagcacagaaaacagtcttctatcatatatcatagccagctgcaaacagcagatggcttcccatatcccagagagtaagaaccagagagagagagaaagagagagagtttgggtctttctcctctgtgcctgctctctccagagaaactggaggggtagcagttagcattcccccgctggttccaccaagcacagtcaaggtctctaggacatggccacccctcacctgtggaagcggtcctgctggggtgggtgggtgttagttggttctggtttgggtcagagacacccagtggcccaggtgggcgtggggccagggcgcagacgagaaggggcacgagggctccgctccgaggacccagcggcaagcaccggtcccgggcgcgccccagcccacccactcgcgtgcccacggcggcattattccctataaggatctgaacgatccgggggcggccccgccccgttaccccttgcccccggccccgccccctttttggagggccgatgaggtaatgcggctctgccattggtctgagggggcgggccccaacagcccgaggcggggtccccgggggcccagcgctatatcactcggccgcccaggcagcggcgcagagcgggcagcaggcaggcggcgggcgctcagacggcttctcctcctcctcttgctcctccagctcctgctccttcgccgggaggccgcccgccgagtcctgcgccagcgccgaggcagcctcgctgcgccccatcccgtcccgccgggcactcggagggcagcgcgccggaggccaaggttgccccgcacggcccggcgggcgagcgagctcgggctgcagcagccccgccggcggcgcgcacggcaactttggagaggcgagcagcagccccggcagcggcggcagcagcggcaatgaccccttggctcgggctcatcgtgctcctgggcagctggagcctgggggactggggcgccgaggcgtgcacatgctcgcccagccacccccaggacgccttctgcaactccgacatcgtgatccgggccaaggtggtggggaagaagctggtaaaggaggggcccttcggcacgctggtctacaccatcaagcagatgaagatgtaccgaggcttcaccaagatgccccatgtgcagtacatccacacggaagcttccgagagtctctgtggccttaagctggaggtcaacaagtaccagtacctgctgacaggtcgcgtctatgatggcaagatgtacacggggctgtgcaacttcgtggagaggtgggaccagctcaccctctcccagcgcaaggggctgaactatcggtatcacctgggttgtaactgcaagatcaagtcctgctactacctgccttgctttgtgacttccaagaacgagtgtctctggaccgacatgctctccaatttcggttaccctggctaccagtccaaacactacgcctgcatccggcagaagggcggctactgcagctggtaccgaggatgggcccccccggataaaagcatcatcaatgccacagacccctgagcgccagaccctgccccacctcacttccctcccttcccgctgagcttcccttggacactaactcttcccagatgatgacaatgaaattagtgcctgttttcttgcaaatttagcacttggaacatttaaagaaaggtctatgctgtcatatggggtttattgggaactatcctcctggccccaccctgccccttctttttggttttgacatcattcatttccacctgggaatttctggtgccatgccagaaagaatgaggaacctgtattcctcttcttcgtgataatataatctctatttttttaggaaaacaaaaatgaaaaactactccatttgaggattgtaattcccacccctcttgcttcttccccacctcaccatctcccagaccctcttccctttgcccttctcctccaatacataaaggacacagacaaggaacttgctgaaaggccaaccatttcaggatcagtcaaaggcagcaagcagatagactcaaggtgtgtgaaagatgttatacaccaggagctgccactgcatgtcccaaccagactgtgtctgtctgtgtctgcatgtaagagtgagggagggaaggaaggaactacaagagagtcggagatgatgcagcacacacacaattccccagcccagtgatgcttgtgttgaccagatgttcctgagtctggagcaagcacccaggccagaataacagagctttcttagttggtgaagacttaaacatctgcctgaggtcaggaggcaatttgcctgccttgtacaaaagctcaggtgaaagactgagatgaatgtctttcctctccctgcctcccaccagacttcctcctggaaaacgctttggtagatttggccaggagctttcttttatgtaaattggataaatacacacaccatacactatccacagatatagccaagtagatttgggtagaggatactatttccagaatagtgtttagctcacctagggggatatgtttgtatacacatttgcatatacccacatggggacataagctaatttttttacaggacacagaattctgttcaatgctgttaaatatgccaatagtttaatctcttctattttgttgtcgttgcttgtttgaagaaaatcatgacattccaagttgacatttttttttcattttaattaaaatttgaaattctgaacaccgtcagcaccctctcttccctatcatgggtcatctgacccctgtccgtctccttgtccctgcttcatgtttgggggcctttctttaactgccttcctggcttagctcagatggcagatgagagtgtagtcaagggcctgggcacaggagggagagctgcagagtgtcctgcctgccttggctggagggacacctctcctgggtgtggagacagcttggttccctttccctagctccctggtgggtgaatgccacctcctgagatcctcacctcttggaattaaaattgttggtcactggggaaagcctgagtttgcaaccagttgtagggtttctgttgtgtttttttttttttttttgaaataaaactataatataaattctcctattaaataaaattattttaagttttagtgtcaaaagtgagatgctgagagtaggtgataatgtatattttacagagtgggggttggcaggatggtgacattgaacatgattgctctctgtctcttttttcagcttatgggtatttatcttctattagtatttgtatcttcagttcattccactttaggaaacagagctgccaattgaaacagaagaagaaaaaaaaaaaaagcagcagacaacacactgtagagtcttgcacacacacaagtgcccaggcaaggtgcttggcagaaccgcagagtgggaagagagtaccggcatcgggtttccttgggatcaatttcattaccgtgtacctttcccattgtggtcatgccatttggcagggggagaatgggaggcttggccttctttgtgaggcagtgtgagcagaagctgatgccagcatgtcactggttttgaagggatgagcccagacttgatgttttgggattgtccttattttaacctcaaggtctcgcatggtggggcccctgaccaacctacacaagttccctcccacaagtggacatcagtgtcttctctgtgaggcatctggccattcgcactccctggtgtggtcagcctctctcacacaaggaggaacttgggtgaaggctgagtgtgaggcacctgaagtttccctgcggagtcgataaattagcagaaccacatccccatctgttaggccttggtgaggaggccctgggcaaagaagggtctttcgcaaagcgatgtcagagggcggttttgagctttctataagctatagctttgtttatttcacccgttcacttactgtataatttaaaatcatttatgtagctgagacacttctgtatttcaatcatatcatgaacattttattttgctaaatcttgtgtcatgtgtaggctgtaatatgtgtacattgtgtttaagagaaaaatgaaacccacatgccgccattttcctgaatcaaattctgcagtggaatggagaggaaaatacttctaggcaagcagctagactggtgaattgggggaaatagaaggaactagtaactgagactcctccagcctcctccctattggaatcccaatggctcctggagtaggaaaaaagtttaaactacattcatgttcttgttctgtgtcactcggccctgggtagtctaccatttacttcaccccaagtcctgctgcccatccagttgggaagccatgattttcctaagaatccagggccatgggagatacaattccaagttctcgcttcctcctttgggcatctcttctgcctcccaatcaaggaagctccatgctcaggctctcagctctcgggccagtgctctgctctgtccagggtaggtaatactgggagactcctgtcttttaccctcccctcgttccagacctgcctcatggtggcaacatggttcttgaacaattaaagaaacaaatgactttttggaatagccctgtctagggcaaactgtggcccccaggagacactacccttccatgccccagacctctgtcttgcatgtgacaattgacaatctggactaccccaagatggcacccaagtgtttggcttctggctacctaaggttaacatgtcactagagtatttttatgagagacaaacattataaaaatctgatggcaaaagcaaaacaaaatggaaagtaggggaggtggatgtgacaacaacttccaaattggctctttggaggcgagaggaaggggagaacttggagaatagtttttgctttgggggtagaggcttcttagattctcccagcatccgcctttccctttagccagtctgctgtcctgaaacccagaagtgatggagagaaaccaacaagagatctcgaaccctgtctagaaggaatgtatttgttgctaaatttcgtagcactgtttacagttttcctccatgttatttatgaattttatattccgtgaatgtatattgtcttgtaatgttgcataatgttcactttttatagtgtgtcctttattctaaacagtaaagtggttttatttctatcac

SEQ ID NO: 8309 - protein, 211 aa, Homo sapiens
  ref <308>: DATABASE ACCESSION NUMBER: SWISS-Prot / P35625
  ref <309>: DATABASE ENTRY DATE: 2001-10-16
MTPWLGLIVLLGSWSLGDWGAEACTCSPSHPQDAFCNSDIVIRAKVVGKKLVKEGPFGTLVYTIKQMKMYRGFTKMPHVQYIHTEASESLCGLKLEVNKYQYLLTGRVYDGKMYTGLCNFVERWDQLTLSQRKGLNYRYHLGCNCKIKSCYYLPCFVTSKNECLWTDMLSNFGYPGYQSKHYACIRQKGGYCSWYRGWAPPDKSIINATDP

SEQ ID NO: 8310 - DNA, 5350 bp, Rattus norvegicus
  ref <308>: DATABASE ACCESSION NUMBER: EMBL / U27319
  ref <309>: DATABASE ENTRY DATE: 2000-03-04
gaattccaagacagccaggagtacacagagggaccgtgtcttgaaaaaacaaccaaccaaccaatcaacataacccatgcatgaagcctgaagagatgactcagtggtaaagagtttttgactgctctagcagaggacctaagttcaattcccagcacccactggtgtctcacaaacatctttaactccagttccaggggacctgatgttctcttctgacctcctcaagcatcaggaacatgtatggtacgtacacacacacacacacacacacacacacacacacacacacacacactatacatacatatatacatgtaagcaaaatcttcatataaaaaaacctaaaaaaattaaaaataaatccaggcatagtagcgatcaccttgggccttgcgcttcccaggcaagcgctctaccactgagctaaatccccaaccccatagtagcgataacctttaagcccagcacttgggaggcagaggtaggcagatctctgtgagttcaaggccagcctggtctatatagttccaggactgccaaagctatacagtaagaccctgtttcaaaaactaataaaaaaccaacaagaaacattcatgaggtagcctagggcttaaccaagagaagatacaacacggccatagtgctgcctccagggaatggcctgatggaagtgataaggcctgctccggcagaccgtctcccctatcagggaggcagtcttgactcagttgcttatctggcccagtctgcctgaggtggtggggtgggatggaaagagtgctggctaagcctcagagtcccggctcgaaattctacggcaacctgccgctgggcaagatggcccaccagctgcgcaccctacaccttgtttgtagagaagagccctggtctccattcgcatggactctgagcactgtctgagtgtgccctgtggaggtgctggggcctgggaggccagggtgagtggctgaggtcaggggaggccagctcgggaaggaggtcagatgtgccttcctgtggtgaggtcggaacctggacaggtgtaggagaatcgggacggaagggtggtatcgaggggagccacacagagtggatgtgtggggttaaggacagtgggacacactagtgctgtcggtcaggggctgggtaagagattccgcgctcagagtccggtaacagggccagtgtgtttaaattggcttccaccaggatgcagggcccagaagggactttgagcaggggcataacgtaattaaggttgcttttcagtgagactgtcgcggcctgcagcacagaatggcttggatggcgggtagcaaccaaccagaaagccagctcaaatcgttcttgtcatatttctagctagacaagagaaaaactggggtggaggtggtgttgggagtagcagtgagtctgacttagagagatatgcattaggaaacaacactaagcctcggtgcctgggtgtatgtgtgtgtgtctgtgtcctgagtcaccttggtacaggggttgagggaagggacagcagaggtacctacctgcctacaagctggtccagcttttccccagctctggtttgttggctaagggttgtatccccatataatcccacagattatagtgatggctgaaggttgggggaggggtccatgagcccgacactggggttggagaatggggtggcccattcaacctacagacctctgagaaaacaaaacaaccctccatccccaaagacttgccagccttgagagctggccgaagtacatttgcagattcaaatgcagctcagaagaaccatttttgtcttgacgctgtcaggcaatattggtagcgtgtgtgtgtgtgtgtgtgttagtttgagatttacgtgggactcaatgctaatctttttaagggaagggcaactataacaggccctccctgggctggaaatggtgacattcaggtgacaggtcccccaaactttaacctgtaggttcccgagtccgttctatgagagtacctcccatctaatctattagataccagtgtttatgctctttcagaaaaattacagggtgtaggcatcagctccatcttatgggtaaagaaagaaagcctgagaggtgactcaggacacatctgcaccagccattaggcagggtggtggctggaagggccctgggatacttgaagggcaccctggggtatctttgccccgatggatgctgggcctagccaggggctcccagtccccaggcgtggggtagaagttggactctatagtcacctaagggcctatgttgcagtcctggtctcaggcacacggcctgcaggagaggcttaaaagaagagaaactgcacacaatggctaggtcaccggcgttaaagctaagcaaacccagcgctactcctgggcagcaactgcaaagcgtttcttcaggtccctcacctgtagaatcagagcggtagtcgcctctgcatgtctgagttcttacatgtcgtaatgtacaaacacgatttcccctcaatcaccgcccggaacagtacctccaacttcccagacccggatgccccaagagccagagtagggtgggaaaatcgggacaggcccccaaattccactcgggggccttgagctcttacatggtgtcacgggggcaggtagtttgggtttagcaatgtgaactctgacaatttgggatgtagagctggtgggccatcgtgggacgccaagcatcatccttagagtttggatcctttagggcaggcaggcacagggacccagtgcgagatcagtgaagccgcccagtttcggcttccgctctttttccacgcccacttgcgtgcttctccaacagtgtggatgggaggggtgggggacgagccctaatctccgaggaaggggtgtggccccgttcgtgttctccagtttgtggcgtcctggatctgtcctctggtcccctccagatcgtgtcccacacccacccgttcaggcatggcactgtgccgccacgcgtgaccgtgcgctccttacgtgggggacgtgcagggtgctgcctcctttccggtgcgggagggagcggccgtctttctcctgctctggctgggaagccccagccattgcgctgcagaggagacttgcagccaatggggactgaggaagtgggccggctggcggttgtcaccctcccggggaccggagctccgaggtctggagagcgcaggcagacgcccgccccgcccggggactgagggggaggagcgaagggaggaggaggtggagtctccgatctgccgctggaggaccactgctcaccagggctactgaggagccactggccccacacctgcttttccgcatcccccaccgtcagcatgatcgccgcgcaactactggcctattacttcaccgagctgaaggatgaccaagtcaaaaaggtgagccccgccggcgccgccctggccacagccttgcattcccgcatccgctcgccaccgcctgcatcctcccccggcctctcccagacagcatctggttggactacagggtgcaggcgacaggcctcgtgctgggattcaccccggcattgtcggcatgcgggcgtgcttgtgctttgaggagctgggctgccgtctgaagaccccccctttcgctccccccacggctggattgcatactgcagtgtccttgaaaaggaccatggatgtcagatgggtacccgcacgctgtgccgggctgcgacctggctgggtggggataagcgggcctgtctataaggcctgtttggaaaggtccacgcgccgtgggcggggaaggtgtgatcaccgagatatgttggggaggtgagtgagcagctggtgggggtgctggctgaaagccaggcatcccatatttggggtttccatttggagaatgcgatgcccttccgaaactgtcactgggctcccccagctgttgcaactgctccttactctgaggacggggtgacccgcctggctttccggtgcggggagaacagaggccaccggaaactttgctcataggcctcaggtctggaaccgcatgtctgaatggaattttttattcttctaaagctgtaatttccaggcagtcccagccccggggctcaaaaaagacactttagtcacttgaacagctcagagcggttgacatgcgttccttgtgacttgtgtgttcttacacatggaggctgggtcctaggggtgatgtttatctagtgtaaagtgccgtctgctggtgggtcttaaagatgtacctcacttttctgacactgttagacaggatgtttttcctgaaatagcctaagatggtaggggacacatccaggacatttttattagtgcaacaggtatgccttgcctactctagggtaggtagtagtatcatcaacctgactgacactgggacaaggagtactatctacaggtgagagagaggcagaggtgactagggtctgtcctttcccgcctgagacctcatcctggtaggaagcagtcttactggggaccgtgacctcctgaaggtcacacagctggttagaggtaggagccaaggcgggctatgacctcctcccactcgagagcttgaccaggactcccccacccctggtatcagctgaaggggaggtgctgagagacaagctcgtggagatgctgtgcccatcctggatctcagcctggatggggaccaggagtagggtgctgaggggatgggatatgacctcagggagctatgcatcagcccgtgttattccgtggtggtggacattgctgatgcttagccctcggaagggggagacagaagtcccagcagggcagagggcacttagaatacgcctcctgaatcaaagagttcacagctctcccactctagataccctctgtggctcaggcatgcaatcctgggcggaggcccagtgaatgacctttgtaaactaagcctccggcctcacccacaaccacctgtgtggccgccagctgcccggctgctcctttacatggtgctgggtggccttgactgagctggactaaggtttggcagactacagtgctccactacaagtagcctgatccatctccatcccattcgatctcccagacccagtgagtgcttgagctctgattcaaaccgtgcctaactgaagccctcaccctgatgtcccctcccccacctctatcctagagccttgctggaggaagggtcttgaggttgaaactttcaccttgtttgtgtaggagatccttagaaacaagagctcccagcaagccggtggtggcccaagcctttaatcccagcttttgggaggcagaggcgaggcaggtggatctctgtgaattc

SEQ ID NO: 8311 - protein, 918 aa, Rattus norvegicus
  ref <308>: DATABASE ACCESSION NUMBER: SWISS-Prot / AAC52945
  ref <309>: DATABASE ENTRY DATE: 2002-06-15
MIAAQLLAYYFTELKDDQVKKIDKYLYAMRLSDEILIDILTRFKKEMKNGLSRDYNPTASVKMLPTFVRSIPDGSEKGDFIALDLGGSSFRILRVQVNHEKNQNVSMESEIYDTPENIVHGSGTQLFDHVADCLGDFMEKKKIKDKKLPVGFTFSFPCRQSKIDEAVLITWTKRFKASGVEGADVVKLLNKAIKKRGDYDANIVAVVNDTVGTMMTCGYDDQQCEVGLIIGTGTNACYMEELRHIDLVEGDEGRMCINTEWGAFGDDGSLEDIRTEFDRELDRGSLNPGKQLFEKMVSGMYMGELVRLILVKMAKEGLLFEGRITPELLTRGKFNTSDVSAIEKDKEGIQNAKEILTRLGVEPSDVDCVSVQHICTIVSFRSANLVAATLGAILNRLRDNKGTPRLRTTVGVDGSLYKMHPQYSRRFHKTLRRLVPDSDVRFLLSESGTGKGAAMVTAVAYRLAEQHRQIEETLAHFRLSKQTLMEVKKRLRTEMEMGLRKETNSKATVKMLPSFVRSIPDGTEHGDFLALDLGGTNFRVLLVKIRSGKKRTVEMHNKIYSIPLEIMQGTGDELFDHIVSCISDFLDYMGIKGPRMPLGFTFSFPCHQTNLDCGILISWTKGFKATDCEGHDVASLLRDAVKRREEFDLDVVAVVNDTVGTMMTCAYEEPTCEIGLIVGTGTNACYMEEMKNVEMVEGNQGQMCINMEWGAFGDNGCLDDIRTDFDKVVDEYSLNSGKQRFEKMISGMYLGEIVRNILIDFTKKGFLFRGQISEPLKTRGIFETKFLSQIESDRLALLQVRAILQQLGLNSTCDDSILVKTVCGVVSKRAAQLCGAGMAAVVEKIRENRGLDHLNVTVGVDGTLYKLHPHFSRIMHQTVKELSPKCTVSFLLSEDGSGKGAALITAVGVRLRGDPSIA

SEQ ID NO: 8312 - DNA, 3580 bp, Homo sapiens
  ref <308>: DATABASE ACCESSION NUMBER: Refseq / NM_000188
  ref <309>: DATABASE ENTRY DATE: 2001-10-10
ccgccggaggaccacggctcgccagggctgcggaggaccgaccgtccccacgcctgccgccccgcgaccccgaccgccagcatgatcgccgcgcagctcctggcctattacttcacggagctgaaggatgaccaggtcaaaaagattgacaagtatctgtatgccatgcggctctccgatgaaactctcatagatatcatgactcgcttcaggaaggagatgaagaatggcctctcccgggattttaatccaacagccacagtcaagatgttgccaacattcgtaaggtccattcctgatggctctgaaaagggagatttcattgccctggatcttggtgggtcttcctttcgaattctgcgggtgcaagtgaatcatgagaaaaaccagaatgttcacatggagtccgaggtttatgacaccccagagaacatcgtgcacggcagtggaagccagctttttgatcatgttgctgagtgcctgggagatttcatggagaaaaggaagatcaaggacaagaagttacctgtgggattcacgttttcttttccttgccaacaatccaaaatagatgaggccatcctgatcacctggacaaagcgatttaaagcgagcggagtggaaggagcagatgtggtcaaactgcttaacaaagccatcaaaaagcgaggggactatgatgccaacatcgtagctgtggtgaatgacacagtgggcaccatgatgacctgtggctatgacgaccagcactgtgaagtcggcctgatcatcggcactggcaccaatgcttgctacatggaggaactgaggcacattgatctggtggaaggagacgaggggaggatgtgtatcaatacagaatggggagcctttggagacgatggatcattagaagacatccggacagagtttgacagggagatagaccggggatccctcaaccctggaaaacagctgtttgagaagatggtcagtggcatgtacttgggagagctggttcgactgatcctagtcaagatggccaaggagggcctcttatttgaagggcggatcaccccggagctgctcacccgagggaagtttaacaccagtgatgtgtcagccatcgaaaagaataaggaaggcctccacaatgccaaagaaatcctgacccgcctgggagtggagccgtccgatgatgactgtgtctcagtccagcacgtttgcaccattgtctcatttcgctcagccaacttggtggctgccacactgggcgccatcttgaaccgcctgcgtgataacaagggcacacccaggctgcggaccacggttggtgtcgacggatctctttacaagacgcacccacagtattcccggcgtttccacaagactctaaggcgcttggtgccagactccgatgtgcgcttcctcctctcggagagtggcagcggcaagggggctgccatggtgacggcggtggcctaccgcttggccgagcagcaccggcagatagaggagaccctggctcatttccacctcaccaaagacatgctgctggaggtgaagaagaggatgcgggccgagatggagctggggctgaggaagcagacgcacaacaatgccgtggttaagatgctgccctccttcgtccggagaactcccgacgggaccgagaatggtgacttcttggccctggatcttggaggaaccaatttccgtgtgctgctggtgaaaatccgtagtgggaaaaagagaacggtggaaatgcacaacaagatctacgccattcctattgaaatcatgcagggcactggggaagagctgtttgatcacattgtctcctgcatctctgacttcttggactacatggggatcaaaggccccaggatgcctctgggcttcacgttctcatttccctgccagcagacgagtctggacgcgggaatcttgatcacgtggacaaagggttttaaggcaacagactgcgtgggccacgatgtagtcaccttactaagggatgcgataaaaaggagagaggaatttgacctggacgtggtggctgtggtcaacgacacagtgggcaccatgatgacctgtgcttatgaggagcccacctgtgaggttggactcattgttgggaccggcagcaatgcctgctacatggaggagatgaagaacgtggagatggtggagggggaccaggggcagatgtgcatcaacatggagtggggggcctttggggacaacgggtgtctggatgatatcaggacacactacgacagactggtgaacgaatattccctaaatgctgggaaacaaaggtatgagaagatgatcagtggtatgtacctgggtgaaatcgtccgcaacatcttaatcgacttcaccaagaagggattcctcttccgagggcagatctctgagacgatgaagacccggggcatctttgagaccaagtttctctctcagatcgagagtgaccgattagcactgctccaggtccgggctatcctccagcagctaggtctgaatagcacctgcgatgacagtatcctcgtcaagacagtgtgcggggtggtgtccaggagggccgcacagctgtgtggcgcaggcatggctgcggttgtggataagatccgcgagaacagaggactggaccgtctgaatgtgactgtgggagtggacgggacactctacaagcttcatccacacttctccagaatcatgcaccagacggtgaaggaactgtcaccaaaatgtaacgtgtccttcctcctgtctgaggatggcagcggcaagggggccgccctcatcacggccgtgggcgtgcggttacgcacagaggcaagcagctaagagtccgggatccccagcctactgcctctccagcacttctctcttcaagcggcgaccccctaccctcccagcgagttgcgctgggagacgctggcgccagggcctgccggcgcggggaggaaagcaaaatccaactaatggtatatattgtagggtacagaatagagcgtgtgctgttgataatatctctcacccggatccctcctcacttgccctgccactttgcatggtttgattttgacctggtcccccacgtgtgaagtgtagtggcatccatttctaatgtatgcattcatccaacagagttatttattggctggagatggaaaatcacaccacctgacaggccttctgggcctccaaagcccatccttggggttccccctccctgtgtgaaatgtattatcaccagcagacactgccgggcctccctcccgggggcactgcctgaaggcgagtgtgggcatagcattagctgcttcctcccctcctggcacccactgtggcctggcatcgcatcgtggtgtgtcaatgccacaaaatcgtgtgtccgtggaaccagtcctagccgcgtgtgacagtcttgcattctgtttgtctcgtggggggaggtggacagtcctgcggaaatgtgtcttgtcttccatttggataaaaggaaccaaccaacaaacaatgccatcactggaatttcccaccgctttgtgagccgtgtcgtatgacctagtaaactttgtaccaattc

SEQ ID NO: 8313 - protein, 917 aa, Homo sapiens
  ref <308>: DATABASE ACCESSION NUMBER: SWISS-Prot / P19367
  ref <309>: DATABASE ENTRY DATE: 2002-06-15
MIAAQLLAYYFTELKDDQVKKIDKYLYAMRLSDETLIDIMTRFRKEMKNGLSRDFNPTATVKMLPTFVRSIPDGSEKGDFIALDLGGSSFRILRVQVNHEKNQNVHMESEVYDTPENIVHGSGSQLFDHVAECLGDFMEKRKIKDKKLPVGFTFSFPCQQSKIDEAILITWTKRFKASGVEGADVVKLLNKAIKKRGDYDANIVAVVNDTVGTMMTCGYDDQHCEVGLIIGTGTNACYMEELRHIDLVEGDEGRMCINTEWGAFGDDGSLEDIRTEFDREIDRGSLNPGKQLFEKMVSGMYLGELVRLILVKMAKEGLLFEGRITPELLTRGKFNTSDVSAIEKNKEGLHNAKEILTRLGVEPSDDDCVSVQHVCTIVSFRSANLVAATLGAILNRLRDNKGTPRLRTTVGVDGSLYKTHPQYSRRFHKTLRRLVPDSDVRFLLSESGSGKGAAMVTAVAYRLAEQHRQIEETLAHFHLTKDMLLEVKKRMRAEMELGLRKQTHNNAVVKMLPSFVRRTPDGTENGDFLALDLGGTNFRVLLVKIRSGKKRTVEMHNKIYAIPIEIMQGTGEELFDHIVSCISDFLDYMGIKGPRMPLGFTFSFPCQQTSLDAGILITWTKGFKATDCVGHDVVTLLRDAIKRREEFDLDVVAVVNDTVGTMMTCAYEEPTCEVGLIVGTGSNACYMEEMKNVEMVEGDQGQMCINMEWGAFGDNGCLDDIRTHYDRLVNEYSLNAGKQRYEKMISGMYLGEIVRNILIDFTKKGFLFRGQISETMKTRGIFETKFLSQIESDRLALLQVRAILQQLGLNSTCDDSILVKTVCGVVSRRAAQLCGAGMAAVVDKIRENRGLDRLNVTVGVDGTLYKLHPHFSRIMHQTVKELSPKCNVSFLLSEDGSGKGAALITAVGVRLRTEASS

SEQ ID NO: 8314 - DNA, 1489 bp, Rattus norvegicus
  ref <308>: DATABASE ACCESSION NUMBER: EMBL / U27767
  ref <309>: DATABASE ENTRY DATE: 2000-03-04
atactataattatattttattgtctatacacctcgaggtgagctacgtcaacggttaaacaagatgtgcaaaggactcgctggtctgccggcttcctgcctgaggagcgcaaaggatatgaaacatcggctgggatttctgctgcagaaatcagattcctgtgaacatagttcttcacacagcaagaaggacaaagtagtaacttgccagagggtgagccaagaagaagtcaagaaatgggctgaatcgctggaaaacctgattaaccatgaatgtggactggcagctttcaaagctttcctgaagtcagaatacagtgaggagaacattgacttctggatcagctgtgaggagtacaagaaaatcaaatcaccttctaaactaagtcccaaggccaagaagatctacaatgagttcatctctgtgcaggcaacaaaagaggtgaacctggattcttgcaccagagaggagacaagccggaacatgttagagcccacgataacctgttttgatgaagcccagaagaagattttcaacctgatggaaaaggattcataccgtcgtttcctcaagtctcgattctatcttgacctgaccaatccttccagctgcggggcagagaagcagaaaggagccaagagttctgcagactgcacttccctagtccctcagtgtgcctaattctcacacagaggcagagaaccgaaatgccaagactctatgctctggaaaacctgaggccaaatattgatctgtattaagcatcaatgctttctccacattgtagcctagtatccatgctgcctgccgtgtgtgagtcacttccatgtaaaactagacttagctgtggtgtgggggttttcattggggtaagacccaacttgttttcaattttcccaagtttccttaaagggtgtcaggtgagcaagtctccaaataatggccctgtaggtctggattttcaaagatggttagtagtccaccccttccaacagtttgacctcaagttagttggtacacttcatgtgatgtcacatgcacatgcaatgtcagccagcagcacttcctacagactttcaacgtttaggtgatatttgtgtatgtgtatgtatatattaaatatatagtacatatgcatatacattctgtatatattatatctatgtattcagtatgtgtgaatgtgcatgaatatatatatatatgcatatatatatttgtatatgttcacacatgcacacacatttcttcaagaaaagatgggaaagatccttggtgctcaaattggagtgtgtacacatgcttgcatgcatgttctgacttctggtccttcatactgtgtctgaacagggcaaactaaattaactgccatgcaggctaagaaaggaacactaacttgtaaaaagtgagttccgtcaagccactgggtcttgatggagcgttgacgtagctcgacattcgagagttcccataactgaagttcccttat

SEQ ID NO: 8315 - protein, 205 aa, Rattus norvegicus
  ref <308>: DATABASE ACCESSION NUMBER: SWISS-Prot / P49799
  ref <309>: DATABASE ENTRY DATE: 2002-06-15
MCKGLAGLPASCLRSAKDMKHRLGFLLQKSDSCEHSSSHSKKDKVVTCQRVSQEEVKKWAESLENLINHECGLAAFKAFLKSEYSEENIDFWISCEEYKKIKSPSKLSPKAKKIYNEFISVQATKEVNLDSCTREETSRNMLEPTITCFDEAQKKIFNLMEKDSYRRFLKSRFYLDLTNPSSCGAEKQKGAKSSADCTSLVPQCA

SEQ ID NO: 8316 - DNA, 800 bp, Homo sapiens
  ref <308>: DATABASE ACCESSION NUMBER: EMBL / U27768
  ref <309>: DATABASE ENTRY DATE: 1999-06-30
gcaacatagcacgttcgcaaagtacgctcaaagccgaagccacagctcctcctgccgcatttctttcctgcttgcgaattccaagctgttaaataagatgtgcaaagggcttgcaggtctgccggcttcttgcttgaggagtgcaaaagatatgaaacatcggctaggtttcctgctgcaaaaatctgattcctgtgaacacaattcttcccacaacaagaaggacaaagtggttatttgccagagagtgagccaagaggaagtcaagaaatgggctgaatcactggaaaacctgattagtcatgaatgtgggctggcagctttcaaagctttcttgaagtctgaatatagtgaggagaatattgacttctggatcagctgtgaagagtacaagaaaatcaaatcaccatctaaactaagtcccaaggccaaaaagatctataatgaattcatctcagtccaggcaaccaaagaggtgaacctggattcttgcaccagggaagagacaagccggaacatgctagagcctacaataacctgctttgatgaggcccagaagaagattttcaacctgatggagaaggattcctaccgccgcttcctcaagtctcgattctatcttgatttggtcaacccgtccagctgtggggcagaaaagcagaaaggagccaagagttcagcagactgtgcttccctggtccctcagtgtgcctaattctcacctgaagggagagggatgaaaagccgaatctgagatatccatcacactggggggcgtcgagcatgatctagagggccta

SEQ ID NO: 8317 - protein, 205 aa, Homo sapiens
  ref <308>: DATABASE ACCESSION NUMBER: SWISS-Prot / P49798
  ref <309>: DATABASE ENTRY DATE: 2002-06-15
MCKGLAGLPASCLRSAKDMKHRLGFLLQKSDSCEHNSSHNKKDKVVICQRVSQEEVKKWAESLENLISHECGLAAFKAFLKSEYSEENIDFWISCEEYKKIKSPSKLSPKAKKIYNEFISVQATKEVNLDSCTREETSRNMLEPTITCFDEAQKKIFNLMEKDSYRRFLKSRFYLDLVNPSSCGAEKQKGAKSSADCASLVPQCA

SEQ ID NO: 8318 - DNA, 1489 bp, Rattus norvegicus; identical to SEQ ID NO: 8314
  ref <308>: DATABASE ACCESSION NUMBER: EMBL / U27767
  ref <309>: DATABASE ENTRY DATE: 2000-03-04

SEQ ID NO: 8319 - protein, 205 aa, Rattus norvegicus; identical to SEQ ID NO: 8315
  ref <308>: DATABASE ACCESSION NUMBER: SWISS-Prot / P49799
  ref <309>: DATABASE ENTRY DATE: 2002-06-15

SEQ ID NO: 8320 - DNA, 800 bp, Homo sapiens; identical to SEQ ID NO: 8316
  ref <308>: DATABASE ACCESSION NUMBER: EMBL / U27768
  ref <309>: DATABASE ENTRY DATE: 1999-06-30

SEQ ID NO: 8321 - protein, 205 aa, Homo sapiens; identical to SEQ ID NO: 8317
  ref <308>: DATABASE ACCESSION NUMBER: SWISS-Prot / P49798
  ref <309>: DATABASE ENTRY DATE: 2002-06-15

SEQ ID NO: 8322 - DNA, 4871 bp, Rattus norvegicus
  ref <308>: DATABASE ACCESSION NUMBER: EMBL / U28938
  ref <309>: DATABASE ENTRY DATE: 2000-03-04
ttttaagcgccacggggacccgctggcgctgccatccctcccgggttcctggtcgcgccacgatggggcacctgcctagggaaaggcgcgggggccgccgcctgctacctctgctcgggctctttgtgctgctcaagattgtttcaacgttccacgtgactgtccgagacgacaacaacatcgttgtgtctttagaagcttctgatgtagtcagcccaacctccgtgtatgttgtgagggtagctggcgaatccaaaaactatttcttcgaatttgaggaatccaatggcacactgcctcctcctgtggtctttaaggccacgtatcatggtctttattacatcatcagtctggtggtagtcagtgggaatgtggtcaccaaaccatcccgatcaatcaccgtgctgacaaaacccttgcccgtaaccagtgtgtctatatatgactataagccttctcctgagacaggagtactgtttgaaattcactatccggaaaaatacaacgtgttcagcagagtgaacatcagctactgggaggggaaggatttcaggacgatgctgtacaaagacttcctgaaggggaaaaccgtgtttaatcactggctcccggggatctgctacagtaacatcactttccagctggtttctgaggcgacctttaacaaaagcaccctggtggagtgcagtggtgtgagtcacgaacccaaacaacacagaacagcgccgtatccccctcgaaacatctctgttcgctttgtcaacttgaacaagaacaactgggaagaaccaagcgggagcttccccgaggactcgttcatcaaaccgcaagacgcgataggaagagacagacccttccatttccccgaggaaacccctgagacgcccgccagcaatgcgtcttccggctggcctgacccgaacggcactgagtatgagagcacatctcagccctactggtgggacagtgcatccgcggcccctgaaaacgaggaggacttcgtcagcgtgctgccagcggactatgacactgaggccacgctcggcaggacagagaaacccacagctgaccctttctctgccttccccgtgcagatgactctgagctggttaccaccaaaaccgcctacagccttcgatggcttcaatatcctcatagagagggaagggaactttaccgactatttgacagtggatgaagaagcccacgagtttgttgccgaactgaaggagcctggaaagtacagactctcagtgacaaccttcagctcctcgggagcctgtgagactcggaaaagccagtcagcaaaatcgctcagcttctacatcagccccacaggagagtggattgaagaactgactgagaaaccgcagcacgtgagtgtccacgtcttaagctcaaccactgccttgttgtcgtggacatcttcccaggagaactacaacagcaccattgtgtctgtggtgtccctgacatgccagaaacagaaagagagccagcggctggagaagcagtattgtacccaggtgaactcaagcaaacctgtaattgagaacctggttcccggtgcccagtaccaggttgtgatgtacctaagaaaaggccctttgattgggccaccttctgatcctgtgacatttgccattgttcccacggggataaaggatttaatgctctatccattgggtcccacggcagtagtgctgagctggacccgaccttacttgggagtgttcagaaaatacgtggttgaaatgttttatttcaaccccaccaccatgacctccgagtggacgacctactacgaaatagcagcgaccgtctccttaacatcgtccgtgagaatagcaaatctattgccggcgtggtactacaactttcgcgtaaccatggtgacgtggggagatccagaactgagctgctgtgacagttccaccatcagcttcataacggcccccgtcgctccagaaatcacgtctgtggagtacttcaacagcctgctgtacatcagctggacctacggggacgccaccactgacctgtcccattcgagaatgctacactggatggtcgtggcagaagggaggaggaaaattaaaaagagtgtgacacgcaatgtcatgacggccatccttagcctgcctccaggagatatctacaacctgtctgtcacagcctgcactgagagggggagtaacacctccatgctccgccttgtcaagctagaaccagctcctccaaaatcactcttcgcagtgaacaaaacgcagacatcggtcaccctgctttgggttgaggagggcgtagctgatttctttgaagtcctctgtcagaagctcgggtctggccacgatggcaaactccaggaaccggtagctgtttcctcccacgtggtgaccatctccagcctcctcccagccactgcctacaactgcagtgtcaccagcttcagccacgacagtcccagtgtccctacgttcatagctgtctccacaatggttacagaggtgaaccctaatgtggtggtgatctcggtgctggccatcctcagcatacttttaattggactgctgttagtgacccttgtcattctgagaaagaagcacctgcagatggccagggagtgtggggctggcacgtttgtcaattttgcatccttggagagggaagggaaactcccctacagttggcgtaggagtgtctttactttcttaaccctgctgccctcatgtctgtggactgactatctgttggcattttatattaacccttggagtaaaaatggcttaaagaagaggaaactgacgaaccctgttcagctggacgattttgattcttacatcaaggacatggccaaggactctgactataaattctctcttcagtttgaggagttgaagttgattggactggatattccacactttgctgcagatcttccgctgaaccgatgtaaaaaccgctatacaaacatcctgccgtacgacttcagcagagtgaggctggtctccatgaatgaagaagaaggagcagactacattaatgccaattatattcctggctacaactcacctcaggagtacattgccacccagggaccactgccggaaaccagaaatgatttctggaagatggtcctgcagcagaagtctcgcatcattgtcatgctcactcagtgcaatgagaaaagaagggtaaaatgcgaccactactggccattcacggaagaacccattgcttatggagacatcaccgtggagatggtctctgaggaagaacaggaggactgggccagcagacacttccggatcaattatgctgacgaggcccaggatgtgatgcactttaactacacggcctggccagaccatggcgtgcctccagcaaatgctgccgagagcatcctgcagttcgtgtacactgtccggcagcaagccaccaagagcaaaggacccatgatcatccactgcagcgcgggcgtgggacggacaggcaccttcatagcccttgacaggctcttgcaacacatccgagatcacgaatttgtggacatcttggggctggtgtcagaaatgcgctcataccgaatgtcgatggtacagacagaggagcagtacatcttcatccatcagtgcgtgcagctgatgtggctgaagaagaagcaacagttctgcatcagtgacgtcatctacgagaacgtcagcaagtcctagttcagactcgggagcggtgaggccatgatgtctacccatcctcccttgcttccagaggttttataggggcctttagtcactttgtcaaatcgcgtccccgctgcgcagtttgtggacaaggaggtgatttaacctcctagaaccgagaagacttagccttaaggagcctacaataccgtttggagtcttttcacttctagacgtttgatggtccaaattcactaggatttccagaaatgctcctcctcgaagggcgggaagtgcccttcctgatggttcagtcggctctttgctgcttgggctgggtttggttttttcttttttttaagtgcaataatttctgtataatcgtgattttttttttacattcgcaattcagaatgttgaattgttatccgcccacatcactgatcagtgccacagccttgggaaggccttatcgcagagttttatctcaccactgaagaggcatggctacacacaggaagactcggtgacaaatcctcaaaggaaatgagcgcgtgtgtccctccctccaacctctcgaagctatgggtcaggagtaggtgggcagagagagaagagaggggttctactcacacgtcagccggtttatctcttcctatttcgaatatgagaacctgtgtttcgaagtagagtaggaaaaacattacttgtctgacttgtcgtagtgggtttcttccttgttgacagttgggagtttcttccgtggctcttttgaactagtgtcactgtcatggtccttttcaaacagccagagctgactcaacagttttgagtctgactctgaactctgagaaatcttggtgcctagccttctttatttttctgtccacccgtgtacacaagaacagtttctccaagagctataggctgtaaaaatgcactttctttccccacccagaggagctgggaattcagaagtcaggacaacgaactcagcatgctaggacagtcactggacaccgtcccttaagaataccgttgagcgtctccgtggattccgacaggatattctctgggttctttgcatttctgttgtcagactcattttaacccgtgtagctagtggcattttattctttggattttgtatgattaaagtacatgattatgtgttgtgaccagcgccgcgaa

SEQ ID NO: 8323 - protein, 1217 aa, Rattus norvegicus
  misc_feature (1)..(1217): Xaa=Unknown amino acid
MGHLPRERRGGRRLLPLLGLFVLLKIVSTFHVTVRDDNNIVVSLEASDVVSPTSVYVVRVAGESKNYFFEFEESNGTLPPPVVFKATYHGLYYIISLVVVSGNVVTKPSRSITVLTKPLPVTSVSIYDYKPSPETGVLFEIHYPEKYNVFSRVNISYWEGKDFRTMLYKDFLKGKTVFNHWLPGICYSNITFQLVSEATFNKSTLVECSGVSHEPKQHRTAPYPPRNISVRFVNLNKNNWEEPSGSFPEDSFIKPQDAIGRDRPFHFPEETPETPASNASSGWPDPNGTEYESTSQPYWWDSASAAPENEEDFVSVLPADYDTEATLGRTEKPTADPFSAFPVQMTLSWLPPKPPTAFDGFNILIEREGNFTDYLTVDEEAHEFVAELKEPGKYRLSVTTFSSSGACETRKSQSAKSLSFYISPTGEWIEELTEKPQHVSVHVLSSTTALLSWTSSQENYNSTIVSVVSLTCQKQKESQRLEKQYCTQVNSSKPVIENLVPGAQYQVVMYLRKGPLIGPPSDPVTFAIVPTGIKDLMLYPLGPTAVVLSWTRPYLGVFRKYVVEMFYFNPTTMTSEWTTYYEIAATVSLTSSVRIANLLPAWYYNFRVTMVTWGDPELSCCDSSTISFITAPVAPEITSVEYFNSLLYISWTYGDATTDLSHSRMLHWMVVAEGRRKIKKSVTRNVMTAILSLPPGDIYNLSVTACTERGSNTSMLRLVKLEPAPPKSLFAVNKTQTSVTLLWVEEGVADFFEVLCQKLGSGHDGKLQEPVAVSSHVVTISSLLPATAYNCSVTSFSHDSPSVPTFIAVSTMVTEVNPNVVVISVLAILSILLIGLLLVTLVILRKKHLQMARECGAGTFVNFASLEREGKLPYSWRRSVFTFLTLLPSCLWTDYLLAFYINPWSKNGLKKRKLTNPVQLDDFDSYIKDMAKDSDYKFSLQFEELKLIGLDIPHFAADLPLNRCKNRYTNILPYDFSRVRLVSMNEEEGADYINANYIPGYNSPQEYIATQGPLPETRNDFWKMVLQQKSRIIVMLTQCNEKRRVKCDHYWPFTEEPIAYGDITVEMVSEEEQEDWASRHFRINYADEAQDVMHFNYTAWPDHGVPPANAAESILQFVYTVRQQATKSKGPMIIHCSAGVGRTGTFIALDRLLQHIRDHEFVDILGLVSEMRSYRMSMVQTEEQYIFIHQCVQLMWLKKKQQFCISDVIYENVSKSX

SEQ ID NO: 8324 - DNA, 3979 bp, Homo sapiens
  ref <308>: DATABASE ACCESSION NUMBER: EMBL / AF187042
  ref <309>: DATABASE ENTRY DATE: 2000-03-03
aagtaaaaaaatggaagggggaaaaggcaaagtattctgccttccaagttagatagctatctttatgaaaggacatatttcaaaggcaatataaagtctttatggtgctcttacctacctatatttgaattgggggatgcttcacctgcttattagtgaaagaagaaagaatacacttagtaaattaaattttttttaaaactttgtctttgctcagaaccagctccacccaaatcactcttcgcagtgaacaaaacccagacttcagtgactttgctgtgggtggaagagggagtagctgatttctttgaagttttctgtcaacaagttggctccagtcagaaaaccaaacttcaggaaccagttgctgtttcttcccatgtcgtgaccatctccagccttcttcctgccactgcctacaattgtagtgtcaccagctttagccatgacagccccagtgtccctacgttcatagccgtctcaacaatggttacagagatgaatcccaatgtggtagtgatctccgtgctggccatccttagcacacttttaattggactgttgcttgttaccctcattattcttaggaaaaagcatctgcagatggctagggagtgtggagctggtacatttgtcaattttgcatccttagagagggatggaaagcttccatacaactggagtaaaaatggtttaaagaagaggaaactgacaaacccggttcaactggatgactttgatgcctatattaaggatatggccaaagactctgactataaattttctcttcagtttgaggagttgaaattgattggactggatatcccacactttgctgcagatcttccactgaatcgatgtaaaaaccgttacacaaacatcctaccatatgacttcagccgtgtgagattagtctccatgaatgaagaggaaggtgcagactacatcaatgccaactatattcctggatacaactcaccccaggagtatattgccacccaggggccactgcctgaaaccagaaatgacttctggaagatggtcctgcaacaaaagtctcagattattgtcatgctcactcagtgtaatgagaaaaggagggtgaaatgtgaccattactggccattcacggaagaacctatagcctatggagacatcactgtggagatgatttcagaggaagagcaggacgactgggcctgtagacacttccggatcaactatgctgacgagatgcaggatgtgatgcattttaactacactgcatggcctgatcatggtgtgcccacagcaaatgctgcagaaagtatcctgcagtttgtacacatggtccgacagcaagctaccaagagcaaaggtcccatgatcattcactgcagtgctggcgtgggacggacaggaacattcattgccctggacaggctcttgcagcacattcgggatcatgagtttgttgacatcttagggctggtgtcagaaatgaggtcataccggatgtctatggtacagacagaggagcagtacatttttatccatcagtgtgtgcaactgatgtggatgaagaagaagcagcagttctgcatcagtgatgtcatatacgagaatgttagcaagtcctagttcagaatccggagcagtaagtggagaagagctctccacgagtgttcagtcttagaactattagagggggatgtgatggatgggacaaaagacagcagtagccatttgtattgactctgacttcacatgagtatttcttcccagctcctggcctcacatgggtggtcacagggagaaacaagtactgtagcagatctttgagtttcaatgcaccttggttggtgttggcaacaaacaggagcttctgcacatcatgatgactttacctccattccctctacccagaaccctaaattattctgttattggatctgtgcctgtaatatcaggatactaccatccaaatctatctagatatcttgtgcaaatattttattgattacaagggctgtatacggggttacaaaaagacatgagctggattggacactcctaaaaccaaaaacaacagtgacaatagagtctcaggatagcagagtctgaaaataccttggtctcccccattatgtgagcccttatttgagagcttcatgaagacacttgtaacatattcaacgtcctgtactccagttttgactacgagatcagattttggaggtgtaagtaatcttggctgaggtaacagtaatctgcccatttagttcagtaaacagactgtagagtgtctgactatactgggggaagaggagccaatgacagggtagggagatgacagtggtgcatgatgggagaatcatgaaagtctgggaagcatatggaccagtgggaaggataggattagcactgcacctctacatccatcaagagagacagagcgcacaatggagcaggaaggataaaaaataaagaaagacagagacaaacaaatttgctgggagagggaaagacattcagacccacagaaaggaggcagcacacagagaaagatgcacagatcaacccacatctgcatgggttgtgagactgagcatagtgagagcagtggtggagcaatagaagattgctgtgacaccaggctgcttactgtctttctttgtctcattcacaggagaggacatgatgtgcgcccatcctcccttgcttccagattgttttagtgggccctgatggtcatttttctaaacagaggccctgctttgtaatatgtggccaaggagataatttatctcacagaagcaccgggaagacttagccttaaagagcctacagtgtccttttggactctttcacttcgggacatttaataatggaccaaattcaacagaacaccaggaaggtcaagacgctctccaaagggcaggaagtacagcacttccgaagagtttagttggccctttgctggttgggctgagttttttatttttaagtgtttgtttttcagtgcaataatttttgtgtgtgtgtgattcttatcagaaagttgaattgttttctgcctacaccgttcatcagccccataacccaggaaggaacaggcattgttagcatcagattatacctcattattaaaaggaggcatggccacacatgaagaaatggtcattctacttcaaagaaattgagccagcactatctgtactccaacattaccggatctggattgggggaggttggtcagggaagagaggggttctacccacagatcaactgtgtaatcttttactattcaagctataattcagcttcaaagtagagtagaaaaaaaattgtcttaactgttctagttcttgatggttttcttccttattaacagttggtgtttcttccttggcccttttggactaatgttactgtccaagttctttctcaagaaaccacatctggttcagaagagtgtcaagttggactctttgaactctgttgctgtctgagcaatcgtggtgcctagactttgcattccttgttctgttgacctgcatacatgtgagagctatttctttaagaactatataggctgtgaaaacgcactttctttcccccaaagagctgggaatttatgaagttatggcaatgaactgcagcatgctgggacaattatttgactacttttttttgtaatattgtcaaatgtctctatggattctgacagagatttctttttgttttgttattcttttggttgtcagtttcattttaacgagtgtaactagtaacattttattctttggattttgtataattacagtacatgattgtgtattgtgacatgaatgctgtcaaaatgacattgatggcattgtgaagcctgttactttgtgtcacttcctgataaataagaggtgatgacatggatatacaacagaaaacactttgagttgaaagtaaacacaagctggctgcttccctgtggcaactgtgg

SEQ ID NO: 8325 - protein, 378 aa, Homo sapiens
  misc_feature (1)..(378): Xaa=Unknown amino acid
MVTEMNPNVVVISVLAILSTLLIGLLLVTLIILRKKHLQMARECGAGTFVNFASLERDGKLPYNWSKNGLKKRKLTNPVQLDDFDAYIKDMAKDSDYKFSLQFEELKLIGLDIPHFAADLPLNRCKNRYTNILPYDFSRVRLVSMNEEEGADYINANYIPGYNSPQEYIATQGPLPETRNDFWKMVLQQKSQIIVMLTQCNEKRRVKCDHYWPFTEEPIAYGDITVEMISEEEQDDWACRHFRINYADEMQDVMHFNYTAWPDHGVPTANAAESILQFVHMVRQQATKSKGPMIIHCSAGVGRTGTFIALDRLLQHIRDHEFVDILGLVSEMRSYRMSMVQTEEQYIFIHQCVQLMWMKKKQQFCISDVIYENVSKSX

SEQ ID NO: 8326 - DNA, 2026 bp, Rattus norvegicus
  ref <308>: DATABASE ACCESSION NUMBER: EMBL / U30788
  ref <309>: DATABASE ENTRY DATE: 2000-03-04
ggcacgaggtgaggccatcccttagtccgatcctagttctcagtggctgtctcttgcaggccttcaaccaggataggctcctgcatagccatttcccgagccactttatctgctttgttactgcccaatgccactgaatctcttacgcctcctgatatcctgagcaatgaatagtactcacagttgttggcttcaccagggcatccaagagatggcaaaggcatctgcagtgctgatgtactgggggggggtagaggttcagccatcccagatgacattgtgttgtccaccatggcagcacccacctatctctgaccttcatgaagagaactgttcccgtctgtggacaaggtagcctcggctttcagcaggggtcaatcagccagtcgcagaggtctttcctccacccatgggcttctgccagtgcttgacactcgtgctgtggtggctccaggtcaggattgggcagcaaggtgaccagattgcccccaacaggtggagaatctagtccatggcagctgaccagtggtccatcttttgggacactctattcaaaggcagaacatcagccactctatcacagtttaagtcctggattgggtgataattgttagtgcccggttggcaggagtgatgtgttccaggcagatcaggactaagtcacacatctcccagcatcaggtactggtgcactgagacaggtcttaagctccacatacacagtctgtagatatgcatacacatggcctcacccagccatttcagcccacgcaagccattttggagagcaattttctcatgagcaagggataggggcagtcacccatgactatgaactagtgggttacccggcccacgccaaggtccactgttcttcgggcagtccataagtattgtttgttgccagatgccccttgcactcaaggtctttggatattggcccactggggggcataggagcacagagcattgggtccctgcatccacacttcccttctattctctgtacatagccagcactctaggaccaagaggctctccagtgtcctctcttgttcttttctggggcagtccctgacccagtgtccttccgtccctctagacaccagaagttccgcctctgaacggacgtcttagcttgcgagtcaccgagttcatacttctgcgcaggcgccctgagcctgtctctggcttggctcttgcggcgagaccgccctgctgtcatggctcctccagcccttgctgtgccgctttgcattctgcgccgggctccggctctccccgcttggtgtgctactgcgagccggagaatggtggagactgggaccgcgacgatttcaacctctatgtgacggacgcgcggagctctggagcacctgcttctcgcctgacagcctggcgatcgctcaaagcccgatttggcctaagtgggactgaggatatccattcccggttcagggcagcctgccaacagcaggcagtgactgtaagactgtcaagaggacagagcattgatgacctttcaggggatacctctgccctggcctttgacctctccaaggtgcccagcccagagcaggcccccaggctgcaggctttgactctcagcctggcagagcatgtatgcaacctggagaggcggctggcagccacagaagagaccgccattagccccaggaagagcacccagccagcaggcactcagttcttaccagaacttgatcaccagagaggcagctctgggtctggggtcaggagacggtgtccaggggagtctctcgtcaaccctggtttcaaaagtaagaaaccagctggtggtgtagacttcgatgagacctgaagctagcaaagcctgtgtgaccttgccaggagtctgtctgcaaggaaaggggacatcatggacccctaaccagagacaccctttgcttcacttcccctgtggtcctgctgatgggcaaaagtacctctcatcccttccccatcaaataaactgctcccttggggagagatgctaggccaaaaaaaa

SEQ ID NO: 8327 - DNA, 860 bp, Homo sapiens
  ref <308>: DATABASE ACCESSION NUMBER: EMBL / BC002613
  ref <309>: DATABASE ENTRY DATE: 2001-06-06
ggcacgaggcgccgggttcccgctcgcccggcgccatggatccgctgtcgccgccgctctgcacgctgccgccgggccccgagccgccccgcttcgtgtgctactgcgaaggggaggaaagcggggagggggaccgcggcggcttcaacctctacgtgaccgacgccgcggagctttggagcacctgcttcacgccggacagcctggcggccctcaaagcccgttttggcctgagtgcggctgaggacatcaccccccggttcagggcagcctgtgagcagcaagctgtggctctgactctgcaggaggacagagcatccctgacgctttcaggggggccctcggcactggcctttgacctctccaaggtaccaggcccagaggcagcccccaggctgcgggcgctgacactgggcctggcaaaacgcgtgtggagcctggagcggcgactggcagctgcagaagagacagctgtcagcccgaggaagagcccccggcctgcagggcctcagctcttcttaccagacccagatccccagagaggtggccctggacctggagtcaggaggcggtgtccaggagagtcgctcatcaaccccgggttcaagagtaagaaaccagctggtggcgtggacttcgatgagacctgaaggtgcagcacaagcgtggccccgcggggagtccgcctatgaggggagaggcagtctttgaggcccccatcagagaccccccgccaccacctccacctgcctgtcctgggccaggactaacacggctcctcaaattccttccctgtcaaataaacagctcccttggttggaaaaaaaaaaaaaaaaaaaaaaaaaaaaaaaaaaaaaaaa

SEQ ID NO: 8328 - DNA, 3738 bp, Rattus norvegicus
  ref <308>: DATABASE ACCESSION NUMBER: EMBL / U30938
  ref <309>: DATABASE ENTRY DATE: 2000-08-16
tgaatccttctcatctagcactgaagtaccatttaggcatgagctcttggcaggagtgggctctgagcaggtgtcatattcattctttacaaaccatagataaataatctcatcccccaactgtagtaattgttacaattttatataaaaaaaaagaatagtatatgcagaaaatgacctgaattccatccgcaacaagagcacatggctttacatggatacaattggacaattattttcgctctgctctgttttgcatggagtattattattattattatttttaaaattgcatttttacctttcatgtgcctgaaggctatccaatacattctgaaaggccttgttaaaaatccaagctgctcatttccctattctgtttatggttggaaagattaaaaactatccattgtcgcttactacaggttcaaggaaatcaaggagtctgagtgcaggaaggaaagagcatgtaagagacacattttttaaagtgttattttgtataaatgggaagaaagatgcaactaagttattgatgtttgggacctggatgattatatcagagtatgccgttccaataaattatttaactaaaagctagattaaagcatgtgagcggtgtttgaagaagtggtgtggaagtgcgtctcttaggattgatgcactttcgttaggatgggctcgagtctgattagaatgtcagttgattggctagatttgtgtccacacagtcagtttcatgcccccattccatctgtttgatacagtattatagatataaatatatatatatatttctctgtggccatttgtgatacttcctcatatacttgaatatgatacttctttattcacagtatctgtgtctcctgcaccctttggtgttgcaattttaggtatgtgaaagtagatgttagcagggttctctccctatttaaaaatacattttacaaagacaaagagtttgagcatgaagttgctttctgtaacaactcaaagctgtaaccctgttttagtgccagaatcaagtccttcctgtgatgctagaacattttatttttctttgcttccaccaacatggagtttgtggagtgggtccagttatgcataaaggggtttacagattgttggtctatggatttatctcatgtttaattactgaatagtttgggttttatccctctaattattcatgaaaccaatcccttactattcatttcttctctttctcttttcctttttccatttgctaaagttgaaagtaggaaaatagttttggatatcttttcttgttctccaaatagtatctgttcattaaataattctctgatagaagatatttggcttccttctcccaaagacctcttcaaaaatgagaaatacaacatattaagaatatatatatatatatatatatatatattctttgagacacagatatctaaatccatctctccaggattctacatgaacatggtatgattttttttattttatatacagtctcaacatcacaattcattaatttcatttacaaatcatactaagtgaataagcaagagtcaatggcccaaaagaagacaaagcattatcaaaccaagtggacttttcccttaacatttaatttgttctttttcttgttctcaggattggtagactgaatctgaagggttaaatgtaaaaagttggctaggtgttttatgtctttgaaacaagccaagccctgtctataaaggagacggtgaacatgaacaagacagagacgtacaggtgtgtctgagacagaaggcaagtggatgcgaaggcagagaggaaacaggtggcagtttagtgatccattgagtattatggccaatgtgacagccacatggaaagcttagcatcaaacgaagacattcttcacagctagtaggtacacacacagacacagacacagacacacacacacacacacacacacacacacacacacacacacagagagagagagagagagagacacacacacacacacagagagagagagagacacacacacacacagagagagagagagagagacagagagagagagagagacacacacacgtctttgtaaattgtttttttaatatataactttaaaactaccatgtaatggttgctttcactctggacaatccattccttacctactcttgaatgcacaagaaatggaagaaggaacgtctgtgtgtggagaaggccagtcctacagttttggtagacaaggattaaagttatctaggaaaaagagagttaatagatgatccgtgtggtttaaactatgtagaagtaatttcaacccagtttattataaaaattaaggctaagcaaaggtttttttaagtgttcaagttcattttcttacgatgtgtattcaaaataaaattatgtaagccccaagttaatagatctagcactaaaatatcatttttctaatgttaatacaattataatggatacaagtccttgttctatgtgaaaatgtgattcacacatgaatgtaaagtcaacacaagaaggacctgaattttttgtaccagacagagacagagaaatgcacaggctaaaattcacttccttatgggaatgtgggatggatcccaccttacctacttaagataatgactcaaattaagctttttggacaccacttttgtggggatacacatacgctgatctagaaatgaaaggcgcacagctacatttctagatccactaatgccagtttctctttggcttcagcctttgagaacctgttcaagaatacgtaagtatccagagctctgaagagttcgaaggccaactttttcagtgaactcacacactctgggtctcctgcaactgacaattgggtaccttgcaacaatgcgggaaggatccgagtttatgatgagtttcaaaggccgtgttcacttaggaactgactctctctggatctgcctgctgcgttccagcgagatgacgggctgaaatcccacccataggaagacacctgtgcaattccagctcagtttggctgaaggtaactaaagaagaaggtccagtaaatggaagaatagactacagctggccttctccacacacacacgcacacacacgcacgcacgcacacacacagatgtgggatagaagagagatcagcaccaaaatgtagcattatatcagtagtagtaaagaaataatataaatgtgaatgattctgacttagctgcatttatagttttcttctcatttttcatgccacagggggaaaaaaataaattatttatagtagaagtagcaaggcaaaagtagatttatcatttggaaaggcaaatttcaggcatttcttcaagactggtgtgctaaaattaatactgttgttgtgtttttacacctagaagttttagcctggacatgtagattgaggccaagtccctatgtaggaaaaagtttttttcaaaacccctaaaaaaatgccaatcatgaaagtccacttcaactttagcaaaaaaattcaacaaaaagtatactctgtatgctgggatcccaaggttccaacacaccatctttgggggggttctttcttctgataattctagagcctgttaccatagaaaggaatttcttcaatggctgattgtagttagttcatgtttttcaatcaatttgcaaatgtatttgttgctgtatagtgattgttttgcaaaataaaattgcttgtcatctaactac

SEQ ID NO: 8329 - protein, 1861 aa, Rattus norvegicus
  ref <308>: DATABASE ACCESSION NUMBER: SWISS-Prot / P15146
  ref <309>: DATABASE ENTRY DATE: 2002-06-15
MADERKDEGKAPHWTSASLTEAAAHPHSPEMKDQGGSGEGLSRSANGFPYREEEEGAFGEHGSQGTYSDTKENGINGELTSADRETAEEVSARIVQVVTAEAVAVLKGEQEKEAQHKDQPAALPLAAEETVNLPPSPPPSPASEQTAALEEDLLTASKMEFPEQQKLPSSFAEPLDKEETEFKMQSKPGEDFEHAALVPQPDTSKTPQDKKDPQDMEGEKSPASPFAQTFGTNLEDIKQITEPSITVPSIGLSAEPLAPKDQKDWFIEMPVESKKDEWGLAAPISPGPLTPMREKDVLEDIPRWEGKQFDSPMPSPFHGGSFTLPLDTVKDERVTEGSQPFAPVFFQSDDKMSLQDTSGSATSKESSKDEEPQKDKADKVADVPVSEATTVLGDVHSPAVEGFVGENISGEEKGTTDQEKKETSTPSVQEPTLTETEPQTKLEETSKVSIEETVAKEEESLKLKDDKAGVIQTSTEQSFSKEDQKGQEQTIEALKQDSFPISLEQAVTDAAMATKTLEKVTSEPEAVSEKREIQGLFEEDIADKSKLEGAGSATVAEVEMPFYEDKSGMSKYFETSALKEDVTRSTGLGSDYYELSDSRGNAQESLDTVSPKNQQDEKELLAKASQPSPPAHEAGYSTLAQSYTSDHPSELPEEPSSPQERMFTIDPKVYGEKRDLHSKNKDDLTLSRSLGLGGRSAIEQRSMSINLPMSCLDSIALGFNFGRGHDLSPLASDILTNTSGSMDEGDDYLPPTTPAVEKIPCFPIESKEEEDKTEQAKVTGGQTTQVETSSESPFPAKEYYKNGTVMAPDLPEMLDLAGTRSRLASVSADAEVARRKSVPSEAVVAESSTGLPPVADDSQPVKPDSQLEDMGYCVFNKYTVPLPSPVQDSENLSGESGSFYEGTDDKVRRDLATDLSLIEVKLAAAGRVKDEFTAEKEASPPSSADKSGLSREFDQDRKANDKLDTVLEKSEEHVDSKEHAKESEEVGDKVELFGLGVTYEQTSAKELITTKETAPERAEKGLSSVPEVAEVETTTKADQGLDVAAKKDDQSPLDIKVSDFGQMASGMSVDAGKTIELKFEVDQQLTLSSEAPQETDSFMGIESSHVKDGAKVSETEVKEKVAKPDLVHQEAVDKEESYESSGEHESLTMESLKPDEGKKETSPETSLIQDEVALKLSVEIPCPPPVSEADSSIDEKAEVQMEFIQLPKEESTETPDIPAIPSDVTQPQPEAVVSEPAEVRGEEEEIEAEGEYDKLLFRSDTLQITDLLVPGSREEFVETCPGEHKGVVESVVTIEDDFITVVQTTTDEGELGSHSVRFAAPVQPEEERRPYPHDEELEVLMAAEAQAEPKDGSPDAPATPEKEEVPFSEYKTETYDDYKDETTIDDSIMDADSLWVDTQDDDRSILTEQLETIPKEERAEKEARRPSLEKHRKEKPFKTGRGRISTPERREVAKKEPSTVSRDEVRRKKAVYKKAELAKESEVQAHSPSRKLILKPAIKYTRPTHLSCVKRKTTATSGESAQAPSAFKQAKDKVTDGITKSPEKRSSLPRPSSILPPRRGVSGDREENSFSLNSSISSARRTTRSEPIRRAGKSGTSTPTTPGSTAITPGTPPSYSSRTPGTPGTPSYPRTPGTPKSGILVPSEKKVAIIRTPPKSPATPKQLRLINQPLPDLKNVKSKIGSTDNIKYQPKGGQVRILNKKMDFSKVQSRCGSKDNIKHSAGGGNVQIVTKKIDLSHVTSKCGSLKNIRHRPGGGRVKIESVKLDFKEKAQAKVGSLDNAHHVPGGGNVKIDSQKLNFREHAKARVDHGAEIITQSPSRSSVASPRRLSNVSSSGSINLLESPQLATLAEDVTAALAKQGL

SEQ ID NO: 8330 - DNA, 2124 bp, Homo sapiens
  ref <308>: DATABASE ACCESSION NUMBER: EMBL / AK056148
  ref <309>: DATABASE ENTRY DATE: 2002-08-06
cattcatcttagacttacaaataaggaatgaaatagtcaatggcctgattaaggcaaagagctaccaggctagatggacactttttaaaaattttatctgttctttttcttgctcagggctggtaggttggatctgaaccattaaaatcaaatggtccactaggcgtatgatctctttgagccaaatcagttcctgaatataaaggaggaaatgatgaggatgtactgaggcaacggggaagtatagaaacatccaagacaaaagccaagggatgcaaaggcagagacacaggtgctttttggtgacccagtggatatggcaaccagtgtaactgccatacaagaaaccctaggagcaaacccacaccactcattctcagctaagagattttacacaggcaaacgtgtcttaaaccatctataaatcagttattttatatgacagtcaaaaccttagaaaccttaggatcattatatctattttctgcctattaattgctgtgaggtttgatttgaccaatctgggcaatttattcatcagcttcccttgaagtgcaccagaaaatagaagaaaggtgtgtggagacttagggtattttattacatgttttcatagtcttaaatagtgattaaatttctctagaaagaagttaacagctcattagaaaagttttaacctgtgaaataagtatttttctcaacattctttaaagtttttatataagttaacactaggtaaacattctgcatactagaagtcagtttattacaaatacatgtcaaaaataaagattatacaaggcaccaaactactagatttggcattaaaacaaatgtttatttctaatcacaacaaaattataatgaataaatgttcttgctttgtatggaaatacaattctttattaaagttaacagaaaggaactgatcgtttgtaccagtaaaagagagaaacacacaggttaaatatcttcttgtggggttaaggggtagaacctatcttgccttcactctcaagataacgactcaaattaagctttttgagcaccactcttgtggggacacacatacgctgatctaggaatgaaatcttcgtggtctcaattctagatctactatgccagtttctctctggctttagcctttgagaacctgtataagaatacgtaagtaatccagagctgtgaagagtttaaaggccaacttctccagtgaactcaacctctgggtcacttgcaaccagaaattggatacctcataatgatgcaggaaagacccgagttcatgatgagtttcaaaggccacgttcatttaggaaccaactctctctggatttacctgctgagttccagcagcgtgatgggctgacatcccacctacaagtatgacacctgtgtaacaccagctaggtacggctggagaaggctgaagagagaatgccattaaatggaagaatgtactgattgtagtgaccttctccacacacacacacacacacacacacacctacagtaatacagcaagcgtggaataatcagccaatatataacattccatcagtattttattaaggaaataacctgaatgtggttgattttgacatagctgcaattacagttttcttctatttttcaagccacaataaggaaaataaactactcatggtctaaatactagagataaagtagattcatggcttggtaaggaaattttaagcattccttcaaagattgacgtgctaaaataagcattgatgttttgagtttttttacacctaggatttttagcttgggtgtgtaggtgaaggccaagactctctgcaggaaaaagcttattttcaaactcagaaaataaaatgtcaatcataaaaatctacttcaactttagcaaaaagaaaaaaaaatcaacaaaaagtatactctgtatgctgggattccgaggttccaacacactgttacaaatctgtggggggtttctttcttctgataattctagagcctgttaccatagaaaggcatttcttcaatggctggttgtagttagttcatgtttttcaatcaaatttgcaaatgtatttgttgctgtatagtgattgttttgcaaaataaaattgcttgtcacct

SEQ ID NO: 8331 - DNA, 997 bp, Rattus norvegicus
  misc_feature (1)..(997): n=a, c, g or t
  ref <308>: DATABASE ACCESSION NUMBER: EMBL / U31203
  ref <309>: DATABASE ENTRY DATE: 2000-03-04
ggagggggcgggggaccggctggaggtgccgaggacctggcggagctggaccagctgctgcggcagcggccgtcgggggccatgccgagcgagatcaaagggctggagttctccgagggcttggcccaaggcaagaagcagcgcctgagcaagaagctgaggaggaagttacagatgtggctgtggtcacagaccttctgcccggtgctgtacgcgtggaacgacctaggcagccgtttttgggcgcgctacgtgaaggtgggcagctgcttcagcaagcgctcctgctctgtgcctgagggcatggtgtgtaagccatccaagtctgtgcacctcaccgtgctgcggtggcgctgtcagcggcgcgggggtcagcgctgcggctggattcccatccagtaccccatcatttccgagtgtaagtgttcctgctagaactcggggncccctgcccgcgcctagacacttgatggatccccaccaacgccccccacccccaccgnctccaaccagttccaccaccctctagcgagggttttcaatgaactttttttttcttcttggatacagagacctggctttctggttcatgtaatgcactgtttaactgtgtaggaatgtatatgtgtgtatatacggccccagttttaatttacttattaaaaggtcagtattatacgtcaaaagttacccggcttctactgtatttaaaaaaaataagcaagcaaagtgaaaaaaaaaaagagcagagaaaagagagactnattctggntgttggtaataatgttaccctgctatttatatcccaatgcccttcgcatggngaagcaggggggaaaagttatttttttcttaaaagtacaaagagagggggaactttggtagaaggacttttaaaaaagctatttnccatcctccggaaatgtntggtttcctagncncgagagtatgagtcatgtatttncagtatgtatttgagacaatggatgatatcatg

SEQ ID NO: 8332 - protein, 144 aa, Rattus norvegicus
  ref <308>: DATABASE ACCESSION NUMBER: SWISS-Prot / Q62809
  ref <309>: DATABASE ENTRY DATE: 2001-10-16
GGGGGPAGGAEDLAELDQLLRQRPSGAMPSEIKGLEFSEGLAQGKKQRLSKKLRRKLQMWLWSQTFCPVLYAWNDLGSRFWARYVKVGSCFSKRSCSVPEGMVCKPSKSVHLTVLRWRCQRRGGQRCGWIPIQYPIISECKCSC

SEQ ID NO: 8333 - DNA, 699 bp, Homo sapiens
  ref <308>: DATABASE ACCESSION NUMBER: Refseq / NM_005450
  ref <309>: DATABASE ENTRY DATE: 2000-11-01
atggagcgctgccccagcctaggggtcaccctctacgccctggtggtggtcctggggctgcgggcgacaccggccggcggccagcactatctccacatccgcccggcacccagcgacaacctgcccctggtggacctcatcgaacacccagaccctatctttgaccccaaggaaaaggatctgaacgagacgctgctgcgctcgctgctcgggggccactacgacccaggcttcatggccacctcgccccccgaggaccggcccggcgggggcgggggtgcagctgggggcgcggaggacctggcggagctggaccagctgctgcggcagcggccgtcgggggccatgccgagcgagatcaaagggctagagttctccgagggcttggcccagggcaagaagcagcgcctaagcaagaagctgcggaggaagttacagatgtggctgtggtcgcagacattctgccccgtgctgtacgcgtggaacgacctgggcagccgcttttggccgcgctacgtgaaggtgggcagctgcttcagtaagcgctcgtgctccgtgcccgagggcatggtgtgcaagccgtccaagtccgtgcacctcacggtgctgcggtggcgctgtcagcggcgcgggggccagcgctgcggctggattcccatccagtaccccatcatttccgagtgcaagtgctcgtgctag

SEQ ID NO: 8334 - protein, 232 aa, Homo sapiens
  ref <308>: DATABASE ACCESSION NUMBER: Refseq / NP_005441
  ref <309>: DATABASE ENTRY DATE: 2000-11-01
MERCPSLGVTLYALVVVLGLRATPAGGQHYLHIRPAPSDNLPLVDLIEHPDPIFDPKEKDLNETLLRSLLGGHYDPGFMATSPPEDRPGGGGGAAGGAEDLAELDQLLRQRPSGAMPSEIKGLEFSEGLAQGKKQRLSKKLRRKLQMWLWSQTFCPVLYAWNDLGSRFWPRYVKVGSCFSKRSCSVPEGMVCKPSKSVHLTVLRWRCQRRGGQRCGWIPIQYPIISECKCSC

SEQ ID NO: 8335 - DNA, 1496 bp, Rattus norvegicus
  ref <308>: DATABASE ACCESSION NUMBER: EMBL / U31668
  ref <309>: DATABASE ENTRY DATE: 1996-05-18
gcgggggcagcagcaggcacgagaagagcctggggttgctcaccaccaagttcgtgtcgttgctgcaggaggcgcaggacggcgtcctggatctcaaagcggctgcagatactttggctgtgaggcaaaagcgaagaatttatgatatcaccaacgtcttagaaggaattgatctaattgaaaaaaaatcaaagaacagtatccagtggaagggtgtaggtgctggctgtaatactaaagaagttatagatagattaagatgtcttaaagctgaaattgaagatctagaattgaaggaaagagaacttgaccagcagaagttgtggctacagcaaagcatcaaaaacgtgatggaagactccattaataacagattttcttatgtaactcacgaagacatctgcagttgctttaatggtgatacactgttggccattcaggcaccctctggtacacagctggaagtacctattccagaaatgggacagaatggacaaaagaaataccagataaatctgaagagtcactcaggaccaatccatgtgctacttataaataaagagtccaactcatctaagccggtggtttttcctgtccccccacctgatgacctcacacaaccttcctcccagtcctcaacttcagtgactccaccgaaatccaccatggctgctcaaaacctgcccgagcagcatgtttctgaaagaagccagaatttccagcagacaccagctacagaaatatcttcaggatctattagtggagacatcattgatgaactgatgtcttctgacgtgtttcctctcttacggctgtctcctaccccagcagatgactacaactttaatttagatgataatgaaggagtttgtgatctgtttgatgttcagatactaaattattagattccacggaaacttgggactgttatctacctctaactgtaacattttagaattcttaataacctaagtatttaaaattatgaatgtaacacctttttagttcactgactctaaagtgttttcctaacattttacttttacttcacaaaacttgaaagggctctgactgcttcagggggggataattaactgtccaccagcatgcccctccagtgattacactcagtttcattcagtgctgaattctgtagcttcttcttagaggacagttacagcaggcttcagttcatcataacaaaacattgtccaaaagatcacttacttgtcttatgtttttactgccaaagctgtttctatgtatccttcaaacagacattcactgccatatataaagtgaaggatatcactgttgagtgaacagattttgtgaagtgccttctgttttagcactttaagtctatcagtttgttgattcagacactccactttcctagagtataggaaagatctgtttatgtagtttgtttttaaaatgtgccaatgcctgtacattaacaagatttaaagaaataaagttgtatgaaacattga

SEQ ID NO: 8336 - protein, 300 aa, Rattus norvegicus
  ref <308>: DATABASE ACCESSION NUMBER: SWISS-Prot / Q62814
  ref <309>: DATABASE ENTRY DATE: 2000-05-30
GGSSRHEKSLGLLTTKFVSLLQEAQDGVLDLKAAADTLAVRQKRRIYDITNVLEGIDLIEKKSKNSIQWKGVGAGCNTKEVIDRLRCLKAEIEDLELKERELDQQKLWLQQSIKNVMEDSINNRFSYVTHEDICSCFNGDTLLAIQAPSGTQLEVPIPEMGQNGQKKYQINLKSHSGPIHVLLINKESNSSKPVVFPVPPPDDLTQPSSQSSTSVTPPKSTMAAQNLPEQHVSERSQNFQQTPATEISSGSISGDIIDELMSSDVFPLLRLSPTPADDYNFNLDDNEGVCDLFDVQILNY

SEQ ID NO: 8337 - DNA, 1697 bp, Homo sapiens
  ref <308>: DATABASE ACCESSION NUMBER: EMBL / Z78409
  ref <309>: DATABASE ENTRY DATE: 1998-04-09
cgggggggcccgaccaccgcggggccgggacgcgatggcggcggcagagcccgcgagctcgggccagcaggcgccggcagggcaggggcagggccagcggccgccgccgcagcctccgcaggcgcaagccccgcagccgcccccgccgccgcagctcgggggcgcggggggcggcagcagcaggcacgagaagagcctggggctgctcactaccaagttcgtgtcgctgctgcaggaggccaaggacggcgttctggatctcaaagcggctgctgatactttggctgtgaggcaaaaaaggagaatttatgatatcaccaatgtcttagagggaattgacttgattgaaaaaaagtcaaaaaacagtatccagtggaaaggtgtaggtgctggctgtaatactaaagaagtcatagatagattaagatatcttaaagctgaaattgaagatctagaactgaaggaaagagaacttgatcagcagaagttgttgctacagcaaagcatcaaaaatgtgatggacgattccattaataatagattttcctatgtaactcatgaagacatctgtaattgctttaatggtgatacacttttggccattcaggcaccttctggtacacaactggaggtacccattccagaaatgggtcagaatggacaaaagaaataccagatcaatctaaagagtcattcaggacctatccatgtgctgcttataaataaagagtcgagttcatctaagcccgtggtttttcctgttcccccacctgatgacctcacacagccttcctcccagtccttgactccagtgactccacagaaatccagcatggcaactcaaaatctgcctgagcaacatgtctctgaaagaagccaggctctgcagcagacatcagctacagatatatcttcagcaggatctattagtggagatatcattgatgagttaatgtcttctgacgtgtttcctctcttaaggctttctcctaccccggcagatgactacaactttaatttagatgataacgaaggagtttgtgatctgtttgatgtccagatactaaattattagattccatggaaacttgggactgttatctacctctaactgtgtaacattttagacttcttaataacctaaatatttaaaataatgaatgtaacaccttttttagttcactgattctgaagtgttcttccctaatactttctttacttcacaaaacttcaaccataaaaacaaagggctctgattgctttaggggataagtgatttaatattcacaaacgtccccactcccaaaagtaactatattctggatttcaacttttcttctaattgtgaatccttccgttttttcttcttaaggaggaaagttaaaggacactacaggtcatcaaaaacaagttggccaaggactcattacttgtcttatatttttactgccactaaactgcctgtatttctgtatgtccttctatccaaacagacgttcactgccacttgtaaagtgaaggatgtaaacgaggatatataactgtttcagtgaacagattttgtgaagtgccttctgttttagcactttaagtttatcacattttgttgacttctgacattccactttcctaggttataggaaagatctgtttatgtagtttgtttttaaaatgtgccaatgcctgtacattaacaa

SEQ ID NO: 8338 - protein, 346 aa, Homo sapiens
  ref <308>: DATABASE ACCESSION NUMBER: SWISS-Prot / Q15329
  ref <309>: DATABASE ENTRY DATE: 2002-06-15
MAAAEPASSGQQAPAGQGQGQRPPPQPPQAQAPQPPPPPQLGGAGGGSSRHEKSLGLLTTKFVSLLQEAKDGVLDLKAAADTLAVRQKRRIYDITNVLEGIDLIEKKSKNSIQWKGVGAGCNTKEVIDRLRYLKAEIEDLELKERELDQQKLWLQQSIKNVMDDSINNRFSYVTHEDICNCFNGDTLLAIQAPSGTQLEVPIPEMGQNGQKKYQINLKSHSGPIHVLLINKESSSSKPVVFPVPPPDDLTQPSSQSLTPVTPQKSSMATQNLPEQHVSERSQALQQTSATDISSAGSISGDIIDELMSSDVFPLLRLSPTPADDYNFNLDDNEGVCDLFDVQILNY

SEQ ID NO: 8339 - DNA, 2657 bp, Rattus norvegicus
  ref <308>: DATABASE ACCESSION NUMBER: EMBL / U31866
  ref <309>: DATABASE ENTRY DATE: 2000-03-04
gttttttttttttttttttttttttttttttttttttatgaagaataagcgatccgtttgggatttattgcatttaaagacggcagattattaaaacagtaggtatgataaatacagtaagaaaataactttaaatctcaaacaaaacagtgaacagaattcaagactaagcaatgtaaaggcaataaggtaacaaaattagtgctttactgggtacagggaaagtaactgaagtctatctcaaactcttcccggctacatttgagggcttaagttactttagcaagtatgtctttataacaattagaaatataactaaggatataaacccagtttatttaaaaattaaagttatttgcttagtggtacataaaaggcttcagaaaattcaagtttaacaaaaaaaaaaaaaaaaggaagtgtaatcaaagaaagtgcacttaaagccgtttgccagcaattaaagggctcttccaggctggaggtgtggctcagccctaaagcgcttgcccagcatgtgcaaggccctgggttcagttcccagcaccgcaaaagaaagaacaagtggcaattactccttctagtataggatgatctctcagtcacaaaagaacatagtaataaaatcagtcttcctgtaggcactgtgaacctttaattaaaaaaaaataacctaaaccagacccagccctctgaattttcatctacttcttccttttagtggcttttgtaaacttcgtaactaggagtgaatgctcttaagagaaacgattgcctttttaaattcacattaattccgtagtggagagcctcgatgtgcctgtgtctttttatcttagtagagaacaccaccgagtgtaaatttttccaacagtcatctgttgttctctcagtagactcagtagactgtcaactcagtaactgaatgtaaattgatgactagttttgcttagaaataaaagaaaaagaatgacagagttcactgcgcattctacatgtattaaacagataatacctaactccccacaggtagtgacattaatacatgtgcgccttctgacagtgctttagtgaagtgcccaaatctggataacccaagggaggcacacccaagactggctccaccttcgtattttccgtcagaagaggagagtagtcagtccctgttaaacagggtaggactgatcgcaaggtgcgcagatccgagagccacgtgacttcataaatgcccagggtacacagctcaggggaggggcactcagtttaaatctggtcggttccattctcacccaacttggagtagtcctttctccaactacataccgagaacgtctgtgccttagtagataactttcttaagtgccctgaaagatcctctggtaatactagcgttttgctgacgtgatcaaagtaaagcaagtagtccactttttaagaaaagattccaagttaatgagcacagttaaagcttctaggtgacacctttggcctcagactttcgagctgggttcctaacgtgacttcccttcgatgttcaagtctaacaggtttagttagaactgctttgcacactgggaagcacaaggcacacccaaatgacattctttaaaccagaactgggccgtcccataacagagccagcctttcagtgagtgctgggtgctgggtgctgggtgctgggtgctaagtgctctcttgagcaagagaaatgtaacgcaaaggagccgccccttggacctccagtgaaacagtctgtccaatgagatgatctcgagaggcgcgtcaccgctgggctgttggaggcaatgtaaacattttaggctgtggcacagctgtttcctaaggatttgtccagcattagccggaggggctgcgagtgatcacttctaagtattcagtgcagtgaaaggcgagtggaactctgacttcatagtcacaactcattactttaggaggaaagcatttctgttcggtagcgtagagggcctactgccatttgcattagtgagaataatcaacctgagaaccagacagaaaggtgcaaacacagctctcctttggcacaaggacattaagtggtgaaggcatcagactccagcatcaactggaacaacctgaaaggcaagaagtcctgccatactggagtagacagaaccgccggctggaacatccctatgggcctgctgttcagcaggatcaaccactgcaagttcggtgagcagagccgggaagggagattgggaggggccatgcagaaaaaaaggggccctaagaagggccataggtttggggtccataaaagtgaagcccctcaaaaatgaacctcaaggaaatagggaagaggactaggaggaaccaggggctaaggaatggagtcaggacggttgtctttattgcaaataatggcattagtggctatacattcgcttgtctctctcatgatggagatcagaggtgagcattctgtggctgataaggtcttgagggctccttccttctttctggaccatcatttccatcatagtacttccacattcaaaaagcaaccttgctgaggcagtcacaattcaggcaagaacgagagcaagtggaaatgtacaccaaccgtggtcagtgtttgaaaagagccttctgctgggttcggtccccagctctga

SEQ ID NO: 8340 - DNA, 2036 bp, Homo sapiens
  ref <308>: DATABASE ACCESSION NUMBER: EMBL / AK021725
  ref <309>: DATABASE ENTRY DATE: 2002-08-06
acattcttataacacagcacagtgactttcttctttcaagattgtagctcagagaaaagatacaggattcaattgggggttcaataggatagaaatggagagattcctttgtgttgtagtagaggcattttcctaaggagtatagatttatactttgcattttcattcatcatcccccagaatcatggtcaaggtgtaggtcactccacacagctgatgctcaggttattcccttgtgagaattatgagaataaagctcccaagatatgtgaaagtgcttaacacagtacctggcacacagcactcaataaaagtttggctctattatgggatggttcaattctggtttaaggagggaagaaaggttattatatatgtaccactaagcaaatatatatatatatatatatatttgggtttttttttccctaatattatttgggtgtcccctgtgcttctttaggatgtagttataactaaacctgttatacttgaacatcactaagagaagtaaattattatgaagctagcaaaaatcttgaggccaaagttgtttcttaacagctttaataatgcttgttgattttgaataatcctttaaaaagtggaccatttgcttattttaatatcacgtcagtaaaatgttagtattaaaaagatcagctttttatggcattgaagaatgtatctgctaagacacaaaaattgcatggtaagtataataggtggaggaggaaaggttgtaggccggatgaaaatttaactgactagaacatttattcaggagtgtaattattttcccttaccccaatccctgtgtacgtgttgggtatagttacgacattatccggatttgcaaatagacacaactttcagtcttaccctgtttattgtttaagagtgatagactgttgtcctcttgctggtggaaaatctaaggtggagcccactcttctatgctgaagttcaccaggcagagcagttttcttacaagtcagctactctgcttggtttattttaggttttggtacttcacgtaagcactgttagaaggtacaagtgtattaatatcactagttttgaggcgcttgggtacatttgtttttaatatatttagaatgtgcagtaaacttttttctcatttttttttctttttagcaaacttgttattttaggtccaattattgagttgacagtctactgtgagaatgagatgacatatctactgtgagaataccataaatgatgaatagtttatttgagaacttttatactcagtggtgttttatatattaagataaaaatatgtacacacatgcatgtcacatctctctactgtggagttaatgtgaatttttaaaaaatggaattgcaaccacaaccatatctaagagaacattcactcctagtgagggtttacaaaagctactaagagaataaggtagatgataatgcaaagggtcatgatttggggttatttttgttttattttaaaatttatactgctacttttgaaagaattgtttttatgactatgctctttttgtgattgaaaagtcatctaatagaagctgtatagaagctactttttaattgctggcaaacagctttaagtgcactttctttgattacacttccattttttgttaaacttgaattttctgaagccttttatgtaccactaagcaaataactttaacctttaaataaagcaaatttacatctttattgtatttctacttgttacaaaacatacttgctaaagtaacttcagtcctcaaatatagctgggaaacaattatgagataggctcagtctccccctcccaccccttttcccctgccatatctaattaagcactaactgattttattactttattgcctttacactgcttattctttttgactgaattctgtccctgattcactgttttgtttgaaatttaaagttattttcttactgtatttatcatacctgttttaatctgttttctttaaatgcaataaatcccaaatggattgcatattctttat

SEQ ID NO: 8341 - DNA, 2657 bp, Rattus norvegicus; identical to SEQ ID NO: 8339
  ref <308>: DATABASE ACCESSION NUMBER: EMBL / U31866
  ref <309>: DATABASE ENTRY DATE: 2000-03-04

SEQ ID NO: 8342 - DNA, 2036 bp, Homo sapiens; identical to SEQ ID NO: 8340
  ref <308>: DATABASE ACCESSION NUMBER: EMBL / AK021725
  ref <309>: DATABASE ENTRY DATE: 2002-08-06

SEQ ID NO: 8343 - DNA, 3945 bp, Rattus norvegicus
  ref <308>: DATABASE ACCESSION NUMBER: EMBL / U32314
  ref <309>: DATABASE ENTRY DATE: 2000-03-04
cgcggcggccacggcttgaggcgacggggcgaagatgctgaagttccaaacagttcgagggggcctgaggctcctgggtgtccgccgatcctccacagcccccgttgcctccccaaatgtccggcgtctggagtacaagcccatcaagaaagtaatggtggccaacagaggtgagattgccatccgagtgtttcgtgcctgcacagagctgggtatccgcacagtggctgtctactcggagcaggacacaggccagatgcaccggcagaaagctgatgaagcctaccttattggccgtgggctggctcctgtgcaagcctacctgcacattccagacatcattaaggtggccaaggagaatggtgtagatgctgtgcaccctggctatgggttcctctcagagagagcagactttgcccaggcctgccaagatgctggagtccgattcattggtccaagcccagaggtggtccgcaagatgggagacaaggtggaagcccgggccattgccattgctgcaggcgttccagtggtccctggcactaattcccccatcaattccctgcatgaggcacacgagttctctaacacctatggtttccctattatcttcaaggctgcctatggaggtgggggccgtggcatgagggttgtgcatagctacgaggagctggaagagaattacacccgggcctaccctgaggccttggcagcctttgggaatggggcattgtttgtggagaaattcattgagaagccaagacacattgaggtgcagatcctaggggaccaatatgggaacatcttgcacttgtatgagcgggactgctccatccagcggcggcaccagaaggtggtagagattgcccctgctacccacctggacccccaacttcggtcacgcctcaccagtgactctgtcaaacttgccaagcaggttggctatgagaatgcaggcactgtggagttcctggtggacaagcatggcaagcactacttcatcgaggtcaattcccgcctgcaggtggagcacacggtcactgaggagattacagatgtggacctggtccatgctcagatccatgtgtccgaaggccggagcctgcctgacctaggcctgcggcaggaaaacatccgaatcaatggttgtgccattcagtgtcgggtcaccactgaggaccctgcacgcagcttccagccagacactggccgcattgaggttttccggagtggtgagggcatgggcatccgcctggacaatgcctcagcattccagggagctgtcatatccccccactatgactccctgctcgtcaaagtcattgcccatggcaaagaccaccctacagctgccaccaagatgagcagagccctggcggagttccgtgtccgaggtgtaaagaccaacatccccttcctgcagaatgtgctcaacaaccagcagttcctagcgggcattgtggacacccagttcatcgatgagaaccccgagctgttccagctgcggcctgcacagaaccgggcccagaagttgctacattaccttggacacgtcatggtcaatggccctaccactccaatccccgtcaaggtcagtcccagccctgtggaccccattgttcctgtggtgcccataggcccacccccagctggtttcagagacatccttctgcgagaggggccagagggctttgccagagctgtgcggaatcaccaggggctgctgctaatggacacaaccttccgggatgcccaccagtcactacttgccactagagtgcgcacacacgatctcaaaaagattgcaccctacgttgcccacaacttcaacaacctcttcagcatagagaactggggaggagccacatttgacgtggccatgcgcttcttgtatgagtgcccctggcggcggctccaggagctccgggagctcatccccaacatcccattccagatgctactgaggggggccaatgctgtgggctacaccaactaccctgacaacgtggtcttcaagttctgtgaggtggccaaagagaatggcatggacgtcttccggatctttgactcccttaactacctgccaaacatgctgctgggcatggaagcagctggcagtgctgggggtgtggtggaagctgccatctcctacacgggtgacgtggctgaccccagtcgcactaaatactcactggagtactacatgggcttagctgaagaactggtgcgagccggcactcacatcctctgcattaaggacatggcaggcctgctgaagcctgcagcatgcaccatgctggtcagctccctccgggaccggttccccgacctcccactgcacatccatacccatgacacatcagggtcaggtgtggcagccatgttggcctgtgcacaagctggggctgatgttgtggatgtggcagtcgactctatgtctgggatgacctcacagcccagcatgggggccctggtggcctgtaccaaagggactcctctggacacagaggtacccctggagcgtgtgtttgactacagtgagtattgggaaggggctcgggggctgtatgcagcctttgattgcacggctaccatgaagtctggcaactcagacgtgtatgagaatgaggatccagggggccagtacaccaacctacacttccaggcccacagcatgggacttggctccaagttcaaggaggtcaagaaggcctatgtggaggctaaccagatgctgggggacctcatcaaggtgacaccatcctccaagattgtgggggatctggcccagttcatggtgcagaacgggttgagccgggcagaggcagaagctcaggcagaagagctgtccttcccccgctctgtggtggagttcctgcagggctacattggcattccccatgggggtttccctgaacccttccgttctaaggtgctaaaggacctgccaaggatagaaggagggcctggagcctccctccctcccttgaacctgaaggagctggagaaggacctgattgataggcatggagaggaggtgaccccagaggacgttctctctgcagccatgtaccctgatgtctttgctcagttcaaagacttcacggctacctttggccccctggatagcctgaatactcgtctctttcttcaaggacccaaaattgcagaggagtttgaggttgagctggaacggggcaagaccttgcacatcaaagccctggctgtaagcgacctgaaccgtgctggccagaggcaggtgttctttgaactcaatgggcagcttcgatccattctggttaaagacacccaggccatgaaggagatgcacttccatcccaaggccttgaaggatgtgaagggccaaattggggcccctatgcctgggaaggtcatagacgtcaaggtggcagcaggagccaaggtggttaagggccagcccctctgtgtgctcagcgccatgaagatggagactgtggtgacttcgcccatggagggcactatccgaaaggttcacgtgaccaaggacatgactctggaaggcgatgacctcatcctagagattgagtgatcttactccagactggcagcctggccaaccctaccccaagcctctcaacagaagctgtgcagccagggcaggcccaggcagtacctgagggctaggccttgaggtcctgtcccatgggacagcacacacactacctgcaatggccctcccattcccttcagctatttgtccttgtcttgctggcaggcagttctcacatattcatctcttgccaaataagggtctgctcctcgtgggagaccacaggtgtacagtaggtggccttgtacctgggagaggggttctacctctgggggtagagggaagaagacctaattcataggtcctgggaaatttgctcaataaaagtggccttcccttgccctccacaaaaa

SEQ ID NO: 8344 - protein, 1178 aa, Rattus norvegicus
  ref <308>: DATABASE ACCESSION NUMBER: SWISS-Prot / P52873
  ref <309>: DATABASE ENTRY DATE: 2002-06-15
MLKFQTVRGGLRLLGVRRSSTAPVASPNVRRLEYKPIKKVMVANRGEIAIRVFRACTELGIRTVAVYSEQDTGQMHRQKADEAYLIGRGLAPVQAYLHIPDIIKVAKENGVDAVHPGYGFLSERADFAQACQDAGVRFIGPSPEVVRKMGDKVEARAIAIAAGVPVVPGTNSPINSLHEAHEFSNTYGFPIIFKAAYGGGGRGMRVVHSYEELEENYTRAYPEALAAFGNGALFVEKFIEKPRHIEVQILGDQYGNILHLYERDCSIQRRHQKVVEIAPATHLDPQLRSRLTSDSVKLAKQVGYENAGTVEFLVDKHGKHYFIEVNSRLQVEHTVTEEITDVDLVHAQIHVSEGRSLPDLGLRQENIRINGCAIQCRVTTEDPARSFQPDTGRIEVFRSGEGMGIRLDNASAFQGAVISPHYDSLLVKVIAHGKDHPTAATKMSRALAEFRVRGVKTNIPFLQNVLNNQQFLAGIVDTQFIDENPELFQLRPAQNRAQKLLHYLGHVMVNGPTTPIPVKVSPSPVDPIVPVVPIGPPPAGFRDILLREGPEGFARAVRNHQGLLLMDTTFRDAHQSLLATRVRTHDLKKIAPYVAHNFNNLFSIENWGGATFDVAMRFLYECPWRRLQELRELIPNIPFQMLLRGANAVGYTNYPDNVVFKFCEVAKENGMDVFRIFDSLNYLPNMLLGMEAAGSAGGVVEAAISYTGDVADPSRTKYSLEYYMGLAEELVRAGTHILCIKDMAGLLKPAACTMLVSSLRDRFPDLPLHIHTHDTSGSGVAAMLACAQAGADVVDVAVDSMSGMTSQPSMGALVACTKGTPLDTEVPLERVFDYSEYWEGARGLYAAFDCTATMKSGNSDVYENEDPGGQYTNLHFQAHSMGLGSKFKEVKKAYVEANQMLGDLIKVTPSSKIVGDLAQFMVQNGLSRAEAEAQAEELSFPRSVVEFLQGYIGIPHGGFPEPFRSKVLKDLPRIEGGPGASLPPLNLKELEKDLIDRHGEEVTPEDVLSAAMYPDVFAQFKDFTATFGPLDSLNTRLFLQGPKIAEEFEVELERGKTLHIKALAVSDLNRAGQRQVFFELNGQLRSILVKDTQAMKEMHFHPKALKDVKGQIGAPMPGKVIDVKVAAGAKVVKGQPLCVLSAMKMETVVTSPMEGTIRKVHVTKDMTLEGDDLILEIE

SEQ ID NO: 8345 - DNA, 4058 bp, Homo sapiens
  ref <308>: DATABASE ACCESSION NUMBER: EMBL / BC011617
  ref <309>: DATABASE ENTRY DATE: 2002-09-02
ggcacgaggcagcagcggtagaggcggcggcgaggactggcgacggcgaggagatagtgtctgccttctggagagctgaccaaacactaaggatgctgaagttccgaacagtccatgggggcctgaggctcctgggaatccgccgaacctccaccgcccccgctgcctccccaaatgtccggcgcctggagtataagcccatcaagaaagtcatggtggccaacagaggtgagattgccatccgtgtgttccgggcctgcacggagctgggcatccgcaccgtagccatctactctgagcaggacacgggccagatgcaccggcagaaagcagatgaagcctatctcatcggccgcggcctggcccccgtgcaggcctacctgcacatcccagacatcatcaaggtggccaaggagaacaacgtagatgcagtgcaccctggctacgggttcctctctgagcgagcggacttcgcccaggcctgccaggatgcaggggtccggtttattgggccaagcccagaagtggtccgcaagatgggagacaaggtggaggcccgggccatcgccattgctgcgggtgttcccgttgtccctggcacagatgcccccatcacgtccctgcatgaggcccacgagttctccaacacctacggcttccccatcatcttcaaggcggcctatgggggtggagggcgtggcatgagggtggtgcacagctacgaggagctggaggagaattacacccgggcctactcagaggctctggccgcctttgggaatggggcgctgtttgtggagaagttcatcgagaagccacggcacatcgaggtgcagatcttgggggaccagtatgggaacatcctgcacctgtacgagcgagactgctccatccagcggcggcaccagaaggtggtcgagattgcccccgccgcccacctggacccgcagcttcggactcggctcaccagcgactctgtgaaactcgctaaacaggtgggctacgagaacgcaggcaccgtggagttcctggtggacaggcacggcaagcactacttcatcgaggtcaactcccgcctgcaggtggagcacacggtcacagaggagatcaccgacgtagacctggtccatgctcagatccacgtggctgagggcaggagcctacccgacctgggcctgcggcaggagaacatccgcatcaacgggtgtgccatccagtgccgggtcaccaccgaggaccccgcgcgcagcttccagccggacaccggccgcattgaggtgttccggagcggagagggcatgggcatccgcctggataatgcttccgccttccaaggagccgtcatctcgccccactacgactccctgctggtcaaagtcattgcccacggcaaagaccaccccacggccgccaccaagatgagcagggcccttgcggagttccgcgtccgaggtgtgaagaccaacatcgccttcctgcagaatgtgctcaacaaccagcagttcctggcaggcactgtggacacccagttcatcgacgagaacccagagctgttccagctgcggcctgcacagaaccgggcccaaaagctgttgcactacctcggccatgtcatggtaaacggtccaaccaccccgattcccgtcaaggccagccccagccccacggaccccgttgtccctgcagtgcccataggcccgcccccggctggtttcagagacatcctgctgcgagaggggcctgagggctttgctcgagctgtgcggaaccacccggggctgctgctgatggacacgaccttcagggacgcccaccagtcactgctggccactcgtgtgcgcacccacgatctcaaaaagatcgccccctatgttgcccacaacttcagcaagctcttcagcatggagaactggggaggagccacgtttgacgtcgccatgcgcttcctgtatgagtgcccctggcggcggctgcaggagctccgggagctcatccccaacatccctttccagatgctgctgcggggggccaatgctgtgggctacaccaactacccagacaacgtggtcttcaagttctgtgaagtggccaaagagaatggcatggatgtcttccgtgtgtttgactccctcaactacttgcccaacatgctgctgggcatggaggcggcaggaagtgccggaggcgtggtggaggctgccatctcatacacgggcgacgtggccgaccccagccgcaccaagtactcactgcagtactacatgggcttggccgaagagctggtgcgagctggcacccacatcctgtgcatcaaggacatggccgggctgctgaagcccacggcctgcaccatgctggtcagctccctccgggaccgcttccccgacctcccactgcacatccacacccacgacacgtcaggggcaggcgtggcagccatgctggcctgtgcccaggctggagctgatgtggtggatgtggcagctgattccatgtctgggatgacttcacagcccagcatgggggccctggtggcctgtaccagagggactcccctggacacagaggtgcccatggagcgcgtgtttgactacagtgagtactgggagggggctcggggactgtacgcggccttcgactgcacggccaccatgaagtctggcaactcggacgtgtatgaaaatgagatcccagggggccagtacaccaacctgcacttccaggcccacagcatggggcttggctccaagttcaaggaggtcaagaaggcctatgtggaggccaaccagatgctgggcgatctcatcaaggtgacgccctcctccaagatcgtgggggacctggcccagtttatggtgcagaatggattgagccgggcagaggccgaagctcaggcggaagagctgtcctttccccgctccgtggtggagttcctgcagggctacatcggtgtcccccatggggggttccccgaaccctttcgctctaaggtactgaaggacctgccaagggtggaggggcggcctggagcctccctccctcccctggatctgcaggcactggagaaggagctggtagaccggcatggggaggaggtgacgccggaagatgtgctctcagcagctatgtaccccgatgtgtttgcccacttcaaggacttcactgccacctttggccccctggatagcctgaatactcgcctcttcctgcagggacccaagatcgcagaggagtttgaggtggagctggagcggggcaagacgctgcacatcaaagccctggccgtgagcgacctgaaccgggccggccagaggcaggtcttctttgagctcaatgggcagctgcggtccatcttggtcaaggacacccaggccatgaaggagatgcacttccaccccaaggccctaaaggacgtgaagggccagatcggggcgcccatgcctgggaaggtgatagacatcaaagtggtggcaggggccaaggtggccaagggccagcccctgtgtgtgctcagtgccatgaagatggagactgtggtgacctcacccatggagggtactgtccgcaaggttcatgtgaccaaggacatgacactggaaggtgacgacctcatcctggagatcgagtgatcttgccccagaccggcagcctggccatccccaagccttcaacagaagctgtgctgccacggcaggcccaggccagccagtgcccgaggccaggaaggccgggccgtggaggtcctgtccacagctggacaggagagacaccgcctgcggtggttcattcctttcagccatcgtcctttcctccggcggacagctgcttacatgttcatctcttgccaaataagggtcccctcctcactggagactacaagtggtgggtcaggtggtcctaggacccaggggaggtttaggggtcctatctcctgggggaaggggagatctaagatgtcccaggtcctgggaagtttactcaataaagctggctttcccctgccaaaaaaaaaaaaaaaaaaaaaaaaaaaaaaaaaaaaaaaaaaaaaaaaaaaaaaa

SEQ ID NO: 8346 - protein, 1178 aa, Homo sapiens
  ref <308>: DATABASE ACCESSION NUMBER: SWISS-Prot / P11498
  ref <309>: DATABASE ENTRY DATE: 2002-06-15
MLKFRTVHGGLRLLGIRRTSTAPAASPNVRRLEYKPIKKVMVANRGEIAIRVFRACTELGIRTVAIYSEQDTGQMHRQKADEAYLIGRGLAPVQAYLHIPDIIKVAKENNVDAVHPGYGFLSERADFAQACQDAGVRFIGPSPEVVRKMGDKVEARAIAIAAGVPVVPGTDAPITSLHEAHEFSNTYGFPIIFKAAYGGGGRGMRVVHSYEELEENYTRAYSEALAAFGNGALFVEKFIEKPRHIEVQILGDQYGNILHLYERDCSIQRRHQKVVEIAPAAHLDPQLRTRLTSDSVKLAKQVGYENAGTVEFLVDRHGKHYFIEVNSRLQVEHTVTEEITDVDLVHAQIHVAEGRSLPDLGLRQENIRINGCAIQCRVTTEDPARSFQPDTGRIEVFRSGEGMGIRLDNASAFQGAVISPHYDSLLVKVIAHGKDHPTAATKMSRALAEFRVRGVKTNIAFLQNVLNNQQFLAGTVDTQFIDENPELFQLRPAQNRAQKLLHYLGHVMVNGPTTPIPVKASPSPTDPVVPAVPIGPPPAGFRDILLREGPEGFARAVRNHPGLLLMDTTFRDAHQSLLATRVRTHDLKKIAPYVAHNFSKLFSMENWGGATFDVAMRFLYECPWRRLQELRELIPNIPFQMLLRGANAVGYTNYPDNVVFKFCEVAKENGMDVFRVFDSLNYLPNMLLGMEAAGSAGGVVEAAISYTGDVADPSRTKYSLQYYMGLAEELVRAGTHILCIKDMAGLLKPTACTMLVSSLRDRFPDLPLHIHTHDTSGAGVAAMLACAQAGADVVDVAADSMSGMTSQPSMGALVACTRGTPLDTEVPMERVFDYSEYWEGARGLYAAFDCTATMKSGNSDVYENEIPGGQYTNLHFQAHSMGLGSKFKEVKKAYVEANQMLGDLIKVTPSSKIVGDLAQFMVQNGLSRAEAEAQAEELSFPRSVVEFLQGYIGVPHGGFPEPFRSKVLKDLPRVEGRPGASLPPLDLQALEKELVDRHGEEVTPEDVLSAAMYPDVFAHFKDFTATFGPLDSLNTRLFLQGPKIAEEFEVELERGKTLHIKALAVSDLNRAGQRQVFFELNGQLRSILVKDTQAMKEMHFHPKALKDVKGQIGAPMPGKVIDIKVVAGAKVAKGQPLCVLSAMKMETVVTSPMEGTVRKVHVTKDMTLEGDDLILEIE

SEQ ID NO: 8347 - DNA, 3945 bp, Rattus norvegicus; identical to SEQ ID NO: 8343
  ref <308>: DATABASE ACCESSION NUMBER: EMBL / U32314
  ref <309>: DATABASE ENTRY DATE: 2000-03-04

SEQ ID NO: 8348 - protein, 1178 aa, Rattus norvegicus; identical to SEQ ID NO: 8344
  ref <308>: DATABASE ACCESSION NUMBER: SWISS-Prot / P52873
  ref <309>: DATABASE ENTRY DATE: 2002-06-15

SEQ ID NO: 8349 - DNA, 4058 bp, Homo sapiens; identical to SEQ ID NO: 8345
  ref <308>: DATABASE ACCESSION NUMBER: EMBL / BC011617
  ref <309>: DATABASE ENTRY DATE: 2002-09-02

SEQ ID NO: 8350 - protein, 1178 aa, Homo sapiens; identical to SEQ ID NO: 8346
  ref <308>: DATABASE ACCESSION NUMBER: SWISS-Prot / P11498
  ref <309>: DATABASE ENTRY DATE: 2002-06-15

SEQ ID NO: 8351 - DNA, 2265 bp, Rattus norvegicus
  ref <308>: DATABASE ACCESSION NUMBER: EMBL / U32575
  ref <309>: DATABASE ENTRY DATE: 2000-03-04
atgtgcaaagattctgcctgcttttcgactatgaaggagacagacctggaggctgttgcaacagcagtccaaagggtggctgggatgcttcagcgcccagaccagctggacaaagtggagcagtatcgcagaagggaggctcggaagaaggcctctgtggaggccaggctaaaggccgcaatccagtctcaactagatggcgtccgcacaggcctaagccaactgcacaatgcactgaatgatgtcaaggatatccagcagtcactggctgatgtgagcaaggactggaggcagagcatcaacaccatcgagagtctcaaggacgtaaaagacgcagtggtgcagcacagccagctggctgcagctgtggagaacctcaagaacatattctctgtgcctgagattgtgagggagacccaagatctcatcgagcaaggggctctcctgcaggcccaccggaagctaatggatctggagtgctcccgggatgggctaatgtgtgagcagtaccgcatggacagtgggaacaaacgggacatgaccctcattcatggctacttcggtagcacacaggggctctctgacgagctggccaagcagctgtggatggtgctgcaaagatcgctggtcactgtccgccgggatcccaccttgctggtctccgtggtcaggatcattgaaagggaagaaaaaattgacaggcggatacttgatcgaaaaaagcaaactgggtttgttcctcctggaaggcccaaaaactggaaggaaaaaatgtttgccgtcttggacagaactgtgacgactagaatcgaaggcacgcaggcggacaccagagaatctgacaagatgtggctcgtgcgccacctggagatcattaggaagtacgtcctggatgacctcgtcatcgccaagaacctgctggtgcagtgcttccctcctcactatgacatctttaagaacctcctgagcatgtaccaccaggccttgagcattcggatgcaggacctcgcctcagaggaccttgaggccaacgagattgtgagcctcttgacctgggtcctaaatacctacaccagtgcagagatgatggggaatgtggagctggccccagaggtggacgttaatgccctggaaccgctcctctcaccaaacgtggtctctgagctgctcgacacatacatgtcaacactcacgtccaacatcattgcctggcttcggaaagcactggagacagacaagaaagactggagcaaagagacggagccggaagcagaccaggacggctattatcagacgacacttcctgccattgtattccagatgtttgaacagaatcttcaagttgctgctcaaataagtgaagatttgaaaacaaaggtattagttttgtgtcttcagcaaatgaattctttcctaagtagatacaaagaggaagcccagctttacaaagaggagcacctgagaaaccggcagcacccacactgttacgtgcagtacatggtcgccatcatcaataactgccagaccttcaaagaatccatcatcagtctgaaaagaaaatacctaaaacccgaaacagaggaaagcctgtgtcagagtcagcccagcatggatgggattctagatgccattgctaaggaaggctgcagcagtctgctagaggaggtcttcctggatctagagcaacatctgaatgagctaatgacaaagaagtggatgttaggatcaaatgctgtggacatcatctgtgtcaccgtagaagactacttcaatgacttcgccaaaattaaaaagccatacaaaaagaggatgacagctgaggcacacaggcgtgtggtggtggaatacctgcgggctgtcatgcagaagcgtatttcctttcggagtgctgaagagcgcaaggagggtgctgagaagatggtcagagaggcggaacagctccgcttcctgttccggaagctggcatctggatttggtgaggatgcagatggacactgtgacacaatcgttgcagtggcagaggtcattaagctcacggacccgtctctgctctacctagaagtctcaactctggtcagcaaatatccagacatcagagatgaccatattggtgcgctgctggcactgcgaggagacgccagccgggacatgaagcagaccatcatggagacactggagcagggccccatgcaagcgagccccaactatgtgcccatcttccaggagattgtggtgcccagtctgaacgtggcaaagctccttaag

SEQ ID NO: 8352 - protein, 755 aa, Rattus norvegicus
  ref <308>: DATABASE ACCESSION NUMBER: SWISS-Prot / AAA85505
  ref <309>: DATABASE ENTRY DATE: 2002-06-15
MCKDSACFSTMKETDLEAVATAVQRVAGMLQRPDQLDKVEQYRRREARKKASVEARLKAAIQSQLDGVRTGLSQLHNALNDVKDIQQSLADVSKDWRQSINTIESLKDVKDAVVQHSQLAAAVENLKNIFSVPEIVRETQDLIEQGALLQAHRKLMDLECSRDGLMCEQYRMDSGNKRDMTLIHGYFGSTQGLSDELAKQLWMVLQRSLVTVRRDPTLLVSVVRIIEREEKIDRRILDRKKQTGFVPPGRPKNWKEKMFAVLDRTVTTRIEGTQADTRESDKMWLVRHLEIIRKYVLDDLVIAKNLLVQCFPPHYDIFKNLLSMYHQALSIRMQDLASEDLEANEIVSLLTWVLNTYTSAEMMGNVELAPEVDVNALEPLLSPNVVSELLDTYMSTLTSNIIAWLRKALETDKKDWSKETEPEADQDGYYQTTLPAIVFQMFEQNLQVAAQISEDLKTKVLVLCLQQMNSFLSRYKEEAQLYKEEHLRNRQHPHCYVQYMVAIINNCQTFKESIISLKRKYLKPETEESLCQSQPSMDGILDAIAKEGCSSLLEEVFLDLEQHLNELMTKKWMLGSNAVDIICVTVEDYFNDFAKIKKPYKKRMTAEAHRRVVVEYLRAVMQKRISFRSAEERKEGAEKMVREAEQLRFLFRKLASGFGEDADGHCDTIVAVAEVIKLTDPSLLYLEVSTLVSKYPDIRDDHIGALLALRGDASRDMKQTIMETLEQGPMQASPNYVPIFQEIVVPSLNVAKLLK

SEQ ID NO: 8353 - DNA, 1823 bp, Homo sapiens
  ref <308>: DATABASE ACCESSION NUMBER: EMBL / AF055006
  ref <309>: DATABASE ENTRY DATE: 1998-04-06
ggcttgtccgccacctggaaattataaggaagtacgtcctggatgacctcattgtcgccaaaaacctgatggttcagtgctttcctccccactatgagatctttaagaacctcctgaacatgtaccaccaagccctgagcacgcggatgcaggacctcgcatcggaagacctggaagccaatgagatcgtgagcctcttgacgtgggtcttaaacacctacacaagtactgagatgatgaggaacgtggagctggccccggaagtggatgtcggcaccctggagccattgctttctccacacgtggtctctgagctgcttgacacgtacatgtccacgctcacttcaaacatcatcgcctggctgcggaaagcgctggagacagacaagaaagactgggtcaaagagacagagccagaagccgaccaggacgggtactaccagaccacactccctgccattgtcttccagatgtttgaacagaatcttcaagttgctgctcagataagtgaagatttgaaaacaaaggtactagttttatgtcttcagcagatgaattctttcctaagcagatataaagatgaagcgcagctgtataaagaagagcacctgaggaatcggcagcaccctcactgctacgttcagtacatgatcgccatcatcaacaactgccagaccttcaaggaatccatagtcagtttaaaaagaaagtatttaaagaatgaagtggaagagggtgtgtctccgagccagcccagcatggacgggattttagacgccatcgcgaaggagggctgcagcggtttgctggaggaggtcttcctggacctggagcaacatctgaatgaattgatgacgaagaagtggctattagggtcaaacgctgtagacattatctgtgtcaccgtggaagactatttcaacgattttgccaaaattaaaaagccgtataagaagaggatgacggccgaggcgcaccggcgcgtggtggtggagtacctgcgggcggtcatgcagaagcgcatttccttccggagcccggaggagcgcaaggagggtgccgagaagatggttagggaggcagagcagctgcgcttcctgttccggaagctggcgtccggtttcggggaagacgtggacggatactgcgacaccatcgtggctgtggccgaagtgatcaagctgacagacccttctctgctctacctggaggtctccactctggtcagcaagtatccagacatcagggatgaccacatcggtgcgctgctggctgtgcgtggggacgccagccgtgacatgaagcagaccatcatggagaccctggagcagggcccagcacaggccagccccagctacgtgcccctcttcaaggacattgtggtgcccagcctgaacgtggccaagctgctcaagtagcctccgccggcctgccctgctcgcccctccacagcctcggtccctgcctttagaaacgcgggacagctgattgctctccttggccacacgtgctccttttagctgcacggcctgtctttaggtgccagtgtgatgcaccgggtgtgcgtcgagtgagcgtcccgaggccacgtgcggaggcccctcactgtgctgtcaaaggcctgtgggtgcagggctctgccgcacagcctctcttgggtgcttgtttgttgcagtggttgaaagtgtgtggggcacagaggacgtgcacctccctgccctcctcctccctgggccttcaccgcaccccatctgcttaagtgctcggaaccccgtcacctaattaaagtttctcggcttcctcagaaaaaaaaaaaaaaaaaa

SEQ ID NO: 8354 - protein, 471 aa, Homo sapiens
  ref <308>: DATABASE ACCESSION NUMBER: SWISS-Prot / AAC09358
  ref <309>: DATABASE ENTRY DATE: 2002-06-15
LVRHLEIIRKYVLDDLIVAKNLMVQCFPPHYEIFKNLLNMYHQALSTRMQDLASEDLEANEIVSLLTWVLNTYTSTEMMRNVELAPEVDVGTLEPLLSPHVVSELLDTYMSTLTSNIIAWLRKALETDKKDWVKETEPEADQDGYYQTTLPAIVFQMFEQNLQVAAQISEDLKTKVLVLCLQQMNSFLSRYKDEAQLYKEEHLRNRQHPHCYVQYMIAIINNCQTFKESIVSLKRKYLKNEVEEGVSPSQPSMDGILDAIAKEGCSGLLEEVFLDLEQHLNELMTKKWLLGSNAVDIICVTVEDYFNDFAKIKKPYKKRMTAEAHRRVVVEYLRAVMQKRISFRSPEERKEGAEKMVREAEQLRFLFRKLASGFGEDVDGYCDTIVAVAEVIKLTDPSLLYLEVSTLVSKYPDIRDDHIGALLAVRGDASRDMKQTIMETLEQGPAQASPSYVPLFKDIVVPSLNVAKLLK

SEQ ID NO: 8355 - DNA, 2265 bp, Rattus norvegicus; identical to SEQ ID NO: 8351
  ref <308>: DATABASE ACCESSION NUMBER: EMBL / U32575
  ref <309>: DATABASE ENTRY DATE: 2000-03-04

SEQ ID NO: 8356 - protein, 755 aa, Rattus norvegicus; identical to SEQ ID NO: 8352
  ref <308>: DATABASE ACCESSION NUMBER: SWISS-Prot / AAA85505
  ref <309>: DATABASE ENTRY DATE: 2002-06-15

SEQ ID NO: 8357 - DNA, 1823 bp, Homo sapiens; identical to SEQ ID NO: 8353
  ref <308>: DATABASE ACCESSION NUMBER: EMBL / AF055006
  ref <309>: DATABASE ENTRY DATE: 1998-04-06

SEQ ID NO: 8358 - protein, 471 aa, Homo sapiens; identical to SEQ ID NO: 8354
  ref <308>: DATABASE ACCESSION NUMBER: SWISS-Prot / AAC09358
  ref <309>: DATABASE ENTRY DATE: 2002-06-15

SEQ ID NO: 8359 - DNA, 2265 bp, Rattus norvegicus; identical to SEQ ID NO: 8351
  ref <308>: DATABASE ACCESSION NUMBER: EMBL / U32575
  ref <309>: DATABASE ENTRY DATE: 2000-03-04

SEQ ID NO: 8360 - protein, 755 aa, Rattus norvegicus; identical to SEQ ID NO: 8352
  ref <308>: DATABASE ACCESSION NUMBER: SWISS-Prot / AAA85505
  ref <309>: DATABASE ENTRY DATE: 2002-06-15

SEQ ID NO: 8361 - DNA, 1823 bp, Homo sapiens; identical to SEQ ID NO: 8353
  ref <308>: DATABASE ACCESSION NUMBER: EMBL / AF055006
  ref <309>: DATABASE ENTRY DATE: 1998-04-06

SEQ ID NO: 8362 - protein, 471 aa, Homo sapiens; identical to SEQ ID NO: 8354
  ref <308>: DATABASE ACCESSION NUMBER: SWISS-Prot / AAC09358
  ref <309>: DATABASE ENTRY DATE: 2002-06-15

SEQ ID NO: 8363 - DNA, 2265 bp, Rattus norvegicus; identical to SEQ ID NO: 8351
  ref <308>: DATABASE ACCESSION NUMBER: EMBL / U32575
  ref <309>: DATABASE ENTRY DATE: 2000-03-04

SEQ ID NO: 8364 - protein, 755 aa, Rattus norvegicus; identical to SEQ ID NO: 8352
  ref <308>: DATABASE ACCESSION NUMBER: SWISS-Prot / AAA85505
  ref <309>: DATABASE ENTRY DATE: 2002-06-15

SEQ ID NO: 8365 - DNA, 1823 bp, Homo sapiens; identical to SEQ ID NO: 8353
  ref <308>: DATABASE ACCESSION NUMBER: EMBL / AF055006
  ref <309>: DATABASE ENTRY DATE: 1998-04-06

SEQ ID NO: 8366 - protein, 471 aa, Homo sapiens; identical to SEQ ID NO: 8354
  ref <308>: DATABASE ACCESSION NUMBER: SWISS-Prot / AAC09358
  ref <309>: DATABASE ENTRY DATE: 2002-06-15

SEQ ID NO: 8367 - DNA, 2368 bp, Rattus norvegicus
  ref <308>: DATABASE ACCESSION NUMBER: EMBL / U32577
  ref <309>: DATABASE ENTRY DATE: 2001-12-17
tcggcacgagacgcggagaaaatggcggcaggggtcgaagcggcggccgaagtggcagcgacagagcccaaaatggaggaagagagcggcgcgccctgcgtgccgagcggcaacggagctccggtcccgaagggtgaagaacgacctactcagaatgagaagaggaaggagaaaaacataaaaagaggaggcaatcgctttgagccatatgcaaacccaactaaaagatacagagccttcattacaaatataccttttgatgtgaaatggcagtcacttaaagacctggttaaagaaaaagttggtgaggtaacatacgtggagctcttaatggacgctgaaggaaagtcaaggggatgtgctgttgttgagttcaagatggaggagagcatgaaaaaagctgccgaagttctaaacaagcatagtctgagtggaaggccactgaaagtcaaagaagatcctgatggtgaacatgcaaggagagcaatgcaaaaggctggaagacttggaagcacagtatttgtagcaaatctggattataaagttggctggaagaaactgaaagaagtatttagtatggctggtgtggtggtccgagcagacattctggaagataaagatgggaaaagtcgtggaataggcactgtgacttttgaacagtccattgaagctgtgcaagctatatctatgtttaatggccagttgctgtttgatagaccgatgcacgtcaagatggatgagagggctttaccaaagggagacttttttcctcctgaacgcccacagcaacttcctcatggacttggtggtatcggtatggggttaggacctggagggcagcctattgatgccaaccacctgaacaaaggcattggaatgggaaacctaggacctgcaggaatgggaatggaaggcataggatttggaataaataaaatcggaggcatggaaggaccctttggtggtggtatggaaaacatggggcgatttggatccgggatgaacatgggccggataaatgaaatcctaagtaatgcactgaagaggggagagatcattgcaaagcaaggaggaagtggagctggaggcagtgtccctgggatcgaaaggatgggccctggcattgaccgcattagcggtgctggcatggagcgcatgggcgcaggcttaggccatggcatggatcgagtgggctctgagattgagcgtatgggcctggtcatggaccgcatgggctcagttgagcgcatgggctccggcatcgagcgcatgggcccactaggccttgaccacatggcctccagtattgagcgcatgggccagaccatggaacgcattggttctggtgtggagcgcatgggtgccggtatgggcttcggcctggagcgcatggccgcacccattgaccgtgtgggccaaaccattgagcgcatgggctctggtgtagagcgcatgggtcctgccattgagcgaatgggcctaagcatggatcgaatggtgcccacaggcatgggggccggcctggagcgcatgggtcctgtgatggatcgtatggccaccggcctggagcgcatgggcgccaacaacctggagcgcatgggccttgagcgcatgggagccaacagtcttgagcgcatgggcctggaacgaatgggcgccaacagcctggaacggatgggccctgccatgggcccagcattgggcgctggtattgagcgaatgggcctggccatgggtggcgccggcggtgctagttttgaccgaaccattgagatggagcggggcaactttggaggaagcttcgcaggttcctttggcggagctggaggccatgcccctggagtagccaggaaggcctgccagatatttgtgagaaatctcccatttgattttacatggaagatgctaaaggacaaattcaatgaatgtggccacgtgctgtacgccgacatcaagatggagaacggaaagtccaaggggtgcggtgtggttaagtttgagtctccagaggtggctgagagagcctgccggatgatgaatggcatgaagctgagtggccgagagattgatgttcgaattgatagaaacgcttaagcagttgccttttttaaacatcagtaccagacctctgaatttgtattttttcttgttaaccattttaatttgttggctggatgtataaagatgtttaaaaaattcagttgctttttggggtaatttgaattaattttttaatgattggggttccatttgactgtttgcattgagattgcaatgtgcgcaattttttttgtagttgtggcatcttgttgacatcgaatatgactttgataataaataccagttcctgaaaaaaaaaaaaaaaaaa

SEQ ID NO: 8368 - protein, 697 aa, Rattus norvegicus
  ref <308>: DATABASE ACCESSION NUMBER: SWISS-Prot / AAA83442
  ref <309>: DATABASE ENTRY DATE: 2003-02-01
SARDAEKMAAGVEAAAEVAATEPKMEEESGAPCVPSGNGAPVPKGEERPTQNEKRKEKNIKRGGNRFEPYANPTKRYRAFITNIPFDVKWQSLKDLVKEKVGEVTYVELLMDAEGKSRGCAVVEFKMEESMKKAAEVLNKHSLSGRPLKVKEDPDGEHARRAMQKAGRLGSTVFVANLDYKVGWKKLKEVFSMAGVVVRADILEDKDGKSRGIGTVTFEQSIEAVQAISMFNGQLLFDRPMHVKMDERALPKGDFFPPERPQQLPHGLGGIGMGLGPGGQPIDANHLNKGIGMGNLGPAGMGMEGIGFGINKIGGMEGPFGGGMENMGRFGSGMNMGRINEILSNALKRGEIIAKQGGSGAGGSVPGIERMGPGIDRISGAGMERMGAGLGHGMDRVGSEIERMGLVMDRMGSVERMGSGIERMGPLGLDHMASSIERMGQTMERIGSGVERMGAGMGFGLERMAAPIDRVGQTIERMGSGVERMGPAIERMGLSMDRMVPTGMGAGLERMGPVMDRMATGLERMGANNLERMGLERMGANSLERMGLERMGANSLERMGPAMGPALGAGIERMGLAMGGAGGASFDRTIEMERGNFGGSFAGSFGGAGGHAPGVARKACQIFVRNLPFDFTWKMLKDKFNECGHVLYADIKMENGKSKGCGVVKFESPEVAERACRMMNGMKLSGREIDVRIDRNA

SEQ ID NO: 8369 - DNA, 4088 bp, Homo sapiens
  ref <308>: DATABASE ACCESSION NUMBER: EMBL / AK024911
  ref <309>: DATABASE ENTRY DATE: 2000-09-29
tttttggtattctgtttggatgcccaatttggataactggggaccaatagcagcattgtctctttgttaacagaggaattggctgtgtgtgaattatgcatggaattttagcggtggtataattaatgtaaaacgtgtgttcttgtctagaaaatgttactcttggttgtttgctgaatttgaaagttgtgtgaaccaaagattccgaaaagttgcctttgtgccagtaaattgtaaaccaaatattaaaaacctgaatgttcaaaattggcctagtttaaagagaacataaactattttctgtcgtgcaatagaatggcttagaataatcaaaaggatgagcttaacttacggaagggatggatttaggaggaatatggtaaggactcgattgagtacagagggaagcagatctaaagttggtgtgatttcttggagaccctgaatttaggtctgcttattaaatgtcagcagctctagtgcaatgctggtaacgcgtaggagaaggagatattaaggagcccagcttttaacaaggaaggcgaggcgaggcacttctgtcagcttccccttagaagggttcattttaaaagactaactttgtgacataagtcatatttttagtttgtttataactgtcattggtatttactatttttttcttttctttttccccttccttgctcttctgactggtctctggcttcctccaaagggatgtgcgtaagtatcgtctagttacttattggtatttgagccttctaacttgtaggactggtttcactcgactcgtttccttttgactctatagtgttgttgaattcaagatggaagagagcatgaaaaaagctgcggaagtcctaaacaagcatagtctgagcggaagaccactgaaagtcaaagaagtaagctcttgcttaacactgcggatactgtgtgtaattgttgagtgatcctactttggaattagggaaagacggtcatggtcccagacggcatttacaaagcaagtgccagcctgttgtttctaatgaagagtgtcggtcatagcctacagcagccattccctgcaaggactttggggtggtggccaagcagatcctgagtggctgctgaccaccttctaatatctgtgatttgtctgaggccctgttgtctcagggactctcaaaccatgagcccgtgggtttgtgccattaagttttactccatctgacccttcttcttggcccatctttttttctttttttaaaaagtgagtttgttccagcctgggcaacatggtgaaaccccctctctacaaaaggtacaaaaattagccaggcatggtggcgcatgcctgtagtcctagctacttgggaggctgaggcaggaggatcatttgagcccaggatgtggaggttgcagtgagctgagattgcaccattgcactccagcccgggcaacagtgagaccctgtctaaaaaataaaaaataaagtgagtttgttattcctcaaacctgctttcacatctcatctgaatcaaatatattccttgaggaagaaggtttttttgttgattaaatccctcttggctgggcgcagtggctcacgcctgtaatccccggcactttgggaggctgaggtgggtggatcaaggtcatgagttcaagaccagcttgaccaacatggtgaaaccctgtctactaaaaatacaaaaaattagctgggcgtagtggggggtgcctgtaatccatctactcgggaggctgaggcaggagaatcgctggaacccaggaggcggaggttgcagtgagccgagatcgcgccattgaactccagcctgggcagtaagagcaaagctctgtctcaaaaaaacatccctcttaacttcttttcacctcttctcttggggaggaagatgagtagattcagagtgaagcttggtagggtctaaggtctctcatgtgttatgatgtcttttttagtgctgatggtggtaattgacaggacagagagttgaagaagagagtcagtacagagcttcacagaccttcccagatgttgttttactgcgcagccctcacacacacgcctccaacacctgaaggacttgaaggatgggggcgcttgtgtggtctagaactgtttctcaaacttctggaagccattgacggggtttgcagaagttacaaaaccccattgatgaattagtaagattcagctataccaagcccatgatgctctaatttcagtctggcggttctacattatatcagctaatcatgtttccctccctaccctgcttttcttttttacttagtgcaattgagagctgtgtttttagtgctacacttcatgccttttcttcctttcctatttctttagctggactcttctaagctggtagttgagttcatttgactttcttgttaatagatttgagagatgctttccaaacaacctttcagtttctaagtcttgagaatatcatttactgtgcgagcatggtttgcgttgtactgggtcagttaaacgtaacaccttttgtgcttgttttaggatcctgatggtgaacatgccaggagagcaatgcaaaaggtgatggctacgactggtgggatgggtatgggaccaggtggcccaggaatgattactatcccacccagtatcctaaataatcccaacatcccaaatgagattatccatgcattacaggctggaagacttggaagcacagtatttgtagcaaatgtaagtaaacagaaccatcgtctaaagtagaaaatcagaactttatgaaatgaccttgtcaatatgttataaaagtaattctcacatttgagaagaaaaatgtaaagaagggttttgttcttgatttctttaaaaatcagccttataggcgggctttgtctgcattcctaagtcacaggcttgaccgtggtctcgttggggctgtgattcctgagtttcgcaggtgtttccacaagcagtaaccgagtctgcattctccgttggtttattttatgcagttttggtgcagagtaagactgtacgagcagaagtgcactgacaccttcctcttgttgtgtctggggtgaatgataatacctccaccatctgcaaggggaaatatttagaataaagtaggttgggtggggtggggagtggtaaagcttatcagggaaacaattttttaaaaatgttcagaaaatgagtattaatttgaagtatgaggtgacttaagtttctgagaaaagagacaatatatttactataggtacagtttatttacagtgaaggccaggctttataatcctattttaaaatttccattgcagttgattagtttttgtgacattatttcctaatacttttttccaaccaaagcatgtatcattcatgtagtaaaaatgttgtgtttcttaagatgtttacattgaggtttttaccccgttctctctcgattagctggattataaagttggctggaagaaactgaaggaagtatttagtatggctggtgtggtggtccgagcagacattcttgaagataaagatggaaaaagtcgtggaataggcactgttacttttgaacagtccattgaagctgtgcaagctatatgtatccttctgcaggaattcaacttatgaacagtttgacctaaattgctgtgttagtaatgtaggtttgtgtgaggaagaggtgactgtgtgtattcatgttttttatgtgactagggggagtgcattactgtggaattaagaggttctctgggccggaccggtcacggtggctcacgcctgtaatcccagcacttcgggaggccaaggcgggcggatcacttgaggtcagttcgagaccagcctggccaacatggtgaaaccccggctctactaaaaaatgcaaaaattagctgggcgcagtggtgggtgcctgtaatcccagctactcgggaggctgaggcacaagaatcgcttgaacccgggaggtggaggttgcagtgagccgagattgcgccactgcacaccaccagcctgggtgatagagtgagactcagtctcaaaaaaaaaaaaaaaaaaaaaaaaaaaaaaaaaaaaaaaaaaa

SEQ ID NO: 8370 - protein, 730 aa, Homo sapiens
  ref <308>: DATABASE ACCESSION NUMBER: SWISS-Prot / P52272
  ref <309>: DATABASE ENTRY DATE: 2001-10-16
MAAGVEAAAEVAATEIKMEEESGAPGVPSGNGAPGPKGEGERPAQNEKRKVKNIKRGGNRFEPYANPTKRYRAFITNIPFDVKWQSLKDLVKEKVGEVTYVELLMDAEGKSRGCAVVEFKMEESMKKAAEVLNKHSLSGRPLKVKEDPDGEHARRAMQKVMATTGGMGMGPGGPGMITIPPSILNNPNIPNEIIHALQAGRLGSTVFVANLDYKVGWKKLKEVFSMAGVVVRADILEDKDGKSRGIGTVTFEQSIEAVQAISMFNGQLLFDRPMHVKMDERALPKGDFFPPERPQQLPHGLGGIGMGLGPGGQPIDANHLNKGIGMGNIGPAGMGMEGIGFGINKMGGMEGPFGGGMENMGRFGSGMNMGRINEILSNALKRGEIIAKQGGGGGGGSVPGIERMGPGIDRLGGAGMERMGAGLGHGMDRVGSEIERMGLVMDRMGSVERMGSGIERMGPLGLDHMASSIERMGQTMERIGSGVERMGAGMGFGLERMAAPIDRVGQTIERMGSGVERMGPAIERMGPSMERMVPAGMGAGLERMGPVMDRMATGLERMGANNLERMGLERMGANSLERMGLERMGANSLERMGPAMGPALGAGIERMGLAMGGGGGASFDRAIEMERGNFGGSFAGSFGGAGGHAPGVARKACQIFVRNLPFDFTWKMLKDKFNECGHVLYADIKMENGKSKGCGVVKFESPEVAERACRMMNGMKLSGREIDVRIDRNA

SEQ ID NO: 8371 - DNA, 4344 bp, Rattus norvegicus
  ref <308>: DATABASE ACCESSION NUMBER: EMBL / U32681
  ref <309>: DATABASE ENTRY DATE: 2000-03-04
ggaacagattctggtttggctgtgaggctggtgaatggaggagacaggtgtcggggtcgcgtggagatcctttaccagggttcctggggcaccatgtgtgatgacagctgggacatcaatgatgccaacgtggtgtgcaggcagctgggctgtggctgggccttgtctgccccaggaagtgcccagtttggacagggtctgggtcccattgttctggatgacgtggcctgtagaggacatgaggcctatctgtggagctgctcccaccgaggctggctctctcataactgtggacatcaggaggatgctggagtgatctgctcagattctcaaacaagcagtcccacacccggttggtggaaccccgggggcacaaataacgatgtgatctacgacactcaagaaaccacagaaacttctcaaacaagcagtcccacacctgattggtggaaccatgggggcacaattaatgatgtgatctatgacactcaagaaaccacagaaggaacagattctggtttggctgtgaggctggtgaatggaggagacaggtgtcggggtcgtgtggagatcctttaccagggttcctggggcaccgtgtgtgacgacagctgggacatcaatgatgccaacgtggtgtgcaggcagctgggctgtggctgggccttgtctgccccaggaagtgcccagtttggacagggctctgggtccattgttctggatgacgtggcctgtagaggacatgaggcctatctgtggagctgctcccaccgaggctggctctctcataactgtggacatcaggaggatgctggagtcatctgttcatattctcaaacaagcagtcccacacccgattctcaaacaagcagtcccacacccggttggtggaaccccgggggcacaaataacgatgtgtcctatggacccgaacagaccacagacgcaacagattctggtttggctgtgaggctggtgaatggaggagacaggtgtcagggtcgtgtggagatcctttaccagggttcctggggtaccgtgtgtgacgacagctgggacaccaaggatgccaacgtggtgtgcaggcagctggtctgtggctgggccttgtctgccccaggaagtgcccactttggacaaggctctggatccattgttctggatgacgtggcctgtacaggacatgaggcctatctgtggagctgctcccaccgaggctggctctctcataactgtggccaccatgaggatgctggagtcatctgttcagatgcccaaacccagagcacaacctggccagatatgtggcctactaccactccagaaactacaacagattggtggactacaaaatattcttcctctgttcctacaacacaattccccaccatagccgattggtggacaactccttctccggaatacacctgtggaggtttactgaccctaccctatgggcagttttccagcccatactaccctggaagctatcctaacaatgccagatgtttgtggaaaattttcgtctccagcatgaaccgtgtgacagtggtcttcacagatgtgcagcttgaaggaggttgcaactatgactacatcctggtttttgatggccctgaaaacaattcttctctcattgctcgggtttgtgatgggttcaatggatctttcacctcaacccagaacttcatgtctgtagtctttatcacggatggcagtgtcacgaggagagggttccaagctgactactactccactcctatcagcaccagcacaacctctccaacgacgttcccgatcgttactgattggtggacaactccttctccggaatacacctgtggaggtttactgaccctaccctatgggcagttttccagcccatactaccctggaagctatcctaacaatgccagatgtttgtggaaaattttcgtccccagcatgaaccgtgtgacagtggtcttcacagatgtgcagcttgaaggaggttgcaactatgactacatcctgggttttgatggtcctgaatacaattcttctctcattgctcgggtttgtgatgggtccaatggatctttcacctcaacccagaacttcatgtctgtagtctttatcacggatggcagtgtcacgaggagagggttccaagctgactactactccactcctatcaggaccagcacaactcctccaacgacgttcccgatcattactggaaatgattcttcattggtgctgaggctggtaaatggaacaaaccggtgtgagggccgagtggagatcttgtacagaggctcttgggtaccgtgtgccgacgacagctgggacatcaatgatgccaatgtggtctgcagacagctcggttgtggctctgctctgtctgctccaggaaatgcttggtttggtcagggttcagggctcattgtcctggatgatgtgtcttgctctgggtatgagtcccacctgtggaattgtcgtcaccctggctggcttgttcataattgtcgtcatgttgaggatgcaggagtcatttgctcactccctgatccgactccctctcctggtccagtttggacaagtcctccttttgtaaactatacttgtggaggtttcctgactggactctctgggcaattttctagcccatactaccctgggagctatcctaataatgccagatgtttgtggaacattgaagtcccaaacaactaccgcgtgactgtggtcttcagagatgtgcagctggaagggggctgcaactatgactatatagagatttttgatggcccccaccacagttcacctctcattgcccgggtttgtgatggggccatgggctctttcacttcaacatccaacttcatgtcagttcgcttcaccactgatcacagtgttactcgaagagggttccgggctgactactactcagactttgacaataataccaccaatctcctttgtctgtcaaatcacatgagagccagtgtgagcaggagctaccttcagtccatgggctactcctccagggatcttgtcattcctggttggaacgtgagttaccagtgtcagcctcagataacacaaagggaggtcatattcacaattccctacacaggctgcggtactaccaaacaggctgacaacgagaccatcaactactccaacttcctcaaagcggctgtttcaaatggcatcatcaaaaggagaaaggatctccacatccatgtcagctgcaagatgcttcagaacacctgggtcaacaccatgtacatcaccaacaacacagtcgagatccaggaagtccagtatggcaattttgacgtgaatatttccttttatacatcctcctccttcttgtatccagtgaccagcagcccatattatgtggatctggaccagaatttgtaccttcaggccgaagtcctccattcggatacctctttggctctgtttgtggacacctgtgtggcttcgccacatcccaatgacttctcgtctttgacatatgatctcatcaggagtggatgcatacgagatgaaacttaccaatcttactcctcgccctcaccacgcatcacccgctttaaattcagttctttccacttcctgaaccgcttcccctcagtatacctacagtgtaaactggtggtttgtcgagcaaacgatgtctcctcacggtgctacagaggatgtgtagtaaggtccaagagggatgtaggctcctaccaagaaaaggtggatgttgttctgggacccatccagttgcaatctcccagcaaagaaaagaggagtctcgacttggcagtggcagatgtggagaagccagccagctcccaggaggtctatcccactgcagccatctttggtggagtcttcctggccctggttgtagctgtggcagccttcacactgggaaggaagacacgcactgcccgtggtcaacctccaagtactaagatgtgaagcaaaacaacccagacattggtcccaaatgcatagattcccagaaaagatggaagtcaggagtgtctaatgcctggcacccagatacacgatgactaggcttcccttagcacaaatgtgtggccgagtatgatcagatggtaaagaagaaaggtgggggccaagttttcccagggtctagaggctgaaggctgggaagaatgtcataggagaatgagatcagtgtctacaataacaggcaactgtgagccaaacattggcatcaccatcctttctctagctagaatttccctttcccccttttatactgacttttttgaactgtagtgttaaatggacctttccgtacaacaaactaaaataaagaatctttttcca

SEQ ID NO: 8372 - protein, 1291 aa, Rattus norvegicus
  misc_feature (1)..(1291): Xaa=Unknown amino acid
MCDDSWDINDANVVCRQLGCGWALSAPGSAQFGQGLGPIVLDDVACRGHEAYLWSCSHRGWLSHNCGHQEDAGVICSDSQTSSPTPGWWNPGGTNNDVIYDTQETTETSQTSSPTPDWWNHGGTINDVIYDTQETTEGTDSGLAVRLVNGGDRCRGRVEILYQGSWGTVCDDSWDINDANVVCRQLGCGWALSAPGSAQFGQGSGSIVLDDVACRGHEAYLWSCSHRGWLSHNCGHQEDAGVICSYSQTSSPTPDSQTSSPTPGWWNPGGTNNDVSYGPEQTTDATDSGLAVRLVNGGDRCQGRVEILYQGSWGTVCDDSWDTKDANVVCRQLVCGWALSAPGSAHFGQGSGSIVLDDVACTGHEAYLWSCSHRGWLSHNCGHHEDAGVICSDAQTQSTTWPDMWPTTTPETTTDWWTTKYSSSVPTTQFPTIADWWTTPSPEYTCGGLLTLPYGQFSSPYYPGSYPNNARCLWKIFVSSMNRVTVVFTDVQLEGGCNYDYILVFDGPENNSSLIARVCDGFNGSFTSTQNFMSVVFITDGSVTRRGFQADYYSTPISTSTTSPTTFPIVTDWWTTPSPEYTCGGLLTLPYGQFSSPYYPGSYPNNARCLWKIFVPSMNRVTVVFTDVQLEGGCNYDYILGFDGPEYNSSLIARVCDGSNGSFTSTQNFMSVVFITDGSVTRRGFQADYYSTPIRTSTTPPTTFPIITGNDSSLVLRLVNGTNRCEGRVEILYRGSWVPCADDSWDINDANVVCRQLGCGSALSAPGNAWFGQGSGLIVLDDVSCSGYESHLWNCRHPGWLVHNCRHVEDAGVICSLPDPTPSPGPVWTSPPFVNYTCGGFLTGLSGQFSSPYYPGSYPNNARCLWNIEVPNNYRVTVVFRDVQLEGGCNYDYIEIFDGPHHSSPLIARVCDGAMGSFTSTSNFMSVRFTTDHSVTRRGFRADYYSDFDNNTTNLLCLSNHMRASVSRSYLQSMGYSSRDLVIPGWNVSYQCQPQITQREVIFTIPYTGCGTTKQADNETINYSNFLKAAVSNGIIKRRKDLHIHVSCKMLQNTWVNTMYITNNTVEIQEVQYGNFDVNISFYTSSSFLYPVTSSPYYVDLDQNLYLQAEVLHSDTSLALFVDTCVASPHPNDFSSLTYDLIRSGCIRDETYQSYSSPSPRITRFKFSSFHFLNRFPSVYLQCKLVVCRANDVSSRCYRGCVVRSKRDVGSYQEKVDVVLGPIQLQSPSKEKRSLDLAVADVEKPASSQEVYPTAAIFGGVFLALVVAVAAFTLGRKTRTARGQPPSTKMX

SEQ ID NO: 8373 - DNA, 7683 bp, Homo sapiens
  ref <308>: DATABASE ACCESSION NUMBER: EMBL / AJ243212
  ref <309>: DATABASE ENTRY DATE: 1999-09-17
tttatagcagcagcagaaatataccaccctagtggacacacctccttttagctaggtacctataaatgtccaggattttctattcaattgagaagaacccagcaaaatggggatctccacagtcatccttgaaatgtgtcttttatggggacaagttctatctacaggtgggtggatcccaaggactacagactacgcttcactgattccctcggaggtgcccttggatacaactgtagcagaaggttctccatttccctcggagttgaccctggagtcaactgtagcagaaggttctccgatttccttggagtcaaccctggagacaactgtagcagaaggttctctgattccctcagagtcaaccctggagtcaactgtagcagaaggatctgattctggtttggccctgaggctggtgaatggagatggcaggtgtcagggccgagtggagatcctataccgaggctcctggggcgccgtgtgtgatgacagctgggacaccaatgatgccaacgtggtctgtaggcagctgggttgtggctgggccatgtcagctccaggaaatgcctggtttggccagggctcaggacccattgccctggatgatgtgcgctgctcaggacacgaatcctacctgtggagctgcccccacaatggctggctctcccataactgtggccatggtgaagatgctggtgttatctgctcagctgcccagcctcagtcaacactcaggccagaaagttggcctgtcaggatatcaccacctgtacccacagaaggatctgaatccagtttggccctgaggctggtgaatggaggcgacaggtgtcgaggccgggtggaggtcctataccgaggctcctggggcaccgtgtgtgatgactactgggacaccaatgatgccaatgtggtctgcaggcagctgggctgtggctgggccatgtcagccccaggaaatgcccagtttggccagggctcaggacccattgtcctggatgatgtgcgctgctcaggacacgagtcctacctgtggagctgcccccacaatggctggctcacccacaactgtggccatagtgaagacgctggtgtcatctgctcagctccccagtcccggccgacacccagcccagatacttggccgacctcacatgcatcaacagcaggacctgaatccagtttggccctgaggctggtgaatggaggtgacaggtgtcagggccgagtggaggtcctataccgaggctcctggggcaccgtgtgtgatgatagctgggacaccagtgacgccaatgtggtctgccggcagctgggctgtggctgggccacgtcagccccaggaaatgcccggtttggccagggttcaggacccattgtcctggatgacgtgcgctgctcaggctatgagtcctacctgtggagctgcccccacaatggctggctctcccataactgtcagcacagtgaagacgctggtgtcatctgctcagctgcccactcctggtcgacgcccagtccagacacgttgccgaccatcaccttacctgcatcgacagtaggatctgaatccagtttggccctgaggctggtgaatggaggtgacaggtgtcagggccgagtggaggtcctataccgaggctcctggggcaccgtgtgtgatgacagctgggacaccaatgatgccaatgtggtctgcaggcagctgggctgtggctgggccatgttggccccaggaaatgcccggtttggtcagggctcaggacccattgtcctggatgacgtgcgctgctcagggaatgagtcctacttgtggagctgcccccacaatggctggctctcccataactgtggccatagtgaagacgctggtgtcatctgctcaggacctgaatccagtttggccctgaggctggtgaatggaggtgacaggtgtcagggccgagtggaggtcctataccgaggctcttggggcaccgtgtgtgatgacagctgggacaccaatgatgccaatgtggtctgcaggcagctgggctgtggctgggccatgtcagccccaggaaatgcccggtttggtcagggctcaggacccattgtcctggatgatgtgcgctgctcaggacatgagtcctacctgtggagctgccccaacaatggctggctctcccacaactgtggccatcatgaagatgctggtgtcatctgctcagctgcccagtcccggtcgacgcccaggccagacacgttgtcgaccatcacgttacctccatcgacagtaggatctgaatccagtttgaccctgaggctggtgaatggaagtgacaggtgtcagggccgagtagaggtcctataccgaggctcctggggcaccgtgtgtgatgacagctgggataccaatgatgccaatgtagtctgcaggcagctgggctgtggctgggccacgtcggccccaggaaatgcccggtttggccagggctcaggacccattgttctggatgatgtgcgctgctcaggacacgagtcctacctgtggagctgcccccacaatggctggctctcccacaactgtggccatcatgaagatgctggtgtcatctgctcagtttcccagtcccggccgacacccagtccagatacttggccgacctcacatgcatcaacagcaggacctgaatccagcttggccctgaggctggtgaatggaggtgacaggtgtcagggccgagtggaggtcctataccgaggctcctggggcaccgtgtgtgatgatagctgggacaccagtgacgccaatgtggtctgccggcagctgggctgtggctgggccacgtcagccccaggaaatgcccggtttggccagggttcaggacccattgtcctggatgacgtgcgctgctcaggctatgagtcctacctgtggagctgcccccacaatggctggctctcccataactgtcagcacagtgaagacgctggtgtcatctgctcagctgcccactcctggtcgacgcccagtccagacacattgccgaccatcaccttgcctgcatcgacagtaggatctgaatccagtttggccctgaggctggtgaatggaggtgacaggtgtcagggccgagtggaggtcctataccaaggctcctggggcaccgtgtgcgatgacagctgggacaccaatgatgccaatgtcgtctgcaggcaactgggctgtggctgggccatgtcagccccaggaaatgcccggtttggtcagggctcaggacccattgtcctggatgatgcgcgctgctcaggacacgagtcttacctgtggagctgcccccacaatggctggctctcccacaactgtggccatagtgaagacgctggtgtcatctgctcagcttcccagtcccggccaacacctagtccagacacttggccaacctcacatgcatcaacagcaggatctgaatccagtttggccctgaggctggtgaatggaggtgacaggtgtcagggccgagtggaggtcctataccgaggctcctggggcaccgtgtgtgatgactactgggacaccaatgatgccaatgtggcttgcaggcagctgggctgtggctgggccatgtcagccccaggaaatgcccggtttggccagggttcaggacccattgtcctggatgatgtgcgctgctcaggacatgagtcctatctgtggagctgcccccacaatggctggctctcccacaactgtggccatcatgaagacgctggtgtcatctgctcagcttcccagtcccagccgacacccagcccagacacttggccaacctcacatgcatcaacagcaggatctgaatccagtttggccctgaggctggtgaatggaggtgacaggtgtcagggccgagtggaggtcctataccgaggctcctggggcaccgtgtgtgatgactactgggacaccaatgatgccaatgtggtttgcaggcagctgggctgtggctgggccacgtcagccccaggaaatgcccggtttggccagggttcaggacccattgtcctggatgatgtgcgctgctcaggacatgagtcctatctgtggagctgcccccacaatggctggctctcccacaactgtggccatcatgaagacgctggtgtcatctgctcagcttcccagtcccagccgacacccagcccagacacttggccaacctcacatgcatcaacagcaggatctgaatccagtttggccctgaggctggtgaatggaggtgacaggtgtcagggccgagtggaggtcctataccgaggctcctggggcaccgtgtgtgatgactactgggacaccaatgatgccaatgtggtttgcaggcagctgggctgtggctgggccacgtcagccccaggaaatgcccggtttggccagggttcaggacccattgtcctggatgatgtgcgctgctcaggacatgagtcctatctgtggagctgcccccacaatggctggctctcccacaactgtggccatcatgaagacgctggtgtcatctgctcagctttccagtcccagccgacacccagcccagacacttggccaacctctcgtgcatcaacagcaggatctgaatccactttggccctgagactggtgaatggaggtgacaggtgtcgaggccgagtggaggtcctataccaaggctcctggggcaccgtgtgtgatgactactgggacaccaatgatgccaacgtggtctgcaggcagctgggctgtggctgggccatgtcagccccaggaaatgcccagtttggccagggctcaggacccattgtcctggatgatgtgcgctgctcaggacacgagccttacctgtggagctgcccccacaatggctggctctcccacaactgtggccatcatgaagatgctggtgtcatctgctcagctgctcagtcccagtcaacgcccaggccagatacttggctgaccaccaacttaccggcattgacagtaggatctgaatccagtttggctctgaggctggtgaatggaggtgacaggtgtcgaggccgagtggaggtcctgtatcgaggctcctggggaaccgtgtgtgatgacagctgggacaccaatgatgccaatgtggtctgcaggcagctgggctgtggctgggccatgtcggccccaggaaatgcccggtttggccagggctcaggacccattgtcctgggtgatgtgcgctgctcagggaatgagtcctacctgtggagctgcccccacaaaggctggctcacccacaactgtggccatcacgaagacgctggtgtcatctgctcagccacccaaataaattctactacgacagattggtggcatccaacaactacaaccactgcaagaccctcttcaaattgtggtggcttcttattctatgccagtgggacattctccagcccatcctaccctgcatactaccccaacaatgctaagtgtgtttgggaaatagaagtgaattctggttatcgcataaacctgggcttcagtaatctgaaattggaggcacaccataactgcagttttgattatgttgaaatctttgatggatcattgaatagcagtctcctgctggggaaaatctgtaatgataccaggcaaatatttacatcttcttacaaccgaatgaccattcactttcgaagtgacatcagtttccaaaacactggctttttggcttggtataactccttcccaagcgatgccaccttgaggttggtcaatttaaattcatcctatggtctatgtgccgggcgtgtagaaatttaccatggtggcacctggggggcagtttgtgatgactcctggaccattcaggaagctgaggtggtctgcagacagctagggtgtggacgtgcagtttcagcccttggaaatgcatattttggctctggctctggccccatcaccctggacgatgtagagtgctcagggacggaatccactctctggcagtgccggaaccgaggctggttctcccacaactgtaatcatcgtgaagatgctggtgtcatctgctcaggaaaccatctatcgacacctgctccttttctcaacatcacccgtccaaacaactattcctgcggaggcttcctatcccaaccatcaggggacttttccagcccattctatcccgggaactatccaaacaatgccaagtgtgtgtgggacattgaggtgcaaaacaactaccgtgtgactgtgatcttcagagatgtccagcttgaaggtggctgcaactatgattatattgaagttttcgatggcccctaccgcagttcccctctcattgctcgagtttgtgatggggccagaggctccttcacttcttcctccaacttcatgtccattcgcttcatcagtgaccacagcatcacaaggagagggttccgggctgagtactactccagtccctccaatgacagcaccaacctgctctgtctgccaaatcacatgcaagccagtgtgagcaggagctatctccaatccttgggcttttctgccagtgaccttgtcatttccacctggaatggatactacgagtgtcggccccagataacgccgaacctggtgatattcacaattccctactcaggctgcggcaccttcaagcaggcagacaatgacaccatcgactattccaacctcctcacagcagctgtctcaggtggcatcatcaagaggaggacagacctccgtattcacgtcagctgcagaatgcttcagaacacctgggtcgacaccatgtacattgctaatgacaccatccacgttgctaataacaccatccaggtcgaggaagtccagtatggcaattttgacgtgaacatttccttttatacttcctcatctttcttgtatcctgtgaccagccgcccttactacgtggacctgaaccaggacttgtacgttcaggctgaaatcctccattctgatgctgtactgaccttgtttgtggacacctgcgtggcatcaccatactccaatgacttcacgtctttgacttatgatctaatccggagtggatgcgtgagggatgacacctacggaccctactcctcgccatctcttcgcattgcccgcttccggttcagggccttccacttcctgaaccgcttcccctccgtgtacctgcgttgtaaaatggtggtgtgcagagcgtatgacccctcttcccgctgctaccgaggctgtgtgttgaggtcgaagagggatgtgggctcctaccaggaaaaggtggacgtcgtcctgggtcccatccagctgcagacccccccacgccgagaagaggagcctcggtaggtggtcgctctcagaccccattgtccaccggggcgcagacccctgactcggggacttgggatgttcctcttggtgtcatattccaactcagattgagccctacattgtgctgcacctggtcatacggagttgaatcagacctggttcccgcctcccccaaggctcatggtccttggaggacccgttgcagggtgaggtcaagagagttctgacctggatggcccatagacctgacgtcccagaatccatgcttctcatctgcaaaatgaaaatgtcaatacttacttcttagcactgttgagagggttacttacataaaggaattttggtgaaactgc

SEQ ID NO: 8374 - protein, 2413 aa, Homo sapiens
  misc_feature (1)..(2413): Xaa=Unknown amino acid
MGISTVILEMCLLWGQVLSTGGWIPRTTDYASLIPSEVPLDTTVAEGSPFPSELTLESTVAEGSPISLESTLETTVAEGSLIPSESTLESTVAEGSDSGLALRLVNGDGRCQGRVEILYRGSWGAVCDDSWDTNDANVVCRQLGCGWAMSAPGNAWFGQGSGPIALDDVRCSGHESYLWSCPHNGWLSHNCGHGEDAGVICSAAQPQSTLRPESWPVRISPPVPTEGSESSLALRLVNGGDRCRGRVEVLYRGSWGTVCDDYWDTNDANVVCRQLGCGWAMSAPGNAQFGQGSGPIVLDDVRCSGHESYLWSCPHNGWLTHNCGHSEDAGVICSAPQSRPTPSPDTWPTSHASTAGPESSLALRLVNGGDRCQGRVEVLYRGSWGTVCDDSWDTSDANVVCRQLGCGWATSAPGNARFGQGSGPIVLDDVRCSGYESYLWSCPHNGWLSHNCQHSEDAGVICSAAHSWSTPSPDTLPTITLPASTVGSESSLALRLVNGGDRCQGRVEVLYRGSWGTVCDDSWDTNDANVVCRQLGCGWAMLAPGNARFGQGSGPIVLDDVRCSGNESYLWSCPHNGWLSHNCGHSEDAGVICSGPESSLALRLVNGGDRCQGRVEVLYRGSWGTVCDDSWDTNDANVVCRQLGCGWAMSAPGNARFGQGSGPIVLDDVRCSGHESYLWSCPNNGWLSHNCGHHEDAGVICSAAQSRSTPRPDTLSTITLPPSTVGSESSLTLRLVNGSDRCQGRVEVLYRGSWGTVCDDSWDTNDANVVCRQLGCGWATSAPGNARFGQGSGPIVLDDVRCSGHESYLWSCPHNGWLSHNCGHHEDAGVICSVSQSRPTPSPDTWPTSHASTAGPESSLALRLVNGGDRCQGRVEVLYRGSWGTVCDDSWDTSDANVVCRQLGCGWATSAPGNARFGQGSGPIVLDDVRCSGYESYLWSCPHNGWLSHNCQHSEDAGVICSAAHSWSTPSPDTLPTITLPASTVGSESSLALRLVNGGDRCQGRVEVLYQGSWGTVCDDSWDTNDANVVCRQLGCGWAMSAPGNARFGQGSGPIVLDDARCSGHESYLWSCPHNGWLSHNCGHSEDAGVICSASQSRPTPSPDTWPTSHASTAGSESSLALRLVNGGDRCQGRVEVLYRGSWGTVCDDYWDTNDANVACRQLGCGWAMSAPGNARFGQGSGPIVLDDVRCSGHESYLWSCPHNGWLSHNCGHHEDAGVICSASQSQPTPSPDTWPTSHASTAGSESSLALRLVNGGDRCQGRVEVLYRGSWGTVCDDYWDTNDANVVCRQLGCGWATSAPGNARFGQGSGPIVLDDVRCSGHESYLWSCPHNGWLSHNCGHHEDAGVICSASQSQPTPSPDTWPTSHASTAGSESSLALRLVNGGDRCQGRVEVLYRGSWGTVCDDYWDTNDANVVCRQLGCGWATSAPGNARFGQGSGPIVLDDVRCSGHESYLWSCPHNGWLSHNCGHHEDAGVICSAFQSQPTPSPDTWPTSRASTAGSESTLALRLVNGGDRCRGRVEVLYQGSWGTVCDDYWDTNDANVVCRQLGCGWAMSAPGNAQFGQGSGPIVLDDVRCSGHEPYLWSCPHNGWLSHNCGHHEDAGVICSAAQSQSTPRPDTWLTTNLPALTVGSESSLALRLVNGGDRCRGRVEVLYRGSWGTVCDDSWDTNDANVVCRQLGCGWAMSAPGNARFGQGSGPIVLGDVRCSGNESYLWSCPHKGWLTHNCGHHEDAGVICSATQINSTTTDWWHPTTTTTARPSSNCGGFLFYASGTFSSPSYPAYYPNNAKCVWEIEVNSGYRINLGFSNLKLEAHHNCSFDYVEIFDGSLNSSLLLGKICNDTRQIFTSSYNRMTIHFRSDISFQNTGFLAWYNSFPSDATLRLVNLNSSYGLCAGRVEIYHGGTWGAVCDDSWTIQEAEVVCRQLGCGRAVSALGNAYFGSGSGPITLDDVECSGTESTLWQCRNRGWFSHNCNHREDAGVICSGNHLSTPAPFLNITRPNNYSCGGFLSQPSGDFSSPFYPGNYPNNAKCVWDIEVQNNYRVTVIFRDVQLEGGCNYDYIEVFDGPYRSSPLIARVCDGARGSFTSSSNFMSIRFISDHSITRRGFRAEYYSSPSNDSTNLLCLPNHMQASVSRSYLQSLGFSASDLVISTWNGYYECRPQITPNLVIFTIPYSGCGTFKQADNDTIDYSNLLTAAVSGGIIKRRTDLRIHVSCRMLQNTWVDTMYIANDTIHVANNTIQVEEVQYGNFDVNISFYTSSSFLYPVTSRPYYVDLNQDLYVQAEILHSDAVLTLFVDTCVASPYSNDFTSLTYDLIRSGCVRDDTYGPYSSPSLRIARFRFRAFHFLNRFPSVYLRCKMVVCRAYDPSSRCYRGCVLRSKRDVGSYQEKVDVVLGPIQLQTPPRREEEPRX

SEQ ID NO: 8375 - DNA, 4344 bp, Rattus norvegicus; identical to SEQ ID NO: 8371
  ref <308>: DATABASE ACCESSION NUMBER: EMBL / U32681
  ref <309>: DATABASE ENTRY DATE: 2000-03-04

SEQ ID NO: 8376 - protein, 1291 aa, Rattus norvegicus; identical to SEQ ID NO: 8372
  misc_feature (1)..(1291): Xaa=Unknown amino acid

SEQ ID NO: 8377 - DNA, 7683 bp, Homo sapiens; identical to SEQ ID NO: 8373
  ref <308>: DATABASE ACCESSION NUMBER: EMBL / AJ243212
  ref <309>: DATABASE ENTRY DATE: 1999-09-17

SEQ ID NO: 8378 - protein, 2413 aa, Homo sapiens; identical to SEQ ID NO: 8374
  misc_feature (1)..(2413): Xaa=Unknown amino acid

SEQ ID NO: 8379 - DNA, 2107 bp, Rattus norvegicus
  ref <308>: DATABASE ACCESSION NUMBER: EMBL / U33553
  ref <309>: DATABASE ENTRY DATE: 2000-03-04
gggctccgcgcaatgggccgagctggaggcgggggcccgggctgggggccgccgccagtgctgctgcttctgggggtcacgctggtgctcaccgctggggctgtaccggcacgggaagcaggcagtgcgatcgaggctgaagagctggtgaggagcggccttgcatgggagtcgcgtgccaatgacacgcgggaggaagctggcctgccagcagcaggggaagatgagacctcgtggacagagcggggcagtgagctggctgcggtgggccctggggtcgggccagaggagacactagaggcatcggctgcagtgactgggactgcctggctagaggcagatggcacaggcctgggtggagtgactgcagaggctggtagtggcgacgcccagacccttccagctacactccaggctcctgacgaggcccttgggtcatctacaatgccccctgccatccctgaggctactgaagccagtggacctccctcccccaccctccgtgataaacctagcctagtccctgaactccctaaggagatccccttggaagtttggctgaacctgggaggcagcacacctgaccctcaaaggccagagcctacttttccccttcagggcactctagagacacaaccagcctcagatataattgacattgattactttgaaggattggatagcgagggccgaggcacagacatgggcaggttcccgggctcaccaggaacctcagaaaatcaccctgatactgaaggagagaccccctcctggagcctgcttgacttatatgatgacttcaccccctttgatgagtctgatttctaccccaccacatccttctatgatgacttggaagaggaggaagaggaggaggaggataaggatgcagtgggaggcggagacctggaagatgaaagtgacctcctcctgccctctcagaagcctggtgtggggcctgggacgggacagcccaccagtcgatggcatgcagttcctccacagcatactctggggatggtacctggtggcagcatctctcttaggccccgccctggagatccaggcaaggacctggccacgagcgaaaatggaacagagtgccgagttggctttgtcagacacaatggctcctgtcggtcagtctgtgacctcttcccgagttactgtcacaatggcggccaatgctacctggtggagaacataggggctttctgcaggtgtaacacccaggactatatctggcacaaggggatgcgctgtgagtccatcatcaccgacttccaggtgatgtgcgtggccgtcggctcggctgcgttggtgctgctccttctgttcatgatgactgtgttctttgccaagaaactctatctgctcaagactgagaacaccaagctgaggaggaccaacaaattccggaccccatctgagctccacaatgataacttctccctctccaccattgccgagggctcccatccaaatgatgaccccagcgctccccacaaaatccaggaagctctcaagtcccgcctgaaggaggaagagtcctttaacatccagaactccatgtcacccaaactcgagggtggcaaaggtgaccaggatgacttggaggtgaactttctccagaataacctgacctgagacggaggagggagaggggagaggggggtgggggagggaaggaccgtggtctcctctcgggcagccggctcctcataaccatttgttaagcttttcctttgctgatctcatggcatgctctgatgtgttttgtaggagggggaaactcttaaaataagcaaagaaaccgagcagggttgcgtacattggatggttctcgtctgtgctctttgtacgttgcttctacagctgtgatttctaagcctatgctggcactcagctgacttgtttttttggttttttggtttttgttttttctgggtttttgttttgttttgttttgttttgtttctttgttttttggtttggtttttttttgtttgtttgtttttgtttttttgtactttgacccacctttttttggaataccagtttaaaaaaacaaaacaaacaaggttcttgaaataaaactttttaaaaa

SEQ ID NO: 8380 - protein, 544 aa, Rattus norvegicus
  ref <308>: DATABASE ACCESSION NUMBER: SWISS-Prot / AAC98537
  ref <309>: DATABASE ENTRY DATE: 2003-02-01
MGRAGGGGPGWGPPPVLLLLGVTLVLTAGAVPAREAGSAIEAEELVRSGLAWESRANDTREEAGLPAAGEDETSWTERGSELAAVGPGVGPEETLEASAAVTGTAWLEADGTGLGGVTAEAGSGDAQTLPATLQAPDEALGSSTMPPAIPEATEASGPPSPTLRDKPSLVPELPKEIPLEVWLNLGGSTPDPQRPEPTFPLQGTLETQPASDIIDIDYFEGLDSEGRGTDMGRFPGSPGTSENHPDTEGETPSWSLLDLYDDFTPFDESDFYPTTSFYDDLEEEEEEEEDKDAVGGGDLEDESDLLLPSQKPGVGPGTGQPTSRWHAVPPQHTLGMVPGGSISLRPRPGDPGKDLATSENGTECRVGFVRHNGSCRSVCDLFPSYCHNGGQCYLVENIGAFCRCNTQDYIWHKGMRCESIITDFQVMCVAVGSAALVLLLLFMMTVFFAKKLYLLKTENTKLRRTNKFRTPSELHNDNFSLSTIAEGSHPNDDPSAPHKIQEALKSRLKEEESFNIQNSMSPKLEGGKGDQDDLEVNFLQNNLT

SEQ ID NO: 8381 - DNA, 1728 bp, Homo sapiens
  ref <308>: DATABASE ACCESSION NUMBER: EMBL / AF059274
  ref <309>: DATABASE ENTRY DATE: 2001-09-04
agcgccatggggcgagccgggggcgggggcccgggccgggggccgccgccactgctgctgtttctgggggccgcgctggtcctggcctctggggccgtgccggcgcgtgaggcgggcagcgcggttgaggccgaagagctggtgaagggcagcccggcgtgggagccgcctgccaacgacacgcgggaagaagccggcccaccagcggctggggaagatgaggcgtcgtggacggcgcccggtggcgagctggccgggccagaagaggtgctgcaggagtcggctgcggtgaccggcaccgcctggctggaagctgacagcccaggcctgggaggagtgaccgcagaggcgggcagcggcgatgcccaggcccttccagctacgctccaggctccccacgaggtcctcgggcagtcaatcatgccccctgccattcctgaggctacagaggccagcgggccaccctcccccacccccggcgacaagctgagcccagcttctgaactccccaaggagagccccttggaggtttggctgaacctggggggcagcacacccgaccctcaagtgccagagctgacttacccatttcagggcaccctggagccccaaccggcatcagatatcattgacatcgactacttcgaaggactggatggtgagggtcgtggcgcagatctggggagcttcccagggtcaccaggaacctcagagaaccaccctgatactgagggagagaccccttcctggagcctgcttgacttatacgatgatttcacccccttcgatgaatctgatttctaccccaccacatccttttatgatgacttggatgaagaggaggaggaagaggaggatgacaaagatgcagtaggaggtggagacctagaagatgaaaatgagcttctagtgcccactgggaagcctggtctggggcccgggacaggccagcccaccagtcggtggcatgctgtccctccacagcacactctggggtcggtccccggcagcagcatcgccctcaggccccgcccaggagagccaggcagggacttggcctccagtgaaaatggcactgagtgccgcagtggctttgtgcggcataacggctcctgccggtcagtgtgcgacctcttcccaagttactgtcacaatggcggccagtgctacctggtggagaacataggggccttctgcaggtgcaacacgcaggactacatctggcacaaggggatgcgctgcgagtccatcatcaccgacttccaggtgatgtgcgtggccgtgggctcggctgccctcgtcctgctcctgctcttcatgatgacggtgttctttgccaagaagctctacctgctcaagacggagaataccaagctgcgtaggaccaacaaattccggaccccatctgagctccacaatgataacttctccctctccaccattgccgagggctctcacccaaatgatgatcctagtgctccccacaaaatccaggaggttctcaagtcctgcctgaaagaggaggagtcatttaacatccagaactccatgtcgcccaaacttgagggtggcaaaggtgaccaggctgacttggatgtgaactgtcttcagaataatttaacctaaagcagagcaagaagagaggaagcggggtagtgggtgggggtagggaagaaacattatctcctcttgtacagagtctatttcttgtaaccatttgttaaactc

SEQ ID NO: 8382 - protein, 539 aa, Homo sapiens
  ref <308>: DATABASE ACCESSION NUMBER: SWISS-Prot / AAC69612
  ref <309>: DATABASE ENTRY DATE: 2003-02-01
MGRAGGGGPGRGPPPLLLFLGAALVLASGAVPAREAGSAVEAEELVKGSPAWEPPANDTREEAGPPAAGEDEASWTAPGGELAGPEEVLQESAAVTGTAWLEADSPGLGGVTAEAGSGDAQALPATLQAPHEVLGQSIMPPAIPEATEASGPPSPTPGDKLSPASELPKESPLEVWLNLGGSTPDPQVPELTYPFQGTLEPQPASDIIDIDYFEGLDGEGRGADLGSFPGSPGTSENHPDTEGETPSWSLLDLYDDFTPFDESDFYPTTSFYDDLDEEEEEEEDDKDAVGGGDLEDENELLVPTGKPGLGPGTGQPTSRWHAVPPQHTLGSVPGSSIALRPRPGEPGRDLASSENGTECRSGFVRHNGSCRSVCDLFPSYCHNGGQCYLVENIGAFCRCNTQDYIWHKGMRCESIITDFQVMCVAVGSAALVLLLLFMMTVFFAKKLYLLKTENTKLRRTNKFRTPSELHNDNFSLSTIAEGSHPNDDPSAPHKIQEVLKSCLKEEESFNIQNSMSPKLEGGKGDQADLDVNCLQNNLT

SEQ ID NO: 8383 - DNA, 2107 bp, Rattus norvegicus; identical to SEQ ID NO: 8379
  ref <308>: DATABASE ACCESSION NUMBER: EMBL / U33553
  ref <309>: DATABASE ENTRY DATE: 2000-03-04

SEQ ID NO: 8384 - protein, 544 aa, Rattus norvegicus; identical to SEQ ID NO: 8380
  ref <308>: DATABASE ACCESSION NUMBER: Refseq / NP_062157
  ref <309>: DATABASE ENTRY DATE: 2002-11-05

SEQ ID NO: 8385 - DNA, 1728 bp, Homo sapiens; identical to SEQ ID NO: 8381
  ref <308>: DATABASE ACCESSION NUMBER: EMBL / AF059274
  ref <309>: DATABASE ENTRY DATE: 2001-09-04

SEQ ID NO: 8386 - protein, 539 aa, Homo sapiens; identical to SEQ ID NO: 8382
  ref <308>: DATABASE ACCESSION NUMBER: Refseq / NP_006565
  ref <309>: DATABASE ENTRY DATE: 2002-03-22

SEQ ID NO: 8387 - DNA, 1683 bp, Rattus norvegicus
  ref <308>: DATABASE ACCESSION NUMBER: EMBL / U34843
  ref <309>: DATABASE ENTRY DATE: 2000-03-04
gtcgaccaattcggcacgagggacagggcagcgattgacgcggcagctggaggatgaagaaggagcatgttagtcactgtcagttctccgcgtggtacccactcttccgaagccttaccatcaagagtgtcatcctcccgcttcctcagaatgtgaaagactatttacttgacgacgggactctggtggtctcaggaagggaagacccaccaacatgctctcagccagacagtggtgacgaagcagaggaaacacagtggtccgatgatgagagcacagccacacttacggcacccgagtttcctgagttcaatactcaagtccaagaagctatcaattcgctggggggcagtgtcttccctaagcttaactggagtgccccaagggatgcatactggatagcaatgaacagttctctgaagtgtaaaagcctcagtgacatcttcctgcttttcaagagttcggacttcatcactcatgacttcacacagccgtttattcattgtaatgatgattctccagatccttgtatagagtacgagcttgttctccgaaaatggtgtgaattaatccctggggctgagttccgatgttttgtcaaggaaaacaagcttattggtatttctcagagggactacacgcagtactatgatcatatctctaagcaaaaagaagaaatttgcagatgcattcaagactttttcaaggaacacctgcagtacaaattcttagatgaagactttgtgtttgatatatacagagacagtaggggcaaggtgtggctgatcgactttaacccatttggggaggtcacagactctctgctgtttacttgggaagagctgacatcggagaacaatctgcgaggcgacgtcagtgaggcggacgctctggagcaggattctccagccttccgttgtacgaacagtgaagtcacggtccagcccagcccctatctgagctacggcctgcccaaggacttcgtagacctttccaccggggaagatgctcacaagctcatagattttcttaagctgaaaagaaatcagcaagaggacgactgagcgctgcttggagaataagtcaagagggaaacagcttttcagaagcctcatatagaacacaacttcccagtgacccaaactaggtgcagatgggtgggcagtatgcaaaatcatcagcttttatattcgtgtatatttacctggagaaagatggaggacctttggtacttgtaaaagaaataacaatataataaatagatcttaaacacaaggaagcacactgtgatggtttgtatatgcttgggccagggagtggcactatgaggaggtgtggcctggttggagtagggggtgtcactatgggtgtgggctttaagaccctagtcctaactgcctggaagtcagttttttcctagctaccttcagctaagttcctcctgcaccatgcctgcctgggtgccgccatactcccaccttgatgataatggactgaaactctgaccctctgaacctgtaagccagccccagtgaaatgttgttcttataagagttgtcttggtcatggcgtctgctcacagcaactatgctaagacacacactgttctgaaaataaaataactttctacgaaaaaaaaaaaaaaaaaaaaaactcgaggtcgacctgcaggcatgcaagctt

SEQ ID NO: 8388 - protein, 337 aa, Rattus norvegicus
  misc_feature (1)..(337): Xaa=Unknown amino acid
MKKEHVSHCQFSAWYPLFRSLTIKSVILPLPQNVKDYLLDDGTLVVSGREDPPTCSQPDSGDEAEETQWSDDESTATLTAPEFPEFNTQVQEAINSLGGSVFPKLNWSAPRDAYWIAMNSSLKCKSLSDIFLLFKSSDFITHDFTQPFIHCNDDSPDPCIEYELVLRKWCELIPGAEFRCFVKENKLIGISQRDYTQYYDHISKQKEEICRCIQDFFKEHLQYKFLDEDFVFDIYRDSRGKVWLIDFNPFGEVTDSLLFTWEELTSENNLRGDVSEADALEQDSPAFRCTNSEVTVQPSPYLSYGLPKDFVDLSTGEDAHKLIDFLKLKRNQQEDDX

SEQ ID NO: 8389 - DNA, 1321 bp, Homo sapiens
  ref <308>: DATABASE ACCESSION NUMBER: EMBL / U27112
  ref <309>: DATABASE ENTRY DATE: 1998-09-09
gcccagagttccgggagggtgcaggcaggagagggaaaggcagcagcggcggcagctggaggatgaagaaggagcatgtgcttcactgccagttctccgcgtggtacccgttcttccgaggcgttaccatcaagagtgtcattcttccacttcctcagaatgtgaaggattatttactcgatgatggaactctggtggtttcaggaagggatgatccaccaacacattctcagccagacagtgatgatgaagcagaagaaatacagtggtctgatgatgagaacacagccacgcttacggcaccagaatttcctgagtttgccactaaagtccaggaagctatcaattccctcgggggcagtgtctttcctaagcttaattggagtgccccaagggatgcgtattggatagcaatgaatagttctctgaaatgtaaaaccctcagcgacatctttctgcttttcaagagttccgatttcatcactcgtgacttcactcagccgtttattcattgtactgatgattctccagatccatgtatagaatatgagctcgttctccgaaaatggtgtgaattgattcctggggctgagtttcgatgttttgtcaaggaaaacaagcttattggtatttctcaaagagactacacacaatactatgatcatatttctaaacaaaaggaagaaattcgcagatgcatacaagactttttcaagaaacacatacagtacaaattcttagatgaagactttgtgttcgatatatacagagacagtagggggaaggtgtggctcattgactttaatccatttggtgaagtcacagattcactgctgttcacctgggaagaactgatatctgagaacaacttaaacggcgattttagtgaagttgacgctcaagagcaggattccccagctttccgttgcacaaacagtgaagtgacagtccagcccagcccctatttgagttaccggctacccaaggactttgtagacctctctactggggaggacgctcacaagctaatagacttccttaagctgaagagaaatcagcaggaggacgactgatgagcgtactgtaactggagaagaggaggccccgccccaccgctccgggagctgctcatcagccgcaacttcctgccgaccctgatgcgggtgggccgagcagtgtggacatcggccactttttatattcatgtacattcacctggggaaaaaaacggagggactttgctacttgtaaaaataacataataaatagatcttaaacataggaaaaccatactgttctgataataaaatgttttctatga

SEQ ID NO: 8390 - protein, 337 aa, Homo sapiens
  misc_feature (1)..(337): Xaa=Unknown amino acid
MKKEHVLHCQFSAWYPFFRGVTIKSVILPLPQNVKDYLLDDGTLVVSGRDDPPTHSQPDSDDEAEEIQWSDDENTATLTAPEFPEFATKVQEAINSLGGSVFPKLNWSAPRDAYWIAMNSSLKCKTLSDIFLLFKSSDFITRDFTQPFIHCTDDSPDPCIEYELVLRKWCELIPGAEFRCFVKENKLIGISQRDYTQYYDHISKQKEEIRRCIQDFFKKHIQYKFLDEDFVFDIYRDSRGKVWLIDFNPFGEVTDSLLFTWEELISENNLNGDFSEVDAQEQDSPAFRCTNSEVTVQPSPYLSYRLPKDFVDLSTGEDAHKLIDFLKLKRNQQEDDX

SEQ ID NO: 8391 - DNA, 1683 bp, Rattus norvegicus; identical to SEQ ID NO: 8387
  ref <308>: DATABASE ACCESSION NUMBER: EMBL / U34843
  ref <309>: DATABASE ENTRY DATE: 2000-03-04

SEQ ID NO: 8392 - protein, 337 aa, Rattus norvegicus; identical to SEQ ID NO: 8388
  misc_feature (1)..(337): Xaa=Unknown amino acid

SEQ ID NO: 8393 - DNA, 1321 bp, Homo sapiens; identical to SEQ ID NO: 8389
  ref <308>: DATABASE ACCESSION NUMBER: EMBL / U27112
  ref <309>: DATABASE ENTRY DATE: 1998-09-09

SEQ ID NO: 8394 - protein, 337 aa, Homo sapiens; identical to SEQ ID NO: 8390
  misc_feature (1)..(337): Xaa=Unknown amino acid

SEQ ID NO: 8395 - DNA, 2222 bp, Rattus norvegicus
  ref <308>: DATABASE ACCESSION NUMBER: EMBL / U34932
  ref <309>: DATABASE ENTRY DATE: 2002-07-03
gcggccgcgtcgacgtgccatcaccagtgagtgcgggaatccgccgtttgggctgagacgatggcagctgcgccagcagccctagcgctggatccccagccccaagaggagcaaaaggatgcatccgaatcaagtgagctcagtaggcttcgtgccgaactggccggtgcactggcagaaatggaaaccatgaaggctgtagctgaggtgagcgagagcaccaaggcagaggcggtggctgcagtgcagagacagtgccaagaggaggtggcttccctgcaggccatcctgaaagactccatcagcagctacgagacccagatcgcagccctgaaacaggagcggcagcagcagcaacaggactctgaggagaaggagcgagagctgggccacctcaaacagctgctggcccgggcccaccctttggactccttggagaagcaaatggaaaaggctcacgaagactcagaaaagcttcgggagatcgtgttgcccatggagcaggagattgcagagctgaaggtgaagctgctgagggcggaagagctgatccaagagatccagagacgaccaaggcagcctgcctccctgcatggctccacagagttgcttccactatcaaggaacccctcaccaccactggaaccctcggaggaaccaagtggagacgcaggcccagctgctgaggccttcgcccacaactgtgatgacagtgcctccatctcttccttctccctcggtggggccgccggtagtgtctccctacgaggtccccaaggcctcagccccgagcaggaagagacagcttctctggtgtctactggcactctggtccccgagggcatctacctaccccctccggggtaccagcttgttccagacagccagtgggagcaactgcaggtagaggggcggcagctgcagaaggagctggaaagtgtccgccgtgagcgggatgaactgcaggaaggactgagccggagcaatgaggactgtgccaagcagatgcaggtgctcctggcccaggtccagaactcagagcagctgctccgaactctgcagggaaccgtgagccaggcccaggagcgggtgcagcggcagatggcagaactggccacttctcacaagtgcctgagccaagaggttaaaagactgaatgaagaaaatcgaggactccgggctgagcagctgccatcctccgccctccagggctcagagcagcaggaggaccaggacgaggccctgccaagctccatacaggagctacaccagctggtgcggcacacccggcagcaggctcgggccaggcagcaggcacaggagcatgaggctgagcgcctgcgcattgaaattgtgaagctgcgggaggcactagacgaggagacagcagccaaggccagtctggagggacagctgagggtgcagcgagaagagacagatgtgctggaggcctccctgtgcagcctgagaatagagacagagcgggtccaacaagagcatcacaaggcccagctcacagatctcctctccgaacagagagccaaggcactacggctgcaggctgagctggagaccagtgaacaggtgcagagggacttcgtacggctatcccaggccctacaggtgcgcctggagcagatccgccaagcagacactctggagcaagtacgtagcattctggacgaggcacccctcagggacattaaggacattaaggactcgtgaggggccaggcgagaggcctccctgctggggaagctgccccattctctaccagaactgtgaggtgttgactgcaggtctcagaatggagtccgtcagctgcaaacctggacagtggtgtcccgggccactacttccacccagggtggctggccctgccctcagggatgatacctggaagagggtcctagcctcctcccagaaccaaagctttcaggctgccatgctccctcatggatccagttctcccaccccgtcacctcgggccagcagccagtcccactctctgcgtacccagcttatggctagaagctgttggattcagtggctcctcacatagaggccctgggacacacagctgctttctggactgtatgacactaaggtttttgtccataggtacccgaaataggccccaagacataaggaagcaaggccagacttttctgtcatttattttcaataaataagcagtcagctaaaaaaaaaaaaaaaaaaaa

SEQ ID NO: 8396 - protein, 554 aa, Rattus norvegicus
  ref <308>: DATABASE ACCESSION NUMBER: SWISS-Prot / AAA79137
  ref <309>: DATABASE ENTRY DATE: 2003-02-01
MAAAPAALALDPQPQEEQKDASESSELSRLRAELAGALAEMETMKAVAEVSESTKAEAVAAVQRQCQEEVASLQAILKDSISSYETQIAALKQERQQQQQDSEEKERELGHLKQLLARAHPLDSLEKQMEKAHEDSEKLREIVLPMEQEIAELKVKLLRAEELIQEIQRRPRQPASLHGSTELLPLSRNPSPPLEPSEEPSGDAGPAAEAFAHNCDDSASISSFSLGGAAGSVSLRGPQGLSPEQEETASLVSTGTLVPEGIYLPPPGYQLVPDSQWEQLQVEGRQLQKELESVRRERDELQEGLSRSNEDCAKQMQVLLAQVQNSEQLLRTLQGTVSQAQERVQRQMAELATSHKCLSQEVKRLNEENRGLRAEQLPSSALQGSEQQEDQDEALPSSIQELHQLVRHTRQQARARQQAQEHEAERLRIEIVKLREALDEETAAKASLEGQLRVQREETDVLEASLCSLRIETERVQQEHHKAQLTDLLSEQRAKALRLQAELETSEQVQRDFVRLSQALQVRLEQIRQADTLEQVRSILDEAPLRDIKDIKDS

SEQ ID NO: 8397 - DNA, 2309 bp, Homo sapiens
  ref <308>: DATABASE ACCESSION NUMBER: Refseq / NM_024816
  ref <309>: DATABASE ENTRY DATE: 2001-03-18
gcgctccgtcaccagggagtgcgggaatccgccgtttgcgctgaggcaatggcggcagctgcgccggtggccgcggacgacgatgagcggcggcggcggccgggggctgcactggaggactcccggtcccaggaaggggcaaatggtgaggccgagtcaggtgagctcagccggcttcgggctgagctggcaggcgccctggcagaaatggaaaccatgaaggctgtggcagaggtgagcgagagcacgaaggccgaggctgtggctgcggtgcagcggcagtgccaagaggaggtggcctcgctgcaggccatcctgaaagactccatcagcagctatgaagcccagatcaccgccctgaagcaggagcgacagcagcagcagcaggactgtgaggagaaggagcgggagctgggccgcctgaagcagctgctgtcccgggcctaccccctggactccctggagaagcagatggaaaaggcccacgaggactcggagaagctgcgggagatcgtactgcccatggaaaaggagatcgaggagctgaaggcgaagctgctgagggccgaggagctgattcaggagatccagagacgtccccggcatgccccttccctgcacggctccacggagttgctgcccctgtcccgggatccatcgcccccgctggagcctctggaggagctgagcggagatgggggtccagccgctgaggccttcgctcacaactgcgatgacagcgcctccatctcctccttctcccttggcggtggggtcggcagcagctcctccctgccccaaagccgccagggcctgagccctgaacaggaagagacggcctcgctggtgtctacgggcaccctggttcccgagggcatctacctgccccctcctggctaccagctcgtcccagacactcagtgggagcagctgcagacagagggccgacagctgcagaaggacctggagagcgtcagtcgcgagcgggacgagctccaagagggcctgagacggagcaatgaggactgtgccaagcagatgcaggtgctcctggcccaggtccagaactcagagcagctgctgcggaccctgcaagggaccgtgagccaggcccaggagcgggtgcagctgcagatggcggagctggtcaccacccacaagtgcctgcaccatgaggtaaagcggttgaatgaggaaaaccaagggctccgggccgagcagctgccatcctcagccccccagggctcgcagcaggagcagggcgaggaggaatcactgcccagctctgtgccagagctgcagcagctgctgtgctgcacgcggcaagaggcgagggcccggctgcaggcccaggagcacggggccgagcgcctgcggatcgagatcgtgacgctgcgggaggctctggaggaggagacagtggccagggccagcctggaggggcagctgagggtgcagcgggaggagacagaggtgctggaggcctccctgtgcagcctgaggacagagatggagcgggtgcagcaggaacagagcaaggcccagctcccagacctcctctcagaacagagggccaaggtgctgcggctgcaggcagagctggagaccagtgagcagtgcagagggatttcgtgcgactgtcccaggccctgcaggtgcgcctagagcggatccgccaggctgagaccctggagcaagtgcgcagcatcatggatgaggcgccactcacggacgtcagggacatcaaggacacctgaggggtcaggatatccccacccccaccctgggaaagacgcctttccccactcctgaaccatgaggcctcgctctggggtcttggatggcttttccaccgtccctgagactggggttgaggggactgacgggggccaccaccgccccgccctccagcgcctcctcccagggtggctgggcctcctgttctcaggggtcacacctgggtgaggggcccaagcccctcccggaaccaaaggtgcaggctcaggcctgcggctttctggctgctgtgctgcctcctgggctccagccctcccctgcccccagcccgtcccctgcccagggcacagcggagccatgggggctgggagtccccatcagaggcagtgaggtgggccccggccctgggacaggcagctgccttctggtctgcatgacactaagacgcttgtccacagcggcgacccagacctccaagcttgcacagaggcaaggccagacttttccgtcgtttattttcaataaataagcagctcagcgcaaaaaaaaaaaaaaaaaaaaaaaaaaaaaaa

SEQ ID NO: 8398 - protein, 538 aa, Homo sapiens
  ref <308>: DATABASE ACCESSION NUMBER: Refseq / NP_079092
  ref <309>: DATABASE ENTRY DATE: 2001-03-18
MAAAAPVAADDDERRRRPGAALEDSRSQEGANGEAESGELSRLRAELAGALAEMETMKAVAEVSESTKAEAVAAVQRQCQEEVASLQAILKDSISSYEAQITALKQERQQQQQDCEEKERELGRLKQLLSRAYPLDSLEKQMEKAHEDSEKLREIVLPMEKEIEELKAKLLRAEELIQEIQRRPRHAPSLHGSTELLPLSRDPSPPLEPLEELSGDGGPAAEAFAHNCDDSASISSFSLGGGVGSSSSLPQSRQGLSPEQEETASLVSTGTLVPEGIYLPPPGYQLVPDTQWEQLQTEGRQLQKDLESVSRERDELQEGLRRSNEDCAKQMQVLLAQVQNSEQLLRTLQGTVSQAQERVQLQMAELVTTHKCLHHEVKRLNEENQGLRAEQLPSSAPQGSQQEQGEEESLPSSVPELQQLLCCTRQEARARLQAQEHGAERLRIEIVTLREALEEETVARASLEGQLRVQREETEVLEASLCSLRTEMERVQQEQSKAQLPDLLSEQRAKVLRLQAELETSEQCRGISCDCPRPCRCA

SEQ ID NO: 8399 - DNA, 2222 bp, Rattus norvegicus; identical to SEQ ID NO: 8395
  ref <308>: DATABASE ACCESSION NUMBER: EMBL / U34932
  ref <309>: DATABASE ENTRY DATE: 2002-07-03

SEQ ID NO: 8400 - protein, 554 aa, Rattus norvegicus; identical to SEQ ID NO: 8396
  ref <308>: DATABASE ACCESSION NUMBER: SWISS-Prot / AAA79137
  ref <309>: DATABASE ENTRY DATE: 2003-02-01

SEQ ID NO: 8401 - DNA, 2309 bp, Homo sapiens; identical to SEQ ID NO: 8397
  ref <308>: DATABASE ACCESSION NUMBER: Refseq / NM_024816
  ref <309>: DATABASE ENTRY DATE: 2001-03-18

SEQ ID NO: 8402 - protein, 538 aa, Homo sapiens; identical to SEQ ID NO: 8398
  ref <308>: DATABASE ACCESSION NUMBER: Refseq / NP_079092
  ref <309>: DATABASE ENTRY DATE: 2001-03-18

SEQ ID NO: 8403 - DNA, 2222 bp, Rattus norvegicus; identical to SEQ ID NO: 8395
  ref <308>: DATABASE ACCESSION NUMBER: EMBL / U34932
  ref <309>: DATABASE ENTRY DATE: 2002-07-03

SEQ ID NO: 8404 - protein, 554 aa, Rattus norvegicus; identical to SEQ ID NO: 8396
  ref <308>: DATABASE ACCESSION NUMBER: SWISS-Prot / AAA79137
  ref <309>: DATABASE ENTRY DATE: 2003-02-01

SEQ ID NO: 8405 - DNA, 2309 bp, Homo sapiens; identical to SEQ ID NO: 8397
  ref <308>: DATABASE ACCESSION NUMBER: Refseq / NM_024816
  ref <309>: DATABASE ENTRY DATE: 2001-03-18

SEQ ID NO: 8406 - protein, 538 aa, Homo sapiens; identical to SEQ ID NO: 8398
  ref <308>: DATABASE ACCESSION NUMBER: Refseq / NP_079092
  ref <309>: DATABASE ENTRY DATE: 2001-03-18

SEQ ID NO: 8407 - DNA, 2222 bp, Rattus norvegicus; identical to SEQ ID NO: 8395
  ref <308>: DATABASE ACCESSION NUMBER: EMBL / U34932
  ref <309>: DATABASE ENTRY DATE: 2002-07-03

SEQ ID NO: 8408 - protein, 554 aa, Rattus norvegicus; identical to SEQ ID NO: 8396
  ref <308>: DATABASE ACCESSION NUMBER: SWISS-Prot / AAA79137
  ref <309>: DATABASE ENTRY DATE: 2003-02-01

SEQ ID NO: 8409 - DNA, 2309 bp, Homo sapiens; identical to SEQ ID NO: 8397
  ref <308>: DATABASE ACCESSION NUMBER: Refseq / NM_024816
  ref <309>: DATABASE ENTRY DATE: 2001-03-18

SEQ ID NO: 8410 - protein, 538 aa, Homo sapiens; identical to SEQ ID NO: 8398
  ref <308>: DATABASE ACCESSION NUMBER: Refseq / NP_079092
  ref <309>: DATABASE ENTRY DATE: 2001-03-18

SEQ ID NO: 8411 - DNA, 2222 bp, Rattus norvegicus; identical to SEQ ID NO: 8395
  ref <308>: DATABASE ACCESSION NUMBER: EMBL / U34932
  ref <309>: DATABASE ENTRY DATE: 2002-07-03

SEQ ID NO: 8412 - protein, 554 aa, Rattus norvegicus; identical to SEQ ID NO: 8396
  ref <308>: DATABASE ACCESSION NUMBER: SWISS-Prot / AAA79137
  ref <309>: DATABASE ENTRY DATE: 2003-02-01

SEQ ID NO: 8413 - DNA, 2309 bp, Homo sapiens; identical to SEQ ID NO: 8397
  ref <308>: DATABASE ACCESSION NUMBER: Refseq / NM_024816
  ref <309>: DATABASE ENTRY DATE: 2001-03-18

SEQ ID NO: 8414 - protein, 538 aa, Homo sapiens; identical to SEQ ID NO: 8398
  ref <308>: DATABASE ACCESSION NUMBER: Refseq / NP_079092
  ref <309>: DATABASE ENTRY DATE: 2001-03-18

SEQ ID NO: 8415 - DNA, 2222 bp, Rattus norvegicus; identical to SEQ ID NO: 8395
  ref <308>: DATABASE ACCESSION NUMBER: EMBL / U34932
  ref <309>: DATABASE ENTRY DATE: 2002-07-03

SEQ ID NO: 8416 - protein, 554 aa, Rattus norvegicus; identical to SEQ ID NO: 8396
  ref <308>: DATABASE ACCESSION NUMBER: SWISS-Prot / AAA79137
  ref <309>: DATABASE ENTRY DATE: 2003-02-01

SEQ ID NO: 8417 - DNA, 2309 bp, Homo sapiens; identical to SEQ ID NO: 8397
  ref <308>: DATABASE ACCESSION NUMBER: Refseq / NM_024816
  ref <309>: DATABASE ENTRY DATE: 2001-03-18

SEQ ID NO: 8418 - protein, 538 aa, Homo sapiens; identical to SEQ ID NO: 8398
  ref <308>: DATABASE ACCESSION NUMBER: Refseq / NP_079092
  ref <309>: DATABASE ENTRY DATE: 2001-03-18

SEQ ID NO: 8419 - DNA, 726 bp, Rattus norvegicus
  ref <308>: DATABASE ACCESSION NUMBER: EMBL / U34963
  ref <309>: DATABASE ENTRY DATE: 2000-03-04
gcccatctctattataaaaatgtctcagagcaaccgggagctggtggttgactttctctcctacaagctctcccagaaaggatacagctggagtcagtttagcgatgtcgaagagaacaggactgaagccccagaagaaactgaaccagaaagggagacccccagtgccatcaatggcaacccatcctggcacctggcggatagccccgcggtgaatggagccactggccacagcagcagtttggatgcgcgggaggtactccccatggcagcagtgaagcaagcgctgagagaggctggcgatgagtttgaactgcggtaccggagagcattcagtgatctaacatcccagcttcatataaccccagggacagtatatcagagctttgaacaggtagtgaatgaactctttcgggatggggtaaactggggtcgcattgtggcctcctcctcctttgggggggcactgtgcgtggaaagcgtagacaaggagatgcaggtattggtgagtcggattgcaagttggatggccacctacctgaatgaccacctagagccttggatccaggagaacggcggctgggacacttttgtggatctctacgggaacaatacagcacccgagagccggaaaggccaggagcgtttcaaccgctggttcctgacgggcatgactgtggctggtgtagttctgctgggctcactcttcagtcggaagtgaccaga

SEQ ID NO: 8420 - protein, 233 aa, Rattus norvegicus
  ref <308>: DATABASE ACCESSION NUMBER: SWISS-Prot / P53563
  ref <309>: DATABASE ENTRY DATE: 2002-06-15
MSQSNRELVVDFLSYKLSQKGYSWSQFSDVEENRTEAPEETEPERETPSAINGNPSWHLADSPAVNGATGHSSSLDAREVIPMAAVKQALREAGDEFELRYRRAFSDLTSQLHITPGTAYQSFEQVVNELFRDGVNWGRIVAFFSFGGALCVESVDKEMQVLVSRIASWMATYLNDHLEPWIQENGGWDTFVDLYGNNAAAESRKGQERFNRWFLTGMTVAGVVLLGSLFSRK

SEQ ID NO: 8421 - DNA, 926 bp, Homo sapiens
  ref <308>: DATABASE ACCESSION NUMBER: EMBL / Z23115
  ref <309>: DATABASE ENTRY DATE: 1994-07-26
gaatctctttctctcccttcagaatcttatcttggctttggatcttagaagagaatcactaaccagagacgagactcagtgagtgagcaggtgttttggacaatggactggttgagcccatccctattataaaaatgtctcagagcaaccgggagctggtggttgactttctctcctacaagctttcccagaaaggatacagctggagtcagtttagtgatgtggaagagaacaggactgaggccccagaagggactgaatcggagatggagacccccagtgccatcaatggcaacccatcctggcacctggcagacagccccgcggtgaatggagccactgcgcacagcagcagtttggatgcccgggaggtgatccccatggcagcagtaaagcaagcgctgagggaggcaggcgacgagtttgaactgcggtaccggcgggcattcagtgacctgacatcccagctccacatcaccccagggacagcatatcagagctttgaacaggtagtgaatgaactcttccgggatggggtaaactggggtcgcattgtggcctttttctccttcggcggggcactgtgcgtggaaagcgtagacaaggagatgcaggtattggtgagtcggatcgcagcttggatggccacttacctgaatgaccacctagagccttggatccaggagaacggcggctgggatacttttgtggaactctatgggaacaatgcagcagccgagagccgaaagggccaggaacgcttcaaccgctggttcctgacgggcatgactgtggccggcgtggttctgctgggctcactcttcagtcggaaatgaccagacactgaccatccactctaccctcccacccccttctctgctccaccacatcctccgtccagccgccattgccaccaggagaacccg

SEQ ID NO: 8422 - protein, 233 aa, Homo sapiens
  ref <308>: DATABASE ACCESSION NUMBER: SWISS-Prot / Q07817
  ref <309>: DATABASE ENTRY DATE: 2002-06-15
MSQSNRELVVDFLSYKLSQKGYSWSQFSDVEENRTEAPEGTESEMETPSAINGNPSWHLADSPAVNGATGHSSSLDAREVIPMAAVKQALREAGDEFELRYRRAFSDLTSQLHITPGTAYQSFEQVVNELFRDGVNWGRIVAFFSFGGALCVESVDKEMQVLVSRIAAWMATYLNDHLEPWIQENGGWDTFVELYGNNAAAESRKGQERFNRWFLTGMTVAGVVLLGSLFSRK

SEQ ID NO: 8423 - DNA, 900 bp, Rattus norvegicus
  ref <308>: DATABASE ACCESSION NUMBER: EMBL / U35099
  ref <309>: DATABASE ENTRY DATE: 2000-03-04
ccggcaggagggagcgtctcggcggaggagtgaggaggacgggagggagaggcgggccagagcctcggtcccgggcgccctggtcggccgcggaggaactgcagcctccaacaggaagtcaagcatctctgacatgctatctaccctgcttggtgcctgaggatcctgcatcccggctcatccaggaagcacaggcgagctcattccccgaaggcagaccagccaggagtgctgaatgcgaattcagtcacgggctagggagcactaaccaaagcctgtaggatggacttcgtcatgaagcaagccctcggaggggccaccaaggacatggggaagatgctggggggagaggaggagaaggacccagatgcacagaagaaggaggaggagcggcaggaggccctgaggcagcaggaggaagagcgcaaggccaaacatgcccgcatggaagcggaacgtgagaaggtccggcagcagattcgagataagtatgggctgaagaagaaagaagagaaggaggcagaggagaaggcagccctggaacagccctgcgagggaagcctgaccagacccaagaaggccatccctgcaggctgtggggacgaggaggaggaagaagaggagagcatcctggacacggtgctcaaatatctgccggggccactgcaggacatgttcaagaagtaacctgtcctcttccggccccgtccacgttatgacttttttttttttttttggtgttcctagtttttcttttctttttttattcagttaagtctcagttccaaaggggaaaacctcagtcggcctctgccccctttccctcagcaacccttcacaagcccttcatccagggtttctagttctgtttcactcccaagtagcttggagaaaaaaaaa

SEQ ID NO: 8424 - protein, 134 aa, Rattus norvegicus
  ref <308>: DATABASE ACCESSION NUMBER: SWISS-Prot / Q13329
  ref <309>: DATABASE ENTRY DATE: 2002-06-15
MDFVMKQALGGATKDMGKMLGGEEEKDPDAQKKEEERQEALRQQEEERKAKHARMEAEREKVRQQIRDKYGLKKKEEKEAEEKAALEQPCEGSLTRPKKAIPAGCGDEEEEEEESILDTVLKYLPGPLQDMFKK

SEQ ID NO: 8425 - DNA, 1024 bp, Homo sapiens
  ref <308>: DATABASE ACCESSION NUMBER: EMBL / AK057826
  ref <309>: DATABASE ENTRY DATE: 2001-10-31
agaagccgcggctccagctcgcctggcggaattgcacgcggcggcgggagctggaatagcagaaggaaccacctcgtggagtcgggccggagccctgcagtggctcagacggttgcagggaccgccaggttgtcacatcttcccaagccaggccagccaggagcgctgcatgcaaattctgccgtgggctaaggcacgctaaccagagccggcggcatggacttcgtcatgaagcaggcccttggaggggccacaaaggacatggggaagatgctggggggagaggaggagaaggaccccgacgcgcagaaaaaggaggaggagcggcaggaggcgctgcggcagcaagttaggagtgatcagaaccagtgaagtttccatttttcatccattgctgccctgtgtgtgaacaaatgtgactccatatttattacacagcaaggactgctgtgtgtgggtgtgttcctcagaccatctctactctttttggttaggacactaggttcttcccagcatatgagtgagaatattggtggtattttgggctcctctactgcacaagggccagtccccaagtctactctgattgattgtcatgggcacccacacagatcaggacaccctttgaatttttgtttgacatgaactatttaggtgttccaaaaccttgggatctcaatgtgcaaactccttggactccagacccctgtctggttggcactcccagcagtgtgtggtttcatcaggaaatccttgcagcaggggtttagatggttccttcaggaggtgggaagcctccatagcattgaaggccagcctgcatctcgcggtgtgtgtccacttctcccctcactttcccctcacccatccctttaaagtgattggctgtgaggagcacagagggtggcaattccatctgttatgggctcagaagacatagccgccatgttgatttcacattaaactgtgtaaaatgtggaaaagactcagcatgttggtcaaacaataaactgtcctaattctc

SEQ ID NO: 8426 - protein, 134 aa, Homo sapiens; identical to SEQ ID NO: 8424
  ref <308>: DATABASE ACCESSION NUMBER: SWISS-Prot / AAC50229
  ref <309>: DATABASE ENTRY DATE: 2002-06-15

SEQ ID NO: 8427 - DNA, 3269 bp, Rattus norvegicus
  ref <308>: DATABASE ACCESSION NUMBER: EMBL / U35244
  ref <309>: DATABASE ENTRY DATE: 2000-03-04
ggacaggattgacagattgatagctctttctcgattccgtgggtggtggtgcatggccgttcttagatggcggctcacctgtcatacgggcgagtgaacctgaacgtgctgcgcgaggcggtgcgtcgggagctgcgcgagtttctggacaagtgcgctgggagcaaggcaatagtgtgggatgaatacttaacaggaccgtttggactgattgcacagtactcactactaaaggaacatgaagtggaaaaaatgttcaccctcaaaggaagtcgtttgccagcggctgatgtcaagaatatcatttttttggtcagacccaggctagaattaatggatatgattgccgagaacgtactcagtgaggacaggcgtggccctaccagggatttccatattttatttgtgcctcgtcggagcctactgtgtgagcaaaggctgaaggacctgggtgtgttgggatcctttatttatcgagaggagtacagtttagatctcattccatttgatggggacctcttatccatggagtcagagagcgctttcaaagaatgctaccttgaaggcgaccagacaagcctgtaccacgcagccaaggggctgatgaccctgcaggcgctgtatggaactatcccccagatctttgggaaaggagagtgtgctcggcaagtggccaatatgatggtcaggatgaaaagggagtttacaggcagccaaaactcagtgttccccgtgtttgataacctcttactgcttgatcgcaacgtggatctgctgacgccgctcgcctcccagctcacgtacgaaggactcatcgacgagatttacggcattcagaacagttatgtgaagttacctccagagaaatttgcacccaagaagcagggcggtggtggcgggaaggaccttcccacagaggcaaagaagcttcagctcaactccgcagaggaactctatgccgagatccgagacaagaacttcaacgctgtgggctccgtgctcagcaagaaggcgaagatcatctccgcggcctttgaggagcgacacaatgctaagacggttggagagatcaagcaattcgtctcccagcttccccacatgcaggcggccagggggtcgcttgccaaccacacctcaattgcagagttaatcaaagacgtcaccacttctgaagacttctttgataagttgacggtggagcaggagttcatgtccgggatagacaccgataaggtcaacaattacatcgaggactgcattgcccaaaagcacccgctcatcaaggtcctgagattggtttgcctccagtctatgtgcaacagtgggctcaagcagaaggttctggactactacaaaagggaaattctccagacctacggctatgagcacatactgaccctgaacaacctggagaaggccggcctgctaaaggctcagacagggggcagaaacaactacccaacgattcggaaaacattacgcctctggatggacgatgtcaatgaacaaaaccccacagacatatcctacgtgtacagtggttacgcaccactcagcgtgcgactcgcccagctcctttctcggccaggttggaggagcatcgaggaggttctccgcattctcccagggccccactttgaagaaaggcagccactgcccaccggcgtgcagaagaaacgccagccaggagaaaacagagtcacactggtgtttttcctcgggggcgtcacctttgctgaaatcgcagccctgcgttttctctcccagctggaagacggaggcacagagtatgtaattgcgaccactaaactgataaatggaagcagctggctagaagctctcatggaaaagcctttctaggctgtcagaggggacagtgagctgcccctgagaacgtgttgcccaaaggacataaagccaggagcatggaggcaacgggattgtgttccttcctgctcctctctgtgctcctaaaccctgaagaagggagggtcggcctgggtaaggacacaatgagctgggcgtggcggctcatgcctagaactcctccacttaagagacacaggcaggaggatcgctgcaagtttgggacagctggggctacatagcgagttccaggcaaaagccctcccttccagaaataaaggagatcctgtttcggaatttttaagcttaaagtcttcattttctggaatagactgtggggatgatagccccagcagccacgcaactgtgcacgggcattaaaaaggagagctaaggggataaataagaaaatagaagcggaattctgaccactgactcacggtggcattttctagaccacctatcccaggagagtggttttgggttgaatacgaagccagcatcgtccatcgcgtgcttctccccgcagagcacatttgtgtctccagtctcggctgatgtgattcctcaggcaagctttgtttcctcctgagaatctgagaagcttgaaggagcttcttgacatgatgacgtttctgctgtctgcgttgactgcgtctgtgcagttctctgataaagagtgagctaagcgccaggcagcctctgccagctaaccttcggaggcacttctgggtgtgcacgttgttaactcaagactctctggtgtaggccgccccctgatgggacttctgtcttacctccgtgtcctctgtggttggttcttctgctccttcgagttcatgcagctgtctcagtggaaactgccacatgcacctctctagccctctgactgtactcatcttcacactcccctttacctggtcagtctggtgaccgagtgcacgcggtcagtgtcagtcacacagtgacagtgcctgtgctgcagggagcaggagcaggcatgttgctgccagtgtctgcctcctgatcatttccacatctgaaggagttaagagcgccaagtggcagaccaagttgatggttttctgtcatcacccaagtctccagaaaagctagctgattcagccggtctggtcctggcccaggtgaagtttctgtggttaatagtttcccaatataaagtggtggtgtctacattatgccctgtgatgtaagtccccttagtactcaaagctgcctttgtctcttaagagtatgctctgagaaagactgtgggaacggaaggcttattcttagacagggtggattgtttacgacatgtctggacttgttctgagtttgaggactattctgctacactggctgtcccaattaaagatcctattttctgtctcaaaaaaaaa

SEQ ID NO: 8428 - protein, 597 aa, Rattus norvegicus
  ref <308>: DATABASE ACCESSION NUMBER: SWISS-Prot / AAC52985
  ref <309>: DATABASE ENTRY DATE: 2002-06-15
MAAHLSYGRVNLNVLREAVRRELREFLDKCAGSKAIVWDEYLTGPFGLIAQYSLLKEHEVEKMFTLKGSRLPAADVKNIIFLVRPRLELMDMIAENVLSEDRRGPTRDFHILFVPRRSLLCEQRLKDLGVLGSFIYREEYSLDLIPFDGDLLSMESESAFKECYLEGDQTSLYHAAKGLMTLQALYGTIPQIFGKGECARQVANMMVRMKREFTGSQNSVFPVFDNLLLLDRNVDLLTPLASQLTYEGLIDEIYGIQNSYVKLPPEKFAPKKQGGGGGKDLPTEAKKLQLNSAEELYAEIRDKNFNAVGSVLSKKAKIISAAFEERHNAKTVGEIKQFVSQLPHMQAARGSLANHTSIAELIKDVTTSEDFFDKLTVEQEFMSGIDTDKVNNYIEDCIAQKHPLIKVLRLVCLQSMCNSGLKQKVLDYYKREILQTYGYEHILTLNNLEKAGLLKAQTGGRNNYPTIRKTLRLWMDDVNEQNPTDISYVYSGYAPLSVRLAQLLSRPGWRSIEEVLRILPGPHFEERQPLPTGVQKKRQPGENRVTLVFFLGGVTFAEIAALRFLSQLEDGGTEYVIATTKLINGSSWLEALMEKPF

SEQ ID NO: 8429 - DNA, 2536 bp, Homo sapiens
  ref <308>: DATABASE ACCESSION NUMBER: Refseq / NM_022916
  ref <309>: DATABASE ENTRY DATE: 2002-02-15
ggcagggggtggtggagcaagatggcggctcatctgtcctacggccgagtgaacctaaacgtgttgcgcgaggcggtgcgtcgcgagctgcgcgagttcctggacaagtgcgcaggaagcaaggcaatagtttgggatgaatacctaactggaccctttggcctgattgcacagtattcactattgaaggaacatgaagtggaaaaaatgttcacacttaaaggaaatcgtttgccggcagctgatgtgaagaatataattttttttgtcagacccaggctagagttgatggatataatcgctgaaaacgtgctcagtgaagatagacgaggcccaacgagagattttcatattctgtttgtgccacgccgtagcctgttgtgcgaacagcggttgaaggatctgggtgtcttgggatcctttattcacagggaggagtacagcttagatctcattccattcgatggggatctcttatccatggaatcagagggtgcattcaaagagtgctacctggagggtgaccagacgagcctgtaccacgcagccaaggggctgatgaccctgcaagctctgtatggaacgatcccccagatctttgggaaaggagaatgcgctcggcaagtggccaatatgatgatcaggatgaagagagagtttacaggaagccagaattcaatatttcctgtttttgataatctcttgttgcttgatcggaatgtggatttattaacacctcttgccactcagctgacatatgaaggactcattgatgaaatttatggcattcagaacagttatgtgaaattacctccagagaaatttgcacctaagaaacagggcgatggtggtaaggacctccccacggaagcaaagaagctgcagctgaattctgcagaggagctctatgctgagatccgagataagaacttcaacgcagttggctctgtgctcagcaagaaagcaaagatcatctctgcagcattcgaggaaagacacaatgctaagaccgtgggggagatcaagcagtttgtttcccagttgccccacatgcaggcagcaaggggctcgcttgcaaaccatacctcaattgcagaattgatcaaagatgtcactacttctgaagacttttttgataaattaaccgtggaacaggagtttatgtctggaatagacactgataaggtcaacaattacattgaggattgtatcgcccaaaagcactcgttgatcaaggtgttaagactagtttgcctccaatccgtgtgtaatagtgggctcaaacaaaaagttttggattattacaaaagagagattctccagacatacggctatgagcacatattgaccttacacaacctggagaaggccggcctgctgaaaccgcagacggggggcagaaacaattacccaactatacggaaaacattacgcctctggatggatgatgttaatgagcaaaaccccacggacatatcgtatgtgtacagtgggtatgccccgctcagtgtgcggctggcccagctgctttcccggcctggctggcggagcatcgaggaggtcctccgcatcctcccagggccccactttgaggagcggcagccactgcccacaggactgcagaagaaacgtcaaccgggagaaaaccgagtgactctgatatttttccttgggggcgtaaccttcgctgaaattgctgccctgcgatttctctcccagttggaagatggaggtacagaatatgtcattgccaccactaaactaatgaatggaaccagttggatagaggctctgatggaaaaacctttctaggatgttcagaggagacttaacaagtgtactgcagaataaactacctctttgaagaaattgctgaaaggaagtaaaaccccatagaagaaacatgggaatacagaatatattctggggtcagcttcttaaattatactactgtttactgctttctccgtctcttttgtattccctttttttttttcctttgagacggagtcttgctctgtcacccagactagagtgcagtggcacggtctcacctcactgcaacctccacctcctaggttcaagcaattctcctgcctcagcctcctgagtagctgggactacaggcatgcaccaccacacccggctaatttttgtatttttagtagccatggtgtttcaccatgttggccaggctggtctcaaactcctgacctcaggtgatccacctgcctcggcctcccacagtgctgggattacaggcctgagccaccgtgcctggcccctaatctgctgaagaaagaagaatagaagaaaatcaacctgagtaaaagcagcactggttttgagttttctaagctcagggtcttcattagagacctctggaaatacattaaggatggtgggggtagataatccattcagccagacaaacggggccagctcttaaaataagaaagctgagactgaggaggtgaaactgaaaataaaaagagaaagttcatcctctaaaaaaaaaaaaaaaaaaaaaaaaaaa

SEQ ID NO: 8430 - protein, 596 aa, Homo sapiens
  ref <308>: DATABASE ACCESSION NUMBER: Refseq / NP_075067
  ref <309>: DATABASE ENTRY DATE: 2002-02-15
MAAHLSYGRVNLNVLREAVRRELREFLDKCAGSKAIVWDEYLTGPFGLIAQYSLLKEHEVEKMFTLKGNRLPAADVKNIIFFVRPRLELMDIIAENVLSEDRRGPTRDFHILFVPRRSLLCEQRLKDLGVLGSFIHREEYSLDLIPFDGDLLSMESEGAFKECYLEGDQTSLYHAAKGLMTLQALYGTIPQIFGKGECARQVANMMIRMKREFTGSQNSIFPVFDNLLLLDRNVDLLTPLATQLTYEGLIDEIYGIQNSYVKLPPEKFAPKKQGDGGKDLPTEAKKLQLNSAEELYAEIRDKNFNAVGSVLSKKAKIISAAFEERHNAKTVGEIKQFVSQLPHMQAARGSLANHTSIAELIKDVTTSEDFFDKLTVEQEFMSGIDTDKVNNYIEDCIAQKHSLIKVLRLVCLQSVCNSGLKQKVLDYYKREILQTYGYEHILTLHNLEKAGLLKPQTGGRNNYPTIRKTLRLWMDDVNEQNPTDISYVYSGYAPLSVRLAQLLSRPGWRSIEEVLRILPGPHFEERQPLPTGLQKKRQPGENRVTLIFFLGGVTFAEIAALRFLSQLEDGGTEYVIATTKLMNGTSWIEALMEKPF

SEQ ID NO: 8431 - DNA, 3269 bp, Rattus norvegicus; identical to SEQ ID NO: 8427
  ref <308>: DATABASE ACCESSION NUMBER: EMBL / U35244
  ref <309>: DATABASE ENTRY DATE: 2000-03-04

SEQ ID NO: 8432 - protein, 597 aa, Rattus norvegicus; identical to SEQ ID NO: 8428
  ref <308>: DATABASE ACCESSION NUMBER: SWISS-Prot / AAC52985
  ref <309>: DATABASE ENTRY DATE: 2002-06-15

SEQ ID NO: 8433 - DNA, 2536 bp, Homo sapiens; identical to SEQ ID NO: 8429
  ref <308>: DATABASE ACCESSION NUMBER: Refseq / NM_022916
  ref <309>: DATABASE ENTRY DATE: 2002-02-15

SEQ ID NO: 8434 - protein, 596 aa, Homo sapiens; identical to SEQ ID NO: 8430
  ref <308>: DATABASE ACCESSION NUMBER: Refseq / NP_075067
  ref <309>: DATABASE ENTRY DATE: 2002-02-15

SEQ ID NO: 8435 - DNA, 2051 bp, Rattus norvegicus
  ref <308>: DATABASE ACCESSION NUMBER: EMBL / U35245
  ref <309>: DATABASE ENTRY DATE: 2000-03-04
cggcggtggctcaggtgacctctcccatggctttcccccatcgactggacgcccctgagcttcccgacttctctatgctcaagaggctggctcgggaccagctcatctatctgctagaacagcttcctgggaaaaaggatttgttcattgaggcagatctcatgagccctttggatcgaattgctaacgtctctatcctgaagcaacatgaagtagacaagctgtacaaggtggaaaacaaacttactctcagctccaatgaacaattgtgcttcttggtcagacctcgaatcaagactatgcgctacattgccaatcttgtcaatgctgacaaactggctggccgagttagaaaatacaaaatcatcttaagtcctcagaagttttatgcatgtgagatggtgcttgaggaagagggagtctatggagatgtgagctgtgatgaatgggccttttctctgctgcctcttgatgtggatctgctgagcatggaactgccagaatttttcagggattacttcctggaaggggatcagcgttggatcaacacggtggctcaggccttgcaccttctcagtactctctatgggcccttccctaactgctatggcattggcagatgcacgaagatgtcatatgacctgtggaggaaactggaggaggaagaggacagtgaaacgaaaggtcggagaccagagattggacacatctttctcttggacagagatgtggactttgtgacagcactttgctcccaagtggtttatgagggcttggtagatgacaccttccgaatcaagtgtggaagtgtcgactttggcccagaagtcacatcctctgacaagagcctgaaggtgctgctcaacgctgaggacaaggtgttcagtgagatccgcaatgagcacttctccaatgtctttggcttcttgagccagaaagcccggaacttgcaggctcaatatgaccgccggagaggtatggacataaagcagatgaagaacttcgtgtcccaagagctcaagggactgaaacaggagcaccgccttctgagtctccatattggagcttgtgaatcaatcatgaagaagaaaaccaagcaggacttccaggagctaatcaagaccgagcatgcactgctggagggcttcaacattcgagagagcactagctacattgaagaacacatagaccggcaggtgtcgcccatagaaagcctacgcctcatgtgccttttgtccatcactgagaatggtttgattcccaaggattatcggtccctgaaaacacagtatctgcagagctacggccccgagcacctgctaaccttctccaaccttcggagagccgggcttctaacagagcaggcttcgggggacaccctcactgcagtagagaataaagtgagcaagctggtgactgacaaggccgcaggaaaaatcactgatgccttcagttctctggccaagaggagcaattttcgtgccatcagcaaaaagctgaatttgatcccacgtgtagatggggagtatgacctgaaagtgccccgggacatggcttacgtcttcagtggcgcctacgtgcctctgagctgccgaatcattgagcaggtgctggaccggcggagttggcagggcctagatgaagtggtccggctgctaaactgcagtgactttgcattcacagacatggctaaggaagacaaggcttccagtgagtcactccgcctcatcttggtggtgttcttggggggctgcacgttctcagagatatcagccctgcgcttcctgggtagagagaaagggtacagatttatttttctgacaactgctgttacaaacagtgctcgcctcatggaagccatgagtgaggtgaaatcctgatgctttcctggccagtgcggaagtaattcctgattgtggaccccagtgagaagctggtgtttcacatctaccttctaagactcccccaacacacacatcctacctcccagctatactcttcagaactgggaacttcagaactaattttcgggagagaattcgatatcaagt

SEQ ID NO: 8436 - protein, 617 aa, Rattus norvegicus
  ref <308>: DATABASE ACCESSION NUMBER: SWISS-Prot / AAC52986
  ref <309>: DATABASE ENTRY DATE: 2002-06-15
MAFPHRLDAPELPDFSMLKRLARDQLIYLLEQLPGKKDLFIEADLMSPLDRIANVSILKQHEVDKLYKVENKLTLSSNEQLCFLVRPRIKTMRYIANLVNADKLAGRVRKYKIILSPQKFYACEMVLEEEGVYGDVSCDEWAFSLLPLDVDLLSMELPEFFRDYFLEGDQRWINTVAQALHLLSTLYGPFPNCYGIGRCTKMSYDLWRKLEEEEDSETKGRRPEIGHIFLLDRDVDFVTALCSQVVYEGLVDDTFRIKCGSVDFGPEVTSSDKSLKVLLNAEDKVFSEIRNEHFSNVFGFLSQKARNLQAQYDRRRGMDIKQMKNFVSQELKGLKQEHRLLSLHIGACESIMKKKTKQDFQELIKTEHALLEGFNIRESTSYIEEHIDRQVSPIESLRLMCLLSITENGLIPKDYRSLKTQYLQSYGPEHLLTFSNLRRAGLLTEQASGDTLTAVENKVSKLVTDKAAGKITDAFSSLAKRSNFRAISKKLNLIPRVDGEYDLKVPRDMAYVFSGAYVPLSCRIIEQVLDRRSWQGLDEVVRLLNCSDFAFTDMAKEDKASSESLRLILVVFLGGCTFSEISALRFLGREKGYRFIFLTTAVTNSARLMEAMSEVKS

SEQ ID NO: 8437 - DNA, 1913 bp, Homo sapiens
  ref <308>: DATABASE ACCESSION NUMBER: EMBL / AL357472
  ref <309>: DATABASE ENTRY DATE: 2000-05-31
caagaatatgcgatacattgccagtcttgtcaatgctgacaaattggctggccgaactcgcaaatacaaagtgatcttcagccctcaaaagttctatgcgtgtgagatggtgcttgaggaagagggaatctatggagatgtgagctgtgatgaatgggccttctctttgctgcctcttgatgtggatctgctgagcatggaactaccagaatttttcagggattactttctggaaggagatcagcgttggatcaacactgtagctcaggccttacaccttctcagcactctctatggaccctttccaaactgctatggaattggcaggtgcgccaagatggcatatgaattgtggaggaacctggaggaggaggaggatggcgaaaccaagggccgaaggccagagattggacatatctttctcttggacagagatgtggactttgtgacagcactttgctcccaagtggtttatgagggcctagtagatgacaccttccgcatcaagtgtgggagtgtcgactttggcccagaagtcacatcctctgacaagagcctgaaggtgctactcaatgccgaggacaaggtgtttaatgagattcggaacgagcacttctccaatgtctttggcttcttgagccagaaggcccggaacttgcaggcccagtatgatcgccggagaggcatggacattaagcagatgaagaatttcgtgtcccaagagctcaagggcctgaaacaggagcaccgcctgctgagtctccatattggggcctgtgaatccatcatgaagaagaaaaccaagcaggatttccaggagctaatcaagactgagcatgcactgctagaggggttcaacatccgggagagcaccagctacattgaggaacacatagaccggcaggtgtcgcctatagaaagcctgcgcctcatgtgccttttgtccatcactgagaatggtttgatccccaaggattaccgatctctgaaaacacagtatctgcagagctatggccctgagcacctgctaaccttctccaatctgcgaagagctgggctcctaacggagcaggcccccggggacaccctcacagccgtggagagtaaagtgagcaagctggtgaccgacaaggctgcaggaaagattactgatgccttcagttctctggccaagaggagcaattttcgtgccatcagcaaaaagctgaatttgatcccacgtgtggacggcgagtatgatctgaaagtgccccgagacatggcttacgtcttcggtggtgcttatgtgcccctgagctgccgaatcattgagcaggtgctagagcggcgaagctggcagggccttgatgaggtggtacggctgctcaactgcagtgactttgcattcacagatatgactaaggaagacaaggcttccagtgagtccctgcgcctcatcttggtggtgttcttgggtggttgtacattctctgagatctcagccctccggttcctgggcagagagaaaggctacaggttcattttcctgacgacagcagtcacaaacagcgctcgccttatggaggccatgagtgaggtgaaagcctgatgtttttcccggccagtgttgacatcttccctgaacacattcctcagtgagatgcaggcatctggcacccagctgctataaccaagtgtccaccaactacctgctaagagccgggagcatggaacgtgttgggatttagagaacattatctgagaaaagagttcacttcctgctcccaggatatttctcttttctgtttatgaagtacaacccatgctgctaagatgcgagcaggaagaggcatcctttgctaaatcctgtttgaatgtcattgtaaataaagcctctgctctcagatgtaaaaaaaaaaaaaaaaaaaaaaaaa

SEQ ID NO: 8438 - protein, 617 aa, Homo sapiens
  ref <308>: DATABASE ACCESSION NUMBER: SWISS-Prot / AAG34680
  ref <309>: DATABASE ENTRY DATE: 2002-06-15
MAFPHRPDAPELPDFSMLKRLARDQLIYLLEQLPGKKDLFIEADLMSPLDRIANVSILKQHEVDKLYKVENKPALSSNEQLCFLVRPRIKNMRYIASLVNADKLAGRTRKYKVIFSPQKFYACEMVLEEEGIYGDVSCDEWAFSLLPLDVDLLSMELPEFFRDYFLEGDQRWINTVAQALHLLSTLYGPFPNCYGIGRCAKMAYELWRNLEEEEDGETKGRRPEIGHIFLLDRDVDFVTALCSQVVYEGLVDDTFRIKCGSVDFGPEVTSSDKSLKVLLNAEDKVFNEIRNEHFSNVFGFLSQKARNLQAQYDRRRGMDIKQMKNFVSQELKGLKQEHRLLSLHIGACESIMKKKTKQDFQELIKTEHALLEGFNIRESTSYIEEHIDRQVSPIESLRLMCLLSITENGLIPKDYRSLKTQYLQSYGPEHLLTFSNLRRAGLLTEQAPGDTLTAVESKVSKLVTDKAAGKITDAFSSLAKRSNFRAISKKLNLIPRVDGEYDLKVPRDMAYVFSGAYVPLSCRIIEQVLERRSWQGLDEVVRLLNCSDFAFTDMTKEDKASSESLRLILVVFLGGCTFSEISALRFLGREKGYRFIFLTTAVTNSARLMEAMSEVKA

SEQ ID NO: 8439 - DNA, 2051 bp, Rattus norvegicus; identical to SEQ ID NO: 8435
  ref <308>: DATABASE ACCESSION NUMBER: EMBL / U35245
  ref <309>: DATABASE ENTRY DATE: 2000-03-04

SEQ ID NO: 8440 - protein, 617 aa, Rattus norvegicus; identical to SEQ ID NO: 8436
  ref <308>: DATABASE ACCESSION NUMBER: SWISS-Prot / AAC52986
  ref <309>: DATABASE ENTRY DATE: 2002-06-15

SEQ ID NO: 8441 - DNA, 1913 bp, Homo sapiens; identical to SEQ ID NO: 8437
  ref <308>: DATABASE ACCESSION NUMBER: EMBL / AL357472
  ref <309>: DATABASE ENTRY DATE: 2000-05-31

SEQ ID NO: 8442 - protein, 617 aa, Homo sapiens; identical to SEQ ID NO: 8438
  ref <308>: DATABASE ACCESSION NUMBER: SWISS-Prot / AAG34680
  ref <309>: DATABASE ENTRY DATE: 2002-06-15

SEQ ID NO: 8443 - DNA, 2246 bp, Rattus norvegicus
  ref <308>: DATABASE ACCESSION NUMBER: EMBL / U35775
  ref <309>: DATABASE ENTRY DATE: 2000-03-04
ggcaggagtcggatgtagatcgctcctgagttcaattcccagcaaccacacctagccgggaagacggacacgcgtcggctcccctgcacgcaaagcagctttggatcgcctgcagggcaagaagactggaagcatgagttcagacagcagccaagcggtgatcaccacccctcctcctcccagcatgcctcacaaagagaggtattttgaccgaatcaatgaaagtgatccagaatacctccgagagaggaacatgtctcctgatctacgggaggacttcaatatgatggagcagaggaagcgagtcactcagatcctgcagagtcctgcctttcgggaagacctagagtgcctcacccaagaacagatgaagaaaggccacgacccgaccggattgctagcgttacagcagatcgccgactacatcatggccaactccttcaccggtttttcttcacctcccctgagtcttggcatggtcactcctattaatgaccttcctggtgcagacacatcctcgtatgtgaagggagagaagctcactcgttgcgaactcgccagcctgtacagactcgcagatctgtttgggtgggcacatctggcaaatacatacatctcggtacgagtaagtaaggagcaggaccacatcataatcatccccagaggcctccctttctctgaagccacagcctctgctctggtgaaggtcaacataataggagaagtggtggaccaggggagtactaatttgaaaattgaccattcaggattcagtccccatgctgcaatctattcaacccgtcccgatgtgaagtgtgtgatacacatccacaccctcgctacagcagctgtgtcttccatgaagtgtgggatccttccaatttcccaagagtctctcatcctgggagatgtagcctattatgactaccaggggtcgcttgatgaggaggaggaaagaatcgaacttcagaaagttctgggtccaagctgtaaggtgctggtcctcaggaaccatggcgtggtagctcttggagaaacacttgaggaggctttccactacatcttcaatgtacagatggcctgtgagattcaggtgcaggctgtagcaggggcagggggagtggacaatcttctcatactggatcttcagaaatacaaagctttcacccacggtgttgccatgactggaggaggcggtgtgaatatgggttcccatcagaagtggaaagttggcgagattgagtttgaagggctcatgagaaccctggacaacttgggctacagaacaggctacgcatacaggcatcctctagttcgagagaagcctcggcacaagagtgacgtggagatcccagcaactgtgactgcattctcctttgaagatgatagtgtgccactctctcccctcaagtacatggcacagagacagcagcgtgaaaaaacaagatggctgaattctccaaatacatacatgaaagtgaatgtgccggaggagtcccggaacggggaaactagtcccaggaccaaaataacgtggatgaaagcagaggacccctctaaagttagtagtggaacacctatcaaaattgaagatcccaatcagtttgttcctctaaacacgaacccgactgaggtgctggagaagagaaataagattcgggaacagaatcgctatgacctgaagacagcagggccacagtctcagctgctggcggggatcgttgtggacaaaccgccttctaccatgcggtttgaagacgatgatcagggcccaccagcccctcctaacccattcagtcatctcatggaaggagaacttgaagaatatacgaagacaatcgagagacagcagcaaggcctggacgaaaaccacgagctgttttccaagagcttcacctctgtggatgtgcctgtcattgtgaatggcaaggacgagatgcacgatgttgaagacgagctcgctcagcgcgtcagcaggctcacgacgagcaccaccatagagaacatcgagatcaccatcaagtccccagacagaactgaagaggtcctgtcacccgatggctcgccttcaaagtcaccatccaagaaaaagaagaaattccgcacaccttcttttctcaaaaagaacaaaaaaaaaggagaaagttgaggcctaagtagtctttctgtaatttgtacattacattgtggcattgcacagttaaataccatattttagttaatcgttaatatacggtggtagagcc

SEQ ID NO: 8444 - protein, 705 aa, Rattus norvegicus; identical to SEQ ID NO: 6899
  ref <308>: DATABASE ACCESSION NUMBER: SWISS-Prot / Q62847
  ref <309>: DATABASE ENTRY DATE: 2001-10-16

SEQ ID NO: 8445 - DNA, 2920 bp, Homo sapiens
  ref <308>: DATABASE ACCESSION NUMBER: EMBL / D67031
  ref <309>: DATABASE ENTRY DATE: 1997-12-10
tctggttcggcccacctctgaaggttccagaatcgatagtgaattcgtggagtaggtttctgtgcagcattgcagaatccacacctagagaacagaagacacagacacgtacgtctactacccttgttagaaggaagctttggatcttcggtggataacaagagtaatccacagacttaaaacatgagctcagatgccagccaaggcgtgattaccactcctcctcctcccagcatgcctcacaaagagagatattttgaccgcatcaatgaaaatgacccagaatacattagggagaggaacatgtctcctgatctacgacaagactccagcatgatggagcagaggaaacgagttactcggatcctgcaaagtcctgcctttcgggaagacttggaatgccttattcaagaacagatgaagaaaggccacaacccaactggattactagcattacagcagattgcagattacatcatggccaattctttctcgggtttttcttcacctcctctcagtcttggcatggtcacacctatcaatgaccttcctggtgcagatacatcctcatatgtgaagggagaaaaacttactcgctgtaaacttgccagcctgtacagacttgtagacttgtttggatgggcacacctggcaaatacctatatctcagtaagaataagtaaggagcaagaccacattataataattcccagaggcctatctttttctgaagctacagcctccaatttggtgaaagtcaatataataggagaagtggttgaccagggaagtaccaatttgaaaattgaccatacaggattcagtccccatgctgcaatctattcaacacgtcctgatgttaagtgtgtgatacacatccatacccttgcaacagcagctgtatcctccatgaaatgtgggatccttccaatttctcaagagtctcttcttctgggagatgttgcctattatgactaccaagggtcacttgaagaacaggaggagagaattcaactgcagaaggttctgggaccaagttgtaaagtgctggtactcaggaatcatggtgtggttgcacttggagaaacattagaggaggcttttcattatatttttaatgtgcaactagcctgtgagattcaggtgcaggccctagcaggtgcaggtggagtagacaatctccatgtactggactttcagaagtataaagctttcacttacactgtagcagcgtctggtggaggaggtgtgaatatgggttcccatcaaaaatggaaggttggcgaaattgagtttgaagggcttatgaggactctggacaacttggggtatagaacaggctatgcttacaggcatcctctcattcgagagaagcctaggcacaagagtgatgtggaaatcccagcaactgtgactgctttttcctttgaagacgatacagtgctactctctcctctcaaatacatggcacagaggcaacagcgtgaaaaaacaagatggctgaactcaccaaatacttacatgaaagtgaatgtgcctgaggagtctcggaacggagaaaccagtccccgaaccaaaatcacgtggatgaaagcagaagactcatctaaagttagtggtggaacacctatcaaaattgaagatccaaatcagtttgttcctttaaacacaaacccgaatgaggtactagaaaagagaaataagattcgggaacaaaatcgatatgacttgaaaacagcaggaccacaatctcagttgcttgctggaattgttgtggataagccaccttctactatgcaatttgaagatgatgatcatggcccaccagctcctcctaacccatttagtcatctcacagaaggagaacttgaagagtataagaggacaatcgaacgtaaacaacaaggcctagaagaaaaccatgagctgttttccaagagcttcatctccatggaagtgcctgtcatggtagtaaatggcaaggatgatatgcatgatgttgaagatgagcttgctaagcgagtgagtaggttaagcacaagtacaaccatagaaaacatcgagattactattaagtctccagagaaaatcgaagaagtcctgtcacctgaaggctccccttcaaaatcgccatccaagaaaaagaagaaattccgcactccttcttttctgaaaaagaacaaaaaaaaggagaaagttgaggcctaaataaagtctttttataattattattataacaatgtgacattgcacatctaaataccacatttaagttgatcattaatatgcaatggtagatcagattgggggatgtagcaaactggactttaagaactggaaagaggttttacaaaagaaaaactttcagattcatctctcattttatatgtccagaaatggctttgaattttaagcaattactagttttaattagctctgccctcatgaagtattattataattcaccataaacagctatctgtctgaattacttcaggccttctccataatatctgttagaaagaaattgccagtgagcaagtgagaatttttatttctcaatacctgcttcacttgataatcatattataattttttatcatgattattgactatatttttggagtcccattgtttcagtgggcattaacagaatgctttaaaaacttctaagacaagaatctatagcattagtatacactggcacataattttttaaaaagttttaagaaaagattcatttggaattttattcacagtataaaatttcctcacctgaagtaactttgtttgccaaaaaagttgttttaataaactataatttttgaaaacttccttttttattagtttagaaagccccttatttttcaacaaaggggattttgtacacataacatgggttatttagtttaactctggc

SEQ ID NO: 8446 - protein, 706 aa, Homo sapiens; identical to SEQ ID NO: 6901
  ref <308>: DATABASE ACCESSION NUMBER: SWISS-Prot / Q9UEY8
  ref <309>: DATABASE ENTRY DATE: 2001-10-16

SEQ ID NO: 8447 - DNA, 2246 bp, Rattus norvegicus; identical to SEQ ID NO: 8443
  ref <308>: DATABASE ACCESSION NUMBER: EMBL / U35775
  ref <309>: DATABASE ENTRY DATE: 2000-03-04

SEQ ID NO: 8448 - protein, 705 aa, Rattus norvegicus; identical to SEQ ID NO: 6899
  ref <308>: DATABASE ACCESSION NUMBER: SWISS-Prot / Q62847
  ref <309>: DATABASE ENTRY DATE: 2001-10-16

SEQ ID NO: 8449 - DNA, 2920 bp, Homo sapiens; identical to SEQ ID NO: 8445
  ref <308>: DATABASE ACCESSION NUMBER: EMBL / D67031
  ref <309>: DATABASE ENTRY DATE: 1997-12-10

SEQ ID NO: 8450 - protein, 706 aa, Homo sapiens; identical to SEQ ID NO: 6901
  ref <308>: DATABASE ACCESSION NUMBER: SWISS-Prot / Q9UEY8
  ref <309>: DATABASE ENTRY DATE: 2001-10-16

SEQ ID NO: 8451 - DNA, 1862 bp, Rattus norvegicus
  ref <308>: DATABASE ACCESSION NUMBER: EMBL / U35776
  ref <309>: DATABASE ENTRY DATE: 2002-07-10
cggggatctgagtgcctagtccagcttggcacctgggccggacccgaccccctcggggcagcaggatcccagtgtgcggcggtccagacccccccgccccgccccgcccccggcctgtgagccttgcgcccttcagcatagcggttgcgcggatctacgtggcctttcagcgctcaggtcccgagcactctcagacgcagactggttttgcagagcccatttggccgggaaagggcccctgcccttcacttcgaaagaagattctgtccagaggtgccgcaccatggccagcccaagaaccagaaaagttcttaaggaagtccgggcacaggacgagaataatgtttgctttgagtgtggtgcgttcaatcctcagtgggtcagcgtgacctatggcatctggatctgcctggaatgctctgggagacaccgtgggcttggggtgcatctcagcttcgtgcgctctgtgacaatggacaagtggaaggacattgaactggagaagatgaaagctggtgggaatgctaagttccgagagttcctggaggcacaggacgactatgagcctagctggtcactgcaggacaagtatagcagcagagctgcagcgctcttcagggataaggtggctactttggcagaaggtaaagaatggtctctggagtcatcgcctgcccagaactggaccccacctcagcccaagacgctgcagttcactgcccaccgacccgctggccagccacagaatgtaactacctctggggacaaggcctttgaggattggctgaatgatgatctgggttcctatcagggtgctcaggagaatcgctatgtggggtttgggaacacagtgccacctcagaagagagaagatgacttcctcaacagcgccatgtcatctctgtactcgggctggagcagttttaccactggggcgagcaagtttgcgtctgcagcaaaggagggtgctacaaaatttggatctcaagcaagtcaaaaggcttcggagttgggccacagcctgaatgagaatgttctcaagcctgcacaggagaaggtgaaagagggaaggatttttgatgatgtgtccagtggggtctctcagttggcatccaaggtccagggagttggcagtaagggatggcgtgatgtcacgaccttcttttctgggaaagctgaagacacttcagacagacccttagagggccacagctaccagaacagcagtggagacaactctcagaacagcaccatagaccagagcttctgggagaccttcgggagtgctgagccccccaaggccaagtccccaagcagtgacagctggacctgcgcagatgcctcaacgggaaggaggagctcggacagctgggacatttggggctcaggttctgcatccaacaacaagaacagcaatagcgatggttgggagagctgggagggagccagtggggagggaagggcaaaggctaccaagaaggcagctccatctacagccgccgacgagggctgggacaaccagaactggtaggagccttgctgcaccctaacccagccctgctgggagaccgctgtgtttgcactttacccttgttcctccttcatttgacctcagtgtgaagacagtggctcaggcaggacttgagttggtgctgcctgcctggtgtggggtggctttctcttagacctcaggggacatgtcatccacctgcctcttgggtcctctgagcagccttcctggattctgggttcttgggacccaggcactgtctctgcagccctagcatagcctgggactgcagccctgtgcaatgtcagctaagccagacatctgctttcgttgaaatgtctttttaaacttg

SEQ ID NO: 8452 - protein, 415 aa, Rattus norvegicus
  ref <308>: DATABASE ACCESSION NUMBER: SWISS-Prot / AAC52337
  ref <309>: DATABASE ENTRY DATE: 2002-10-01
MASPRTRKVLKEVRAQDENNVCFECGAFNPQWVSVTYGIWICLECSGRHRGLGVHLSFVRSVTMDKWKDIELEKMKAGGNAKFREFLEAQDDYEPSWSLQDKYSSRAAALFRDKVATLAEGKEWSLESSPAQNWTPPQPKTLQFTAHRPAGQPQNVTTSGDKAFEDWLNDDLGSYQGAQENRYVGFGNTVPPQKREDDFLNSAMSSLYSGWSSFTTGASKFASAAKEGATKFGSQASQKASELGHSLNENVLKPAQEKVKEGRIFDDVSSGVSQLASKVQGVGSKGWRDVTTFFSGKAEDTSDRPLEGHSYQNSSGDNSQNSTIDQSFWETFGSAEPPKAKSPSSDSWTCADASTGRRSSDSWDIWGSGSASNNKNSNSDGWESWEGASGEGRAKATKKAAPSTAADEGWDNQNW

SEQ ID NO: 8453 - DNA, 3248 bp, Homo sapiens
  ref <308>: DATABASE ACCESSION NUMBER: Refseq / NM_018209
  ref <309>: DATABASE ENTRY DATE: 2002-11-05
ggaagctggtggcggctggtgggcgaccgggcgcatcctcattgcagtgcggcggccctacctcggccctggcctgaccccggcggccctgcccgcccctccctccagcatcatggccagcccaagaaccaggaaggttcttaaagaagtcagggtgcaggatgagaacaacgtttgttttgagtgtggcgcgttcaatcctcagtgggtcagtgtgacctacggcatctggatctgcctggagtgctcggggagacaccgcgggcttggggttcacctcagctttgtgcgctctgttactatggacaagtggaaggacattgagcttgagaagatgaaagctggtgggaatgctaagttccgagagttcctggagtctcaggaggattacgatccttgctggtccttgcaggagaagtacaacagcagagccgcggccctctttagggataaggtggtcgctctggccgaaggcagagagtggtctctggagtcatcacctgcccagaactggaccccacctcagcccaggacgctgccgtccatggtgcaccgagtctctggccagccgcagagtgtgaccgcctcctcggacaaggcttttgaggactggctgaatgatgacctcggctcctatcaaggggcccaggggaatcgctacgtggggtttgggaacacgccaccgcctcagaagaaagaagatgacttcctcaacaacgccatgtcctccctgtactcgggctggagcagcttcaccactggagccagccggtttgcctcggcagccaaggagggcgctacaaagtttggatcccaagcgagtcagaaggcgtccgagctgggccacagcctgaacgagaacgtcctcaagcctgcgcaggagaaggtgaaggagggaaagatttttgatgatgtctccagtggggtctctcagttggcgtccaaggtccagggagtcggtagtaagggatggcgggacgtcaccacctttttttcggggaaagcagagggccccttggacagcccctcggagggccacagttatcagaacagcggtctggaccacttccaaaacagcaacatagaccagagcttctgggagacctttggaagtgctgagcccaccaagacccgcaagtccccgagcagcgacagctggacgtgcgcggacacctccaccgagaggaggagctcggacagctgggaggtgtggggctcggcctccaccaacaggaacagcaacagcgacggcggggagggcggggagggcaccaagaaggcagtgccgccggccgtgcccactgatgatggctgggacaaccagaactggtagggcccactgcgcccccgtccccagcgcccccgggcgacttcgtgtttgcactctgccctcgtcgttcctcctccttccatttgacccaagaatcagcaactgcagtgtgaggacagcgtctcgggaggcaggaccctagggagacccgggtgtgcgccgcctgcgcgtggggagtcttcggtgcgtgggggcggcttgctgtccagcctgtgtgggggccgtcccgtcccacactcccctgggcattcttggactcaaggccggggctctgcgtggcttgctgggaggtgggctgcagcacagaggcctgtgactgcgttccagcggccagttcactacgcagtatctctggggcctgggaccagccacgtgccgagctgtcagcgacgtgaggtgtcccttctcgttgagatatttaactttggttttgctctagttctttctttttgaagagagtgactggagtggtaaagatggaaatgctggaaatgatactggcgctcacgctgccatccgaccaccctcggctcccgagtccacgcctgcctgggcctgtgctgtcagacccgcgtcggtcgtaaccctctgtggctcccctgcatcagcaccgtcccaccaccaagttcaccaggttcaccagacacggcctccacaatagccacacccacacctgagctgtcctcagtgctggaacttgaccatcctggaacaccctggaagaaaaaggagcgcagggtgggccctcggccctgatgcaggagggtgcgatagcggacgtggccaggcaggaggggccgggttcaggagctgagcaggggatgcctgtgcgtggtgcctgggtctagggaagctccagccccaggatggggctgccctgcacaccggtgcccgccacatgccaaccctcacctccccgaggactggatgatgtgctgccacgtgtgactcgtctcccttgtctgccctgtgtgaccctcagtcttggccagccatgcatgcgcccgaagctcgtgcagtttgtacgtgaggtgctctcctccctgccaccatgctcatcactctggccttggccatgctccctggtcaccccacttcccggtcgccgtctgcagcactcctggagcagcctgggcccttcagcccctgtgctcgtcccaccctagggactcagtcacttgcagaacaggatgggaccgagatttcagcgagccctcctggcgcccggtcctccctgtgggcaccagccctcttggtagctggtgtggagggccggtgtccttggctgccacggagggatttgatcaccgaagcagccacctgctgtagttggacctgaggtcagaggcggggcatcagaggctcaaggtgctgagaagccaccgggaaagcagccagcacaaagggcccaggaagccagcccccgagagctgagcgtgggggtctttgagtgtctttctccaagctgagacgtgggcggccgcgtggtatctcccgagggctgcttggaccctggtgggctgagtgctccgaggaggggtggactccaccttggacagtgggatgtggtgttccacatgtgcctgtttccacgccagcaccttgacttggcagcatggagccaaggtctgtccccgcccaggagggtgccttcctcgggggtagggggacggcccactctgccccagggagtcccttttgatgggaagtgcagtcagcagcgtggaggtgtctgggccaccttcagaaggtggatgtggtggccgagaccccgtccacggagggtgatggcctttcccttctgcaggtgcgggcaggtgggcctgggaccggtgctggggcctctccttgctgtgtgtgagggcccaggtggaaggcgcggacctgacagcattccaataaagcatacgggaacatg

SEQ ID NO: 8454 - protein, 406 aa, Homo sapiens
  ref <308>: DATABASE ACCESSION NUMBER: Refseq / NP_060679
  ref <309>: DATABASE ENTRY DATE: 2002-11-05
MASPRTRKVLKEVRVQDENNVCFECGAFNPQWVSVTYGIWICLECSGRHRGLGVHLSFVRSVTMDKWKDIELEKMKAGGNAKFREFLESQEDYDPCWSLQEKYNSRAAALFRDKVVALAEGREWSLESSPAQNWTPPQPRTLPSMVHRVSGQPQSVTASSDKAFEDWLNDDLGSYQGAQGNRYVGFGNTPPPQKKEDDFLNNAMSSLYSGWSSFTTGASRFASAAKEGATKFGSQASQKASELGHSLNENVLKPAQEKVKEGKIFDDVSSGVSQLASKVQGVGSKGWRDVTTFFSGKAEGPLDSPSEGHSYQNSGLDHFQNSNIDQSFWETFGSAEPTKTRKSPSSDSWTCADTSTERRSSDSWEVWGSASTNRNSNSDGGEGGEGTKKAVPPAVPTDDGWDNQNW

SEQ ID NO: 8455 - DNA, 1838 bp, Rattus norvegicus
  misc_feature (1)..(1838): n=a, c, g or t
  ref <308>: DATABASE ACCESSION NUMBER: EMBL / U35890
  ref <309>: DATABASE ENTRY DATE: 2000-03-04
atatgactgtgatttctgatgaaaccagattggaataattttcatnatatttgtatatttatatatatatattttaaaattttacatttgacttaaagtgccatgagaaaatttgcatattgcaaggtggttctagccacctccttggtttgggtactcttggatatgttcctgctgctttacttcagtgaatgcaacaaatgtgaagagaagaaggagcgagggcttcctgctggggatgttctagagctggtgcagaagcctcacgaaggtcctggagaaatgggaaaaccagtcgtcattcctaaagaggatcaggaaaagatgaaagagatgttcaaaatcaaccagttcaacctaatggcgagtgagatgattgcattcaacagatccttaccagacgtgaggctagaggggtgtaaaacaaaagtgtacccagatagccttcctacgacaagcgtggtgattgtctttcacaatgaggcgtggagcaccctcctgcgaacagtccacagtgtcattaaccgctcaccaagacacatgatagaagagattgttcttgtagacgatgccagcgaaagagactttttgaaaagacctctagagagttatgtgaaaaagcttaaagtgccagttcatgtaattcgaatggaacaacgttctgggttgatcagagctagattaaaaggagctgctgtgtccaaaggccaagtgatcaccttcttagatgctcactgcgagtgcacagtagggtggctggagcctctgttagcccggatcaaacatgacaggaggacagtggtgtgtcctatcatcgatgtgatcagtgatgacacttttgagtacatggcgggctctgatatgacctatggtggattcaactggaagctcaatttccgttggtatcctgttccccaacgagaaatggacagaaggaaaggtgaccggactcttcctgtcagaacacctacaatggctggaggcctgttttcaatagacagagattactttcaggaaattggaacatatgatgctggaatggatatttggggaggagaaaacctagaaatttcctttaggatttggcagtgtggagggactctggaaatagtgacgtgctcccacgttggccatgtgtttcggaaagctacgccgtacacgttcccgggtggcacggggcagatcatcaacaagaataacagacggctcgcggaggtgtggatggatgaattcaagaatttcttctacataatttctccaggtgttacaaaggtagattatggtgatatatcatcaagagtcggtctgagacataaactacagtgcaagcctttctcttggtacctagaaaatatttatcccgattctcaaattcctcgtcactatttctcattgggagagatacgaaatgtggaaacaaatcaatgtctagataacatggctagaaaagagaatgaaaaggttggaatttttaattgtcatggtatgggaggcaatcaggttttctcttacactgccaacaaagaaattagaacagatgacctttgtttggacgtttccaaacttaatggcccagttaccatgctcaaatgccaccacctaaaaggcaaccagctctgggagtatgacccagtgaaattaaccctgcagcatgtgaacagtaaccagtgcctggataaagccacagaagaggacagccaggtgcccagcatcagagactgcactggaagccggtcccagcagtggcttcttcgaaatgtcacccttccagaaatattctgagaccaaattacaacaaagaaaggattgactgggctacctcagcataagccgaattc

SEQ ID NO: 8456 - protein, 559 aa, Rattus norvegicus
  ref <308>: DATABASE ACCESSION NUMBER: SWISS-Prot / Q10473
  ref <309>: DATABASE ENTRY DATE: 2002-06-15
MRKFAYCKVVLATSLVWVLLDMFLLLYFSECNKCEEKKERGLPAGDVLELVQKPHEGPGEMGKPVVIPKEDQEKMKEMFKINQFNLMASEMIAFNRSLPDVRLEGCKTKVYPDSLPTTSVVIVFHNEAWSTLLRTVHSVINRSPRHMIEEIVLVDDASERDFLKRPLESYVKKLKVPVHVIRMEQRSGLIRARLKGAAVSKGQVITFLDAHCECTVGWLEPLLARIKHDRRTVVCPIIDVISDDTFEYMAGSDMTYGGFNWKLNFRWYPVPQREMDRRKGDRTLPVRTPTMAGGLFSIDRDYFQEIGTYDAGMDIWGGENLEISFRIWQCGGTLEIVTCSHVGHVFRKATPYTFPGGTGQIINKNNRRLAEVWMDEFKNFFYIISPGVTKVDYGDISSRVGLRHKLQCKPFSWYLENIYPDSQIPRHYFSLGEIRNVETNQCLDNMARKENEKVGIFNCHGMGGNQVFSYTANKEIRTDDLCLDVSKLNGPVTMLKCHHLKGNQLWEYDPVKLTLQHVNSNQCLDKATEEDSQVPSIRDCTGSRSQQWLLRNVTLPEIF

SEQ ID NO: 8457 - DNA, 989 bp, Homo sapiens
  misc_feature (1)..(989): n=a, c, g or t
  ref <308>: DATABASE ACCESSION NUMBER: EMBL / BG026335
  ref <309>: DATABASE ENTRY DATE: 2001-01-26
gttatgtgaaaaaactaaaagtaccagttcatgtaattcgaatggaacaacgttctggattgatcagagctagattaaaaggagctgctgtgtctaaaggccaagtgatcaccttcctggatgcccattgtgagtgtacagtgggatggctggagcctctcttnggcccaggatcaaacnatgagcgagganngaacagtggtnngtgtctcctatctatcgatgtgtatcagtgtatgtatatcttnnttgatgtactnntgtgcaggtctccnntgtatatgtaaactctatgtgntgnggnnttcccaatctgtgaaggtctccaatnnntttcgtctgtgtattctctnngttcnncccaannnagagaaaatgggaccaaggaaaggaaaggtgatcggattcttccgtgtcaggacacctaccatggcaggaggccttttttcaatagacagagattactttcaggaaattggaacatatgatgctggccattaagagatgcaagcattttgaactgggaggagataagaagagaaagggccaagtgatccagttctaaacttcgggatatttttcttcaattttgaagagaaaatggtgaagccatagaaaagttacccgagggaaataaatacagtgatattcttacgcaaaaaaaaaaggaaaaaaaaaaaaaacatagcaacaggctgacacagacaaccaagagagagaaaaggcagagacaacagcggagccacagaggaccaaccacgacaagaatatacacaagaaacacggagtgggcagcgtacacaataccccggcgcgcaggagacgccacgagcagtatcgaaggaagccgaggcaagagaaaataaagcagcgggagacgaaaacacagagcaaagagaaagccgcgggctggaacagccctagtgatgaaagcgaccaccaggctagcagcagaaaatatggcgagacgcactgggagggagtactgn

SEQ ID NO: 8458 - protein, 105 aa, Homo sapiens; identical to SEQ ID NO: 4984
  ref <308>: DATABASE ACCESSION NUMBER: SWISS-Prot / P09896
  ref <309>: DATABASE ENTRY DATE: 2002-06-15

SEQ ID NO: 8459 - DNA, 3111 bp, Rattus norvegicus
  ref <308>: DATABASE ACCESSION NUMBER: EMBL / U36444
  ref <309>: DATABASE ENTRY DATE: 2000-05-02
gttggccaccatggggatgtaccaagtgagactgtagggaaagaaggtggtgactcgcgtgcctggctactggctgctgctcacctcgatgctacaagattcctagcaagatcaaaactgaccattaacctacctctacatccccctggcgccgttccagggccaacgccacattccctgctgggcacgcaatggccgcaccccctcccgctacagaaggctcttttggtacacgcagtccgaggtcgccatggatcggatgaagaagatcaaacggcagctgtcaatgacactccgagggggccgaggcatagacaagaccaatggtgtccctgagcagataggcctagatgagagtggtggtggtggtggcatgacccttggagaagctcccacccgtgttgcccctggggaacttcgctctattcggggcccactcagctctgcaccaggtctacctgggtttcccagtctgctctaggggccatgtacacaaatggatacgatgaagaaatatattatattgggggaaagagagtgttcttgactccaaaggcctggcctttccctcactctgcaccagagattgtgcatgaagacatgaagatgggatctgatggggagagtgaccaggcttcagccacatcctcagatgaggtgcagtctccagtgagagtgcgcatgcgcaaccaccccccacgcaagatctccactgaggatatcaacaaatgcctgtcactaccagctgacatacggctgcctgagggctaccttgagaagctgaccctcaatagccccatcggtgataagcctcttagccggcgcctccggccagtcagcttgtctgagattggctttggaaaactggagacctacatcaaactagacaagctgggtgagggtacctatgccactgtctacaaaggcaaaagcaagctcacagacaaccttgtagcacttaaggagatcagactggaacacgaagaaggggcaccctgcactgctatccgggaagtatccctgcttaaggacctcaagcatgccaacatcgtcacactacatgacattatccacacagagaagtccctcacccttgtctttgaatacttggacaaggacctgaagcagtacctggatgactgtggaaatgtcatcaacatgcacaatgtgaaactgttcctgttccagttgctccgtggcctggcctactgccacaggcagaaggtgctacaccgagacctcaagccccagaacctactcatcaacgagaggggagagctcaaactggcagactttggcctggcttacgccaagtcaattcctactaaaacatactccaacgaagtggtgacactgtggtaccggccccctgacatcttacttgggtccacagactactccggccaaattgacatgtggggtgttggctgcatcttttatgagatggccacaggccggcccctcttcccaggctccacagtggaagaacagctgcacttcatcttccgcattttgggaaccccaactgaggacacatggccaggtatcctgtccaatgaagagtttagaacatacaactaccccaagtaccgagccgaggcccttctgaggcatgcaccccgacttgaatgcgatggagctgacctcctcaccaagctgctgcagtttgagggtcgcaatcggatctctgctgaggatgccatgaaacatccattctttctcagcttgggggagcggatccacaaacttcctgacactacttccatatttgcactaaaggaggtacagctacaaaaggaggccaacattcggtccacttctatgcctgactcaggcaggccagctttccgtgtggtggataccgagttctaagccaagttttaagccacagacagaccaaggccccagcaggcagcggctggagggatgccacacccctcacaggacagcccccatctgcaatcctccctgcttgttgcctgcttacctgcctgagccacactcccctgccaacttgtcccctgccacctgtccaaacaccgaactactggcctggcctgtcaacccaaccactggcctgtctgctgggtgctaacaaagctctcaccactactttgcttgatgtgtctgtctctgtcttggtagatgctggtggaccgaatggccgtgccagctttccacactaaggctaggccttcccctcttcatcacactctctcccaggaccactaccccatggccagccaggggtttggagctagcccaggccaggctcttaatcgactttgactagaaggtagtgagtgatgccttgggtctgagcatcatttgcctgcttcccacctgtcccacttgcctctgttgtatgggcttttttttagtttcttttattgtttttttattattttaaatgaggttctcactttttaatgcaatatctctgtatacagactggttgggcactactccctgagtgtggcactcccacagtattttgtgcaatgaagtcccactcccaccctttgagaggtagggacccagaccctattcagatcctcaccatcactagaccctggaattggctatgggaaagcatgcctcagccactcaccttcctcccctacctagcgttcccagctatagggggacctgagaactaccagagagtgggagatggacatggtggggcctactttttccctccttcagtcccgtagccagggcctccttccttctcagggtcttccccagcccagctctgcctagccctcctgccctgtcctactcggtgctgttgagtaggggctctgcctggaatcgagcagcttagtgaggagccatatataatatgtgcacaagcaggaggacatgtgggagcttgtgcccaattgttacaccccaatccctaggagggtcaggcaggccaaggacagtctcctggatggatggtttgctccccttactccaccttaagccttgggacccttaagcagggtgggagggcaagggagggtgccctcctagtggggtttggggggattgggttcctgaatgcaccataatcgctgtatgaaatattaaaaaaaagtctaaagtgaaaaaaaaaaaaaa

SEQ ID NO: 8460 - protein, 462 aa, Rattus norvegicus
  misc_feature (1)..(462): Xaa=Unknown amino acid
MYTNGYDEEIYYIGGKRVFLTPKAWPFPHSAPEIVHEDMKMGSDGESDQASATSSDEVQSPVRVRMRNHPPRKISTEDINKCLSLPADIRLPEGYLEKLTLNSPIGDKPLSRRLRPVSLSEIGFGKLETYIKLDKLGEGTYATVYKGKSKLTDNLVALKEIRLEHEEGAPCTAIREVSLLKDLKHANIVTLHDIIHTEKSLTLVFEYLDKDLKQYLDDCGNVINMHNVKLFLFQLLRGLAYCHRQKVLHRDLKPQNLLINERGELKLADFGLAYAKSIPTKTYSNEVVTLWYRPPDILLGSTDYSGQIDMWGVGCIFYEMATGRPLFPGSTVEEQLHFIFRILGTPTEDTWPGILSNEEFRTYNYPKYRAEALLRHAPRLECDGADLLTKLLQFEGRNRISAEDAMKHPFFLSLGERIHKLPDTTSIFALKEVQLQKEANIRSTSMPDSGRPAFRVVDTEFX

SEQ ID NO: 8461 - DNA, 3131 bp, Homo sapiens
  ref <308>: DATABASE ACCESSION NUMBER: Refseq / NM_006201
  ref <309>: DATABASE ENTRY DATE: 2002-11-05
gcggagcgcggcgcgcgcggcggttgggccgttggctgttcggccctgggatccgccgccactccgcgatcagaccgctctgtgccgcgagccgccgtgagcactcggattcaagccggcgccaacgagtccgggggcatcgcccgcagcggccaagctcatggccggctgagcgggacgccgcctccgcctcagccaccgccgccgccgccgcctcctcctcctcagccggcggcggcccgggcccagcaaccatggctgaagactactgggacgggcgcctgcggcgaacaggaggagaaggaggtcgcgcggcctcatcccgggccgccgccccaggcgccgccgcgccggccccgcggctctgaggttgctcgcgcgcccccgccgatcgccatggatcggatgaagaagatcaaacggcagctgtcaatgacactccgaggtggccgaggcatagacaagaccaatggtgcccctgagcagataggcctggatgagagtggtggtggtggcggcagtgaccctggagaggcccccacacgtgctgctcctggggaacttcgttctgcacggggcccactcagctctgcaccagagattgtgcacgaggacttgaagatggggtctgatggggagagtgaccaggcttcagccacgtcctcggatgaggtgcagtctccagtgagagtgcgtatgcgcaaccatcccccacgcaagatctccactgaggacatcaacaagcgcctatcactaccagctgacatccggctgcctgagggctacctggagaagctgaccctcaatagccccatctttgacaagcccctcagccgccgcctccgtcgtgtcagcctatctgagattggctttgggaaactggagacctacattaagctggacaaactgggcgagggtacctatgccaccgtctacaaaggcaaaagcaagctcacagacaaccttgtggcactcaaggagatcagactggaacatgaagagggggcaccctgcaccgccatccgggaagtgtccctgctcaaggacctcaaacacgccaacatcgttacgctacatgacattatccacacggagaagtccctcacccttgtctttgagtacctggacaaggacctgaagcagtacctggatgactgtgggaacatcatcaacatgcacaacgtgaaactgttcctgttccagctgctccgtggcctggcctactgccaccggcagaaggtgctacaccgagacctcaagccccagaacctgctcatcaacgagaggggagagctcaagctggctgactttggcctggcccgagccaagtcaatcccaacaaagacatactccaatgaggtggtgacactgtggtaccggccccctgacatcctgcttgggtccacggactactccactcagattgacatgtggggtgtgggctgcatcttctatgagatggccacaggccgtcccctctttccgggctccacggtggaggaacagctacacttcatcttccgtatcttaggaaccccaactgaggagacgtggccaggcatcctgtccaacgaggagttcaagacatacaactaccccaagtaccgagccgaggcccttttgagccacgcaccccgacttgatagcgacggggccgacctcctcaccaagctgttgcagtttgagggtcgaaatcggatctccgcagaggatgccatgaaacatccattcttcctcagtctgggggagcggatccacaaacttcctgacactacttccatatttgcactaaaggagattcagctacaaaaggaggccagccttcggtcttcgtcgatgcctgactcaggcaggccagctttccgcgtggtggacaccgagttctaagccacagaccgaggccccagcaggcagcggctggagggatgccacacccctcacagggcagcccccaactacatcttccctgcttactctctgcctacctgcctgagccatgttcacctgcccacttgtcccctgctgcctgcccaaacaccccaccattggcctgtcaacccacccattggcctgtctgctgggtgctaacaaagctctcatcactccttcacttggtctgtctgtctctgtcttggtagttgccggtggacagcatggccgtgccagcctcccacactgaggccaggtctaccccccatcataccagcccccaggaccactaccccacggccagccaggggtccagagctagcccaggctggggatctcgactcagacaagatggtgacaatgccttgagtctgaggcatcctctgcctgctttcctgcctgccccacctgcctcatattgtgtgggcctttttttgtttgtttcattcattgttttttttttttttaattattttaaatgagatttttgttttttttaaatgcaatatctctgtatacagactggctgggccccaccccctgcgtgtggccctcccacagtattttgtgcaatgaagccctgctcccagcctttcagagacagggacacagcccctatttggaaccctgatcatcaccagaccctgggattggctatgggaaagcatgccacagccactcgccttcctacccccgcccgccatccccagttgcagggggatctggggactaccagagactctgggaaatggacaaggtggggggccccactctttctctcctgcagtcccgtagctggggcctccttccttctcagggtctccccagcccagtccccttgctcccatcccactcggtgctgttgggtaggggccctgccaggaactgaccagctcagcgaggagccataatgtgcatatgtgcacaagcagggttgggggaggggggtgtgaggggttgtgcccaggtgttgccccctatctcctggggagggtgaggcagggcagggacagtctccagggtcagtccctggatgggtggttacctccccttcctccaccctaagccctggggccctgaaatggggtgggagggcaggggtgggagccctcctagtgggtttggggggttgggttcctgaatgcaccataatcgctgtatgaaatattaaaaagtctaaagtgaaaaaaaaaaaaaaaaaa

SEQ ID NO: 8462 - protein, 496 aa, Homo sapiens [sequence omitted]

SEQ ID NO: 8463 - DNA, 3111 bp, Rattus norvegicus; identical to SEQ ID NO: 8459
  ref <308>: DATABASE ACCESSION NUMBER: EMBL / U36444
  ref <309>: DATABASE ENTRY DATE: 2000-05-02

SEQ ID NO: 8464 - protein, 462 aa, Rattus norvegicus; identical to SEQ ID NO: 8460
  misc_feature (1)..(462): Xaa=Unknown amino acid

SEQ ID NO: 8465 - DNA, 3131 bp, Homo sapiens; identical to SEQ ID NO: 8461
  ref <308>: DATABASE ACCESSION NUMBER: Refseq / NM_006201
  ref <309>: DATABASE ENTRY DATE: 2002-11-05

SEQ ID NO: 8466 - protein, 496 aa, Homo sapiens [sequence omitted]

SEQ ID NO: 8467 - DNA, 3111 bp, Rattus norvegicus; identical to SEQ ID NO: 8459
  ref <308>: DATABASE ACCESSION NUMBER: EMBL / U36444
  ref <309>: DATABASE ENTRY DATE: 2000-05-02

SEQ ID NO: 8468 - protein, 462 aa, Rattus norvegicus; identical to SEQ ID NO: 8460
  misc_feature (1)..(462): Xaa=Unknown amino acid

SEQ ID NO: 8469 - DNA, 3131 bp, Homo sapiens; identical to SEQ ID NO: 8461
  ref <308>: DATABASE ACCESSION NUMBER: Refseq / NM_006201
  ref <309>: DATABASE ENTRY DATE: 2002-11-05

SEQ ID NO: 8470 - protein, 496 aa, Homo sapiens [sequence omitted]

SEQ ID NO: 8471 - DNA, 1139 bp, Rattus norvegicus
  ref <308>: DATABASE ACCESSION NUMBER: EMBL / U36482
  ref <309>: DATABASE ENTRY DATE: 2000-03-04
cctgctgtagcttgcccatctcccgctcccacaatccggcgtgatggctgccgccgttcctggcgccgtttcgctctccccactgctgtccgttctccttggcctgctgctcctctctgctcctcatggcgccagcggcctgcacacgaagggcgcccttcccttggacacagtcactttctacaaggtcattcccaaaagcaagttcgtcttggtgaagttcgacacccagtacccctatggagagaagcaagatgagtttaagcgtctggctgagaactcagcctccagcgatgatctcttggtggcagaggtggggatctcagactatggtgacaagctgaacatggagctgagtgagaagtacaagctggacaaagagagctacccagtcttctacctcttccgggatggggactttgagaatcctgtcccatacagcggggcagttaaagttggagccatccagcgctggctcaaggggcagggagtctatctgggcatgcctggatgtctgcctgcgtacgatgccctggcgggccagttcatcgaggcctccagcagagaggcccgccaggccatcctgaaacaggggcaggatggcctctcaggtgtgaaggagacagacaagaagtgggccagtcagtacctgaagatcatggggaagatcttggaccaaggtgaagacttcccggcctccgagctggcccggatcagtaagctcattgagaacaagatgagtgagggtaagaaggaagagctgcagaggagcctcaacatcctcaccgccttccgcaagaaaggcgccgagaaggaggagctgtgagggcaccaggctgctagggtttgctgagggcggggagggagagccgcctgctgactgtggggccctgtgggtggagggggcagtggagcaaagcagtcctgagccagagacctgtgccccgagtgcctggacactgaggctgctgagaccataccctggacatccttggtgcagtttgtggggagcctgtgtgccaagacaagatggctgtgtccccacaggagctggtactatagaggaaggtccttgacaggtatagttctgatcaaataaaagtctgttttgggttaaaaaaaaaaaaaaaaaaaaaaaa

SEQ ID NO: 8472 - protein, 260 aa, Rattus norvegicus
  ref <308>: DATABASE ACCESSION NUMBER: SWISS-Prot / P52555
  ref <309>: DATABASE ENTRY DATE: 2002-06-15
MAAAVPGAVSLSPLLSVLLGLLLLSAPHGASGLHTKGALPLDTVTFYKVIPKSKFVLVKFDTQYPYGEKQDEFKRLAENSASSDDLLVAEVGISDYGDKLNMELSEKYKLDKESYPVFYLFRDGDFENPVPYSGAVKVGAIQRWLKGQGVYLGMPGCLPAYDALAGQFIEASSREARQAILKQGQDGLSGVKETDKKWASQYLKIMGKILDQGEDFPASELARISKLIENKMSEGKKEELQRSLNILTAFRKKGAEKEEL

SEQ ID NO: 8473 - DNA, 892 bp, Homo sapiens
  ref <308>: DATABASE ACCESSION NUMBER: EMBL / X94910
  ref <309>: DATABASE ENTRY DATE: 1998-08-07
cggccggcgatatggctgccgctgtgccccgcgccgcatttctctccccgctgcttccccttctcctgggcttcctgctcctctccgctccgcatggcggcagcggcctgcacaccaagggcgcccttcccctggatacggtcactttctacaaggtcattcccaaaagcaagttcgtcttggtgaagttcgacacccagtacccctacggtgagaagcaggatgagttcaagcgtcttgctgaaaactcggcttccagcgatgatctcttggtggcagaggtggggatctcagattatggtgacaagctgaacatggagctgagtgagaaatacaagctggacaaagagagctacccagtcttctacctcttccgggatggggactttgagaacccagtcccatacactggggcagttaaggttggagccatccagcgctggctgaaggggcaaggggtctacctaggtatgcctggttgcctgcctgtatacgacgccctggccggggagttcatcagggcctctggtgtggaggcccgccaggccctcttgaagcaggggcaagataacctctcaagtgtgaaggagactcagaagaagtgggccgagcaatacctgaagatcatggggaagatcttagaccaaggggaggacttcccagcatcagagatgacacggatcgccaggctgattgagaagaacaagatgagtgacggcaagaaggaggagctccagaagagcttaaacatcctgactgccttccagaagaagggggccgagaaagaggagctgtaaaaaggctgtctgtgattttccagggtttggtgggggtagggaggggagagttaacctgctggctgtgagtcccttgtggaatataagggggcccg

SEQ ID NO: 8474 - protein, 261 aa, Homo sapiens
  ref <308>: DATABASE ACCESSION NUMBER: SWISS-Prot / P30040
  ref <309>: DATABASE ENTRY DATE: 2002-06-15
MAAAVPRAAFLSPLLPLLLGFLLLSAPHGGSGLHTKGALPLDTVTFYKVIPKSKFVLVKFDTQYPYGEKQDEFKRLAENSASSDDLLVAEVGISDYGDKLNMELSEKYKLDKESYPVFYLFRDGDFENPVPYTGAVKVGAIQRWLKGQGVYLGMPGCLPVYDALAGEFIRASGVEARQALLKQGQDNLSSVKETQKKWAEQYLKIMGKILDQGEDFPASEMTRIARLIEKNKMSDGKKEELQKSLNILTAFQKKGAEKEEL

SEQ ID NO: 8475 - DNA, 1139 bp, Rattus norvegicus; identical to SEQ ID NO: 8471
  ref <308>: DATABASE ACCESSION NUMBER: EMBL / U36482
  ref <309>: DATABASE ENTRY DATE: 2000-03-04

SEQ ID NO: 8476 - protein, 260 aa, Rattus norvegicus; identical to SEQ ID NO: 8472
  ref <308>: DATABASE ACCESSION NUMBER: SWISS-Prot / P52555
  ref <309>: DATABASE ENTRY DATE: 2002-06-15

SEQ ID NO: 8477 - DNA, 892 bp, Homo sapiens; identical to SEQ ID NO: 8473
  ref <308>: DATABASE ACCESSION NUMBER: EMBL / X94910
  ref <309>: DATABASE ENTRY DATE: 1998-08-07

SEQ ID NO: 8478 - protein, 261 aa, Homo sapiens; identical to SEQ ID NO: 8474
  ref <308>: DATABASE ACCESSION NUMBER: SWISS-Prot / P30040
  ref <309>: DATABASE ENTRY DATE: 2002-06-15

SEQ ID NO: 8479 - DNA, 1139 bp, Rattus norvegicus; identical to SEQ ID NO: 8471
  ref <308>: DATABASE ACCESSION NUMBER: EMBL / U36482
  ref <309>: DATABASE ENTRY DATE: 2000-03-04

SEQ ID NO: 8480 - protein, 260 aa, Rattus norvegicus; identical to SEQ ID NO: 8472
  ref <308>: DATABASE ACCESSION NUMBER: SWISS-Prot / P52555
  ref <309>: DATABASE ENTRY DATE: 2002-06-15

SEQ ID NO: 8481 - DNA, 892 bp, Homo sapiens; identical to SEQ ID NO: 8473
  ref <308>: DATABASE ACCESSION NUMBER: EMBL / X94910
  ref <309>: DATABASE ENTRY DATE: 1998-08-07

SEQ ID NO: 8482 - protein, 261 aa, Homo sapiens; identical to SEQ ID NO: 8474
  ref <308>: DATABASE ACCESSION NUMBER: SWISS-Prot / P30040
  ref <309>: DATABASE ENTRY DATE: 2002-06-15

SEQ ID NO: 8483 - DNA, 1139 bp, Rattus norvegicus; identical to SEQ ID NO: 8471
  ref <308>: DATABASE ACCESSION NUMBER: EMBL / U36482
  ref <309>: DATABASE ENTRY DATE: 2000-03-04

SEQ ID NO: 8484 - protein, 260 aa, Rattus norvegicus; identical to SEQ ID NO: 8472
  ref <308>: DATABASE ACCESSION NUMBER: SWISS-Prot / P52555
  ref <309>: DATABASE ENTRY DATE: 2002-06-15

SEQ ID NO: 8485 - DNA, 892 bp, Homo sapiens; identical to SEQ ID NO: 8473
  ref <308>: DATABASE ACCESSION NUMBER: EMBL / X94910
  ref <309>: DATABASE ENTRY DATE: 1998-08-07

SEQ ID NO: 8486 - protein, 261 aa, Homo sapiens; identical to SEQ ID NO: 8474
  ref <308>: DATABASE ACCESSION NUMBER: SWISS-Prot / P30040
  ref <309>: DATABASE ENTRY DATE: 2002-06-15

SEQ ID NO: 8487 - DNA, 3485 bp, Rattus norvegicus
  ref <308>: DATABASE ACCESSION NUMBER: EMBL / U36580
  ref <309>: DATABASE ENTRY DATE: 2000-03-04
gaagtgaagttgctgtcagtggcgcctccggctcccggggaagctgagagtttccgcaggtggcggctgcggcggcggcggcagcggtagcaactgcaacagtagcaacgaaggctgtgggtctgcagctgtgttcccagtcgacattgctcacggtgaaggtgacatctccctccagtttcacaaaatgagtgtggtatggttacgaagaccaggacctaaacttcacagagagcccagcctgctgttctgatgccgaaagggagacagaaagtcccacgcttggatgcccgcctgggcctgcctatctgcctctgtctggaattagccatcttctttctggttccccaggtcatgggcctaacagaggcaggtggtcttgacaccttgggtgcaggggggctaagctgggctgtacatctggacagcctagaaggtgagaggaaggaagagagtctgatacaacaggcaaatgctgtggcccaggcagcggggctggtgaatgctgggcgcattggagagctccaggggcactacctctttgtccagccagctgggcacgggcaagccatggaggcggaggccatgcggcaacaggcagaggctgtgttagccaagcatgaagctgtgcgctggcactcagagcagaggctgctgaagagggccaagcgcagcatccacttcaatgatcccaagtatcctcaacagtggcacctgaataatcggcggagcccaggaagagacatcaatgtgacaggtgtgtgggagagaaatgtaactgggcgaggggtgacggtggtagtggtggacgacggagtggagcacaccgtccaggacattgcacccaactatagcccagagggaagctatgacctcaactctaatgacccagatcctatgccccaccctgatgaggagaacggtaaccaccatgggacccggtgtgcaggagaaattgcagctgtgcccaacaacagcttctgtgcagtaggtgtggcctatgggagccgaatagcaggtatccgggtgctggatggaccactcacagacagtatggaagctgtggcattcaacaaacactatcagatcaatgacatctacagctgcagctggggccccgatgatgatgggaagacagtggatggtcctcatcagcttgggaaggctgccttacaacatggagtgatggctggtcgccaaggctttggaagtatctttgtggttgccagtggtaatggtggccagcacaatgacaactgcaactatgatggctatgccaactccatctacactgtcaccataggagctgtggatgaggagggacggatgcctttttatgcagaggagtgtgcctccatgctggcagtcaccttcagtggaggagacaagatgctgcggagcattgtgactactgactgggaccttcagaagggcactggctgcactgaaggccacacaggaacctcagctgcagcccctctagcagctggcatgatagctctcatgctgcaggtgcggccctgcctcacgtggcgggatgtccagcacatcattgtcttcacagccactcagtatgaagatcatcgtgcagactggctcactaatgaggctggattcagccacagccatcagcatggtttcggcctgctcaacgcctggagacttgtcaatgcagccaagatctggacgtctgtcccttacttagcttcctatgtcagccccatgctgaaagaaaataaggctgttccacggtccccccactctctggaggtcctatggaatgtcagcaggacggacctggagatgtcggggctgaagaccctggaacatgtggcggtgacagtctccatcactcacccacgacgtggcagcttagaactgaaactgttttgtcccagtggcatgatgtctttgatcggcgcgccccgcagcatggactcggaccctaacggcttcaatgactggacattttccactgtgcggtgctggggggaaagagcaagaggagtctacagactggttatcagggatgtaggagatgagccgctccaggtgggcatcctccagcagtggcagctgacgctgtatggctccacgtggagtccagtagacatcaaggacagacaaagtctcttagaaagtgctatgagtggaaaatacctgcatgatgacttcactctgccttgcccacctggactgaaaattcctgaggaggatggttacagcattacccctaacacactcaagacccttgtgctggttggctgcttcagtgtcttctggaccatttactacatgctagaagtgtgcctgagccagaggagcaaggcttccacccatggctgcaggagaggatgctgcccctggcccccacaaagccaaaactccaaggaagtggggacagcactagaatcaatgccactgtgcagcagcaaggacctggatggagtggattcagagcacggggactgcacaactgcctctagcttgctggccccagagctgctgggggaagctgactggagtctgtcccagaacagtaagagtgacctggattgtcctccccaccaacccccagacctgaaggatggacagatctgctgaccccagagcccagcttcttccatgtacaacaggctcttcctaaacttggttatgaggctttcaatcatggatgctcaggagagaatggtcctgatagtgacatctgccacccaaggcctctgaagcattctcagccttctcaagagggtgagggccatcttaattaagcgcagtggtaagggactggtgttcatggctcctctagctgagctttgctgagagcctttcgacaaggggttggcgcccaggccaggcagcccttgatttcatctctctcgggctagtcactgtcctcggccatcaggacctccaccccttcacaagttatgcagcaggtgcctgtatacctaggaacactctcaacagaagtgccgctgtaccgagggcccagagagaggctggcaagagcctagacatgcctaccctgaaagcagctgccttcattaccctttcctgtgtgcctgttctgaagcccgtaccttcactaccactcacccttcctgctgaaggaatggtggcgtgtcccaggaaaactgggaggcacaggattcccagccagcacccttgctgcctcactggggaagttgtcctgctgggctgcagagagctgagacacagtgttgtctaagatagcatgggagcccctgcctatgaccacctgtcttcctctgcaaagtgctcagggaaatggccttcattccagaggccagctgtccgcctgacttttcctccattcttggccttctccccttcccatctttggagctaattgttaatatgaattttttaatgcttaagatttgatttttacttttcaaagcaacattttgttgaatttttttctgcacagctttccaaaataaaaagcagaagtaaaaaaa

SEQ ID NO: 8488 - protein, 783 aa, Rattus norvegicus
  ref <308>: DATABASE ACCESSION NUMBER: SWISS-Prot / Q62849
  ref <309>: DATABASE ENTRY DATE: 2002-06-15
MPKGRQKVPRLDARLGLPICLCLELAIFFLVPQVMGLTEAGGLDTLGAGGLSWAVHLDSLEGERKEESLIQQANAVAQAAGLVNAGRIGELQGHYLFVQPAGHGQAMEAEAMRQQAEAVLAKHEAVRWHSEQRLLKRAKRSIHFNDPKYPQQWHLNNRRSPGRDINVTGVWERNVTGRGVTVVVVDDGVEHTVQDIAPNYSPEGSYDLNSNDPDPMPHPDEENGNHHGTRCAGEIAAVPNNSFCAVGVAYGSRIAGIRVLDGPLTDSMEAVAFNKHYQINDIYSCSWGPDDDGKTVDGPHQLGKAALQHGVMAGRQGFGSIFVVASGNGGQHNDNCNYDGYANSIYTVTIGAVDEEGRMPFYAEECASMLAVTFSGGDKMLRSIVTTDWDLQKGTGCTEGHTGTSAAAPLAAGMIALMLQVRPCLTWRDVQHIIVFTATQYEDHRADWLTNEAGFSHSHQHGFGLLNAWRLVNAAKIWTSVPYLASYVSPMLKENKAVPRSPHSLEVLWNVSRTDLEMSGLKTLEHVAVTVSITHPRRGSLELKLFCPSGMMSLIGAPRSMDSDPNGFNDWTFSTVRCWGERARGVYRLVIRDVGDEPLQVGILQQWQLTLYGSTWSPVDIKDRQSLLESAMSGKYLHDDFTLPCPPGLKIPEEDGYSITPNTLKTLVLVGCFSVFWTIYYMLEVCLSQRSKASTHGCRRGCCPWPPQSQNSKEVGTALESMPLCSSKDLDGVDSEHGDCTTASSLLAPELLGEADWSLSQNSKSDLDCPPHQPPDLKDGQIC

SEQ ID NO: 8489 - DNA, 3497 bp, Homo sapiens
  ref <308>: DATABASE ACCESSION NUMBER: EMBL / BC010696
  ref <309>: DATABASE ENTRY DATE: 2001-07-13
cactgctcctccggctcccgggaagccgcgagtttccgcagggaggcggcggcagctgcggcggggccggtctgtagcctttgctgagtcaacactactcacagtgaaagtgatgccttttctccatttgcacaacatgagtgtgacgtggttagccagaccaggagctcaacctcatgtagaatccagtccactgctctgatgccgaaggggaggcagaaagtgccacacttggatgcccccctgggcctgcccacctgcctctggctggaattagccgggctcttcttactggttccctgggtcatgggcctggcagggacaggtgggcctgatggccagggcacaggggggccgagctgggctgtgcacctggaaagcctggaaggtgacggggaggaagagactctggagcagcaggcggatgccttggcccaggcagcagggctggtgaatgctggacgcatcggagagcttcaggggcactacctctttgtccagcctgctgggcacaggccggccctggaggtggaggccatccggcagcaggtggaggctgtgttggctgggcatgaagctgtgcgctggcactcagagcagaggctgctaaggcgggccaagcgcagcgtccacttcaacgaccccaagtacccgcagcaatggcacctgaataaccgacggagcccgggcagggacatcaacgtgacgggtgtgtgggaacgcaatgtgactgggcgaggggtgacggtggtggtagtggatgacggagtggaacacaccatccaggacattgcacccaactatagccctgagggtagctatgacctcaactctaatgaccctgaccccatgccccacccggatgtggagaatggcaaccaccatggcacgcgatgtgcaggagagatcgcggctgtgcccaacaacagcttctgtgccgtgggcgtggcctacgggagccgcatcgcaggtatccgggtactggatggacctctcacagacagcatggaggcagtggcgttcaacaagcactatcagatcaatgacatctacagctgcagctggggaccagatgacgatgggaagacagtggatggcccccatcagcttggaaaggctgccttacaacatggggtgattgctggtcgccagggctttgggagcatctttgtggtagccagtggcaacggaggccaacacaacgacaactgcaactacgatggctacgccaactccatctacaccgtcaccataggagctgtggatgaggagggacgcatgcctttctatgcagaagaatgtgcctccatgctggcagtcaccttcagtggtggggacaagatgcttcggagcattgtgaccactgactgggaccttcagaagggcactggctgcactgagggccacacagggacctcagctgcagcgcctctggcagctggcatgatagccttaatgctgcaggtgcggccctgcctcacgtggcgtgacgtccagcacatcattgtcttcacagccacccggtatgaggatcgccgtgcagagtgggtcaccaacgaggcaggcttcagccatagccaccagcacggtttcggcctcctcaacgcctggaggctcgtgaatgcagccaagatctggacatctgtcccttacttagcatcctacgtcagtcccgtgttaaaagaaaacaaggcgattccgcagtccccccgttccctggaggtcctgtggaatgtcagcaggatggacctggagatgtcagggctgaagaccctggagcatgtggcagtgacagtctccatcactcacccacggcgcggcagcttggagctgaagctgttctgccccagtggcatgatgtccctcatcggcgccccccgcagcatggactcggatcccaacggcttcaatgactggaccttctccactgtgcgatgctggggggagagagcccgagggacctacaggcttgtcatcagggatgtcggggatgagtcattccaggtcggcatcctccggcaatggcagctgaccctatatggctctgtgtggagtgcagtagacatcagggacagacaaaggctgttagagagtgccatgagtggaaaatacctgcacgatgacttcgccctgccctgcccaccggggctgaaaattcctgaggaagatggttacaccatcacccccaacaccctcaagaccctggtgctggtaggctgtttcaccgtcttctggactgtttactacatgctggaagtatatttgagccagaggaatgtggcttccaatcaagtttgtaggagtggaccctgccactggccccatcggagccggaaagccaaggaggaagggacagagctagaatcagtgccactttgcagcagcaaggatccagacgaagtggaaacagagagcaggggccctcccaccacctctgacctccttgccccagacctgctggagcaaggggactggagcctgtcccagaacaagagcgccctggactgccctcatcagcacctagacgtaccgcacgggaaggaggagcagatctgctgacctcagggcctgacagtgtgggacaggctcttctttcccaaaattagggagctcttgacagaaagcagttctgatgcttacatctggaatctgaggcatcctctgactccactcaaagagggtgagggccttcttaagatacaaatggtggaggattgctgccagagaagtctggtcagagccacagggtctgcctccagccaaacgggagcttttggtgagaaggtgttggacaggggattggcgcccccctttggtttggcctccatcctcatctctcttgggccaagccagctgcctaggtcccccaagcatgggggaccccttcccacatataagttgagaaggtgcctgccatagccaggagcgcatctcaatggaaacatcactggggtcacttgggaagaggacttcggggtagaggctgggaggagcccctggacatgcctgtcctgaaagcggctgcctccattatccattcccaagatgcctgatcagaaaccaaccatgaatgaacccctggctccttcaccacccccacgattggtatgatgctgccggcacagctgggatacacacggctcccccaggcctgagctgcttcactagggaatcctgcggcaggactgcagagcagatggcagatgcacatgttggaggagagagccttgggagccactgccactccagtcctgccaccaccctgtcttcctctgcaagtgctcagggaaatggccttcccgccggaggccagctatctgcctgacaggctgtgactcttctctcaaccttggccttctcccctcttctgagctagttggttgaattttttttaatgcttaagatttgtttttctcttttcacagcaacattttcttgaatttttttctgcacagcttttccaaaataaaaaccttccaaacaaaaaaaaaaaaaaa

SEQ ID NO: 8490 - protein, 785 aa, Homo sapiens
  ref <308>: DATABASE ACCESSION NUMBER: SWISS-Prot / Q16549
  ref <309>: DATABASE ENTRY DATE: 2002-06-15
MPKGRQKVPHLDAPLGLPTCLWLELAGLFLLVPWVMGLAGTGGPDGQGTGGASWAVHLESLEGDGEEETLEQQADALAQAAGLVNAGRIGELQGHYLFVQPAGHRPALEVEPIRQQVEAVLAGHEAVRWHSEQRLLRRAKRSVHFNDPKYPQQWHLNNRRSPGRDINVTGVWERNVTGRGVTVVVVDDGVEHTIQDIAPNYSPEGSYDLNSNDPDPMPHPDVENGNHHGTRCAGEIAAVPNNSFCAVGVAYGSRIAGIRVLDGPLTDSMEAVAFNKHYQINDIYSCSWGPDDDGKTVDGPHQLGKAALQHGVIAGRQGFGSIFVVASGNGGQHNDNCNYDGYANSIYTVTIGAVDEEGRMPFYAEECASMLAVTFSGGDKMLRSIVTTDWDLQKGTGCTEGHTGTSAAAPLAAGMIALMLQVRPCLTWRDVQHIIVFTATRYEDRRAEWVTNEAGFSHSHQHGFGLLNAWRLVNAAKIWTSVPYLASYVSPVLKENKAIPQSPRSLEVLWNVSRMDLEMSGLKTLEHVAVTVSITHPRRGSLELKLFCPSGMMSLIGAPRSMDSDPNGFNDWTFSTVRCWGERARGTYRLVIRDVGDESFQVGILRQWQLTLYGSVWSAVDIRDRQRLLESAMSGKYLHDDFALPCPPGLKIPEEDGYTITPNTLKTLVLVGCFTVFWTVYYMLEVYLSQRNVASNQVCRSGPCHWPHRSRKAKEEGTELESVPLCSSKDPDEVETESRGPPTTSDLLAPDLLEQGDWSLSQNKSALDCPHQHLDVPHGKEEQIC

SEQ ID NO: 8491 - DNA, 2519 bp, Rattus norvegicus
  ref <308>: DATABASE ACCESSION NUMBER: EMBL / U36771
  ref <309>: DATABASE ENTRY DATE: 1999-03-29
cagccttggccgatgtaaacacacgaatgaggactgggttgactttggcttcaaacctaccttcttcagatccgcaacgctgaaatggaaggagagcctcatgagccggaagaggcccttcgtgggaaggtgttgctattcatgcacgcctcagagctgggaaaggttcttcaaccccagtatcccacctctgggtttgcggaatgttatttatatcaatgaaactcacacaaggcaccgaggatggctggcaagacggctttcttacatcctttttgttcaagagcgcgatgtccacaagggcatgtttgccaccagtatcactgacaatgtactgaatagcagcagagtccaagaggcaattgctgaagtggctgcagaattgaacccggatggatctgcccagcagcagtccaaagccatccagaaagtgaaaaggaaagccaggaagatcctccaggaaatggttgctacagtctcccccgggatgatcaggctgactggctgggtgttactaaagctcttcaacagcttcttctggaacattcagattcacaagggtcaacttgagatggtgaaagctgcaactgagacgaatctgccgctcttgtttctgccggtgcacagatcccacatcgactacctgttgctcaccttcatcctcttctgccacaacatcaaagctccatacatcgcctcgggcaacaacctcaacatccccatcttcagtaccttgattcacaagcttgggggctttttcataagacggaggcttgacgaaactccagatggacgcaaagacattctgtacagagcgttgctccatgggcatgtagttgaactcctccgacagcagcagttcctggagatcttcctggaaggcacccgctcccgcagtggcaagacctcctgtgcccgggccggcgtcctgtcagtggtagtggatactctgtcatccaacaccatccctgacatcctggtcatccctgtgggcatctcgtatgatcggataatcgaaggtcactacaatggtgaacagttgggcaagcccaagaagaatgaaagtctctggagtgtggcaagaggcgttatcagaatgctgcggaaaaactacggctatgtccgagtggactttgcacagccattttctttgaaggaatatttagaaggccaaagtcagaaacctgtatctgctcccctctctttggagcaagcactgttaccagcaatccttccttcaagacctgatgctgctgctgccgaacatgaagacatgtccagtaatgagtcgagaaacgcggcagacgaagccttccgaaggaggctgatcgcaaacctggcggagcacaatctcctcaccgccagcaagtcctgcgctatcatgtccacccacattgtggcctgcctgctcctctacagacactggcagggaatccacctctccacgctggtggaagacttctttgtgatgaaggaggaagtcctagctcgggattttgacctgggcttctccgggaattcagaagacgtagtcatgcatgctattcagcttctgggcaactgtgtcacaatcacccacactagcaggaaggatgaattctttattactcccagcacaactgtcccgtccgtctttgaactcaacttctacagcaatggggtacttcatgtctttatcatggaagccatcatagcttgcagcatttatgcagtccagaataagaggggttccggaggtctgccggagcctggcaacctgatcagccaggagcagctggtgcggaaggccgccagcctgtgctaccttctctctaatgaaggtaccatttctctgccctgccagacattttaccaggtttgtcacgagacagtaggaaagttcatccagtacggaattctcacagtggcagagcaagatgaccaggaagatgtcagtcctggccttgcagagcagcagtggaacaagaagcttccggagcctctgaactggagaagtgacgaagaagatgaggacagtgactttggtgaggagcagcgtgattgctacctgaaggtgagccaggccaaggagcaccagcaattcatcacctttctgcagaggcttctggggcccctgctagaagcctacagctctgctgccatctttgtccacaccttccgcgcgccagttcccgagtctgagtacctgcagaagctgcacaggtaccttctcaccaggacggagaggaacgtcgcggtgtacgctgagagtgccacatactgtcttgtgaagaatgctgtgaaaatgtttaaggacatcggggttttcaaagagaccaagcagaagcgagcgtctgtcttagaactgagcaccactttcctacctcagggcagccggcagaagctcctggaatacattctgagcttcgtggtgctgtagggttccctcagcacctatctccgtgaggagctgatgagtcctttgcagactccagtctgacccagagtggcaagtttcctggacatgggccagcctgccg

SEQ ID NO: 8492 - protein, 828 aa, Rattus norvegicus
  ref <308>: DATABASE ACCESSION NUMBER: SWISS-Prot / P97564
  ref <309>: DATABASE ENTRY DATE: 1999-07-15
MEESSVTIGTIDVSYLPNSSEYSLGRCKHTNEDWVDCGFKPTFFRSATLKWKESLMSRKRPFVGRCCYSCTPQSWERFFNPSIPSLGLRNVIYINETHTRHRGWLARRLSYILFVQERDVHKGMFATSITDNVLNSSRVQEAIAEVAAELNPDGSAQQQSKAIQKVKRKARKILQEMVATVSPGMIRLTGWVLLKLFNSFFWNIQIHKGQLEMVKAATETNLPLLFLPVHRSHIDYLLLTFILFCHNIKAPYIASGNNLNIPIFSTLIHKLGGFFIRRRLDETPDGRKDILYRALLHGHIVELLRQQQFLEIFLEGTRSRSGKTSCARAGLLSVVVDTLSSNTIPDILVIPVGISYDRIIEGHYNGEQLGKPKKNESLWSVARGVIRMLRKNYGYVRVDFAQPFSLKEYLEGQSQKPVSAPLSLEQALLPAILPSRPDAAAAEHEDMSSNESRNAADEAFRRRLIANLAEHILFTASKSCAIMSTHIVACLLLYRHRQGIHLSTLVEDFFVMKEEVLARDFDLGFSGNSEDVVMHAIQLLGNCVTITHTSRKDEFFITPSTTVPSVFELNFYSNGVLHVFIMEAIIACSIYAVQNKRGSGGSAGGLGNLISQEQLVRKAASLCYLLSNEGTISLPCQTFYQVCQETVGKFIQYGILTVAEQDDQEDVSPGLAEQQWNKKLPEPLNWRSDEEDEDSDFGEEQRDCYLKVSQAKEHQQFITFLQRLLGPLLEAYSSAAIFVHTFRGPVPESEYLQKLHRYLLTRTERNVAVYAESATYCLVKNAVKMFKDIGVFKETKQKRASVLELSTTFLPQGSRQKLLEYILSFVVL

SEQ ID NO: 8493 - DNA, 6346 bp, Homo sapiens
  ref <308>: DATABASE ACCESSION NUMBER: Refseq / XM_034422
  ref <309>: DATABASE ENTRY DATE: 2002-08-01
ggactggaagtgcgggcttctgcagcagccgaagctggagctgctagggcagcagcggctcccctgttgtatggacattctgcacccgaaactgatagctgagtcctgaagttttatgttatgaaacagaagaactttcatcccagcacatgatttgggaattacactttgtgacatggatgaatctgcactgacccttggtacaatagatgtttcttatctgccacattcatcagaatacagtgttggtcgatgtaagcacacaagtgaggaatggggtgagtgtggctttagacccaccatcttcagatctgcaactttaaaatggaaagaaagcctaatgagtcggaaaaggccatttgttggaagatgttgttactcctgcactccccagagctgggacaaatttttcaaccccagtatcccgtctttgggtttgcggaatgttatttatatcaatgaaactcacacaagacaccgcggatggcttgcaagacgcctttcttacgttctttttattcaagagcgagatgtgcataagggcatgtttgccaccaatgtgactgaaaatgtgctgaacagcagtagagtacaagaggcaattgcagaagtggctgctgaattaaaccctgatggttctgcccagcagcaatcaaaagccgttaacaaagtgaaaaagaaagctaaaaggattcttcaagaaatggttgccactgtctcaccggcaatgatcagactgactgggtgggtgctgctaaaactgttcaacagcttcttttggaacattcaaattcacaaaggtcaacttgagatggttaaagctgcaactgagacgaatttgccgcttctgtttctaccagttcatagatcccatattgactatctgctgctcactttcattctcttctgccataacatcaaagcaccatacattgcttcaggcaataatctcaacatcccaatcttcagtaccttgatccataagcttgggggcttcttcatacgacgaaggctcgatgaaacaccagatggacggaaagatgttctctatagagctttgctccatgggcatatagttgaattacttcgacagcagcaattcttggagatcttcctggaaggcacacgttctaggagtggaaaaacctcttgtgctcgggcaggacttttgtcagttgtggtagatactctgtctaccaatgtcatcccagacatcttgataatacctgttggaatctcctatgatcgcattatcgaaggtcactacaatggtgaacaactgggcaaacctaagaagaatgagagcctgtggagtgtagcaagaggtgttattagaatgttacgaaaaaactatggttgtgtccgagtggattttgcacagccattttccttaaaggaatatttagaaagccaaagtcagaaaccggtgtctgctctactttccctggagcaagcgttgttaccagctatacttccttcaagacccagtgatgctgctgatgaaggtagagacacgtccattaatgagtccagaaatgcaacagatgaatccctacgaaggaggttgattgcaaatctggctgagcatattctattcactgctagcaagtcctgtgccattatgtccacacacattgtggcttgcctgctcctctacagacacaggcagggaattgatctctccacattggtcgaagacttctttgtgatgaaagaggaagtcctggctcgtgattttgacctggggttctcaggaaattcagaagatgtagtaatgcatgccatacagctgctgggaaattgtgtcacaatcacccacactagcaggaacgatgagttttttatcacccccagcacaactgtcccatcagtcttcgaactcaacttctacagcaatggggtacttcatgtctttatcatggaggccatcatagcttgcagcctttatgcagttctgaacaagaggggactggggggtcccactagcaccccacctaacctgatcagccaggagcagctggtgcggaaggcggccagcctgtgctaccttctctccaatgaaggcaccatctcactgccttgccagacattttaccaagtctgccatgaaacagtaggaaagtttatccagtatggcattcttacagtggcagagcacgatgaccaggaagatatcagtcctagtcttgctgagcagcagtgggacaagaagcttccagaacctttgtcttggagaagtgatgaagaagatgaagacagtgactttggggaggaacagcgagattgctacctgaaggtgagccaatccaaggagcaccagcagtttatcaccttcttacagagactccttgggcctttgctggaggcctacagctctgctgccatctttgttcacaacttcagtggtcctgttccagaacctgagtatctgcaaaagttgcacaaatacctaataaccagaacagaaagaaatgttgcagtatatgctgagagtgccacatattgtcttgtgaagaatgctgtgaaaatgtttaaggatattggggttttcaaggagaccaaacaaaagagagtgtctgttttagaactgagcagcacttttctacctcaatgcaaccgacaaaaacttctagaatatattctgagttttgtggtgctgtaggtaacgtgtggcactgctggcaaatgaaggtcatgagatgagttccttgtaggtaccagcttctggctcaagagttgaaggtgccatcgcagggtcaggcctgccctgtcccgaagtgatctcctggaagacaagtgccttctccctccatggatctgtgatcttcccagctctgcatcaacacagcagcctgcagataacacttggggggacctcagcctctattcgcaactcataatccgtagactacaagatgaaatctcaataaattatttttgagtttattaaagattgacattttaagtacaacttttaaggactaattactgtgatggacacagaaatgtagctgtgttctggaactgaatcttacatggtatacttagtgctgctgggtaatttgttggtatattatctggttagtggttaatgcttcctttaaaaataattgagtcatccattcactctttttcagttttatctgtcaatagtagctacatttttaatgggagcaccttttatcccaaagtgctttataaattgagtggactgatatatatcacacccaggtatcactgtgctgtcctttgctgtcagatttagaaatgtttttaagagctatgtgaaaacagacaatattagtttaggtcgggaactgagatattgtaatcaaatagttaacatcaggaagttaatttggctggcaaaattctagggaaacttggccagaaaactggtgttgaaggcttttgctcatataaacaagtgccattgagtttcaaatgaccagcaaatatatttagaacccttcctgttttatgtctgtacctcgtccacccctcaggtaatacctgcctctcacaggtacagctgtttcttggaaatcctccaaccaaatagcagttttcctaacttgattagcttgagctgacagactgttagaatacagttctctggccacagctgatgagggctttctgtactgcacacagattgtgtactgcaccccagtccaggtgactggtacccactcgagttgtgccgtgcacaacctgtccagtatatgcatgtggtggccctactgactggtaatggttagaggcatttatggatttttagctttgaggaaaaaccatgacttttaacaaatttttatgggttatatgcctaaacccttatgccacatagtggtaaataattatgaaaaatggtctgttcataattggtaggtgccttttgtgagcagggagcataattattggtttattatggtaattatggtgattttttaaatatcatgtaatgttaaaacgttttctaacagtttactgttgcttatctccaagatattatggaattaagaatttttccagatgagtgttacatagattctttgaatttagtataaaagtactgagaattaagtttgtacttccataagcttggattttaaacactgatagtatctcatgagtaatgtgtgttttgggagagggagggatgctgattgatatttcacattgtatgaaataccatgtttgaaactcatagcaataatgctatgctgttgtgatccctctcaagttctgcatttaaaatatattttttctttataggaattgatgtataccatgaagtcattgtcagttgtagtagctctgatgttgaatgagatatcatgttttagcattccattttactgactagggtagaagaacacttttcttggctacatttggaggatacccagggagtcttgggtgttccttatctggggaagcaaacatttcactagtctctttttttcatcctttaaattgtaaattaaggattactcaagctcaccattattcaagattgggactcgcttcccagtcgacactctgccctgcctgtcattgctgcaaagagctgctgctttgccaacctaagcaaagaaaatacggcttctcttgcattattttcccttttggttggtttgttttctagaagtacgttcagatgctttggggaatgcaatgtatgatttgctagctctctcaccacttaactcactgtgaggataaatatgcatgctttttgtaattaactggtgctttgaaaatcttttttaagggagaaaaatctcaaccaaagttatgctcatccagacaagctgacctttgagttaatttcagcacaactcattcttcagtgcctcatgactgaaaacaaaaaacaaaaaaacgaaagcatcttcacaatgaagcttccagatagcaccgttttgctaaaagatacattctcattgttttccaacagtgatggcttccacataaggttaaacaaactaggtgcttgtaaataatttattacagtttactctatcgcatttctgtaacatgaaatgcatgcccttcttcaggggaagactgtggtcaagttaaaaaaaaaaaacaatattaaacaacatgaaactgcagtctgtttttgaaaatgagaatgtcctaagtgattcagaagagaggagggaagttgtgcactctgaaaatgcatgaaaaacaaaggcaaaaactagtgggaaatgtgtagaactgttaactgagatggcttcgagtcttccttctggaatctgttaaatttcacaaagtcatgagggtaaatggagaaaatatttctgggattacaatgaatgtaagcccaaattgtggaattgccagtaacctggatggggaaaagcatttcccatagcactccatgtaatatgagtgctctgtgagatgttcatcagtgttttatagaaatggtgttgctgggaaaccaagtttgcacctggaaacttacaatgcactttagcgcagtaagggcttggcatccggtagtgaaaaactgtctaacccagcattgcccaaactattttgacaccaggacctttttctcctttgggatacttatgaacctctcactaatgtcctgtggagaacattttgggaaacactatgttagatagttctttaaggagacaaaacggtaatgaacagatagcactggggcagaatatgcatgcattttgtaacgtccagtgtggcgttgaatagatgtgtatttcctcccctgcagaaaataagcacagaaaattataatgtaggtgatcggagctctttcctttgatagagagaacagccccaatgatcctggctttttcactgaacgtatcagaatacatggatgaattggggtaaataaggttttaattcagatctagaagaaagtattgtacgtttgaatgcagatttttatccacagatagttgtagtgtttagacatgacaggacctatcgttgaggtttctaagacttactatgggctgtaaacctgttttttaaaactattttagaaacctgagacttgccgtctggcattttagtttaatacaaactaatgattgcatttgaaagagattcttgaccttatttctaaacgtctagagctctgaaatgtcttgatggaaggtattaaactatttgcctgttgtacaaagaaatgttaagactcgtgaaaagaattactataaggtactgtgaaataactgcgattttgtgagcaaaacatacttggaaatgctgattgatttttatgcttgttagtgtattgcaagaaacacagaaaatgtagttttgttttaataaaccaaaaattgaacat

SEQ ID NO: 8494 - protein, 828 aa, Homo sapiens
  ref <308>: DATABASE ACCESSION NUMBER: Refseq / XP_034422
  ref <309>: DATABASE ENTRY DATE: 2002-08-01
MDESALTLGTIDVSYLPHSSEYSVGRCKHTSEEWGECGFRPTIFRSATLKWKESLMSRKRPFVGRCCYSCTPQSWDKFFNPSIPSLGLRNVIYINETHTRHRGWLARRLSYVLFIQERDVHKGMFATNVTENVLNSSRVQEAIAEVAAELNPDGSAQQQSKAVNKVKKKAKRILQEMVATVSPAMIRLTGWVLLKLFNSFFWNIQIHKGQLEMVKAATETNLPLLFLPVHRSHIDYLLLTFILFCHNIKAPYIASGNNLNIPIFSTLIHKLGGFFIRRRLDETPDGRKDVLYRALLHGHIVELLRQQQFLEIFLEGTRSRSGKTSCARAGLLSVVVDTLSTNVIPDILIIPVGISYDRIIEGHYNGEQLGKPKKNESLWSVARGVIRMLRKNYGCVRVDFAQPFSLKEYLESQSQKPVSALLSLEQALLPAILPSRPSDAADEGRDTSINESRNATDESLRRRLIANLAEHILFTASKSCAIMSTHIVACLLLYRHRQGIDLSTLVEDFFVMKEEVLARDFDLGFSGNSEDVVMHAIQLLGNCVTITHTSRNDEFFITPSTTVPSVFELNFYSNGVLHVFIMEAIIACSLYAVLNKRGLGGPTSTPPNLISQEQLVRKAASLCYLLSNEGTISLPCQTFYQVCHETVGKFIQYGILTVAEHDDQEDISPSLAEQQWDKKLPEPLSWRSDEEDEDSDFGEEQRDCYLKVSQSKEHQQFITFLQRLLGPLLEAYSSAAIFVHNFSGPVPEPEYLQKLHKYLITRTERNVAVYAESATYCLVKNAVKMFKDIGVFKETKQKRVSVLELSSTFLPQCNRQKLLEYILSFVVL

SEQ ID NO: 8495 - DNA, 2519 bp, Rattus norvegicus; identical to SEQ ID NO: 8491
  ref <308>: DATABASE ACCESSION NUMBER: EMBL / U36772
  ref <309>: DATABASE ENTRY DATE: 1999-03-29

SEQ ID NO: 8496 - protein, 828 aa, Rattus norvegicus; identical to SEQ ID NO: 8492
  ref <308>: DATABASE ACCESSION NUMBER: SWISS-Prot / AAB39470
  ref <309>: DATABASE ENTRY DATE: 1999-07-15

SEQ ID NO: 8497 - DNA, 6346 bp, Homo sapiens; identical to SEQ ID NO: 8493
  ref <308>: DATABASE ACCESSION NUMBER: Refseq / XM_034422
  ref <309>: DATABASE ENTRY DATE: 2002-08-01

SEQ ID NO: 8498 - protein, 828 aa, Homo sapiens; identical to SEQ ID NO: 8494
  ref <308>: DATABASE ACCESSION NUMBER: Refseq / XP_034422
  ref <309>: DATABASE ENTRY DATE: 2002-08-01

SEQ ID NO: 8499 - DNA, 1305 bp, Rattus norvegicus
  ref <308>: DATABASE ACCESSION NUMBER: EMBL / U36895
  ref <309>: DATABASE ENTRY DATE: 2000-03-04
ggcacgagccgtgattaagggactttgaacttttcaagggatttggagttttatgaagaatttgaagatttacagagtttacaggaatggagctgaccagccactatgacatgccttatatctccaagagcataaatataaggcatggcatgagaggaccagcagccactgttctcatatatgatgaataagaacagcagagtccacactgattctaccataaggaataccttctccactgaaattggcattggaatcttagccaacagtttcctacttctcttccacatcttcaagtttattcgtggacagaggtccagactcactgacctgcccattggtctcttgtccctaatccacctactgatgctactgatgggggcattcatagccatagacatttttatttcttggaggggatgggatgacatcatatgtaaattccttgtctacttgtacagaagttttagaggtctctctctttgtaccacctgcatgttgagtgtcctgcaggccatcaccctcagccccagaagctcctgtttagcaaagttcaaacataagtctccccatcacgtctcctgtgccattatttcgctgagcatcctctacatgttcattagcagtcacctcttagtatccatcaatgccacccccaatttgaccacgaacaactttatgcaagttactcagtcctgctacattatacccttgagttacctcatgcaaagcatgttttctacacttctggccatcagagatatctctcttattagtctcatggtcctctcgacttgttacatggaggttctcttgtgtaggcacaggaatcagatccagcatcttcaagggaccaacctttccccaaaagcatctccagaacaaagggccacacagaccatcctgatgctcatgaccttctttgtcctaatgtccattttcgacagcattgtctcctgttcaagaactatgtatctgaatgatccaacatcttactatattcaaatatttgtagtggacatctatgccacagtcagcccttttgtgtttatgagcactggaaaacatatagttaactttttgaagtccatgtgtgtgagggtgaagaatgtttgaatattcattaatggacaagatcctttaagaggagccaatgtagtcatcagaactgtcagtcatggtgtgctgtctatgtgctttggtaaatgtgaatcatgaagttgtttttctggtaaaatgatttactttaaccaactcatgattgtaaacatgtaacaggagattaaacaatatccccttcggaaa

SEQ ID NO: 8500 - protein, 312 aa, Rattus norvegicus
  misc_feature (1)..(312): Xaa=Unknown amino acid
MMNKNSRVHTDSTIRNTFSTEIGIGILANSFLLLFHIFKFIRGQRSRLTDLPIGLLSLIHLLMLLMGAFIAIDIFISWRGWDDIICKFLVYLYRSFRGLSLCTTCMLSVLQAITLSPRSSCLAKFKHKSPHHVSCAIISLSILYMFISSHLLVSINATPNLTTNNFMQVTQSCYIIPLSYLMQSMFSTLLAIRDISLISLMVLSTCYMEVLLCRHRNQIQHLQGTNLSPKASPEQRATQTILMLMTFFVLMSIFDSIVSCSRTMYLNDPTSYYIQIFVVDIYATVSPFVFMSTGKHIVNFLKSMCVRVKNVX

SEQ ID NO: 8501 - DNA, 1062 bp, Homo sapiens
  ref <308>: DATABASE ACCESSION NUMBER: EMBL / AF255342
  ref <309>: DATABASE ENTRY DATE: 2000-09-09
atggttggagacacattaaaacttctgtctccactgatgacaagatacttctttctgcttttttattctactgattcttcagacctcaatgaaaatcaacatcccctagattttgatgaaatggcttttggaaaagtaaaatcagggattagcttcctcattcagactggagttgggatcctgggaaattcctttctcctttgtttttataacttaattttgttcactggacacaagctgagacccacggacttgattctcagccaactggccttggctaactccatggtccttttctttaaagggatacctcagacaatggcagcttttggattgaaatatttgctgaatgacactggatgtaagtttgtcttttattatcacagggtgggcacaagagtttccctcagcaccatctgccttctcaatggattccaagccattaagctcaaccccagtatatgcaggtggatggagatcaagattagatccccaaggtttattgacttctgttgtctcctctgctgggccccccatgtcttgatgaatgcatctgttcttctattagtgaatggcccactgaatagcaaaaacagtagtgcaaaaaacaattatggatactgttcttacaaagcatcaaagagatttagctcattacatgcagtcttatatttttcccctgattttatgagtttgggcttcatggtctgggccagtggctccatggtcttcttcctctacagacacaagcagcaagtccaacacaatcacagcaacagactctcctgcagaccttcccaggaagccagagccacacacaccatcatggtcctggtgagctccttttttgttttctattcagtccatagttttctgacaatttggacaactgtagttgcaaacccaggccagtggatagtgaccaactctgtgttggtcgcctcatgtttcccagcacgcagcccttttgtcctcatcatgagtgatactcatatctctcagttctgttttgcctgcaggacaaggaaaacactctttcctaatctggttgtcatgccatga

SEQ ID NO: 8502 - protein, 353 aa, Homo sapiens
  ref <308>: DATABASE ACCESSION NUMBER: SWISS-Prot / AAG10698
  ref <309>: DATABASE ENTRY DATE: 2003-02-01
MVGDTLKLLSPLMTRYFFLLFYSTDSSDLNENQHPLDFDEMAFGKVKSGISFLIQTGVGILGNSFLLCFYNLILFTGHKLRPTDLILSQLALANSMVLFFKGIPQTMAAFGLKYLLNDTGCKFVFYYHRVGTRVSLSTICLLNGFQAIKLNPSICRWMEIKIRSPRFIDFCCLLCWAPHVLMNASVLLLVNGPLNSKNSSAKNNYGYCSYKASKRFSSLHAVLYFSPDFMSLGFMVWASGSMVFFLYRHKQQVQHNHSNRLSCRPSQEARATHTIMVLVSSFFVFYSVHSFLTIWTTVVANPGQWIVTNSVLVASCFPARSPFVLIMSDTHISQFCFACRTRKTLFPNLVVMP

SEQ ID NO: 8503 - DNA, 585 bp, Rattus norvegicus
  ref <308>: DATABASE ACCESSION NUMBER: EMBL / U37099
  ref <309>: DATABASE ENTRY DATE: 2000-03-04
gaccagaattttgattacatgttcaagttgctgatcattggcaatagcagcgtgggcaaaacatccttcttgttccgctatgctgatgactccttcacgtccgcctttgtcagcacggtcggcatcgatttcaaagtaaaaactgtcttcaaaaatgaaaagagaatcaagcttcagatttgggacacagcaggccaggaaagatacaggaccatcaccacagcctattatcgaggggccatgggcttcattttaatgtatgacatcacaaatgaagaatccttcaacgctgtacaagattggtcaactcagatcaaaacatattcctgggataatgcccaggttatcctggccggaaacaaatgtgacatggaagacgaacgggtggtctcaactgagagagggcagcgcttaggagagcagctcgggtttgagttttttgaaaccagcgccaaggataacatcaacgtcaagcaaacctttgagcgcctcgtagatatcatctgtgacaaaatgtcagagagcttggagactgacccagccatcacagccgccaagcagagcacaagactcaaggaaacgcct

SEQ ID NO: 8504 - protein, 219 aa, Rattus norvegicus
  ref <308>: DATABASE ACCESSION NUMBER: SWISS-Prot / AAC52704
  ref <309>: DATABASE ENTRY DATE: 2002-06-15
MASAQDARFGQKDSSDQNFDYMFKLLIIGNSSVGKTSFLFRYADDSFTSAFVSTVGIDFKVKTVFKNEKRIKLQIWDTAGQERYRTITTAYYRGAMGFILMYDITNEESFNAVQDWSTQIKTYSWDNAQVILAGNKCDMEDERVVSTERGQRLGEQLGFEFFETSAKDNINVKQTFERLVDIICDKMSESLETDPAITAAKQSTRLKETPPPPQPNCGC

SEQ ID NO: 8505 - DNA, 1500 bp, Homo sapiens
  ref <308>: DATABASE ACCESSION NUMBER: Refseq / NM_002866
  ref <309>: DATABASE ENTRY DATE: 2002-11-05
ggcacgagggaggactgcaggggcctgagccgctgctgccgccgccgccgcgcagccccacatcaacgcaccggggtcctgtcaccgccaccgccaaaaaagtcaccgccgctagggtcgccgttgcatcggtgcagggcaagatggcatccgccacagactcgcgctatgggcagaaggagtcctcggatcagaacttcgactacatgttcaagattctcatcatcggcaacagcagcgtgggcaagacgtccttcctcttccgctatgctgacgactcgttcacgcctgccttcgtcagcaccgtgggcatcgacttcaaggtcaagaccatctatcgcaacgacaagaggatcaagctgcagatctgggacacagcagggcaagagcggtaccggaccatcaccaccgcatactaccggggcgctatgggcttcatcctcatgtatgacatcaccaacgaggaatccttcaatgcagtgcaggactggtccacccagatcaagacctactcatgggacaatgcccaggtgctgctggtaggaaacaagtgtgacatggaggatgagcgggtggtgtcatcagaacgtggccggcagctagctgaccaccttgggttcgagttctttgaggcaagcgccaaggacaacattaacgtcaagcagacctttgagcgcctggtggatgtcatctgcgagaagatgtccgagtcgttggacacggcggaccctgcggtcacaggcgccaagcagggcccacagctcagtgaccagcaggtgccaccgcaccaggactgcgcctgctgagagccatcccactccctttcccctcttccctgtcttccccaccttcccccaactacccgggcctgacccggcccctaccagccacgggcacaagacccctgctcctgacttagcccgtcacccttatttattattgtagctatttatttatttattgaagatgtcccccaggggcccaggctcccctgcccgccccaagccctgcccctcctgtacatatagccctttccccactcagctgtggtgtctcgtggccccgtgaactcaccgctcaccctcctgaaccccccccccgcctttttttaaaattcacccccatccacagttgtcagttgtgaagaggggccagatgacaccctaaagcaggctgatcgggcaatgggaggtggccaggcctgccagcccctcggctctgccgcggtgggccgaggccgctgttgggggtttccctgtgtggaccatggggatcagagtctggcctgccaggctcctctccccgttttctcttttggtgggggggtgtgctgtgggtattcaccaccctgggaccccccccccccccgcccaccagacctgttctgacctcatgagtgtcaaacgtgccccccagttccttaggagatgtcatgacaacactacacgcacccaataaagcgaatggaccatcaaaaaaaaaaaaaaaaaaaaaaaaaaa

SEQ ID NO: 8506 - protein, 220 aa, Homo sapiens
  ref <308>: DATABASE ACCESSION NUMBER: SWISS-Prot / P20336
  ref <309>: DATABASE ENTRY DATE: 2002-06-15
MASATDSRYGQKESSDQNFDYMFKILIIGNSSVGKTSFLFRYADDSFTPAFVSTVGIDFKVKTIYRNDKRIKLQIWDTAGQERYRTITTAYYRGAMGFILMYDITNEESFNAVQDWSTQIKTYSWDNAQVLLVGNKCDMEDERVVSSERGRQLADHLGFEFFEASAKDNINVKQTFERLVDVICEKMSESLDTADPAVTGAKQGPQLSDQQVPPHQDCAC

SEQ ID NO: 8507 - DNA, 2472 bp, Rattus norvegicus
  ref <308>: DATABASE ACCESSION NUMBER: EMBL / U37138
  ref <309>: DATABASE ENTRY DATE: 2000-03-04
ggcaacaccgcgacctctgaacccgtgcctcagagacaacaccgcgaccctctggcgacctctgaccctgtgaccctgtgtggtgtgacctcacgaccctggcgccctcagcggtgacctttgaccccgcagcgaccccgagaccccaggacccctgcacttatccacaactctgggacctccaaccccgcgaccccaacagcgacctctgaccctggtgaaagcaggagaacccgggacaccagtgaccctgcaacttctgaccccactaagggcaacaactctgagactgtacggtgacctctgacctctgaccctgggctgttcccccgagataacagtgaccccaggaactccaactcagctacaacctggtgacaaccaaggtaacccagggacaacctctgaccccttgaatccacgacttttcacccagtgctgaccactgcagtgtggggcagtctgagagagtgcgtgacctttgatctctgacctctgaccccgacccagccttgcccacaggacgatgctctggccctgtctccttgccctgctcctctcccagctcaactttctctgtgctgcccgtcctggccctggacctaacttcctgctcatcatggctgatgaccttggcattggggacctaggctgctatggcaaccgcacactcaggacgccacacatcgaccgcctggcccttgagggggtgaagttgactcagcacctggcggctgcgcccctgtgcaccccgagccgcgctgccttccttaccgggcgctaccctgtgcggtcagggatggcatcacatggccgcctgggtgtattcctgttctcggcatcatctggggggctcccgcccaatgaagtcacctttgcaaagttgctcaagggtcaaggctacaccaccgggcttgtagggaagtggcatctggggctgagctgccaagcagcctctgacttctgccaccaccctgggcgccatggctttgaccgcttcctgggcacgcccaccaccaacctgagggactgcaagccagggggcgggaccgtgtttggctctgcccaacaagtattcgtggtcctgcccatgaatattctgggggcagtgctgctggccatggcacttgcgcggtgggcagggctggcccggcccccagggtgggtgttcggggtgacagtggctgccatggcggcggtgggcggggcctatgtggccttcctctaccacttccgcccagccaactgcttcctcatggccgacttcaccatcacccaacagcccacggactacaaggggctcacacagcgcctggcaagcgaggctggggacttcctgcgcaggaacagggacacgcccttcctgctattcctgtctttcatgcatgtgcacacggcacacttcgccaaccctgagtttgccgggcagagcctgcatggggcctatggagatgctgtggaggagatggactgggccgtaggccaggtccttgccacactggacaagctgggcctcgccaacaacacactcgtgtacttgacgtccgaccatggcgcacacgtggaggagcttggccccaacggtgaacggcatggcgggagcaacggaatttacaggggcgggaaggccaacacgtgggagggtggcatccgtgtgcctggacttgtgcgctggcccggcgtgattgtgcccggccaggaggtcgaggagcccacgagcaacatggacgtcttccccactgtggccaggcttgcaggggcagagctgccgactgacagggtgattgacgggcgtgacttgatgcccctgctgctgggccatgtacaacactctgagcatgaattcctgttccactactgcaatgcctacctcagcgctgtggcatggcggccccacaacagctcgtccgtgtggaaggcgttttacttcacaccgaacttcgaccccccgggctctaatggctgcttctccacacacgtgtgcatgtgccacggccaccatgtcacgcaccatgatccgcccctgctcttcgacattgcccgtgaccccagggagcgccacccgctcacgcctgaaacagagccgcgccatggtgagatcctgcgcaacatggatgctgcggcccgtgcacacgttgctaccctagaggaggcgcccaatcagctttccatgtcaaatgtcgcatggaagccatggctgcagctctgcctgccttccaagccccacccactcgcatgccgctgtgctggcgacgggtgagttgggcatgccaaacacacaggtatgcaagcatgggacactgtggcctggtgatttcacctcctgaactgatacctgacacaatcttgctgacatgtatgaaaacatatgaacatgtatgaacatgtgtatgctgagtacaaaacacaggaagagcccctcagcatgaccctgatgaataaatgatgtggacacggaaaaaaaaaaaaaaa

SEQ ID NO: 8508 - protein, 577 aa, Rattus norvegicus
  ref <308>: DATABASE ACCESSION NUMBER: SWISS-Prot / P15589
  ref <309>: DATABASE ENTRY DATE: 1996-10-01
MLWPCLLALLLSQLNFLCAARPGPGPNFLLIMADDLGIGDLGCYGNRTLRTPHIDRLALEGVKLTQHLAAAPLCTPSRAAFLTGRYPVRSGMASHGRLGVFLFSASSGGLPPNEVTFAKLLKGQGYTTGLVGKWHLGLSCQAASDFCHHPGRHGFDRFLGTPTTNLRDCKPGGGTVFGSAQQVFVVLPMNILGAVLLAMALARWAGLARPPGWVFGVTVAAMAAVGGAYVAFLYHFRPANCFLMADFTITQQPTDYKGLTQRLASEAGDFLRRNRDTPFLLFLSFMHVHTAHFANPEFAGQSLHGAYGDAVEEMDWAVGQVLATLDKLGLANNTLVYLTSDHGAHVEELGPNGERHGGSNGIYRGGKANTWEGGIRVPGLVRWPGVIVPGQEVEEPTSNMDVFPTVARLAGAELPTDRVIDGRDLMPLLLGHVQHSEHEFLFHYCNAYLSAVAWRPHNSSSVWKAFYFTPNFDPPGSNGCFSTHVCMCHGHHVTHHDPPLLFDIARDPRERHPLTPETEPRHGEILRNMDAAARAHVATLEEAPNQLSMSNVAWKPWLQLCLPSKPHPLACRCAGDG

SEQ ID NO: 8509 - DNA, 6520 bp, Homo sapiens
  misc_feature (1)..(6520): n=a, c, g or t
  ref <308>: DATABASE ACCESSION NUMBER: EMBL / M16505
  ref <309>: DATABASE ENTRY DATE: 2000-03-04
acagtgctgttggccaagcctccagcagctgacgggacccagctgtagtgaggttgcagtgattgagtaggattggcctgcttcaaagcagaggtttctcatgggaatatgcttattaaactcccactggtgcagaaaccatgaacagaggatgaacaagtgaagttgcaatctcctccatcacagctcagttccccaacaacaggatcacaagctggagatgcctttaaggaagatgaagatccctttcctcctactgttctttctgtgggaagccgagagccacgaagcatcaaggccgaacatcatcctggtgatggctgacgacctcggcattggagatcctgggtgctatgggaacaaaactatcaggactcccaatatcgaccggttggccagtgggggagtgaaactcactcagcacctggcagcatcaccgctgtgcacaccaagcagggcagccttcatgactggccggtaccctgtccgatcaggaatggcatcttggtcccgcactggagttttcctcttcacagcctcttcgggaggacttcccaccgatgagattacctttgctaagcttctgaaggatcaaggttattcaacagcactgatagggaaatggcaccttgggatgagctgtcacagcaagactgacttctgtcaccaccctttacatcacggcttcaattatttctatgggatctctttgaccaatctgagagactgcaagcccggagagggcagtgtcttcaccacgggcttcaagaggctggtcttcctccccctgcagatcgtcggggtcaccctccttacccttgctgcactcaattgtctggggctactccacgtgcctctaggcgtttttttcagccttctcttcctagcagccctaatcctgacccttttcttgggcttccttcattacttccggcccctgaactgcttcatgatgaggaactacgagatcattcagcagcccatgtcctatgacaatctcacccagaggctaacggtggaggcggcccagttcatacagcggaacactgagactccgttcctgcttgtcttgtcctacctccacgtgcacacagccctgttctccagcaaagactttgctggcaaaagtcaacacggagtctacggggatgctgttgaggaaatggactggagtgtggggcagatcttgaaccttctggatgagctgagattggctaatgataccctcatctacttcacatcggaccagggagcacatgtagaagaagtgtcttccaaaggagaaattcatggcggaagtaatgggatctataaaggaggaaaagcaaacaactgggaaggaggtatccgggttccaggcatccttcgttggcccagggtgatacaggctggccagaagattgatgagcccactagcaacatggacatatttcctacagtagccaagctggctggagctcccttgcctgaggacaggatcattgatggacgtgatctgatgcccctgcttgaaggaaaaagccaacgctccgatcatgagtttctcttccattactgcaacgcctacttaaatgctgtgcgctggcaccctcagaacagcacatccatctggaaggcctttttcttcacccccaacttcaaccccgtgggttccaacggatgctttgccacacacgtgtgcttctgtttcgggagttatgtcacccatcacgacccacctttactctttgatatttccaaagatcccagagagagaaacccacttactccagcatccgagccccggttttatgaaatcctcaaagtcatgcaggaagctgcggacagacacacccagaccctgccagaggtgcccgatcagttttcatggaacaactttctttggaagccctggcttcagctgtgctgtccttccaccggcctgtcttgccagtgtgatagagaaaaacaggataagagactgagccgctagcagcgcctggggaccagacagacgcatgtggcaaagctcaccatcttcactacaaacacgcctgagagtggcactggggaaacataactccatctacaccttggatttggactgattctccattttatcacctgaaggcttgggccagagctcaacagctactcaactggaggggtgagggggataaggtctgtagtatacagacaggaagatggtaggtttatgccttctgtggccagagtcttggactcatggaaatagaatgaatagaggggcattcacaaggcacaccagtgcaagcagatgacaaaaaggtgcagaaggcaatcttaaaacagaaaggtgcaggaggtaccttaactcacccctcagcaaatacctatgtcaacagtataagttaccatttactctataatctgcagtgatgcaataaccagcataataaaaaggcaatcacataaaaaagagtttagtcgtctaaacataagtaactttaaggtgaatgaaagatcttctttaggaataatagatgatggtaagttccactntggttattggaaggcaagtcattattattggtattagttaaaacacatatcaaatgcttgctcttcatcatatatatagttatgcatacatacacacacacacatacagtatattctttcctcaaaagggttaagatgtctaaaatagggacctagaagcttaacactatttaagtaaatacagtagaagctcacaaatagatttctttgcacaatgattttttgcaaaattttacagtaataataatcccaaggcaaatctctcctgaactgctttccattccataatttgtagtataattcttggattccactgttttctttggggaatggaagttctgaattaaaagcccactgtggagatgctgtggttcatggaatctcttccagtgtaattcagaatcatggcctagaaagtctctgatatttggaggggaacaaaaatcactcacaagcaatccatgatctatacacataagcataatttcctttagttctagttagtcatcagagaacagtcatgtatgcaagttttgtgactgagaaatttctgtgcttccaatccacaatgagatgcatgattttgttttcatcccatttcccccaagcccctgtaaatcagggaaaatgcgcaactgatcgcctaggagagggcctcgtagtggcacagctggagatagtttcaaagtctaaaccaccagcccatcctgaggaaagcctcctatggaatgtaaagtgcaatcatttcttcagatataagactttccccaacaatgtgattggattcctttatgctcaaaatcgagagaagctgccatccacctgcttatgcatttatctcttttgtggacttgtctgaccaccttctatttgcccagagtttgctcaattccaagacagtgcccatgaatgggacacctgtaatgtaacccacacagcggtttgcagagaatgttagccatgacttgggctttgtaaagttggctataatttctctatccctacccacaaccctgggaagttggagcaagaggggcatactattgggctgggaggatttgacagcatttccccagttgccctttaagttcttctatttcaaacgttaattttgcttctctttctaaaaaaaaaaaaaaaaaagaaagagaagaaagaagtgattcctacccctacctccagagttgttgaaagctgaaaagcatacaagattcttccttttaacttggatttctcgttccagaaattgtgggataatctgtattcttgctttagaaaacaattcttagagagggtactagcttactgatgatgtgttaggattgctactgatgctgtcatgtggaaactatttaaaggcactattataaatttatcctataagatgacaatgtttactcaaagtctaacatattcaatgcaagtaagactttctgaaaacacttgatgatgtggaaatgctgcaggacctaaataacttgaagagcctttatagattatatgaatgcctatttgtgtctagaaccagttatttaacctgtaaaatgtcaatagcaaatgaaggatgaagtatatctctagatgcaaatacattgagtttaaaagtgcctcaaaataattgagatcacatttcaggacatttggaaatcaggtcgatttgtggtaactgtagtcatcttaaatttcaaaccatttaccatctgaaagttttgatttgaatgtaaaacaggaaattggaattcctttgtccaggagaaacctcacaaaccttctttaaggcatagttttgttgtttgtttgcttgtttgttgcaggctgtaaggcatggctgcttgtttacaaagcatctcattcatattacctgtggagttgcatatccaaaccttagtgagttttgaagctttaagcaaattcttttaaaaaattcttgtatttctagcattactagatattaaaagttaagcaaatagattaatgacgtatacataggcatcatttcacaaggtcagtaatgctgcaggaaaagcaaaattgcaatctacgtatctatggtactaaggaagtcctgttttcaaaaatggaagcccacttctcagatttttctgaagggcatacaatgaaaagtgaaggggaaacacacacacacaaaaaaaacaagtatttggcttgtcacaggaatctgattgcattaagtgaaggattatttagaatatgttaatgcaaagctaaaataaaattttccttggcaattaaaaatgctgtgcgctaataccctgctttctatcgtgactcaattcaacaatgtggggaatgtttactacatttccaacttgatgtcaagcaatggggaatacaagttccagttctgcaaagattcgtcaactttcttagctcaagagagaggctgagaaatgcagagaagaataagacataaaatagctccgacctccatgatccgagagtgggaaaaggcccgattattacccataaggcacactctctaaggccttttaaggggcctacaaaaatgttttattttataatcagaagaaaaggaaatgaacattggggattgaaaatcatattggtatttgcaccaacatagtcataaaatagtatgttaatatgtttttactttatatatttatatattaaaatatatttaatatgttttgcctttgtggcccatgaaagtcttactgggccctggggaaggtatcctaccctggtgaagcagctgctttgctctacaaatacctggggcagaaatttgatttgaaaagtattattctctcttctctttgtttcaactggattcctttggaaaaccaaactagtatcagaacaaaccccgaaacagtaagaaattggagtgagaagggcatggtattgggactaggatcggctctcattcgatcgagctattctcttaaaatgacaaaaagtgtccataaagaggctgctggagagtgcgtggccatagggagccgacatgcccgggaggaaaggtgttgattacatggatacttctaaaagctaaagccttgttgccttctctttaatgcctagagaatgggatgtgtgatgcaaatgctcaaaacctcttaaatcatagctgtctgacctctacggacctcacatccatctgaggcttcatggacaaagattctccacttggccaaactttagccaagctcctcaaccttctcccaggcccaatctgggcacttccttgtaaaatctagttttggcaagaagtctattaggtcagtttagcaagaacacctaacccccccatatctgttcaacctcagtatctgatcaggctcctcagcctccaccatcccccaggtgatgtctggtcaactggcctaccttcagctagaatcctgttaggtcggtttagatgaatgctccctgatatttcctcttggtaatcttccatccactgcccatgaccctgttccctgtctataaatccccagttttccatggtatattcagagctgagtccagtctctctcccctactacaagtccccattgctgtggtccccgtacctgtcatgatggtcctaaataaagtcttactgtgctttaataggtagcattgaaaaatttttttctttgacatcattcatgacaacatgaaacctattgggacagcatgactgtgcagggtctttagagctcagctttctgaggccctgagcattcttggttttccgacatcgtgaacctgttctgtgttgcaagatatcactcaagccagtgttgcttaataccatctctttgtgtaatagatctgaataaagtaattgtaatacaccaatattttactttgttgagtattattttaatgggagcctttccaatgaaggaaacatcagctttccttgttagaatgcaagcagcttaaaaactacccatgtctttctggaaaggaaacattgccatgtaactatgtatcagttttctaagaacttcatgggccttccata

SEQ ID NO: 8510 - protein, 583 aa, Homo sapiens
  ref <308>: DATABASE ACCESSION NUMBER: SWISS-Prot / P08842
  ref <309>: DATABASE ENTRY DATE: 2002-06-15
MPLRKMKIPFLLLFFLWEAESHAASRPNIILVMADDLGIGDPGCYGNKTIRTPNIDRLASGGVKLTQHLAASPLCTPSRAAFMTGRYPVRSGMASWSRTGVFLFTASSGGLPTDEITFAKLLKDQGYSTALIGKWHLGMSCHSKTDFCHHPLHHGFNYFYGISLTNLRDCKPGEGSVFTTGFKRLVFLPLQIVGVTLLTLAALNCLGLLHVPLGVFFSLLFLAALILTLFLGFLHYFRPLNCFMMRNYEIIQQPMSYDNLTQRLTVEAAQFIQRNTETPFLLVLSYLHVHTALFSSKDFAGKSQHGVYGDAVEEMDWSVGQILNLLDELRLANDTLIYFTSDQGAHVEEVSSKGEIHGGSNGIYKGGKANNWEGGIRVPGILRWPRVIQAGQKIDEPTSNMDIFPTVAKLAGAPLPEDRIIDGRDLMPLLEGKSQRSDHEFLFHYCNAYLNAVRWHPQNSTSIWKAFFFTPNFNPVGSNGCFATHVCFCFGSYVTHHDPPLLFDISKDPRERNPLTPASEPRFYEILKVMQEAADRHTQTLPEVPDQFSWNNFLWKPWLQLCCPSTGLSCQCDREKQDKRLSR

SEQ ID NO: 8511 - DNA, 3077 bp, Rattus norvegicus
  ref <308>: DATABASE ACCESSION NUMBER: EMBL / U37142
  ref <309>: DATABASE ENTRY DATE: 2000-03-04
ggcacgaggcgggacgcggtgtgtggaggggacctcacaagttcttccaagtttgcagcatgatcccattgcttctgtccctgctggcagctctggtcctgacccaagcccctgcagccctcgctgatgacctgaaagaagacagctcagaggatcgagcctttcgggtgcgcatcggtgccgcgcagctgcggggtgtgctgggcggtgccctggccatcccatgccacgtccaccacctgaggccgccgcccagccgccgggccgcgccgggctttccccgagtcaaatggaccttcctgtccggggaccgggaggtggaggtgctggtggcgcgcgggctgcgcgtcaaggtaaacgaagcctatcggttccgcgtggcgctgcctgcctaccccgcatcgctcacagatgtgtctttagtattgagcgaactgcggcccaatgattccggggtctatcgctgcgaggtccagcacggtatcgacgacagcagtgatgctgtggaagtcaaggtcaaaggggtcgtcttcctctaccgagagggctctgcccgctatgctttctccttcgctggagcccaggaagcctgtgctcgcatcggagcccgaattgccacccctgagcagctgtatgctgcctacctcggcggctatgaacagtgtgatgctggctggctgtccgaccaaaccgtgaggtaccccatccagaacccacgagaagcctgttatggagacatggatggctaccctggagtgcggaattacggagtggtgggtcctgatgatctctacgatgtctactgttatgccgaagacctaaatggagaactgttcctaggtgcccctcccggcaagctgacgtgggaggaggctcgggactactgtctggaacgcggtgctcagatcgctagcacgggccagctatacgcggcatggaatggcggcttggacagatgtagccctggctggctggctgatggcagtgtgcggtaccccatcatcacgcccagccaacgctgtgggggaggcctgccaggagtcaagaccctcttcctctttcccaaccagactggcttccccagcaagcagaaccgcttcaatgtctactgcttccgagactctgcccatccctctgccttctctgaggcctccagcccagcctctgatggactagaggccattgtcacagtgacagagaagctggaggaactgcagttgcctcaggaagctgtggagagcgagtctcgtggggcgatctactccatccccatcacagaagatgggggaggaggaagctctaccccagaagacccagcagaggcccccaggactcctctagaatcagaaacccaatccgttgcaccacctaccgggtcctcagaagaggaaggcgaagccctggaggaagaagaaagattcaaagacacagagactccgaaggaagagaaggagcaggagaacctgtgggtgtggcccacggagctcagcagccctctccctactggcttggaaacagagcactcactctcccaggtgtccccaccagcccaggcagttctacagctgggtgcatcaccttctcccaggcctccaagggtccatggaccgcctgcagagactttgcaacccccaagggagggaagcctcacatctactccagatggggcaagagaagtagcgggggaaactgggagccctgagctctctggggttcctcgagaaagcgaggaggcaggaagctccagcttggaggatggcccttccctccttccagcgacatgggcccctgtgggtaccagggagctggagaccccctcagaagagaagtctggaagaactgttctgacaggcacatcagtgcaggcccagccagtgctgcccaccgacagtgccagccgaggtggagtggctgtggctccctcatcaggtgactgtatccccagcccctgccacaatggtgggacatgcttggaggagaaggagggtttccgctgcctctgtttgccaggctatgggggggacctgtgcgatgttggcctccacttctgcagcccgggctgggaggccttccagggtgcctgctacaagcacttttccacacgaaggagttgggaggaggcagaaagccagtgccgagcgctaggggctcatctgaccagcatctgcacccctgaggagcaggactttgtcaacgatcgatacagggagtaccagtggattgggctcaatgacaggaccatcgagggtgacttcctgtggtcagatggtgcccctctgctctatgaaaactggaaccctgggcagcctgacagctacttcctgtctggggagaactgtgtggtcatggtgtggcatgaccagggacagtggagtgatgtaccctgcaactaccacctatcctacacctgcaagatggggcttgtgtcatgtggacctccaccacagctgcccctggctcaaatatttggtcgccctcggctggcctacgcggtggacactgtgcttcgatatcggtgccgagacgggctggcccagcgcaacttgccgttgatccgctgccaggagaatgggctttgggaggcccctcagatttcttgcgtgccccgaagacctgcccgtgctctccgctcaatgaccgccccagaaggaccacggggacagctcccgaggcagaggaaagcactgttgacacctccctccagtctctagggaacaggcgtggaagactactgcccccaccagggccctctcacttcaactgcctgtgctcttccctatgatagggggttgacaagagaggggtgggactggaattcagaggacaagcgacccgaaggggtttctgggaaacacttgggtgactccgcccaacctagaccccgccccctcatacaagggcctcaggttttacccggtaagtccctaagtgcctcaactgccttctgctgtcagctgcctccttgtttctcgatttctttaggggacactgtgctactcgttcttaattttcaaagggtttttaggatggagtaccagcaaaaccaggtggaaataaagttgtttgaacctcgtgcc

SEQ ID NO: 8512 - protein, 883 aa, Rattus norvegicus
  ref <308>: DATABASE ACCESSION NUMBER: SWISS-Prot / P55068
  ref <309>: DATABASE ENTRY DATE: 2002-06-15
MIPLLLSLLAALVLTQAPAALADDLKEDSSEDRAFRVRIGAAQLRGVLGGALAIPCHVHHLRPPPSRRAAPGFPRVKWTFLSGDREVEVLVARGLRVKVNEAYRFRVALPAYPASLTDVSLVLSELRPNDSGVYRCEVQHGIDDSSDAVEVKVKGVVFLYREGSARYAFSFAGAQEACARIGARIATPEQLYAAYLGGYEQCDAGWLSDQTVRYPIQNPREACYGDMDGYPGVRNYGVVGPDDLYDVYCYAEDLNGELFLGAPPGKLTWEEARDYCLERGAQIASTGQLYAAWNGGLDRCSPGWLADGSVRYPIITPSQRCGGGLPGVKTLFLFPNQTGFPSKQNRFNVYCFRDSAHPSAFSEASSPASDGLEAIVTVTEKLEELQLPQEAVESESRGAIYSIPITEDGGGGSSTPEDPAEAPRTPLESETQSVAPPTGSSEEEGEALEEEERFKDTETPKEEKEQENLWVWPTELSSPLPTGLETEHSLSQVSPPAQAVLQVGASPSPRPPRVHGPTVETLQPPGEGSLTSTPDGAREVGGETGSPELSGVPREREEAGSSSLEDGPSLLPETWAPVGTREVETPSEEKSGRTVLTGTSVQAQPVLPTDSASRGGVAVAPSSGDCIPSPCHNGGTCLEEKEGFRCLCVPGYGGDLCDVGLHFCSPGWEPFQGACYKHFSTRRSWEEAESQCRALGAHLTSICTPEEQDFVNDRYREYQWIGLNDRTIEGDFLWSDGPPLLYENWNPGQPDSYFLSGENCVVMVWHDQGQWSDVPCNYHLSYTCKMGLVSCGPPPQLPLAQIFGRPRLRYAVDTVLRYRCRDGLAQRNLPLIRCQENGLWEAPQISCVPRRPARALRSMTAPEGPRGQLPRQRKALLTPPSSL

SEQ ID NO: 8513 - DNA, 3275 bp, Homo sapiens
  ref <308>: DATABASE ACCESSION NUMBER: Refseq / NM_021948
  ref <309>: DATABASE ENTRY DATE: 2002-04-10
gcagtctccgccgcagtctcagctgcagctgcaggactgagccgtgcacccggaggagacccccggaggaggcgacaaacttcgcagtgccgcgacccaaccccagccctgggtagcctgcagcatggcccagctgttcctgcccctgctggcagccctggtcctggcccaggctcctgcagctttagcagatgttctggaaggagacagctcagaggaccgcgcttttcgcgtgcgcatcgcgggcgacgcgccactgcagggcgtgctcggcggcgccctcaccatcccttgccacgtccactacctgcggccaccgccgagccgccgggctgtgctgggctctccgcgggtcaagtggactttcctgtcccggggccgggaggcagaggtgctggtggcgcggggagtgcgcgtcaaggtgaacgaggcctaccggttccgcgtggcactgcctgcgtacccagcgtcgctcaccgacgtctccctggcgctgagcgagctgcgccccaacgactcgggtatctatcgctgtgaggtccagcacggcatcgatgacagcagcgacgctgtggaggtcaaggtcaaaggggtcgtctttctctaccgagagggctctgcccgctatgctttctccttttctggggcccaggaggcctgtgcccgcattggagcccacatcgccaccccggagcagctctatgccgcctaccttgggggctatgagcaatgtgatgctggctggctgtcggatcagaccgtgaggtatcccatccagaccccacgagaggcctgttacggagacatggatggcttccccggggtccggaactatggtgtggtggacccggatgacctctatgatgtgtactgttatgctgaagacctaaatggagaactgttcctgggtgaccctccagagaagctgacattggaggaagcacgggcgtactgccaggagcggggtgcagagattgccaccacgggccaactgtatgcagcctgggatggtggcctggaccactgcagcccagggtggctagctgatggcagtgtgcgctaccccatcgtcacacccagccagcgctgtggtgggggcttgcctggtgtcaagactctcttcctcttccccaaccagactggcttccccaataagcacagccgcttcaacgtctactgcttccgagactcggcccagccttctgccatccctgaggcctccaacccagcctccaacccagcctctgatggactagaggctatcgtcacagtgacagagaccctggaggaactgcagctgcctcaggaagccacagagagtgaatcccgtggggccatctactccatccccatcatggaggacggaggaggtggaagctccactccagaagacccagcagaggcccctaggacgctcctagaatttgaaacacaatccatggtaccgcccacggggttctcagaagaggaaggtaaggcattggaggaagaagagaaatatgaagatgaagaagagaaagaggaggaagaagaagaggaggaggtggaggatgaggctctgtgggcatggcccagcgagctcagcagcccgggccctgaggcctctctccccactgagccagcagcccaggagaagtcactctcccaggcgccagcaagggcagtcctgcagcctggtgcatcaccacttcctgatggagagtcagaagcttccaggcctccaagggtccatggaccacctactgagactctgcccactcccagggagaggaacctagcatccccatcaccttccactctggttgaggcaagagaggtgggggaggcaactggtggtcctgagctatctggggtccctcgaggagagagcgaggagacaggaagctccgagggtgccccttccctgcttccagccacacgggcccctgagggtaccagggagctggaggccccctctgaagataattctggaagaactgccccagcagggacctcagtgcaggcccagccagtgctgcccactgacagcgccagccgaggtggagtggccgtggtccccgcatcaggtgactgtgtccccagcccctgccacaatggtgggacatgcttggaggaggaggaaggggtccgctgcctatgtctgcctggctatgggggggacctgtgcgatgttggcctccgcttctgcaaccccggctgggacgccttccagggcgcctgctacaagcacttttccacacgaaggagctgggaggaggcagagacccagtgccggatgtacggcgcgcatctggccagcatcagcacacccgaggaacaggacttcatcaacaaccggtaccgggagtaccagtggatcggactcaacgacaggaccatcgaaggcgacttcttgtggtcggatggcgtccccctgctctatgagaactggaaccctgggcagcctgacagctacttcctgtctggagagaactgcgtggtcatggtgtggcatgatcagggacaatggagtgacgtgccctgcaactaccacctgtcctacacctgcaagatggggctggtgtcctgtgggccgccaccggagctgcccctggctcaagtgttcggccgcccacggctgcgctatgaggtggacactgtgcttcgctaccggtgccgggaaggactggcccagcgcaatctgccgctgatccgatgccaagagaacggtcgttgggaggccccccagatctcctgtgtgcccagaagacctgcccgagctctgcacccagaggaggacccagaaggacgtcaggggaggctactgggacgctggaaggcgctgttgatccccccttccagccccatgccaggtccctagggggcaaggccttgaacactgccggccacagcactgccctgtcacccaaattttccctcacaccctgcgctcccgccaccacaggaagtgacaacatgacgaggggtggtgctggagtccaggtgacagttcctgaaggggcttctgggaaatacctaggaggctccagcccagcccaggccctctccccctaccctgggcaccagatcttccatcagggccggagtaaatccctaagtgcctcaactgccctctccctggcagccatcttgtcccctctattcctctagggagcactgtgcccactctttctgggttttccaagggaatgggcttgcaggatggagtgtctgtaaaatcaacaggaaataaaactgtgtatgagcccaggcaaaaaaaaaaaaaaaaaaaaaaa

SEQ ID NO: 8514 - protein, 911 aa, Homo sapiens
  ref <308>: DATABASE ACCESSION NUMBER: Refseq / NP_068767
  ref <309>: DATABASE ENTRY DATE: 2002-04-10
MAQLFLPLLAALVLAQAPAALADVLEGDSSEDRAFRVRIAGDAPLQGVLGGALTIPCHVHYLRPPPSRRAVLGSPRVKWTFLSRGREAEVLVARGVRVKVNEAYRFRVALPAYPASLTDVSLALSELRPNDSGIYRCEVQHGIDDSSDAVEVKVKGVVFLYREGSARYAFSFSGAQEACARIGAHIATPEQLYAAYLGGYEQCDAGWLSDQTVRYPIQTPREACYGDMDGFPGVRNYGVVDPDDLYDVYCYAEDLNGELFLGDPPEKLTLEEARAYCQERGAEIATTGQLYAAWDGGLDHCSPGWLADGSVRYPIVTPSQRCGGGLPGVKTLFLFPNQTGFPNKHSRFNVYCFRDSAQPSAIPEASNPASNPASDGLEAIVTVTETLEELQLPQEATESESRGAIYSIPIMEDGGGGSSTPEDPAEAPRTLLEFETQSMVPPTGFSEEEGKALEEEEKYEDEEEKEEEEEEEEVEDEALWAWPSELSSPGPEASLPTEPAAQEKSLSQAPARAVLQPGASPLPDGESEASRPPRVHGPPTETLPTPRERNLASPSPSTLVEAREVGEATGGPELSGVPRGESEETGSSEGAPSLLPATRAPEGTRELEAPSEDNSGRTAPAGTSVQAQPVLPTDSASRGGVAVVPASGDCVPSPCHNGGTCLEEEEGVRCLCLPGYGGDLCDVGLRFCNPGWDAFQGACYKHFSTRRSWEEAETQCRMYGAHLASISTPEEQDFINNRYREYQWIGLNDRTIEGDFLWSDGVPLLYENWNPGQPDSYFLSGENCVVMVWHDQGQWSDVPCNYHLSYTCKMGLVSCGPPPELPLAQVFGRPRLRYEVDTVLRYRCREGLAQRNLPLIRCQENGRWEAPQISCVPRRPARALHPEEDPEGRQGRLLGRWKALLIPPSSPMPGP

SEQ ID NO: 8515 - DNA, 1742 bp, Rattus norvegicus
  ref <308>: DATABASE ACCESSION NUMBER: EMBL / U37464
  ref <309>: DATABASE ENTRY DATE: 2000-03-04
atacattccccttgtcacttcttggggctcctaagtaggggccagtcggtactccttgccgcaggatgtgagaccctttaacctgtaatgctgtggctggcccttggcccctttcgtgccatggagaaccaggtgctggtgattcggatcaagattccaaatagtggcgcggtggactggaccgtgcactccgggccgcagttactcttcagggacgtgctggatgtgataggccaggttctgcctgaagcaacgacgacagcctttgaatatgaagatgaagatggtgataggattacagtaagaagtgacgaagagatgaaggcaatgctgtcctactattattccacagtaatggaacagcaagtaaatggccagctaatagagccgctgcagatctttccaagagcctgcaagcctcctggggaacggaacatacatggcctgaaggtgaatacacgggctggaccatctcagcacaccagccctgtggtctcagattcacttccaagcaatagcttgaagaagtcctcggctgaactgagaaagatactggccaacggccagatgaatgaacaagacatacggtatcgagacacccttggtcatggcaacggaggcacagtctacaaagcatatcatgtcccaagtgggaaaatcttagctgtaaaggttattctgttagacatcacactggagcttcagaagcagatcatgtctgagttggaaattctttataagtgtgactcatcgtatatcataggattttacggggcattttttgtagaaaacaggatttcgatttgtacagaattcatggatggggggtctttggatgtatataggaaaattccagagcacgtcctcggaagaattgcagtagcagttgttaaaggccttacctatctgtggagtttaaagattttacacagagatgtgaagccttccaacatgcttgtaaacacaagcggacaggtcaagctgtgtgacttcggcgtgagcacccagctggtgaattctatagccaagacgtatgttggaacaaatgcttatatggcacccgaaaggatttcaggagagcagtatgggatccattccgacgtgtggagcttagggatctctttcatggagattcagaaaaaccagggatctttaatgcctctccagcttctgcagtgcattgttgatgaggattcgccggtccttccgcttggagagttctcggagccgtttgtacatttcatcactcagtgcatgaggaagcagcccaaggaaagaccagcgcccgaggagctgatgggtcacccattcatcgtgcagttcaatgacggaaacgccactgtggtgtccatgtgggtttgccgagctctggaggagagacggagccagcaggggcccccatgagacctcagcaggacactgaccacccaggaccaggcatcaaggtcacaacaagccgcgacccctctgtctgctgcctgattgggaagagatgtactgggcacagctcctgctttcaccttctaccttacctgggagtcttcaagaagggtggtctctgccgaacccctcaccactggtagggaggaggcactgacaatggcaggtggagatggtgcagggttggggtgatgaggttatggaacctcctctggccccaccctcatctctccctactgttgtaaagggtcagcctatcagcagcactgatgggaataaagtattactgctttggattgtag

SEQ ID NO: 8516 - protein, 448 aa, Rattus norvegicus
  ref <308>: DATABASE ACCESSION NUMBER: SWISS-Prot / Q62862
  ref <309>: DATABASE ENTRY DATE: 2001-10-16
MLWLALGPFRAMENQVLVIRIKIPNSGAVDWTVHSGPQLLFRDVLDVIGQVLPEATTTAFEYEDEDGDRITVRSDEEMKAMLSYYYSTVMEQQVNGQLIEPLQIFPRACKPPGERNIHGLKVNTRAGPSQHTSPVVSDSLPSNSLKKSSAELRKILANGQMNEQDIRYRDTLGHGNGGTVYKAYHVPSGKILAVKVILLDITLELQKQIMSELEILYKCDSSYIIGFYGAFFVENRISICTEFMDGGSLDVYRKIPEHVLGRIAVAVVKGLTYLWSLKILHRDVKPSNMLVNTSGQVKLCDFGVSTQLVNSIAKTYVGTNAYMAPERISGEQYGIHSDVWSLGISFMELALGRFPYPQIQKNQGSLMPLQLLQCIVDEDSPVLPLGEFSEPFVHFITQCMRKQPKERPAPEELMGHPFIVQFNDGNATVVSMWVCRALEERRSQQGPP

SEQ ID NO: 8517 - DNA, 1611 bp, Homo sapiens
  ref <308>: DATABASE ACCESSION NUMBER: EMBL / U71088
  ref <309>: DATABASE ENTRY DATE: 1996-10-10
ctgtaatgctgtggctagcccttggcccctttcctgccatggagaaccaggtgctggtaattcgcatcaagatcccaaatagtggcgcggtggactggacagtgcactccgggccgcagttactcttcagggatgtgctggatgtgataggccaggttctgcctgaagcaacaactacagcatttgaatatgaagatgaagatggtgatcgaattacagtgagaagtgatgaggaaatgaaggcaatgctgtcatattattattccacagtaatggaacagcaagtaaatggacagttaatagagcctctgcagatatttccaagagcctgcaagcctcctggggaacggaacatacatggcctgaaggtgaatactcgggccggaccctctcaacacagcagcccagcagtctcagattcacttccaagcaatagcttaaagaagtcttctgctgaactgaaaaaaatactagccaatggccagatgaatgaacaagacatacgatatcgggacactcttggtcatggcaacggaggcacagtctacaaagcatatcatgtcccgagtgggaaaatattagctgtaaaggtcatactactagatattacactggaacttcagaagcaaattatgtctgaattggaaattctttataagtgcgattcatcatatatcattggattttatggagcattttttgtagaaaacaggatttcaatatgtacagaattcatggatgggggatctttggatgtatataggaaaatgccagaacatgtccttggaagaattgcagtagcagttgttaaaggccttacttatttgtggagtttaaagattttacatagagacgtgaagccctccaatatgctagtaaacacaagaggacaggttaagctgtgtgattttggagttagcactcagctggtgaattctatagccaagacgtatgttggaacaaatgcttatatggcgcctgaaaggatttcaggggagcagtatggaattcattctgatgtctggagcttaggaatctcttttatggagattcagaaaaaccagggatctttaatgcctctccagcttctgcagtgcattgttgatgaggattcgcccgtccttccagttggagagttctcggagccatttgtacatttcatcactcagtgtatgcgaaaacagccaaaagaaaggccagcacctgaagaattgatgggccacccgttcatcgtgcagttcaatgatggaaatgccgccgtggtgtccatgtgggtgtgccgggcgctggaggagaggcggagcctggcttccctgccctcgccttcaccctctgtcagtctagagggccctattctatagtgtcacctaaatgctagagctcgctgatcagcctcgactgtgccttctagttgccagccatctgttgtttgcccctcccccgtgccttccttgaccctggaaggtgccactcccactgtcctttcctaataaaatgaggaaattgcatcgcattgtctgagtaggtgtcattctattctggggggtggggtggggcaggacagcaagggggaggattgggaagacaatagcaggcatgctggggatgcgg

SEQ ID NO: 8518 - protein, 438 aa, Homo sapiens
  ref <308>: DATABASE ACCESSION NUMBER: SWISS-Prot / Q13163
  ref <309>: DATABASE ENTRY DATE: 2001-10-16
MLWLALGPFPAMENQVLVIRIKIPNSGAVDWTVHSGPQLLFRDVLDVIGQVLPEATTTAFEYEDEDGDRITVRSDEEMKAMLSYYYSTVMEQQVNGQLIEPLQIFPRACKPPGERNIHGLKVNTRAGPSQHSSPAVSDSLPSNSLKKSSAELKKILANGQMNEQDIRYRDTLGHGNGGTVYKAYHVPSGKILAVKVILLDITLELQKQIMSELEILYKCDSSYIIGFYGAFFVENRISICTEFMDGGSLDVYRKMPEHVLGRIAVAVVKGLTYLWSLKILHRDVKPSNMLVNTRGQVKLCDFGVSTQLVNSIAKTYVGTNAYMAPERISGEQYGIHSDVWSLGISFMEIQKNQGSLMPLQLLQCIVDEDSPVLPVGEFSEPFVHFITQCMRKQPKERPAPEELMGHPFIVQFNDGNAAVVSMWVCRALEERRSQQGPP

SEQ ID NO: 8519 - DNA, 1470 bp, Rattus norvegicus
  ref <308>: DATABASE ACCESSION NUMBER: EMBL / U38253
  ref <309>: DATABASE ENTRY DATE: 2000-03-04
gcggctacggcgtgcggggagctgaggtaaagccggggctagtacggtaccaggcggtgcacgagctggctaagccagatttgtaaaaatggagtttcaagccgtagttatggccgtcggtgggggatctcggatgacagacttgacttccagcattcccaagcctctgcttccagttggaaacaaacctttaatttggtacccgctgaacctgcttgagcgagttggatttgaagaagtcatcgtggttacaaccaaagatgtccaaaaggctctgtgtgcagagttcaagatgaaattgaagccagatattgtgtgcattcctgatgaggcagacatggggactgcagattctctacgccacatatatccaaaacttaagactgatgtgctggtcctgggctgcgatctgataacagatgttgccttacacgaggttgtggacctgttcagagcttacgatgcatcacttgccatgttaatgaggaaaggacaagagagcacagaaccagttccaggtcagaaggggaaaaaaaaaacagtggagcagcgtgacttcattggagtggacagcacaggaaaaaggctgctctttatggctaatgaagcagacttggatgaagagctggtcattaagggatccatcctgcagaagcaccctaggatacatttccagacaggccttgtggatgctcatctctactgcttgaagaaatatgttgtggatttcttaatggaaaataagtcaatcacttctatccgaagcgaactgattccgtacctagtaagaaaacagttttcctcagcctcctcacagcaaaggcaggaagacaaagaagaggatctaaagaaaaaggagcccaagtctttagatatttacagttttataaaaaaagacaacactctgactttggctccctatgatgcctgctggaatgcttttcgaagagacaagtgggaagatttgtctagatcacaggttcgctgctatgtccacatcatgaaggaaggactttgctctcgagtaagcacactgggactctacatggaagccaacagacaggtacccaaattgctgtctgttctttgtcctgaggaatcaatgatccatccatcagcccagattgccaacaaacacctgattggagccgacagccttatcgggtcagatacacaagttggagagaagtcatctattaagcgatctgtcattggctcatcctgtgtcatcagagacagagtaactgttaccaactgccttctcatgaactctgtcaccgtgggagaagggagcagcatccatggcagcgtcatcttcaacaacgccgtggtcgaggcgggcgcggagatcagggactgtttaattggaagtggtcagaggattgaagccaaagctaaacgcatgaacgaggtgatcgtgggaaatgaccagctcatggagatctgaatcctgaacaagtctgaccccac

SEQ ID NO: 8520 - protein, 452 aa, Rattus norvegicus
  ref <308>: DATABASE ACCESSION NUMBER: SWISS-Prot / P70541
  ref <309>: DATABASE ENTRY DATE: 1999-07-15
MEFQAVVMAVGGGSRMTDLTSSIPKPLLPVGNKPLIWYPLNLLERVGFEEVIVVTTKDVQKALCAEFKMKLKPDIVCIPDEADMGTADSLRHIYPKLKTDVLVLGCDLITDVALHEVVDLFRAYDASLAMLMRKGQESTEPVPGQKGKKKTVEQRDFIGVDSTGKRLLFMANEADLDEELVIKGSILQKHPRIHFQTGLVDAHLYCLKKYVVDFLMENKSITSIRSELIPYLVRKQFSSASSQQRQEDKEEDLKKKEPKSLDIYSFIKKDNTLTLAPYDACWNAFRRDKWEDLSRSQVRCYVHIMKEGLCSRVSTLGLYMEANRQVPKLLSVLCPEESMIHPSAQIANKHLIGADSLIGSDTQVGEKSSIKRSVIGSSCVIRDRVTVTNCLLMNSVTVGEGSSIHGSVIFNNAVVEAGAEIRDCLIGSGQRIEAKAKRMNEVIVGNDQLMEI

SEQ ID NO: 8521 - DNA, 1580 bp, Homo sapiens
  ref <308>: DATABASE ACCESSION NUMBER: EMBL / BC018728
  ref <309>: DATABASE ENTRY DATE: 2002-05-29
atcgctgggagcggttgcggcgtgccgggagctgagttatagctgtgacttctgccctgccaggccgcacacaagctggctgacccggtttgtaaaaatggaatttcaagcagtagtgatggcagtaggtggaggatctcggatgacagacctaacttccagcattcccaaacctctgcttccagttgggaacaaacctttaatttggtacccattgaacctgcttgagcgtgttggatttgaagaagtcattgtggttacaaccagggatgttcaaaaggctctatgtgcagaattcaagatgaaaatgaagccagatattgtgtgtattcctgatgacgctgacatgggaactgcagattctttgcgctacatatatccaaaacttaagacagatgtgctggtgctgagctgtgatctgataacagacgttgccttacatgaggttgtggacctgtttagagcttatgatgcatcacttgctatgttgatgagaaaaggccaagatagcatagaacctgttcccggtcaaaaggggaaaaaaaaagcagtggagcagcgtgacttcattggagtggacagcacaggaaagaggctgctcttcatggctaatgaagcagacttggatgaagagctggtcattaagggatccatcctacagaagcatcctagaatacgtttccacacgggtcttgtggatgcccacctctactgtttgaaaaaatacatcgtggatttcctaatggaaaatgggtcaataacttctatccggagtgaactgattccatatttagtgagaaaacagttttcctcagcttcctcacaacagggacaagaagaaaaagaggaggatctaaagaaaaaggagctgaagtccttagatatctacagttttataaaagaagccaatacactgaacctggctccctatgatgcctgctggaatgcctgtcgaggagacaggtgggaagacttgtccagatcacaggtgcgctgctatgtccacatcatgaaagaggggctctgctctcgagtgagcacactgggactctacatggaagcaaacagacaggtgcccaaattgctgtctgctctctgtccagaagaaccaccagtccattcgtcagcccagattgtcagcaaacacctggttggagttgacagcctcattgggccagagacacagattggagagaagtcatccattaagcgctcagtcattggctcatcctgtctcataaaagatagagtgactattaccaattgccttctcatgaactcagtcactgtggaggaaggctaaacgagtgaatgaggtgatcgtggggaatgaccagctcatggagatctgagttctgagcaagtcagactccttccttttggcctccaaagccacagatgttggccggcccacctgtttaactctgtatttatttcccaataaagaagggcttccaaaggcatgctggagacttgtggagcagtccaaagctccatgtcaggtgggctccaggtgtacacagtgtatgttcatgtgtcatgtggtaaagatcatctggagcaaaaaaaaaaaaaaaaaa

SEQ ID NO: 8522 - protein, 452 aa, Homo sapiens
  ref <308>: DATABASE ACCESSION NUMBER: SWISS-Prot / Q9NR50
  ref <309>: DATABASE ENTRY DATE: 2001-10-16
MEFQAVVMAVGGGSRMTDLTSSIPKPLLPVGNKPLIWYPLNLLERVGFEEVIVVTTRDVQKALCAEFKMKMKPDIVCIPDDADMGTADSLRYIYPKLKTDVLVLSCDLITDVALHEVVDLFRAYDASLAMLMRKGQDSIEPVPGQKGKKKAVEQRDFIGVDSTGKRLLFMANEADLDEELVIKGSILQKHPRIRFHTGLVDAHLYCLKKYIVDFLMENGSITSIRSELIPYLVRKQFSSASSQQGQEEKEEDLKKKELKSLDIYSFIKEANTLNLAPYDACWNACRGDRWEDLSRSQVRCYVHIMKEGLCSRVSTLGLYMEANRQVPKLLSALCPEEPPVHSSAQIVSKHLVGVDSLIGPETQIGEKSSIKRSVIGSSCLIKDRVTITNCLLMNSVTVEEGSNIQGSVICNNAVIEKGADIKDCLIGSGQRIEAKAKRVNEVIVGNDQLMEI

SEQ ID NO: 8523 - DNA, 1470 bp, Rattus norvegicus; identical to SEQ ID NO: 8519
  ref <308>: DATABASE ACCESSION NUMBER: EMBL / U38253
  ref <309>: DATABASE ENTRY DATE: 2000-03-04

SEQ ID NO: 8524 - protein, 452 aa, Rattus norvegicus; identical to SEQ ID NO: 8520
  ref <308>: DATABASE ACCESSION NUMBER: SWISS-Prot / P70541
  ref <309>: DATABASE ENTRY DATE: 1999-07-15

SEQ ID NO: 8525 - DNA, 1580 bp, Homo sapiens; identical to SEQ ID NO: 8521
  ref <308>: DATABASE ACCESSION NUMBER: EMBL / BC018728
  ref <309>: DATABASE ENTRY DATE: 2002-05-29

SEQ ID NO: 8526 - protein, 452 aa, Homo sapiens; identical to SEQ ID NO: 8522
  ref <308>: DATABASE ACCESSION NUMBER: SWISS-Prot / Q9NR50
  ref <309>: DATABASE ENTRY DATE: 2001-10-16

SEQ ID NO: 8527 - DNA, 1470 bp, Rattus norvegicus; identical to SEQ ID NO: 8519
  ref <308>: DATABASE ACCESSION NUMBER: EMBL / U38253
  ref <309>: DATABASE ENTRY DATE: 2000-03-04

SEQ ID NO: 8528 - protein, 452 aa, Rattus norvegicus; identical to SEQ ID NO: 8520
  ref <308>: DATABASE ACCESSION NUMBER: SWISS-Prot / P70541
  ref <309>: DATABASE ENTRY DATE: 1999-07-15

SEQ ID NO: 8529 - DNA, 1580 bp, Homo sapiens; identical to SEQ ID NO: 8521
  ref <308>: DATABASE ACCESSION NUMBER: EMBL / BC018728
  ref <309>: DATABASE ENTRY DATE: 2002-05-29

SEQ ID NO: 8530 - protein, 452 aa, Homo sapiens; identical to SEQ ID NO: 8522
  ref <308>: DATABASE ACCESSION NUMBER: SWISS-Prot / Q9NR50
  ref <309>: DATABASE ENTRY DATE: 2001-10-16

SEQ ID NO: 8531 - DNA, 2858 bp, Rattus norvegicus
  ref <308>: DATABASE ACCESSION NUMBER: EMBL / U38376
  ref <309>: DATABASE ENTRY DATE: 1998-06-15
gaattcggcacgagcggaactgtgaagggctcccatcaggctcccgactgacagagagctagaaggcacagagaaacctgaggattctcatttaactctgggaactgcttcaagaagctatagtaccagagaacacctgggaagtgtgagaattcctgcagctgggaccaaaatgtctttcatagatccttatcagcacataatagtggaacaccagtattcccataagtttacagtagtggttctacgtgccaccaaagtaaccaaggggacctttggcgatatgctggacactcctgatccttatgtggaacttttcatctctacaacccctgacagcaggaagcgaacaagacacttcaataatgatataaaccctgtgtggaatgagacctttgagttcattttggatcctaatcaggaaaatgttttggagatcacattgatggatgccaattacgtcatggatgaaaccctaggcacagctacatttcctgtatcttctatgaaggtgggagagaagaaagaagtcccttttattttcaaccaagtcacagaaatgattctggaaatgtctcttgaagtttcgtcatgcccagacctacggttcagcatggcactgtgtgatcaggagaaaacattcaggcagcagaggaaagagaacataaaagagaacatgaagaaacttttgggtccaaaaaagagcgaggggctttattccacacgtgatgtgcctgtggtggccattttgggttccggcgggggtttccgggccatggtgggattctccggtgtgatgaaggcgctctatgaatcagggattttggattgtgcgacctacgttgctggtctgtccggctccacatggtacatgtcaaccttgtactcccaccctgattttccagagaaaggtcctgaggagattaatgaagagctaatgaaaaatgttagccacaaccctctcttacttcttacgccacagaaagttaaaagatatgttgagtctttatggaagaagaaaagttctggccttcctgtcacctttactgacatctttggaatgttaataggagaaacactaattcaaaatagaatagtaccgaccttgagtagcttgaaggaaaaggtcagcgccgcccggtgtcctctgcctctcttcacctgtctccatgtcaaaccggacgtgtcagagctgatgtttgccgattgggtagaatttagtccatacgaaattggcatggcaaaatatggtacctttatgactcctgacctgtttggaagcaaattttttatgggaacagttgtaaaaaaatatgaagaaaaccccttgcatttcttaatgggtgtctggggcagtgccttttctatactgttcaacagagttttgggagtttctggcttacagaataaaggttctacaatggaggaggaattagaaaatattacagcaaagcacattgtgagtaacgacagctctgacagcgatgacgaggcccaaggacccaaaggcaccgagaatgaagatgcggaaagagagtaccaaaatgacaaccaagcaagttgggtccatcggatgctaatggccttggtgagtgactcagctttattcaatacccgagaaggacgtgctgggaaggtgcataacttcatgttgggcttgaatctcaacacatcgtatccactgtctcccctgagagacttcagcccccaagattccttcgatgatgatgaactcgacgcagcggtagcagatccagatgaatttgaacgaatatatgaaccactggatgtcaaaagtaaaaagattcatgttgtagacagtgggctcacgtttaacctgccgtatcccttgattctgcgacctcagagaggtgtggatctcatcatttcctttgacttttctgcaaggccaagtgacaccagccctccattcaaggaacttctgcttgcagagaagtgggctaaaatgaacaagctcccttttccaaagattgatccttacgtgtttgatcgggaaggattgaaggaatgctatgtgtttaaacctaagaatcctgatgtggagaaggattgcacaaccattatccactttgttctggccaacatcaacttcagaaagtacaaggccccaggtgttctgagggaaaccaaggaagagaaagaaatagctgactttgacattttcgatgaccccgaatcgccattttcaaccttcaacttccagtatccaaatcaagcattcaaaaggctacatgatctgatgtacttcaacacactgaacaacattgatgtgataaaggatgccattgttgagagcattgaatacagaagacagaacccatctcgttgctctgtttccctcagtaatgttgaggcaagaaaattcttcaacaaggagttcctaagtaaacccacagcagagtccatttgaattccatgactactggagttcagagcacatgagagatcatcttactatgcacaagagactgactgctactcagagttgtggggacggaggcgtgtgttaggtgaaaacggtgttgattatgcaatacttggcaacagtttctgacagtatgaattttttgacataagcatagggctatatactgtattttaaacattcctcacatttttacctgagcatttttatatatatataaaaatatcctttccttttataaatattaatagtttaactcagtaaaaaaaagcttcccattgtgtgtgaatgttattctgaactagatttgttcatgccatgttacaacactatttttatttaaatgttcatatctacacatgcgaaataaatactttgatatacaaattgccaaaaaaaaaaaaaaaaaaaa

SEQ ID NO: 8532 - protein, 752 aa, Rattus norvegicus
  ref <308>: DATABASE ACCESSION NUMBER: SWISS-Prot / P50393
  ref <309>: DATABASE ENTRY DATE: 2002-06-15
MSFIDPYQHIIVEHQYSHKFTVVVLRATKVTKGTFGDMLDTPDPYVELFISTTPDSRKRTRHFNNDINPVWNETFEFILDPNQENVLEITLMDANYVMDETLGTATFPVSSMKVGEKKEVPFIFNQVTEMILEMSLEVCSCPDLRFSMALCDQEKTFRRQRKENIKENMKKLLGPKKSEGLYSTRDVPVVAILGSGGGFRAMVGFSGVMKALYESGILDCATYVAGLSGSTWYMSTLYSHPDFPEKGPEEINEELMKNVSHNPLLLLTPQKVKRYVESLWKKKSSGQPVTFTDIFGMLIGETLIQNRMSTTLSSLKEKVSAARCPLPLFTCLHVKPDVSELMFADWVEFSPYEIGMAKYGTFMTPDLFGSKFFMGTVVKKYEENPLHFLMGVWGSAFSILFNRVLGVSGSQNKGSTMEEELENITAKHIVSNDSSDSDDEAQGPKGTENEDAEREYQNDNQASWVHRMLMALVSDSALFNTREGRAGKEHNFMLGLNLNTSYPLSPLRDFSPQDSFDDDELDAAVADPDEFERIYEPLDVKSKKIHVVDSGLTFNLPYPLILRPQRGVDLIISFDFSARPSDTSPPFKELLLAEKWAKMNKLPFPKIDPYVFDREGLKECYVFKPKNPDVEKDCPTIIHFVLANINFRKYKAPGVLRETKEEKEIADFDIFDDPESPFSTFNFQYPNQAFKRLHDLMYFNTLNNIDVIKDAIVESIEYRRQNPSRCSVSLSNVEARKFFNKEFLSKPTAESI

SEQ ID NO: 8533 - DNA, 2875 bp, Homo sapiens
  ref <308>: DATABASE ACCESSION NUMBER: EMBL / M68874
  ref <309>: DATABASE ENTRY DATE: 1999-07-01
gaattctccggagctgaaaaaggatcctgactgaaagctagaggcattgaggagcctgaagattctcaggttttaaagacgctagagtgccaaagaagactttgaagtgtgaaaacatttcctgtaattgaaaccaaaatgtcatttatagatccttaccagcacattatagtggagcaccagtattcccacaagtttacggtagtggtgttacgtgccaccaaagtgacaaagggggcctttggtgacatgcttgatactccagatccctatgtggaactttttatctctacaacccctgacagcaggaagagaacaagacatttcaataatgacataaaccctgtgtggaatgagacctttgaatttattttggatcctaatcaggaaaatgttttggagattacgttaatggatgccaattatgtcatggatgaaactctagggacagcaacatttactgtatcttctatgaaggtgggagaaaagaaagaagttccttttattttcaaccaagtcactgaaatggttctagaaatgtctcttgaagtttgctcatgcccagacctacgatttagtatggctctgtgtgatcaggagaagactttcagacaacagagaaaagaacacataagggagagcatgaagaaactcttgggtccaaagaatagtgaaggattgcattctgcacgtgatgtgcctgtggtagccatattgggttcaggtgggggtttccgagccatggtgggattctctggtgtgatgaaggcattatacgaatcaggaattctggattgtgctacctacgttgctggtctttctggctccacctggtatatgtcaaccttgtattctcaccctgattttccagagaaagggccagaggagattaatgaagaactaatgaaaaatgttagccacaatccccttttacttctcacaccacagaaagttaaaagatatgttgagtctttatggaagaagaaaagctctggacaacctgtcacctttactgacatctttgggatgttaataggagaaacactaattcataatagaatgaatactactctgagcagtttgaaggaaaaagttaatactgcacaatgccctttacctcttttcacctgtcttcatgtcaaacctgacgtttcagagctgatgtttgcagattgggttgaatttagtccatacgaaattggcatggctaaatatggtacttttatggctcccgacttatttggaagcaaattttttatgggaacagtcgttaagaagtatgaagaaaaccccttgcatttcttaatgggtgtctggggcagtgccttttccatattgttcaacagagttttgggcgtttctggttcacaaagcagaggctccacaatggaggaagaattagaaaatattaccacaaagcatattgtgagtaatgatagctcggacagtgatgatgaatcacacgaacccaaaggcactgaaaatgaagatgctggaagtgactatcaaagtgataatcaagcaagttggattcatcgtatgataatggccttggtgagtgattcagctttattcaataccagagaaggacgtgctgggaaggtacacaacttcatgctgggcttgaatctcaatacatcttatccactgtctcctttgagtgactttgccacacaggactcctttgatgatgatgaactggatgcagctgtagcagatcctgatgaatttgagcgaatatatgagcctctggatgtcaaaagtaaaaagattcatgtagtggacagtgggctcacatttaacctgccgtatcccttgatactgagacctcagagaggggttgatctcataatctcctttgacttttctgcaaggccaagtgactctagtcctccgttcaaggaacttctacttgcagaaaagtgggctaaaatgaacaagctcccctttccaaagattgatccttatgtgtttgatcgggaagggctgaaggagtgctatgtctttaaacccaagaatcctgatatggagaaagattgcccaaccatcatccactttgttctggccaacatcaacttcagaaagtacaaggctccaggtgttccaagggaaactgaggaagagaaagaaatcgctgactttgatatttttgatgacccagaatcaccattttcaaccttcaattttcaatatccaaatcaagcattcaaaagactacatgatcttatgcacttcaatactctgaacaacattgatgtgataaaagaagccatggttgaaagcattgaatatagaagacagaatccatctcgttgctctgtttcccttagtaatgttgaggcaagaagatttttcaacaaggagtttctaagtaaacccaaagcatagttcatgtactggaaatggcagcagtttctgatgctgaggcagtttgcaatcccatgacaactggatttaaaagtacagtacagatagtcgtactgatcatgagagactggctgatactcaaagttgcagttacttagctgcatgagaataatactattataagttaggtgacaaatgatgttgattatgtaaggatatacttagctacattttcagtcagtatgaacttcctgatacaaatgtagggatatatactgtatttttaaacatttctcaccaactttcttatgtgtgttctttttaaaaattttttttcttttaaaatatttaacagttcaatctcaataagacctcgcattatgtatgaatgttattcactgactagatttattcataccatgagacaacactatttttatttatatatgcatatatatacatacatgaaataaatacatcaatataaaaataaaaaaaaacggaattc

SEQ ID NO: 8534 - protein, 749 aa, Homo sapiens
  ref <308>: DATABASE ACCESSION NUMBER: SWISS-Prot / P47712
  ref <309>: DATABASE ENTRY DATE: 2002-06-15
MSFIDPYQHIIVEHQYSHKFTVVVLRATKVTKGAFGDMLDTPDPYVELFISTTPDSRKRTRHFNNDINPVWNETFEFILDPNQENVLEITLMDANYVMDETLGTATFTVSSMKVGEKKEVPFIFNQVTEMVLEMSLEVCSCPDLRFSMALCDQEKTFRQQRKEHIRESMKKLLGPKNSEGLHSARDVPVVAILGSGGGFRAMVGFSGVMKALYESGILDCATYVAGLSGSTWYMSTLYSHPDFPEKGPEEINEELMKNVSHNPLLLLTPQKVKRYVESLWKKKSSGQPVTFTDIFGMLIGETLIHNRMNTTLSSLKEKVNTAQCPLPLFTCLHVKPDVSELMFADWVEFSPYEIGMAKYGTFMAPDLFGSKFFMGTVVKKYEENPLHFLMGVWGSAFSILFNRVLGVSGSQSRGSTMEEELENITTKHIVSNDSSDSDDESHEPKGTENEDAGSDYQSDNQASWIHRMIMALVSDSALFNTREGRAGKVHNFMLGLNLNTSYPLSPLSDFATQDSFDDDELDAAVADPDEFERIYEPLDVKSKKIHVVDSGLTFNLPYPLILRPQRGVDLIISFDFSARPSDSSPPFKELLLAEKWAKMNKLPFPKIDPYVFDREGLKECYVFKPKNPDMEKDCPTIIHFVLANINFRKYKAPGVPRETEEEKEIADFDIFDDPESPFSTFNFQYPNQAFKRLHDLMHFNTLNNIDVIKEAMVESIEYRRQNPSRCSVSLSNVEARRFFNKEFLSKPKA

SEQ ID NO: 8535 - DNA, 3298 bp, Rattus norvegicus
  ref <308>: DATABASE ACCESSION NUMBER: EMBL / U38801
  ref <309>: DATABASE ENTRY DATE: 2000-03-04
cggcaccatgagcaaacgcaaggccccgcaggagaccctcaacggcggcatcacggacatgctcgtggaactcgcaaactttgagaagaacgtgagccaggcgatccacaagtacaatgcatacagaaaagcagcatctgtgatagcaaagtacccacacaaaatcaagagtggagcagaagctaagaaattgccaggagtaggaacaaaaattgctgaaaagattgatgaatttttagcaactggaaaattgcgtaaactggaaaagattcgtcaggatgatacaagttcatccatcaacttcctgactcgagttactggcatcgggccatctgctgcaaggaagcttgtagatgaaggaattaaaacattagaagatctcaggaaaaatgaagataaattgaaccaccatcagcgaattgggctgaaatattttgaggactttgaaaagagaattcctcgtgaggagatgctgcaaatgcaggacattgttcttaatgaagttaaaaagctggatcccgagtacatcgctacagtctgcggcagtttccgaagaggcgcagagtccagtggagatatggacgttctgctgacccacccaaacttcacgtcagaatcaagcaaacagccaaagttgttacatcgtgttgtggaacagttacaaaaagtccgtttcattacagatactcgttcaaagggtgagacaaagttcatgggtgtttgccagcttcccagcgagaatgatgaaaacgaatatccacacaggagaatcgatatcaggttgatccccaaagatcagtactactgtggtgttctctacttcactggaagtgacatctttaataagaatatgagagcgcatgccctggaaaagggcttcacaatcaatgagtacaccatccgccccctgggggtcactggggttgctggggagccccttccggtggacagcgagcaggacattttcgattacatccagtggcgctaccgggagcccaaggacaggagtgaatgacgcctgccccacccaggcctatcccacgaggagtcctaagttattgcttaacctttgctatgtaagggttgggtgttttaggtgattgcctcttctctgtgcttcccatggactatcgtcaatgaacctcttgagcagctattcagtattttcttagcacatgtgtttaaacttagatatgtttgtgatcgcagtaccatggtttactagagaaacgtaagagccgatgtgataagcagtgtttaatgacctttcacttccacctcacattgcagccacagtcggccccacttgtccctatccaccctttatgggtcagctggtctcccagagccatctccagaagtcacttcattatccttagaaacaaggggcttccaggcatggtggtgcacatccttaatcccaggacttgggaggcagagacaggcagatctctgtgagttcaaggccagcccagactacatactgaattcagggtgccagagctacatagtgaggccctatctaaaaagaaaggggccttcatagctgtaagacttctgtgaccatttcccatttgcagtgtatactgataactagaagacagtgtgtgctttacctcaggggcagccttcccctcacagctcaatggcacctaactagcattcatcagtcgtctggtggacagtccactgtttatcaaataacattctgtgacacgaacaaagaacttcaagtttaagaaagatttatttgagcagattgagccactgtgtctggatggctttattgtagagtcctgtcatgttgtagatggtagtcacaaagtcagaagtaactcatcacagcgtctggtcactgtcagttgctagaagattcagctttatttatgtgctgggtataatgtacttgcctgtaatcccaagactcactcgaggcaagaggaacatgagttcgaagcccaccctgggctatatagcttactctgagaccctgtctcagaacccttacccctccccccaaaaattatccaggaggcagaggcaggtgggtctctatgagtgtaaggccagccagggctacacagcgagaccactgtctcagaaaacaaaataaaaaatagaataaaattagtgccagggattctgtgtgaacacgagggacaagtcccatgtctgtacaacttatattctttggcatactcttagccttgtatgttgtcggttaccagtcacctgacttcgacaggacagtccagggaccacagtcacagcgctggaagatttctggggcttgggcagtgtctttgtgccccctcctggaacacacttgtccctctagtagaactggcttgcaaattttggtccaaaaatggcgagcacagcaaagtccagggccgcagtcggaggttctgagacagctttctccctcctgtcctgtaacaaggtaggctcaggctctagaggtggcagatgggttaagggtgtgtgtgtgtgtgtgtgtgtgtgtgtgtgtgtgtgtgtgttatactaatgggttgagattgggatctaggaatgaaggcctatatagcctatatataaactagcaaagccaacaggacacaggtctcacagaataagggaaattagagccctactgaacaaagacatcaaggaatgattatctaccctgagaaataggtagcactccacaaagtttgctaatacagtttttcgtgagcatcgattcctttacttataaaggggccagctagtccaatatgtgagtaggagcggctgttgtacctctccactttcaaatactctgttattcaagactttaactcgagactcctatttttgtttaaaagaatttttgtaaatccccaagtgtggtggcagacacctttaatcccagcagaagccgtcgggtctctgagttcctgaacagtctggtctacacagtgagttctaggatagcagagctacagacccttttgtactatgtacaagtctggagtgaatgcatcttctttaatccactctgtatgctgaggctataggaaaggtacgtggcacttggtacaccccagcttagggaaagccatcggttggaggtttccttcctaagctgtcatcactagggtcttgccctggcctggccaatagagtcccttgaattgctccaagagctcacagacatgaggtaaaggagtttagcttcagcctgtggggctgggagggagaaaatggtttttaaaataaaatatgctctccttaaaaaaaaaaaaaaaaaaaaaaaaaaaaaaaaaaaaaaaaa

SEQ ID NO: 8536 - protein, 334 aa, Rattus norvegicus; identical to SEQ ID NO: 2420
  ref <308>: DATABASE ACCESSION NUMBER: SWISS-Prot / P06766
  ref <309>: DATABASE ENTRY DATE: 2002-06-15

SEQ ID NO: 8537 - DNA, 1259 bp, Homo sapiens; identical to SEQ ID NO: 2421
  ref <308>: DATABASE ACCESSION NUMBER: EMBL / M13140
  ref <309>: DATABASE ENTRY DATE: 2000-03-04

SEQ ID NO: 8538 - protein, 334 aa, Homo sapiens; identical to SEQ ID NO: 2422
  ref <308>: DATABASE ACCESSION NUMBER: SWISS-Prot / P06746
  ref <309>: DATABASE ENTRY DATE: 2002-06-15

SEQ ID NO: 8539 - DNA, 2538 bp, Rattus norvegicus
  ref <308>: DATABASE ACCESSION NUMBER: EMBL / U39044
  ref <309>: DATABASE ENTRY DATE: 1996-02-29
gagggacgttcccggaaagttaccggtcagaagaaactatctccacatcaccacctgacaggtcacaaccatgtcagacaaaagtgaattaaaagctgagttggaacgtaagaagcaacggttggcccaaatcagagaagaaaagaagaggaaagaagaggaaaggaaaaaaaaagaaactgatcagaagaaggaagctgcagtctctgtgcaggaagagtctgaccttgaaaagaagagaagagaagccgaagccttgcttcagagcatggggctaactacagactccccaattgttttttctgagcactgggtccctcctcccatgtctccatcctccaagtcggtgagcacgccaagtgaagctggaagccaggactctggagatggcgccgtgggatctaggacgctgcactgggatacagatccatcagctcttcagctccactcagattccgatttgggacgaggacctattaaacttggaatggccaaaattactcaagtcgactttccccctcgagaaatcgtcacatatacaaaggaaactcagaccccggttacagctcaacccaaagaagatgaggaggaggaagatgacgtagcagctcctaagcctcctgttgaacctgaagaagagaaaattttaaaaaaagacgaagagaatgatagcaaagctccccctcatgaactaactgaagaagaaaagcaacaaattttacactcagaagaatttttaagtttctttgaccattctacaagaattgtagaaagagccctctctgagcagattaacatcttctttgactacagtgggagagatttggaagacaaagaaggggagattcaagcaggtgctaagctgtcattaaatcgacagttttttgatgagcgttggtcaaagcatcgagttgttagttgcttggattggtcatcccagtatccagaattacttgtggcttcctataataacaatgaagaggctcctcatgagcctgatggtgtggccctcgtatggaatatgaagtacaagaaaactaccccagagtacgtgttccactgccagtcagctgtaatgtctgctacatttgcaaaatttcatccaaatcttgttgttggaggtacatactcaggccaaattgtgctttgggataaccgtagcaataaaagaacccccgtccagagaacaccactgtcagctgctgcacacacacaccctgtctactgtgtaaatgttgttggaacacaaaatgctcataatctgattagcatctctactgatggaaaaatttgctcctggagcttagacatgctttcccatccacaggatagcatggagttggttcataaacagtcaaaggcagtagctgtaacatctatgtctttccctgttggagacgtcaacaactttgttgtgggcagtgaagaaggttctgtgtatacagcatgccgccatggcagcaaagccggaatcagtgagatgtttgagggacaccagggacccatcacgggaatccactgtcacgcagctgttggcgcagtagacttctcacatctgttcgtcacttcgtcttttgactggacagtaaaactttggtcaactaagaataacaagcctttgtactcatttgaagataattcagactatgtctatgatgttattgggtcacccacccacccagccctgtttgcctgtgtggatggcatggggagactggatctatggaatctcaacaatgacacagaggtgccgactgccagcatttctgtggagggcaaccctgcccttaaccgtgtgagatggacccactcgggaagagagatcgccgtgggtgattctgaaggacagattgtcatatatgatgtgggcgagcagatcgctgttccccgaaatgatgaatgggcaagatttggccgaacactcgcagagattaacgcaagccgagctgatgcagaggaggaagcggctacccggattcctgcctaggcctggagggtggccgtagccttatcgagtctggcaaagaggatgaagtagatcctaaactattttgcatgcttctgattaaacgagaattaaaagaaaactccatggatagactgggtttaatacaggaagcaaagcttaccgaagcccttttatattctattccctttgctttggattggtgtcatttttaatacagctgacaactttacagaatgcagccttttctgaattctaacacatggggtgtatattgttaattattcttttggattcttttgaacttgtactactatatataattatttctaaagcacagactaagtgagttctgcatatttctaaagagccacgagtcccttattaatgcaatacagtacatgggtccttgtcagttaatgtcctcactgccctgagtgagtaggaacattgttcttagtgccagcatcgattcgcctacctgttttaagtttcatgttgatgccgttttccttctctatagttcatggatgttatctataaataaaaacaaatatgtgctaacttaaaaa

SEQ ID NO: 8540 - protein, 638 aa, Rattus norvegicus
  ref <308>: DATABASE ACCESSION NUMBER: SWISS-Prot / Q62871
  ref <309>: DATABASE ENTRY DATE: 2001-10-16
MSDKSELKAELERKKQRLAQIREEKKRKEEERKKKETDQKKEAAVSVQEESDLEKKRREAEALLQSMGLTTDSPIVFSEHWVPPPMSPSSKSVSTPSEAGSQDSGDGAVGSRTLHWDTDPSALQLHSDSDLGRGPIKLGMAKITQVDFPPREIVTYTKETQTPVTAQPKEDEEEEDDVAAPKPPVEPEEEKILKKDEENDSKAPPHELTEEEKQQILHSEEFLSFFDHSTRIVERALSEQINIFFDYSGRDLEDKEGEIQAGAKLSLNRQFFDERWSKHRVVSCLDWSSQYPELLVASYNNNEEAPHEPDGVALVWNMKYKKTTPEYVFHCQSAVMSATFAKFHPNLVVGGTYSGQIVLWDNRSNKRTPVQRTPLSAAAHTHPVYCVNVVGTQNAHNLISISTDGKICSWSLDMLSHPQDSMELVHKQSKAVAVTSMSFPVGDVNNFVVGSEEGSVYTACRHGSKAGISEMFEGHQGPITGIHCHAAVGAVDFSHLFVTSSFDWTVKLWSTKNNKPLYSFEDNSDYVYDVIGSPTHPALFACVDGMGRLDLWNLNNDTEVPTASISVEGNPALNRVRWTHSGREIAVGDSEGQIVIYDVGEQIAVPRNDEWARFGRTLAEINASRADAEEEAATRIPA

SEQ ID NO: 8541 - DNA, 2497 bp, Homo sapiens
  ref <308>: DATABASE ACCESSION NUMBER: EMBL / AF250307
  ref <309>: DATABASE ENTRY DATE: 2001-04-17
gggaaagccgcggagctggtggtggctacagttggtgttgggggcttaggcgagggacgttaccgggaagttgcaggcgggaggactcttccccatccagtcacctgacaggtcacaaacatgtcagacaaaagtgaattaaaggctgagttggaacgtaagaagcagcgactggcccaaatcagagaggaaaagaagagaaaagaagaagaaaggaaaaaaaaagaaacagaccagaagaaggaagctgttgctcctgtgcaagaagaatcagatcttgaaaaaaaaaggagagaagctgaagcattgcttcaaagcatggggctaactccagaatcccccattgtccctcctcctatgtctccatcctccaaatctgtgagcactccaagtgaagctggaagccaagactctggagatggcgccgtgggatctagacgaggacctattaaacttggaatggctaaaatcacgcaagtcgactttcctcctcgagaaattgtcacgtatacaaaggaaactcagactccagttatggctcaacccaaagaagatgaagaggaagatgatgatgtagtggctcctaaaccacctattgaacctgaagaagagaaaactttaaagaaagatgaggaaaatgatagtaaagctccccctcatgagctgactgaagaagaaaagcaacaaatcttgcactctgaggaatttttaagtttctttgaccattctacaagaattgtagaaagagctctttctgagcagattaacatcttctttgactatagtgggagagatttggaagacaaagaaggagagattcaagcaggtgctaaactgtcattaaatcgacaattttttgacgaacgttggtcaaagcatcgggtggttagttgtttggattggtcatctcagtatccggagttactcgtggcttcctataacaacaatgaagatgcccctcatgagcctgatggtgtggcccttgtatggaatatgaaatacaaaaaaactaccccagagtatgtgtttcactgccagtcagctgtgatgtctgccacatttgcaaaatttcatccaaatcttgttgttggtggtacatattcaggccaaattgtgctttgggataaccgtagcaataaaagaactccagtgcaaagaactccactgtcagcagctgcacacacacaccctgtatattgtgtaaatgttgttggaacacaaaatgctcacaatctgattagcatctctactgatggaaaaatttgttcatggagtctggacatgctttcccatccacaggatagcatggagttggttcataaacagtcaaaagcagtagctgtgacatctatgtccttccctgttggagatgtcaacaactttgttgttgggagtgaagaaggttctgtgtacacagcatgccgccatggcagcaaagctggaatcagtgagatgtttgaggggcatcaaggaccaatcactggcatccattgtcatgcagctgttggagcagtagacttctcacatctttttgtcacttcatcgtttgactggacagtaaagctttggacaactaagaataacaagcctttgtattcatttgaagataatgcagactatgtttatgatgttatgtggtcacctacccacccagccctgtttgcctgtgtggatggcatggggagattggatttgtggaatctcaataatgacacagaggtaccaactgccagcatttctgtggagggtaatcctgctcttaatcgtgtgagatggacccattctggcagagagattgctgtgggtgattctgaaggacagattgttatatacgatgtgggagagcagattgctgttccccgcaatgatgaatgggcacggtttggccgaacacttgcagaaattaatgcaaaccgagctgatgcagaggaggaagcagctacccgaatacctgcttagttcctgaaaaggggagtgtaactagtggatttgggaaaggttcttaagtagatcctgagactatttgcatgcttctgtctaaatgataattaaaaggaaatttcatggattaacccatgggtttaatgcagcaaggaaacttacaatgtccctttatatataacatgcatcttgttttggatttgtgtcattttttaatatagctgattgacttcacagaaagcagcttttttgaattctaatacataggtgtatatttggtattagttattttgagttcttttcaacttataacactgtatacagttatttctaaagcacagatgaaataagttctgcatatttttaaataatcacagttccctgttatacagataatgttctcactacccataatatgtaggaacattgtttctccttagccgtagtatgcatacacctatccatgttcattctgacatcctttgttgtctttataattcatgtggtagttacctataaataaaaacaaatatgcgttaaaaaaaaaaaaaaaaaa

SEQ ID NO: 8542 - protein, 573 aa, Homo sapiens
  ref <308>: DATABASE ACCESSION NUMBER: SWISS-Prot / Q13409
  ref <309>: DATABASE ENTRY DATE: 2002-06-15
QPLRVVTADTCLFHYLVPPPMSPSSKSVSTPSEAGSQDSGDGAVGSRTLHWDTDPSVLQLHSDSDLGRGPIKLGMAKITQVDFPPREIVTYTKETQTPVMAQPKEDEEEDDDVVAPKPPIEPEEEKTLKKDEENDSKAPPHELTEEEKQQILHSEEFLSFFDHSTRIVERALSEQINIFFDYSGRDLEDKEGEIQAGAKLSLNRQFFDERWSKHRVVSCLDWSSQYPELLVASYNNNEDAPHEPDGVALVWNMKYKKTTPEYVFHCQSAVMSATFAKFHPNLVVGGTYSGQIVLWDNRSNKRTPVQRTPLSAAAHTHPVYCVNVVGTQNAHNLISISTDGKICSWSLDMLSHPQDSMELVHKQSKAVAVTSMSFPVGDVNNFVVGSEEGSVYTACRHGSKAGISEMFEGHQGPITGIHCHAAVGAVDFSHLFVTSSFDWTVKLWTTKNNKPLYSFEDNADYVYDVMWSPTHPALFACVDGMGRLDLWNLNNDTEVPTASISVEGNPALNRVRWTHSGREIAVGDSEGQIVIYDVGEQIAVPRNDEWARFGRTLAEINANRADAEEEAATRIPA

SEQ ID NO: 8543 - DNA, 678 bp, Rattus norvegicus
  ref <308>: DATABASE ACCESSION NUMBER: EMBL / U39572
  ref <309>: DATABASE ENTRY DATE: 1999-02-01
gcctgcaggtcgactctagagacagacacaacggtaacattatgctggacaagaagggacacatcatccacatagactttggcttcatgtttgaaagctcaccgggtggcaaccttggctgggagccagacatcaagctgacagacgagatggtgatgattatggggggcaagatggaagccacacccttcaagtggttcatggagatgtgcgtccgaggttatctggctgtgcgcccctatatggatgcagtcgtctccctggttacactcatgttggacacaggcctgccctgtttccgtggccagacaatcaaacttttgaaacacaggttcagcccgaacatgacagagcgggaggctgcaaattttatcatgaagatcatccaaaactgtttcctcagcaacaggagccggacctacgacatgatccagtactaccagaatgatatcccctactgaggagactgtacctgaagccttgagtgtcacagagcagcttgtactgtcaccataagcctgggtgtggaggtgacaggcacatggaacttggatgcacaggtgtgagtctttttcacactggatacactccctatttgttcacccatcttactatgttggtacatgaagtattttcctgtgtaaacatgagaaattgacataaaaaataagaacccta

SEQ ID NO: 8544 - protein, 2041 aa, Rattus norvegicus; identical to SEQ ID NO: 2188
  ref <308>: DATABASE ACCESSION NUMBER: SWISS-Prot / AAD10400
  ref <309>: DATABASE ENTRY DATE: 2003-02-01

SEQ ID NO: 8545 - DNA, 1787 bp, Homo sapiens; identical to SEQ ID NO: 2189
  ref <308>: DATABASE ACCESSION NUMBER: EMBL / AK024034
  ref <309>: DATABASE ENTRY DATE: 2002-08-06

SEQ ID NO: 8546 - protein, 854 aa, Homo sapiens; identical to SEQ ID NO: 2190
  ref <308>: DATABASE ACCESSION NUMBER: SWISS-Prot / P42356
  ref <309>: DATABASE ENTRY DATE: 2002-06-15

SEQ ID NO: 8547 - DNA, 3027 bp, Rattus norvegicus
  ref <308>: DATABASE ACCESSION NUMBER: EMBL / U41845
  ref <309>: DATABASE ENTRY DATE: 2000-07-25
ggcagtagctggatgagggcgttgcttgcctcctcccttttttttctccgattggttctgaggggtatattcgagttgcaaaatggcggccccgagcgctctcttcagcgttcagtagcagcttcaggctgagcggatgtctcttctcctcagtttcggactcagagacacgcggctccctactcctgctgatcacgaagtccttgaaggcgctcaacgcaccggaatctcccagcggccgcgaccgccgcctcggccctgctctccgcggcgccggaactcagcgtgatctgcggcggccgtctaggaggttcacaaaaatggcgaagagagttgcggagaaggaattaacagataggaattgggatgaagaagatgaagttgaagagatgggaacattctcagtggccagtgaggaagtcatgaagaacagagccgtgaagaaggcaaagcgtaggaatattggctttgaatctgatagcggaggagcctttaaaggtttcaaagggttggttgtgccttctggaggaggagggttttctggatttggtggtggctctggagggaagcctctggaaggactgacaaatggaaacagcacagacagtgccacgcccttctccagtgcaaagacagcagcggagcctaaggcagcctttggttcttttgctgtgaatggccctactactttggtggataaaaagatctccagtcctaaatgcaatagcagcaatcagccgccctcctccggcccagcctccagtacctcctgcactgggaatacctatcataagcagttggctggcttgaactgctctgtccgggattggatagtgaagcatgttaacacaaacccactttgtgacctgacgcccatttttaaagactacgagagatacttagcgacgatcgagaagcagctggagaatgggggtagcagcagctcagagagacagacagacagggcgacggctgcaatggagcctccttccctttttggttcaacaaaactacagcaagattcaccattttcatttcatggcaacaaagcggaggacacatctgaaaagttggagtttacagcagaaaagaaatcggacgcagcacaaggagcaacaagtgcctcgtttaattttggcaagaaaattgagagctcagttttgggctctttaagctctggctccctaactgggttttcattctctcctggaaactctagtttatttggtaaagatgctgcccagagtaaagcagcctcttcaccgttttctgctaaagcatccgagagtcaagcaggaggcagcagcagtgagtgcagagatggtgaagaagaggagagtgatgagccacccaaggtggtggtgactgaagtgaaggaagaggatgctttctactccaaaaaatgtaaactattttacaagaaagacaatgaatttaaagagaagggtgtggggaccctgcatttaaaacccacagcaactcagaagacccagctcttggtgcgggcagacaccaacctaggcaacattctgctgaatgttctgatcccacccaatatgccgtgcacccggacagggaagaacaatgtccttatcgtctgtgtccccaaccccccacttgatgagaagcagcccactctcccggtcaccatgctgattcgggtgaagacgagcgaggatgctgatgagttgcacaagattttactgcagaaaaaggacgtctgagcactgaggctgaccagggcacgtcaccatgttgctgcttccctttgcccctaaacttagtcacattctttcctctttgtactgtgacattctgagaacttctaggtaacttgaaacttttgtgaggaagattaaggccaataaatcctttcagtgtgtcgaagctgttctcccttcctaagaactaagcaaaatacattggagtgaaaagtttgggaagattttttaatgtcgattcattgagtaaactaacctaagtgattcttacggactgtaatcagggtaccagttagctctccaaaggctccctcaggcagccacgggtgccactctcttcctgccctgggagactcaatggcagtgtccacagagttccagaagacgcctgctcccctcctgtgggcttgtttggtccgtgactagcactcctgccaaataccacaccggcacactgtaaccgcgcttgttctgtttccttctgagcggaactgtgggtcctggggatctctgtccttagcctgtttttgacaggtgctggcctttgacctggaactgcttgactgaaccaggcactgcctttccatgggaagagagggcaggtagtggcttgtcggggagctggcgaggtatagactgggttttgtcgtttatccatgaggtgctcttacttgcttacctccctagttaacatggatgggggctgtcaggaataatggattttattaaaagcacaaatttggtagcattttttaaatatcatttctataccacaaacaagcctttattttaaaagaaaaaagtgaaattgtgctgaaaagggttgtatgctcgtggccgtttgtgccccggggacctggtggtcacagtctgaatggagccctgtcagagggtgctcgtgagaaggaagagtgtgggagtggagacggctcattcggcctgtgacttcagacagcagcatgttattcagcgtctgaaaagvccaatttcatttttacctttttacggatgaggtattcttgagtctgcccacttggaagagagccatggttctacacgccattcatgccacttgagagcggtgaggttaccgatactagcattctctcaaggccagacatcagttaaatgcaaggtttgttgacgagctggtcacggctccctcctaaccccagtgccggaaagctgaggcaggaagaccgtgtgagttcacaacagcctgagctacgcagtaggaacccctccccctaaaataaaataaaagtttggtgtctaaaaaaaaaaaaaaaaaaaaaaaaaaaaaaaa

SEQ ID NO: 8548 - protein, 467 aa, Rattus norvegicus; identical to SEQ ID NO: 5233
  ref <308>: DATABASE ACCESSION NUMBER: SWISS-Prot / O08587
  ref <309>: DATABASE ENTRY DATE: 2002-06-15

SEQ ID NO: 8549 - DNA, 1757 bp, Homo sapiens; identical to SEQ ID NO: 5234
  ref <308>: DATABASE ACCESSION NUMBER: Refseq / NM_007172
  ref <309>: DATABASE ENTRY DATE: 2002-11-05

SEQ ID NO: 8550 - protein, 468 aa, Homo sapiens; identical to SEQ ID NO: 5235
  ref <308>: DATABASE ACCESSION NUMBER: SWISS-Prot / Q9UKX7
  ref <309>: DATABASE ENTRY DATE: 2002-06-15

SEQ ID NO: 8551 - DNA, 1550 bp, Rattus norvegicus
  ref <308>: DATABASE ACCESSION NUMBER: EMBL / U42413
  ref <309>: DATABASE ENTRY DATE: 2000-03-04
agcgctccagctccggagaatgaacactctcaagagaccccggaatcgaacagtagtgtgtacaccaccttcatgaagtctcatcgctgctatgacctgatccccacaagctccaagctggtggtatttgatacttcgctgcaggtaaagaaagccttctttgccctggtgactaacggtgttcgtgctgcccctttgtgggatagtaagaagcagagctttgtgggcatgctgaccatcactgacttcatcaatattctgcaccgatactacaagtcagccctggtgcagatctatgaactggaggagcacaagatagagacttggagagaggtctacctgcaagactcctttaagccacttgtctgcatttctccaaatgccagcttgttcgatgctgtctcttcattaattcgaaataagatccacaggcttccagttattgacccggagtcaggcaacaccttgtacattcttactcacaagcggatcctcaagttcctcaagttgtttatcactgagttccccaagccggaattcatgtctaagtctctggaagagctacagattggcacctacgccaatattgccatggtccgtaccactacacctgtctatgtggctctgggcatctttgtacagcaccgagtctccgccttgcctgtggtggatgagaaagggcgtgtggtggacatctactccaagtttgatgtgattaatttggcagcagaaaagacatacaacaacctagatgtgtctgtgacaaaagccctacagcaccggtcacactacttcgagggtgttctcaagtgctacctacatgagactctagaagcaatcatcaatagactggtggaagcagaggttcaccgtctggtggtggtggatgaacatgacgtggtcaagggcattgtatcgctgtctgacatcttacaggctctggtgctcacaggtggagagaagaagccctgagcatggggcggaacaggcagtgcctggggagatggccccctcactgcctgcctgctgtaagagccggaatcagatggaatcctgagagaacggagtcttccctcaggagctccacgcccactgtctagaactagagaaggggaaaggaggagaaggactgttagcttctctcaccatcgtgctacacttgagaaaacacttgtcagcctagccagccccagtcgctcgtcacagcccccttgtgggtgaaccatgggttttgtgctcctcaggcagatcctgatctctaagagatcccgagacctcaccacgccccacctctgtctctgcccttactccactaagagaatagctctgcagaagtcttggtaaagtatttttattcctctttcttcactctgtgtggaggaggctggcctgtttgctgtcagtccttcccatgagtctcgggaggtgcgtcccggctcctggcctgtgcagacgaaggcagatgcctctgtggaggagggcggtgggtagggacccaagattaatgctttttgtggcgaacctaattaaatgacaaggtttcatcatgg

SEQ ID NO: 8552 - protein, 330 aa, Rattus norvegicus
  ref <308>: DATABASE ACCESSION NUMBER: SWISS-Prot / P80385
  ref <309>: DATABASE ENTRY DATE: 2001-10-16
MESVAAESAPAPENEHSQETPESNSSVYTTFMKSHRCYDLIPTSSKLVVFDTSLQVKKAFFALVTNGVRAAPLWDSKKQSFVGMLTITDFINILHRYYKSALVQIYELEEHKIETWREVYLQDSFKPLVCISPNASLFDAVSSLIRNKIHRLPVIDPESGNTLYILTHKRILKFLKLFITEFPKPEFMSKSLEELQIGTYANIAMVRTTTPVYVALGIFVQHRVSALPVVDEKGRVVDIYSKFDVINLAAEKTYNNLDVSVTKALQHRSHYFEGVLKCYLHETLEAIINRLVEAEVHRLVVVDEHDVVKGIVSLSDILQALVLTGGEKKP

SEQ ID NO: 8553 - DNA, 1578 bp, Homo sapiens
  ref <308>: DATABASE ACCESSION NUMBER: EMBL / U42412
  ref <309>: DATABASE ENTRY DATE: 1999-06-30
gcgcccttaaagatggtgagggggctcatgctctgagtagaaggtggtgacctccaggagcggtgggatgatgagggcccgggcgcctcttgcaatggagacggtcatttcttcagatagctccccagctgtggaaaatgagcatcctcaagagaccccagaatccaacaatagcgtgtatacttccttcatgaagtctcatcgctgctatgacctgattcccacaagctccaaattggttgtatttgatacgtccctgcaggtgaagaaagctttttttgctttggtgactaacggtgtacgagctgcccctttatgggatagtaagaagcaaagttttgtgggcatgctgaccatcactgatttcatcaatatcctgcaccgctactataaatcagccttggtacagatctatgagctagaagaacacaagatagaaacttggagagaggtgtatctccaggactcctttaaaccgcttgtctgcatttctcctaatgccagcttgtttgatgctgtctcttcattaattcggaacaagatccacaggctgccagttattgacccagaatcaggcaatactttgtacatcctcacccacaagcgcattctgaagttcctcaaattgtttatcactgagttccccaagccagagttcatgtccaagtctctggaagagctacagattggcacctatgccaatattgctatggttcgcactaccacccccgtctatgtggctctggggatttttgtacagcatcgagtctcagccctgccagtggtggatgagaaggggcgtgtggtggacatctactccaagtttgatgttatcaatctggcagcagaaaagacctacaacaacctagatgtatctgtgactaaagccttgcaacatcgatcacattactttgagggtgttctcaagtgctacctgcatgagactctggagaccatcatcaacaggctagtggaagcagaggttcaccgacttgtagtggtggatgaaaatgatgtggtcaagggaattgtatcactgtctgacatcctgcaggccctggtgctcacaggtggagagaagaagccctgagctgggggaaggggtcatgcagcaccaggggatatgcccaactcactgcctgctggaagctctgtgggaatcagatgaaacttgagggaattgtgactctgttccctgttcagggtcccctgcccttctatctgggagctagggaaggtatgggggaggaaagagaatggatttatagctacccttaccctcacacatacacttgaaaaaactttcagcctagccagttctagcccctgtcctcttagatatatccccctttctgggtgaactataggctctgtgcctctcagacaaattctgatctctaagagatccccagacctcacttgcctctgcctccatcttggccctgattcaaccctaagataatagcacaacaaaattcttcataaagatatttttattcacctgttccgtgctatatggaggaggccaagtccatttagtgacatttcttcccataatgtgagtggggaggattgtgg

SEQ ID NO: 8554 - protein, 331 aa, Homo sapiens
  ref <308>: DATABASE ACCESSION NUMBER: SWISS-Prot / P54619
  ref <309>: DATABASE ENTRY DATE: 2002-06-15
METVISSDSSPAVENEHPQETPESNNSVYTSFMKSHRCYDLIPTSSKLVVFDTSLQVKKAFFALVTNGVRAAPLWDSKKQSFVGMLTITDFINILHRYYKSALVQIYELEEHKIETWREVYLQDSFKPLVCISPNASLFDAVSSLIRNKIHRLPVIDPESGNTLYILTHKRILKFLKLFITEFPKPEFMSKSLEELQIGTYANIAMVRTTTPVYVALGIFVQHRVSALPVVDEKGRVVDIYSKFDVINLAAEKTYNNLDVSVTKALQHRSHYFEGVLKCYLHETLETIINRLVEAEVHRLVVVDENDVVKGIVSLSDILQALVLTGGEKKP

SEQ ID NO: 8555 - DNA, 2104 bp, Rattus norvegicus
  ref <308>: DATABASE ACCESSION NUMBER: EMBL / U42627
  ref <309>: DATABASE ENTRY DATE: 2000-03-04
gcacgagacggggttggatctgaggtgcagcctcagagggattaggagctgctagacttttttcttttttcctttttctcctctcagtggcacggagtccgaattaattggatttcattcactgggtaggaacaaaactgggcactttcattcagagagattcattgactctgagagtgatctggtgcagagggaccaccggcttggcttctgtcgccttccctaaccgctagcttcggcttgggaaaggccgaatcaaacccggctccgagagccggagcttctcacggcttgcttggcctatgcctgcctcgaggggcgtctgctaggcaccccgccttctcctgcagctcgacccccatgatagatacgctcagacccgtgcccttcgcgtcggaaatggcgatcagcaagacggtggcgtggctcaacgagcagctggagctgggcaacgaacagctgctgctgatggactgccgaccgcaggagctgtacgagtcgtcgcacatcgaatctgccatcaacgtggccatcccgggcatcatgctgcggcgtctgcagaagggcaacctgccggtgcgcgcgctattcacgcgctgcgaggaccgggaccgctttaccaggcgctgcggcaccgacaccgtggtgctctacgacgagaacagcagcgactggaatgagaacacaggtggagagtcggtcctcgggctgctgctcaagaaactcaaagacgagggctgccgggcgttctaccttgaaggtggcttcagtaagttccaggccgagttcgccctgcactgcgagaccaatctagacggctcgtgcagcagcagctccccgcccttgccagtgctgggactcgggggcctgaggatcagctccgactcttcctcggacattgagtctgaccttgaccgagaccccaatagtgcaacggactccgatggcagcccgctgtccaacagccagccttccttcccggtggagattttgcccttcctttacctgggctgtgccaaggactctactaacttggacgtgttggaagagtttggcatcaagtacatcttgaacgtcacccccaatctgcccaatctgtttgagaatgcaggggagttcaagtacaagcaaattcctatctctgatcactggagccaaaacctgtcccagtttttccctgaggccatttctttcatagatgaagcccgaggcaaaaactgtggtgtcctggtgcattgcttggcgggcatcagccgctccgtcacggtgacagtggcttaccttatgcagaagctcaacttgtccatgaacgatgcttatgacattgtcaaaatgaagaagtccaacatctctcccaacttcaacttcatgggccagctgcttgactttgaaaggaccctgggactcagcagcccctgtgacaatcgtgtccccgcacagcagctctacttcaccgcgccctccaaccagaatgtctaccaagtggactccctgcaatctacgtgaaaggcacccacctttcctagccgggagtgtctcattccttcagtttctcttgggcagcatcgaccaggctgctttctttgtgtgtggccccaggtgtcaaaaatgtcaccagctgtctgtattagacaaggttgccaagtgcaaaattggttattacggagggagagatttgctccattcattgttttttggaaggacagggtatgctgtctagatccaggcaataggtttgcttttgtaccccagcctacccaagcagggactggacctccatccagatagagggtaggacaaaggagccggggataggagcatgtgttccttagggccacatatggctgtttcctgttgcatctggaaccaactatattgtcttcagtgaagactgattcaactttgcgtatagtggagccaaagagattttagctctgtatttgtggtatcggttttgaaaacaaaagaactgatcctttaatttgattattgtaaatatttgatcttcacttgagagtgtttgtttggcttgtgtttggtttttaatctttgggtttaaacgagatccaaagggagaaagagcagtatgcctcgtgccgaattc

SEQ ID NO: 8556 - protein, 381 aa, Rattus norvegicus
  ref <308>: DATABASE ACCESSION NUMBER: SWISS-Prot / Q64346
  ref <309>: DATABASE ENTRY DATE: 2002-06-15
MIDTLRPVPFASEMAISKTVAWLNEQLELGNEQLLLMDCRPQELYESSHIESAINVAIPGIMLRRLQKGNLPVRALFTRCEDRDRFTRRCGTDTVVLYDENSSDWNENTGGESVLGLLLKKLKDEGCRAFYLEGGFSKFQAEFALHCETNLDGSCSSSSPPLPVLGLGGLRISSDSSSDIESDLDRDPNSATDSDGSPLSNSQPSFPVEILPFLYLGCAKDSTNLDVLEEFGIKYILNVTPNLPNLFENAGEFKYKQIPISDHWSQNLSQFFPEAISFIDEARGKNCGVLVHCLAGISRSVTVTVAYLMQKLNLSMNDAYDIVKMKKSNISPNFNFMGQLLDFERTLGLSSPCDNRVPAQQLYFTAPSNQNVYQVDSLQST

SEQ ID NO: 8557 - DNA, 347 bp, Rattus norvegicus
  ref <308>: DATABASE ACCESSION NUMBER: EMBL / U42719
  ref <309>: DATABASE ENTRY DATE: 2000-03-04
cagacccgcaactttctggtccgggcttcttgccgccttcgtttggagcctagcaaagagtacttaatcatggggatggacggagtcaccagtgacctcaagggagacccccagtacttgctggactcaaacagttggatcgaggagatgccatctgagcacctgtgcaggagcacccgtcagcgggcagcctgtaccagctcaatgacttcctgcaggagtacagaagccaggggtgccaggtgtgagggcgtcggactctggatccctgagctcagccccagggtcagggcctctcacgaagcagggcctgcttaacagggtaaataaataaaacttttgacagt

SEQ ID NO: 8558 - protein, 105 aa, Rattus norvegicus
  ref <308>: DATABASE ACCESSION NUMBER: SWISS-Prot / AAA91231
  ref <309>: DATABASE ENTRY DATE: 2001-12-01
QTRNFLVRASCRLRLEPSKEYLIMGMDGVTSDLKGDPQYLLDSNSWIEEMPSEHLCRSTRQRAACTSSMTSCRSTEARGARCEGVGLWIPELSPRVRASHEAGPA

SEQ ID NO: 8559 - DNA, 5417 bp, Homo sapiens
  ref <308>: DATABASE ACCESSION NUMBER: Refseq / NM_007293
  ref <309>: DATABASE ENTRY DATE: 2001-06-29
agaaggtagcagacagacagacggatctaacctctcttggatcctccagccatgaggctgctctgggggctgatctgggcatccagcttcttcaccttatctctgcagaagcccaggttgctcttgttctctccttctgtggttcatctgggggtccccctatcggtgggggtgcagctccaggatgtgccccgaggacaggtagtgaaaggatcagtgttcctgagaaacccatctcgtaataatgtcccctgctccccaaaggtggacttcacccttagctcagaaagagacttcgcactcctcagtctccaggtgcccttgaaagatgcgaagagctgtggcctccatcaactcctcagaggccctgaggtccagctggtggcccattcgccatggctaaaggactctctgtccagaacgacaaacatccagggtatcaacctgctcttctcctctcgccgggggcacctctttttgcagacggaccagcccatttacaaccctggccagcgggttcggtaccgggtctttgctctggatcagaagatgcgcccgagcactgacaccatcacagtcatggtggagaactctcacggcctccgcgtgcggaagaaggaggtgtacatgccctcgtccatcttccaggatgactttgtgatcccagacatctcagagccagggacctggaagatctcagcccgattctcagatggcctggaatccaacagcagcacccagtttgaggtgaagaaatatgtccttcccaactttgaggtgaagatcacccctggaaagccctacatcctgacggtgccaggccatcttgatgaaatgcagttagacatccaggccaggtacatctatgggaagccagtgcagggggtggcatatgtgcgctttgggctcctagatgaggatggtaagaagactttctttcgggggctggagagtcagaccaagctggtgaatggacagagccacatttccctctcaaaggcagagttccaggacgccctggagaagctgaatatgggcattactgacctccaggggctgcgcctctacgttgctgcagccatcattgagtctccaggtggggagatggaggaggcagagctcacatcctggtattttgtgtcatctcccttctccttggatcttagcaagaccaagcgacaccttgtgcctggggcccccttcctgctgcaggccttggtccgtgagatgtcaggctccccagcttctggcattcctgtcaaagtttctgccacggtgtcttctcctgggtctgttcctgaagcccaggacattcagcaaaacacagacgggagcggccaagtcagcattccaataattatccctcagaccatctcagagctgcagctctcagtatctgcaggctccccacatccagcgatagccaggctcactgtggcagccccaccttcaggaggccccgggtttctgtctattgagcggccggattctcgacctcctcgtgttggggacactctgaacctgaacttgcgagccgtgggcagtggggccaccttttctcattactactacatgatcctatcccgagggcagatcgtgttcatgaatcgagagcccaagaggaccctgacctcggtctcggtgtttgtggaccatcacctggcaccctccttctactttgtggccttctactaccatggagaccacccagtggccaactccctgcgagtggatgtccaggctggggcctgcgagggcaagctggagctcagcgtggacggtgccaagcagtaccggaacggggagtccgtgaagctccacttagaaaccgactccctagccctggtggcgctgggagccttggacacagctctgtatgctgcaggcagcaagtcccacaagcccctcaacatgggcaaggtctttgaagctatgaacagctatgacctcggctgtggtcctgggggtggggacagtgcccttcaggtgttccaggcagcgggcctggccttttctgatggagaccagtggaccttatccagaaagagactaagctgtcccaaggagaagacaacccggaaaaagagaaacgtgaacttccaaaaggcgattaatgagaaattgggtcagtatgcttccccgacagccaagcgctgctgccaggatggggtgacacgtctgcccatgatgcgttcctgcgagcagcgggcagcccgcgtgcagcagccggactgccgggagcccttcctgtcctgctgccaatttgctgagagtctgcgcaagaagagcagggacaagggccaggcgggcctccaacgagccctggagatcctgcaggaggaggacctgattgatgaggatgacattcccgtgcgcagcttcttcccagagaactggctctggagagtggaaacagtggaccgctttcaaatattgacactgtggctccccgactctctgaccacgtgggagatccatggcctgagcctgtccaaaaccaaaggcctatgtgtggccaccccagtccagctccgggtgttccgcgagttccacctgcacctccgcctgcccatgtctgtccgccgctttgagcagctggagctgcggcctgtcctctataactacctggataaaaacctgactgtgagcgtccacgtgtccccagtggaggggctgtgcctggctgggggcggagggctggcccagcaggtgctggtgcctgcgggctctgcccggcctgttgccttctctgtggtgcccacggcagccgccgctgtgtctctgaaggtggtggctcgagggtccttcgaattccctgtgggagatgcggtgtccaaggttctgcagattgagaaggaaggggccatccatagagaggagctggtctatgaactcaaccccttggaccaccgaggccggaccttggaaatacctggcaactctgatcccaatatgatccctgatggggactttaacagctacgtcagggttacagcctcagatccattggacactttaggctctgagggggccttgtcaccaggaggcgtggcctccctcttgaggcttcctcgaggctgtggggagcaaaccatgatctacttggctccgacactggctgcttcccgctacctggacaagacagagcagtggagcacactgcctcccgagaccaaggaccacgccgtggatctgatccagaaaggctacatgcggatccagcagtttcggaaggcggatggttcctatgcggcttggttgtcacgggacagcagcacctggctcacagcctttgtgttgaaggtcctgagtttggcccaggagcaggtaggaggctcgcctgagaaactgcaggagacatctaactggcttctgtcccagcagcaggctgacggctcgttccaggacccctgtccagtgttagacaggagcatgcaggggggtttggtgggcaatgatgagactgtggcactcacagcctttgtgaccatcgcccttcatcatgggctggccgtcttccaggatgagggtgcagagccattgaagcagagagtggaagcctccatctcaaaggcaaactcatttttgggggagaaagcaagtgctgggctcctgggtgcccacgcagctgccatcacggcctatgccctgtcactgaccaaggcgcctgtggacctgctcggtgttgcccacaacaacctcatggcaatggcccaggagactggagataacctgtactggggctcagtcactggttctcagagcaatgccgtgtcgcccaccccggctcctcgcaacccatccgaccccatgccccaggccccagccctgtggattgaaaccacagcctacgccctgctgcacctcctgcttcacgagggcaaagcagagatggcagaccaggcttcggcctggctcacccgtcagggcagcttccaagggggattccgcagtacccaagacacggtgattgccctggatgccctgtctgcctactggattgcctcccacaccactgaggagaggggtctcaatgtgactctcagctccacaggccggaatgggttcaagtcccacgcgctgcagctgaacaaccgccagattcgcggcctggaggaggagctgcagttttccttgggcagcaagatcaatgtgaaggtgggaggaaacagcaaaggaaccctgaaggtccttcgtacctacaatgtcctggacatgaagaacacgacctgccaggacctacagatagaagtgacagtcaaaggccacgtcgagtacacgatggaagcaaacgaggactatgagtacgatgagcttccagccaaggatgacccagatgcccctctgcagcccgtgacacccctgcagctgtttgagggtcggaggaaccgccgcaggagggaggcgcccaaggtggtggaggagcaggagtccagggtgcactacaccgtgtgcatctggcggaacggcaaggtggggctgtctggcatggccatcgcggacgtcaccctcctgagtggattccacgccctgcgtgctgacctggagaagctgacctccctctctgaccgttacgtgagtcactttgagaccgaggggccccacgtcctgctgtattttgactcggtccccacctcccgggagtgcgtgggctttgaggctgtgcaggaagtgccggtggggctggtgcagccggccagcgcaaccctgtacgactactacaaccccgagcgcagatgttctgtgttttacggggcaccaagtaagagcagactcttggccaccttgtgttctgctgaagtctgccagtgtgctgaggggaagtgccctcgccagcgtcgcgccctggagcggggtctgcaggacgaggatggctacaggatgaagtttgcctgctactacccccgtgtggagtacggcttccaggttaaggttctccgagaagacagcagagctgctttccgcctctttgagaccaagatcacccaagtcctgcacttcaccaaggatgtcaaggccgctgctaatcagatgcgcaacttcctggttcgagcctcctgccgccttcgcttggaacctgggaaagaatatttgatcatgggtctggatggggccacctatgacctcgagggacacccccagtacctgctggactcgaatagctggatcgaggagatgccctctgaacgcctgtgccggagcacccgccagcgggcagcctgtgcccagctcaacgacttcctccaggagtatggcactcaggggtgccaggtgtgagggctgccctcccacctccgctgggaggaacctgaacctgggaaccatgaagctggaagcactgctgtgtccgctttcatgaacacagcctgggaccagggcatattaaaggcttttggcagcaaagtgtcagtgttggc

SEQ ID NO: 8560 - protein, 1744 aa, Homo sapiens
  ref <308>: DATABASE ACCESSION NUMBER: SWISS-Prot / P01028
  ref <309>: DATABASE ENTRY DATE: 2002-06-15
MRLLWGLIWASSFFTLSLQKPRLLLFSPSVVHLGVPLSVGVQLQDVPRGQVVKGSVFLRNPSRNNVPCSPKVDFTLSSERDFALLSLQVPLKDAKSCGLHQLLRGPEVQLVAHSPWLKDSLSRTTNIQGINLLFSSRRGHLFLQTDQPIYNPGQRVRYRVFALDQKMRPSTDTITVMVENSHGLRVRKKEVYMPSSIFQDDFVIPDISEPGTWKISARFSDGLESNSSTQFEVKKYVLPNFEVKITPGKPYILTVPGHLDEMQLDIQARYIYGKPVQGVAYVRFGLLDEDGKKTFFRGLESQTKLVNGQSHISLSKAEFQDALEKLNMGITDLQGLRLYVAAAIIESPGGEMEEAELTSWYFVSSPFSLDLSKTKRHLVPGAPFLLQALVREMSGSPASGIPVKVSATVSSPGSVPEVQDIQQNTDGSGQVSIPIIIPQTISELQLSVSAGSPHPAIARLTVAAPPSGGPGFLSIERPDSRPPRVGDTLNLNLRAVGSGATFSHYYYMILSRGQIVFMNREPKRTLTSVSVFVDHHLAPSFYFVAFYYHGDHPVANSLRVDVQAGACEGKLELSVDGAKQYRNGESVKLHLETDSLALVALGALDTALYAAGSKSHKPLNMGKVFEAMNSYDLGCGPGGGDSALQVFQAAGLAFSDGDQWTLSRKRLSCPKEKTTRKKRNVNFQKAINEKLGQYASPTAKRCCQDGVTRLPMMRSCEQRAARVQQPDCREPFLSCCQFAESLRKKSRDKGQAGLQRALEILQEEDLIDEDDIPVRSFFPENWLWRVETVDRFQILTLWLPDSLTTWEIHGLSLSKTKGLCVATPVQLRVFREFHLHLRLPMSVRRFEQLELRPVLYNYLDKNLTVSVHVSPVEGLCLAGGGGLAQQVLVPAGSARPVAFSVVPTAAAAVSLKVVARGSFEFPVGDAVSKVLQIEKEGAIHREELVYELNPLDHRGRTLEIPGNSDPNMIPDGDFNSYVRVTASDPLDTLGSEGALSPGGVASLLRLPRGCGEQTMIYLAPTLAASRYLDKTEQWSTLPPETKDHAVDLIQKGYMRIQQFRKADGSYAAWLSRDSSTWLTAFVLKVLSLAQEQVGGSPEKLQETSNWLLSQQQADGSFQDPCPVLDRSMQGGLVGNDETVALTAFVTIALHHGLAVFQDEGAEPLKQRVEASISKANSFLGEKASAGLLGAHAAAITAYALSLTKAPVDLLGVAHNNLMAMAQETGDNLYWGSVTGSQSNAVSPTPAPRNPSDPMPQAPALWIETTAYALLHLLLHEGKAEMADQASAWLTRQGSFQGGFRSTQDTVIALDALSAYWIASHTTEERGLNVTLSSTGRNGFKSHALQLNNRQIRGLEEELQFSLGSKINVKVGGNSKGTLKVLRTYNVLDMKNTTCQDLQIEVTVKGHVEYTMEANEDYEDYEYDELPAKDDPDAPLQPVTPLQLFEGRRNRRRREAPKVVEEQESRVHYTVCIWRNGKVGLSGMAIADVTLLSGFHALRADLEKLTSLSDRYVSHFETEGPHVLLYFDSVPTSRECVGFEAVQEVPVGLVQPASATLYDYYNPERRCSVFYGAPSKSRLLATLCSAEVCQCAEGKCPRQRRALERGLQDEDGYRMKFACYYPRVEYGFQVKVLREDSRAAFRLFETKITQVLHFTKDVKAAANQMRNFLVRASCRLRLEPGKEYLIMGLDGATYDLEGHPQYLLDSNSWIEEMPSERLCRSTRQRAACAQLNDFLQEYGTQGCQV

SEQ ID NO: 8561 - DNA, 2461 bp, Rattus norvegicus
  ref <308>: DATABASE ACCESSION NUMBER: EMBL / U42976
  ref <309>: DATABASE ENTRY DATE: 2000-03-04
ccgggacatacgctcactcgcggttccattgtagagtgaccggctgccacccggctggccatgaggggtacgcccctgctcctcgtctctctgttctctctgcttcaggacggggactgccgcctggccaacgcagaggagaagctgatggatgacctcctgaacaaaacccggtacaacaacctgatccgcccagccaccagctcctctcagctcatctccatccgcctggagctatcactgtcccagctcatcagtgtgaatgagcgagaacagatcatgaccaccagcatctggctgaaacaggaatggactgactaccgcctggcctggaacagctcctgctatgaaggggtgaacattctgaggatccccgcaaagcgtgtctggttgcctgacatcgtgttgtacaacaatgccgatggcacctatgaggtgtctgtctacaccaacgtgattgtgcgttccaacggcagcatccagtggctgccccctgctatctacaagagtgcctgcaagattgaggtgaagcactttcccttcgaccagcagaactgcaccctcaaattccgctcctggacctatgaccacacggagattgacatggttcttaagtcgcccacggccatcatggatgacttcacccccagtggtgaatgggacattgtggccctcccaggacggaggacggtgaaccctcaggaccccagctacgtggatgtgacctatgacttcatcatcaagcgcaagccgctcttctacaccatcaatcttatcattccttgtgtgctcatcacctcgctggctatcctggtcttctacctgccctccgactgtggggagaagatgacgctctgcatctctgtgctgctggcactcacgttcttcctgctgctcatctccaagatcgtgcctcccacctcccttgacataccgctcattggcaagtacctcttgttcaccatggtgctggtcaccttttccatcgtcaccactgtgtgtgtcctcaatgtgcaccaccgctcacccagcactcacaccatggcatcctgggtcaaggagtgcttcctgcacaaactgcccaccttcctcttcatgaagcgtcccggtcttgaagtcagcctggtcagggtccctcatcccagccagctgcacttggccacagctgatactgcagccacctctgccttaggccccaccagcccatccaacctctatgggagttccatgtactttgtgaaccctgtccctgccgctcctaagtctgcagtcagctcccacacagcaggcctccccagggatgcccgtctgaggtcctccgggaggttccgggaagatctacaggaagcattagagggtgtcagcttcatcgcccagcatctggagagcgatgaccgagatcaaagtgtcatcgaggactggaagttcgtcgcgatggttgttgaccgcctgttcctgtgggtgttcgtgtttgtgtgtattctgggcaccatggggctcttcctgccaccccttttccagatccacgcaccctccaaggactcctaggctacccggcgtgcctcgggcccgggttgtagtgagatgatatgagaagccgtgtgggaagctgggcgtgtcttggcccgggttgtagtgagatgatatgagaagccgtgtgggaagctgggcgtgtctcgggcccccgggttgtagtgagatgatatgagaagccgtgtgggaagctgactgttccatttgggccatagctaatgaagccctaagtaaagccgtgactattggcaatcagcccatcaaactagccacagccacgagaaggacagagatagatgccttctgctgatccctctgatgccgtccagtaagtccctgaaggaggaggatgaggctgctgaataccagcctggcctccttccttccacgtgccaggcaccggagtcagacagccgtgtatcatgccgtcacaccccagcccgccttcccacccatctccctctgattcgcagctacccactagattcccccaccatctttcatttccatacacttctagattctcccaagtcagaacctttatatcttctactgctaccgtccaaacctcactgtaaactcccaagcttttcacgtggctgcaccagtcagagctctgctccaatgccacttccttgtataagccttcccatgatcctctgctccagtgtcatttccttgtataagccttccctagtcatgcattgcaaagcagtgtctcccataaccacatcaaatctccagcttccttgagtgttccccgtcagtagctgcagcctttagttggtggcacactagtcaccagcaccttgcccataaaagtgtatgctccataagggctgggtgtgtggattcacattcactccagagcttgggacccagctctgcacacagaaggtgcaaaataaatgtttattgaatgaaaaaa

SEQ ID NO: 8562 - protein, 495 aa, Rattus norvegicus
  ref <308>: DATABASE ACCESSION NUMBER: SWISS-Prot / P12392
  ref <309>: DATABASE ENTRY DATE: 2002-06-15
MRGTPLLLVSLFSLLQDGDCRLANAEEKLMDDLLNKTRYNNLIRPATSSSQLISIRLELSLSQLISVNEREQIMTTSIWLKQEWTDYRLAWNSSCYEGVNILRIPAKRVWLPDIVLYNNADGTYEVSVYTNVIVRSNGSIQWLPPAIYKSACKIEVKHFPFDQQNCTLKFRSWTYDHTEIDMVLKSPTAIMDDFTPSGEWDIVALPGRRTVNPQDPSYVDVTYDFIIKRKPLFYTINLIIPCVLITSLAILVFYLPSDCGEKMTLCISVLLALTFFLLLISKIVPPTSLDIPLIGKYLLFTMVLVTFSIVTTVCVLNVHHRSPSTHTMASWVKECFLHKLPTFLFMKRPGLEVSLVRVPHPSQLHLATADTAATSALGPTSPSNLYGSSMYFVNPVPAAPKSAVSSHTAGLPRDARLRSSGRFREDLQEALEGVSFIAQHLESDDRDQSVIEDWKFVAMVVDRLFLWVFVFVCILGTMGLFLPPLFQIHAPSKDS

SEQ ID NO: 8563 - DNA, 2455 bp, Homo sapiens
  ref <308>: DATABASE ACCESSION NUMBER: EMBL / U48861
  ref <309>: DATABASE ENTRY DATE: 1996-03-14
ggcacgagccgccagcaaacctcgggggccaggaccggcgctcactcgaccgcgcggctcacgggtgccctgtgaccccacagcggacgtcgcggcggctgccacccggccccgccggccatgaggcgcgcgccttccctggtccttttcttcctggtcgccctttgcgggcgcgggaactgccgcgtggccaatgcggaggaaaagctgatggacgaccttctgaacaaaacccgttacaataacctgatccgcccagccaccagctcctcacagctcatctccatcaagctgcagctctccctggcccagcttatcagcgtgaatgagcgagagcagatcatgaccaccaatgtctggctgaaacaggaatggactgattaccgcctgacctggaacagctcccgctacgagggtgtgaacatcctgaggatccctgcaaagcgcatctggttgcctgacatcgtgctttacaacaacgccgacgggacctatgaggtgtctgtctacaccaacttgatagtccggtccaacggcagcgtcctgtggctgccccctgccatctacaagagcgcctgcaagattgaggtgaagtactttcccttcgaccagcagaactgcaccctcaagttccgctcctggacctatgaccacacggagatagacatggtcctcatgacgcccacagccagcatggatgactttactcccagtggtgagtgggacatagtggccctcccagggagaaggacagtgaacccacaagaccccagctacgtggacgtgacttacgacttcatcatcaagcgcaagcctctgttctacaccatcaacctcatcatcccctgcgtgctcaccaccttgctggccatcctcgtcttctacctgccatccgactgcggcgagaagatgacactgtgcatctcagtgctgctggcactgacattcttcctgctgctcatctccaagatcgtgccacccacctccctcgatgtgcctctcatcggcaagtacctcatgttcaccatggtgctggtcaccttctccatcgtcaccagcgtctgtgtgctcaatgtgcaccaccgctcgcccagcacccacaccatggcaccctgggtcaagcgctgcttcctgcacaagctgcctaccttcctcttcatgaagcgccctggccccgacagcagcccggccagagccttcccgcccagcaagtcatgcgtgaccaagcccgaggccaccgccacctccaccagcccctccaacttctatgggaactccatgtactttgtgaaccccgcctctgcagcttccaagtctccagccggctctaccccggtggctatccccagggatttctggctgcggtcctctgggaggttccgacaggatgtgcaggaggcattagaaggtgtcagcttcatcgcccagcacatgaagaatgacgatgaagaccagagtgtcgttgaggactggaagtacgtggctatggtggtggaccggctgttcctgtgggtgttcatgtttgtgtgcgtcctgggcactgtggggctcttcctaccgcccctcttccagacccatgcagcttctgaggggccctacgctgcccagcgtgactgagggccccctgggttgtggggtgagaggatgtgagtggccgggtgggcactttgctgcttctttctgggttgtggccgatgaggcctaagtaaatatgtgagcattggccatcaaccccatcaaaccagcccaagccgtggaacaggcaaggatgggggcctgggctgtcctctctgaatgccttggagggatcccaggaagccccagtaggagggagcttcagacagttcaattctggcctgtcttccttccctgcaccgggcaatggggataaagatgacttcgtagcagcacctactatgcttcaggcatggtgccggcctgcctctccatcaccatctctctccacttccccttgtccagttcctcacacacttctagattcttcccagctcagaggcttggcatttgccatatcatcatctttttttttttcttttaaacggagtcttgctatatcgcccaggctcaagtgattctcctgcctgaacctcccaagtagctgggattacagaaagccgccaccgtgcccagctaatttttgtatttttgttggccaggctgatttcgaactcctgacctcagatgacccacctgcctcggcctcccaaagtgctgggattacaggtgtgagccactatgcctggccttccctatcttctacctgaaccttcttcctcttcccccagggcttcccaagctctttccacagccacatcagtcagggcatggctccaatccattctttgctccaatgtcacctcctctgagaggccttccctaaccacccaatcattctaaagcagcctccctacagtcacgttaccctgcctccttc

SEQ ID NO: 8564 - protein, 498 aa, Homo sapiens
  ref <308>: DATABASE ACCESSION NUMBER: SWISS-Prot / P30926
  ref <309>: DATABASE ENTRY DATE: 2002-06-15
MRRAPSLVLFFLVALCGRGNCRVANAEEKLMDDLLNKTRYNNLIRPATSSSQLISIKLQLSLAQLISVNEREQIMTTNVWLKQEWTDYRLTWNSSRYEGVNILRIPAKRIWLPDIVLYNNADGTYEVSVYTNLIVRSNGSVLWLPPAIYKSACKIEVKYFPFDQQNCTLKFRSWTYDHTEIDMVLMTPTASMDDFTPSGEWDIVALPGRRTVNPQDPSYVDVTYDFIIKRKPLFYTINLIIPCVLTTLLAILVFYLPSDCGEKMTLCISVLLALTFFLLLISKIVPPTSLDVPLIGKYLMFTMVLVTFSIVTSVCVLNVHHRSPSTHTMAPWVKRCFLHKLPTFLFMKRPGPDSSPARAFPPSKSCVTKPEATATSTSPSNFYGNSMYFVNPASAASKSPAGSTPVAIPRDFWLRSSGRFRQDVQEALEGVSFIAQHMKNDDEDQSVVEDWKYVAMVVDRLFLWVFMFVCVLGTVGLFLPPLFQTHAASEGPYAAQRD

SEQ ID NO: 8565 - DNA, 847 bp, Rattus norvegicus
  ref <308>: DATABASE ACCESSION NUMBER: EMBL / U44948
  ref <309>: DATABASE ENTRY DATE: 1996-05-20
acgagctagacctccctagctccgcccgccgcgtgctcccgcctcccactcggaatgcctgtctggggcggtggaaataagtgcggggcctgcgggagaaccgtgtaccacgctgaagaggtgcagtgtgatgggcggacgttccaccgctgctgctttctgtgcatggtttgcaggaaaaatttagacagcacaacagtggcaattcatgatgaagagatctactgcaaatcatgctacggaaagaagtatggaccaaaaggctatggttatggccagggcgctggcacgctcaacatggaccgtggtgagaggctgggcatcaagccagagagtgctcaacctcacaggcctacaacaaatccaaacacttctaaatttgcccagaaatatggaggtgctgagaagtgctccagatgtggggattctgtgtatgctgctgagaagatcattggagctggaaagccctggcacaaaaactgtttccgatgtgccaagtgtgggaagagtctggagtctacaactctgactgagaaggaaggtgaaatctactgtaaagggtgctacgcaaagaactttgggcccaagggattcggctatggtcaaggagcaggggcccttgttcatgctcagtagtggtgtaaacccagtaagcatggcaaagaacctccattaatgtggatggccttaccgcactcaggctgtgcatcggccagcactcagcactgtgtagcacacacgctatgtgcacaatcgggctggacaggaagcactacactctcctgcccatccgctaacgtttaagaacgttcttttacatttggaataaaattttggtttgatttga

SEQ ID NO: 8566 - protein, 192 aa, Rattus norvegicus
  ref <308>: DATABASE ACCESSION NUMBER: SWISS-Prot / Q62908
  ref <309>: DATABASE ENTRY DATE: 2002-06-15
PVWGGGNKCGACGRTVYHAEEVQCDGRTFHRCCFLCMVCRKNLDSTTVAIHDEEIYCKSCYGKKYGPKGYGYGQGAGTLNMDRGERLGIKPESAQPHRPTTNPNTSKFAQKYGGAEKCSRCGDSVYAAEKIIGAGKPWHKNCFRCAKCGKSLESTTLTEKEGEIYCKGCYAKNFGPKGFGYGQGAGALVHAQ

SEQ ID NO: 8567 - DNA, 741 bp, Homo sapiens
  ref <308>: DATABASE ACCESSION NUMBER: EMBL / U46006
  ref <309>: DATABASE ENTRY DATE: 2000-03-04
atgcctgtctggggaggtggaaacaagtgtggggcctgtgggaggaccgtgtaccacgcagaagaggtgcagtgtgatggcaggagcttccaccgctgctgctttctctgcatggtttgcaggaaaaatttagatagcacaacagtggcaattcacgatgaagagatctactgcaaatcctgctacggaaagaagtatgggccaaaaggctacggttatggccagggcgctggcacgcttaacatggaccgtggcgagaggctgggcatcaaaccagagagtgttcagcctcacaggcctacaacaaatccaaacacttctaaatttgctcagaaatatggaggtgctgagaagtgttccagatgtggggattctgtatatgctgccgagaagataattggagctggaaagccctggcacaaaaactgtttccgatgtgcaaagtgtgggaagagtcttgaatcaacaactctgactgaaaaagaaggtgaaatctattgtaaaggatgctatgcaaagaactttgggcccaagggatttggctatggccaaggagcaggggctcttgttcatgcccagtaagatgtaaaccctgaactaaacatcacacactgagaatctcttcataatctaggcacagataatctttaacccggaattccgccgatactgacgggctccaggagtcgtcgccaccaagccgaattccagcacactggcggccgttactagtggatccga

SEQ ID NO: 8568 - protein, 192 aa, Homo sapiens
  ref <308>: DATABASE ACCESSION NUMBER: SWISS-Prot / Q16527
  ref <309>: DATABASE ENTRY DATE: 2002-06-15
PVWGGGNKCGACGRTVYHAEEVQCDGRSFHRCCFLCMVCRKNLDSTTVAIHDEEIYCKSCYGKKYGPKGYGYGQGAGTLNMDRGERLGIKPESVQPHRPTTNPNTSKFAQKYGGAEKCSRCGDSVYAAEKIIGAGKPWHKNCFRCAKCGKSLESTTLTEKEGEIYCKGCYAKNFGPKGFGYGQGAGALVHAQ

SEQ ID NO: 8569 - DNA, 167 bp, Rattus norvegicus
  ref <308>: DATABASE ACCESSION NUMBER: EMBL / U47316
  ref <309>: DATABASE ENTRY DATE: 2000-03-04
caggtcacggaagccagtcatgccggagacaccggcttctgggaagccgcccaggtctcattcctccctgctgtttggaggcagcatctcctctttttatggagggcccgtccttttttcttacaaattcttcaataaagacacattcttgaggcgaaaaaaaaaaa

SEQ ID NO: 8570 - protein, 180 aa, Rattus norvegicus
  ref <308>: DATABASE ACCESSION NUMBER: SWISS-Prot / AAH03736
  ref <309>: DATABASE ENTRY DATE: 2002-06-15
MSRQANRGTESKKMSSELFTLTYGALVTQLCKDYENDEDVNKQLDRMGYNIGVRLIEDFLARSNVGRCHDFRETADVIAKVAFKMYLGITPSITNWSPAGDEFSLILENNPLVDFVELPDNHSALIYSNLLCGVLRGALEMVQMAVEAKFVQDTLKGDGVTEIRMRFIRRIEDNLPAGEE

SEQ ID NO: 8571 - DNA, 805 bp, Homo sapiens
  ref <308>: DATABASE ACCESSION NUMBER: EMBL / AF041432
  ref <309>: DATABASE ENTRY DATE: 1999-07-05
tgggctgaggggcagcggcttaggctccggcgtctgcaggggtcgccgagctaacccgtggctaggcgagtggggcggggcggccggcaccatgtcgaggcaggcgaaccgtggcaccgagagcaagaaaatgagctctgagctcttcaccctgacctatggtgccctggtcacccagctatgtaaggactatgaaaatgatgaagatgtgaataaacagctggacaaaatgggctttaacattggagtccggctgattgaagatttcttggctcggtcaaatgttgggaggtgccatgactttcgggaaactgcggatgtcattgccaaggtggcgttcaagatgtacttgggcatcactccaagcattactaattggagcccagctggtgatgaattctccctcattttggaaaataaccccttggtggactttgtggaacttcctgataaccactcatcccttatttattccaatctcttgtgtggggtgttgcggggagctttggagatggtccagatggctgtggaggccaagtttgtccaggacaccctgaaaggagacggtgtgacagaaatccggatgagattcatcaggcggattgaggacaatcttccagctggagaggaataaccatccctacaactcgaggatagccatcaggagcactgttggaatcagcaggcctctgtgctccctctgccctccagaactcagtgactcttgaacatggatgttatatattcttataacctgtttccattctccattcaaataaagagcagactgcgatatagtccattt

SEQ ID NO: 8572 - protein, 180 aa, Homo sapiens
  ref <308>: DATABASE ACCESSION NUMBER: SWISS-Prot / O43617
  ref <309>: DATABASE ENTRY DATE: 2002-06-15
MSRQANRGTESKKMSSELFTLTYGALVTQLCKDYENDEDVNKQLDKMGFNIGVRLIEDFLARSNVGRCHDFRETADVIAKVAFKMYLGITPSITNWSPAGDEFSLILENNPLVDFVELPDNHSSLIYSNLLCGVLRGALEMVQMAVEAKFVQDTLKGDGVTEIRMRFIRRIEDNLPAGEE

SEQ ID NO: 8573 - DNA, 2915 bp, Rattus norvegicus
  ref <308>: DATABASE ACCESSION NUMBER: EMBL / U48246
  ref <309>: DATABASE ENTRY DATE: 2000-02-02
aagcactggtttcttgttagcgttggtgcgccctgcttggcgggggttctccggagcgatgccgatggatgtgattttagttttgtggttctgtgtatgcaccgccaggacagtgttgggctttgggatggaccctgaccttcagctggacatcatctcagagctcgacctggtgaacaccaccctgggagtcacgcaggtggctggactgcacaacgccagtaaagcatttctatttcaagatgtacagagagagatccattcggcccctcacgtgagtgagaagctgatccagctattccggaataagagcgagttcacctttttggctacagtgcagcagaaaccatccacctcaggggtgatactgtccatccgggagctggagcacagctattttgaactggagagcagtggcccaagagaagagatacgctaccattacatacatggtggaaagcccaggactgaggcccttccctaccgcatggcagacggacaatggcacaaggtcgcgctgtcagtgagcgcctctcacctcctgctccacatcgactgcaataggatttacgagcgtgtgatagaccctccggagaccaaccttcctccaggaagcaatctgtggcttgggcaacgtaaccaaaagcatggctttttcaaaggaatcatccaagatggtaagatcatcttcatgccgaatggtttcatcacacagtgtcccaacctcaatcgcacttgcccaacatgcagtgacttcctgagcctggttcaaggaataatggatttgcaagagcttttggccaagatgactgcaaaactgaattatgcagagacgagacttggtcaactggaaaattgccactgtgagaagacctgccaagtgagtgggctgctctacagggaccaagactcctgggtggatggtgacaactgtgggaactgcacgtgcaaaagtggtgccgtggagtgccgcaggatgtcctgtcccccgctcaactgttccccggactcacttcctgtgcacatttccggccagtgttgtaaagtttgcagaccaaaatgtatctatggaggaaaagttcttgctgagggccagcggattttaaccaagacctgccgggaatgtcgaggtggagtcttggtaaaaatcacagaagcttgccctcctttgaactgctcagcaaaggatcatattcttccagagaatcagtgctgcagggtctgcccaggtcataacttctgtgcagaagcacctaagtgcggagaaaactcggaatgcaaaaattggaatacaaaagcaacctgtgagtgcaagaatggatacatctctgtccagggcaactctgcatactgtgaagatattgatgagtgtgcagctaaaatgcactattgtcatgccaacaccgtgtgtgtcaacttgccggggttgtatcgctgtgactgcgtcccagggtacatccgtgtggatgacttctcttgtacggagcatgatgattgtggcagcggacaacacaactgcgacaaaaatgccatctgtaccaacacagtccagggacacagctgcacctgccagccgggttacgtgggaaatggcaccatctgcaaagcattctgtgaagagggttgcagatacggaggtacctgtgtggctcctaacaagtgtgtctgtccttctggattcacgggaagccactgtgagaaagatattgatgaatgcgcagagggattcgttgaatgccacaactactcccgctgtgttaacctgccagggtggtaccactgtgagtgcagaagcggtttccatgacgatgggacctactcactgtccggggagtcctgcattgatatcgatgaatgtgccttaagaactcacacttgttggaatgactctgcctgcatcaacttagcaggaggatttgactgcctgtgtccctctgggccctcctgctctggtgactgtccccacgaaggagggctgaagcataatgggcaggtgtggattctgagagaagacaggtgttcagtctgttcctgcaaggatgggaagatattctgccggcggacagcttgtgattgccagaatccaaatgttgaccttttttgctgcccagagtgcgataccagggtcaccagccaatgtttagatcaaagtggacagaagctctatcgaagtggagacaactggacccacagctgccagcagtgccgatgtctggaaggagaggcagactgctggcctctggcttgccctagtttgggctgtgaatacacagccatgtttgaaggggagtgttgtccccgatgtgtcagtgacccctgcctggctggtaatattgcctatgacatcagaaaaacttgcctggacagctttggtgtttcgaggctgagcggagccgtgtggacaatggctggatctccttgtacaacctgcaaatgcaagaatgggagagtctgctgctctgtggatctggagtgtattgagaataactgaagattttaaatggactcgtcacgtgagaaaatgggcaaaatgatcatcccacctgaggaagaagaggggctgatttctttttctttttaaccacagtcaattaccaaagtctccatctgaggaaggcgtttggattgcctttgccactttgctcatccttgctgacctagtctagatgcctgcagtaccgtgcatttcggtcgatggttgttgagtctcagtgttgtaaatcgcatttccctcgtcagatcatttacagatacatttaaaggggttccatgataaatgttaatgtaacttttgtttattttgtgtactgacataatagagacttggcaccatttatttatttttcttgatttttggatcaaattctaaaaataaagttgcctgttgcgaaaaaaaaaaaaaaaaaaaaaaaaaa

SEQ ID NO: 8574 - protein, 810 aa, Rattus norvegicus
  ref <308>: DATABASE ACCESSION NUMBER: SWISS-Prot / Q62919
  ref <309>: DATABASE ENTRY DATE: 2002-06-15
MPMDVILVLWFCVCTARTVLGFGMDPDLQLDIISELDLVNTTLGVTQVAGLHNASKAFLFQDVQREIHSAPHVSEKLIQLFRNKSEFTFLATVQQKPSTSGVILSIRELEHSYFELESSGPREEIRYHYIHGGKPRTEALPYRMADGQWHKVALSVSASHLLLHIDCNRIYERVIDPPETNLPPGSNLWLGQRNQKHGFFKGIIQDGKIIFMPNGFITQCPNLNRTCPTCSDFLSLVQGIMDLQELLAKMTAKLNYAETRLGQLENCHCEKTCQVSGLLYRDQDSWVDGDNCGNCTCKSGAVECRRMSCPPLNCSPDSLPVHISGQCCKVCRPKCIYGGKVLAEGQRILTKTCRECRGGVLVKITEACPPLNCSAKDHILPENQCCRVCPGHNFCAEAPKCGENSECKNWNTKATCECKNGYISVQGNSAYCEDIDECAAKMHYCHANTVCVNLPGLYRCDCVPGYIRVDDFSCTEHDDCGSGQHNCDKNAICTNTVQGHSCTCQPGYVGNGTICKAFCEEGCRYGGTCVAPNKCVCPSGFTGSHCEKDIDECAEGFVECHNYSRCVNLPGWYHCECRSGFHDDGTYSLSGESCIDIDECALRTHTCWNDSACINLAGGFDCLCPSGPSCSGDCPHEGGLKHNGQVWILREDRCSVCSCKDGKIFCRRTACDCQNPNVDLFCCPECDTRVTSQCLDQSGQKLYRSGDNWTHSCQQCRCLEGEADCWPLACPSLGCEYTAMFEGECCPRCVSDPCLAGNIAYDIRKTCLDSFGVSRLSGAVWTMAGSPCTTCKCKNGRVCCSVDLECIENN

SEQ ID NO: 8575 - DNA, 1722 bp, Homo sapiens
  misc_feature (1)..(1722): n=a, c, g or t
  ref <308>: DATABASE ACCESSION NUMBER: EMBL / U57523
  ref <309>: DATABASE ENTRY DATE: 1996-09-01
gatcagtgctgccgtgtctgtagaggtcataacttttgtgcagaaggacctaaatgtggtgaaaactcagagtgcaaaaactggaatacaaaagctacttgtgagtgcaagagtggttacatctctgtccaggggagactctgcctactgtgaagatattgatgagtgtgcagctaagatgcattactgtcatgccaatactgtgtgtgtcaaccttcctgggttatatcgctgtgactgtgtcccaggatacattcgtgtggatgacttctcttgtacagaacacgatgaatgtggcagcggccagcacaactgtgatgagaatgccatctgcaccaacactgtccagggacacagctgcacctgcaaaccgggctacgtggggaacgggaccatctgcagagctttctgtgaagagggctgcagatacggtggaacgtgtgtggctcccaacaaatgtgtctgtccatctggattcacaggaagccactgcgagaaagatattgatgaatgttcagagggaatcattgagtgccacaaccattcccgctgcgttaacctgccagggtggcaccactgtgagtgcagaagcggtttccatgacgatgggacctattcactgtccggggagtcctgtattgacattgatgaatgtgccttaagaactcacacctgttggaacgattctgcctgcatcaacctggcagggggttttgactgtctctgcccctgtgggccctcctgctctggtgactgtcctcatgaaggggggctgaagcacaatggccaggtgtggaccttgaaagaagacaggtgttctgtctgctcctgcaaggatggtaagatattctgccgacggacagcttgtgattgccagaatccaagtgctgacctattctgttgcccagaatgtgacaccagagtcacaagtcaatgtttagaccaaaatggtcacaagctgtatcgaagtggagacaattggacccatagctgtcagcagtgtcggtgtctggaaggagaggtagattgctggccactcacttgccccaacttgagctgtgagtatacagctatcttagaaggggaatgttgtccccgctgtgtcagtgacccctgcctagctgataacatcacctatgacatcagaaaaacttgcctggacagtatggtgtttcacggcttagtggctcagtgtggacgatggctggatctccctgcacaacctgtaaatgcaagaatggaagagtctgttgttctgtggattttgagtgtcttcaaaataattgaagtatttacagtggactcaacgcagaagaatggacgaaatgaccatccaacgtgattaaggataggaatcggtagtttggtttttttgtttgttttgtttttttaaccacagataattgccaaagtttccacctgaggacggtgtttggaggttgccttttggacctaccactttgctcattcttgctaacctagtttaggtgacctacagtgccgtgcatttaagtcagtggttgttaaaagaagtttcccgcgttgtaaatcatgtttcccttatcagatcatttgcaaatacatttaaatgatntcatggtaaatgttgctgtattttttggtttattttctgtactaacataatagagagagantnagctccttttatttattttgttgatttatggatcaaattntaaaataaagttgcctgttgtgnaa

SEQ ID NO: 8576 - protein, 810 aa, Homo sapiens
  ref <308>: DATABASE ACCESSION NUMBER: SWISS-Prot / Q92832
  ref <309>: DATABASE ENTRY DATE: 2002-06-15
MPMDLILVVWFCVCTARTVVGFGMDPDLQMDIVTELDLVNTTLGVAQVSGMHNASKAFLFQDIEREIHAAPHVSEKLIQLFQNKSEFTILATVQQKPSTSGVILSIRELEHSYFELESSGLRDEIRYHYIHNGKPRTEALPYRMADGQWHKVALSVSASHLLLHVDCNRIYERVIDPPDTNLPPGINLWLGQRNQKHGLFKGIIQDGKIIFMPNGYITQCPNLNHTCPTCSDFLSLVQGIMDLQELLAKMTAKLNYAETRLSQLENCHCEKTCQVSGLLYRDQDSWVDGDHCRNCTCKSGAVECRRMSCPPLNCSPDSLPVHIAGQCCKVCRPKCIYGGKVLAEGQRILTKSCRECRGGVLVKITEMCPPLNCSEKDHILPENQCCRVCRGHNFCAEGPKCGENSECKNWNTKATCECKSGYISVQGDSAYCEDIDECAAKMHYCHANTVCVNLPGLYRCDCVPGYIRVDDFSCTEHDECGSGQHNCDENAICTNTVQGHSCTCKPGYVGNGTICRAFCEEGCRYGGTCVAPNKCVCPSGFTGSHCEKDIDECSEGIIECHNHSRCVNLPGWYHCECRSGFHDDGTYSLSGESCIDIDECALRTHTCWNDSACINLAGGFDCLCPSGPSCSGDCPHEGGLKHNGQVWTLKEDRCSVCSCKDGKIFCRRTACDCQNPSADLFCCPECDTRVTSQCLDQNGHKLYRSGDNWTHSCQQCRCLEGEVDCWPLTCPNLSCEYTAILEGECCPRCVSDPCLADNITYDIRKTCLDSYGVSRLSGSVWTMAGSPCTTCKCKNGRVCCSVDFECLQNN

SEQ ID NO: 8577 - DNA, 2915 bp, Rattus norvegicus; identical to SEQ ID NO: 8573
  ref <308>: DATABASE ACCESSION NUMBER: EMBL / U48246
  ref <309>: DATABASE ENTRY DATE: 2000-02-02

SEQ ID NO: 8578 - protein, 810 aa, Rattus norvegicus; identical to SEQ ID NO: 8574
  ref <308>: DATABASE ACCESSION NUMBER: SWISS-Prot / Q62919
  ref <309>: DATABASE ENTRY DATE: 2002-06-15

SEQ ID NO: 8579 - DNA, 1722 bp, Homo sapiens; identical to SEQ ID NO: 8575
  misc_feature (1)..(1722): n=a, c, g or t
  ref <308>: DATABASE ACCESSION NUMBER: EMBL / U57523
  ref <309>: DATABASE ENTRY DATE: 1996-09-01

SEQ ID NO: 8580 - protein, 810 aa, Homo sapiens; identical to SEQ ID NO: 8576
  ref <308>: DATABASE ACCESSION NUMBER: SWISS-Prot / Q92832
  ref <309>: DATABASE ENTRY DATE: 2002-06-15

SEQ ID NO: 8581 - DNA, 1862 bp, Rattus norvegicus
  ref <308>: DATABASE ACCESSION NUMBER: EMBL / U48592
  ref <309>: DATABASE ENTRY DATE: 2001-08-03
tcctgggttccgcttggaccagggcgctgaaggaggcagtggccggccaacccgcacccatctggtcgctgtcgccgagcctgcttggctggcccagtaaggatgggacttccttggtgtttgatgagtctgttcttctgtgggatcctgcagagtcacgcttccgaacgctgtgatgactggggactagataccatgcgacaaatccaagtgtttgaagatgagccagctcgcatcaagtgccccctctttgaacacttcttgaagtacaactacagcactgcccattcctctggacttaccctgatctggtactggaccaggcaagaccgggacctggaggagcccattaatttccgccttccagagaatcgcatcagtaaggagaaagatgtgctctggttccggcccaccctcctcaatgacacgggcaattacacctgcatgttgaggaacacgacttactgcagcaaagttgcatttcccctggaagttgttcagaaggacagctgtttcaattcccccatgagactcccagtgcacaggctgtatattgaacagggtattcacaatatcacgtgtccaaatgtagatggatattttccttccagtgtcaaaccatcggtcacttggtataagggttgtactgaaatagtgaattttcataatgttcaacccaagggcatgaacttgagttttttcatccccttggtatcaaataacggaaattacacatgtgtggtgacgtatctggaaaacggacggctctttcacctcaccaggactatgactgtaaaggtggtaggctcaccaaaggatgcagtaccacctcatatctactcgccaaatgaccgcgttgtctatgagaaggaaccaggagaggagttggttattccctgtaaagtctatttcagtttcattatggactctcacaatgagatctggtggaccattgatggaaagaagcctgatgacgtccctgttgacatcactattattgaaagcgtaagttattcttcaacggaagatgagacaaggactcagattttgagcatcaagaaagtcacccctgaggatctgaagcgcaactatgtctgtcacgctcgaaatgccgaaggggaagccgagcaagcagccaaggtgaaacagaaagtcataccgccaaggtacacagtagaactcgcctgtggttttggagccacagtctttctggtggtggttctcatcgtggtttaccacgtttactggctggagatggtcctcttttaccgggctcattttggaacggatgaaacaattcttgacggaaaagaatatgatatttatgtttcctatgcaagaaatgcagaagaagaagagtttgtgctgctgacactacgtggagttttggagaatgagttcggatacaagctgtgcatcttcgacagggacagcttccctgggggaattgtcacagatgagaccctgagcttcattcagaaaagcagacgactcctggttgtcctaagccccaactacgtgctccagggaacacaagccctcctggagctcaaggctggcctagaaaatatggcctcccggggcaacatcaacgtcattttagtgcagtacaaagctgtgaaggacttgaaggtgaaagagctgaagcgggctaagtcggtgctcaccgtcattaaatggaaaggggagaaatccaagtatcctcagggcaggttctggaagcagctgcaggtggccatgccagtgaagaagagtcccaggtggtctagcagtgacaagcagggtctctcctactcatccctgaaaaacgtatgaaaggaaaagtcagggggtgaaaagaacaaggcggttcatgggaggaa

SEQ ID NO: 8582 - protein, 570 aa, Rattus norvegicus
  ref <308>: DATABASE ACCESSION NUMBER: SWISS-Prot / AAB03502
  ref <309>: DATABASE ENTRY DATE: 2003-02-01
MGLPWCLMSLFFCGILQSHASERCDDWGLDTMRQIQVFEDEPARIKCPLFEHFLKYNYSTAHSSGLTLIWYWTRQDRDLEEPINFRLPENRISKEKDVLWFRPTLLNDTGNYTCMLRNTTYCSKVAFPLEVVQKDSCFNSPMRLPVHRLYIEQGIHNITCPNVDGYFPSSVKPSVTWYKGCTEIVNFHNVQPKGMNLSFFIPLVSNNGNYTCVVTYLENGRLFHLTRTMTVKVVGSPKDAVPPHIYSPNDRVVYEKEPGEELVIPCKVYFSFIMDSHNEIWWTIDGKKPDDVPVDITIIESVSYSSTEDETRTQILSIKKVTPEDLKRNYVCHARNAEGEAEQAAKVKQKVIPPRYTVELACGFGATVFLVVVLIVVYHVYWLEMVLFYRAHFGTDETILDGKEYDIYVSYARNAEEEEFVLLTLRGVLENEFGYKLCIFDRDSFPGGIVTDETLSFIQKSRRLLVVLSPNYVLQGTQALLELKAGLENMASRGNINVILVQYKAVKDLKVKELKRAKSVLTVIKWKGEKSKYPQGRFWKQLQVAMPVKKSPRWSSSDKQGLSYSSLKNV

SEQ ID NO: 8583 - DNA, 1740 bp, Homo sapiens
  ref <308>: DATABASE ACCESSION NUMBER: EMBL / AF029213
  ref <309>: DATABASE ENTRY DATE: 1999-10-06
tctcaaaggatgacacttctgtggtgtgtagtgagtctctacttttatggaatcctgcaaagtgatgcctcagaacgctgcgatgactggggactagacaccatgaggcaaatccaagtgtttgaagatgagccagctcgcatcaagtgcccactctttgaacacttcttgaaattcaactacagcacagcccattcagctggccttactctgatctggtattggactaggcaggaccgggaccttgaggagccaattaacttccgcctccccgagaaccgcattagtaaggagaaagatgtgctgtggttccggcccactctcctcaatgacactggcaactatacctgcatgttaaggaacactacatattgcagcaaagttgcatttcccttggaagttgttcaaaaagacagctgtttcaattcccccatgaaactcccagtgcataaactgtatatagaatatggcattcagaggatcacttgtccaaatgtagatggatattttccttccagtgtcaaaccgactatcacttggtatatgggctgttataaaatacagaattttaataatgtaatacccgaaggtatgaacttgagtttcctcattgccttaatttcaaataatggaaattacacatgtgttgttacatatccagaaaatggacgtacgtttcatctcaccaggactctgactgtaaaggtagtaggctctccaaaaaatgcagtgccccctgtgatccattcacctaatgatcatgtggtctatgagaaagaaccaggagaggagctactcattccctgtacggtctattttagttttctgatggattctcgcaatgaggtttggtggaccattgatggaaaaaaacctgatgacatcactattgatgtcaccattaacgaaagtataagtcatagtagaacagaagatgaaacaagaactcagattttgagcatcaagaaagttacctctgaggatctcaagcgcagctatgtctgtcatgctagaagtgccaaaggcgaagttgccaaagcagccaaggtgaagcagaaagtgccagctccaagatacacagtggaactggcttgtggttttggagccacagtcctgctagtggtgattctcattgttgtttaccatgtttactggctagagatggtcctattttaccgggctcattttggaacagatgaaaccattttagatggaaaagagtatgatatttatgtatcctatgcaaggaatgcggaagaagaagaatttgtattactgaccctccgtggagttttggagaatgaatttggatacaagctgtgcatctttgaccgagacagtctgcctgggggaattgtcacagatgagactttgagcttcattcagaaaagcagacgcctcctggttgttctaagccccaactacgtgctccagggaacccaagccctcctggagctcaaggctggcctagaaaatatggcctctcggggcaacatcaacgtcattttagtacagtacaaagctgtgaaggaaacgaaggtgaaagagctgaagagggctaagacggtgctcacggtcattaaatggaaaggggaaaaatccaagtatccacagggcaggttctggaagcagctgcaggtggccatgccagtgaagaaaagtcccaggcggtctagcagtgatgagcagggcctctcgtattcatctttgaaaaatgtatgaaaggaataatgaaaagga

SEQ ID NO: 8584 - protein, 570 aa, Homo sapiens
  ref <308>: DATABASE ACCESSION NUMBER: Refseq / NP_002173
  ref <309>: DATABASE ENTRY DATE: 2002-10-30
MTLLWCVVSLYFYGILQSDASERCDDWGLDTMRQIQVFEDEPARIKCPLFEHFLKFNYSTAHSAGLTLIWYWTRQDRDLEEPINFRLPENRISKEKDVLWFRPTLLNDTGNYTCMLRNTTYCSKVAFPLEVVQKDSCFNSPMKLPVHKLYIEYGIQRITCPNVDGYFPSSVKPTITWYMGCYKIQNFNNVIPEGMNLSFLIALISNNGNYTCVVTYPENGRTFHLTRTLTVKVVGSPKNAVPPVIHSPNDHVVYEKEPGEELLIPCTVYFSFLMDSRNEVWWTIDGKKPDDITIDVTINESISHSRTEDETRTQILSIKKVTSEDLKRSYVCHARSAKGEVAKAAKVKQKVPAPRYTVELACGFGATVLLVVILIVVYHVYWLEMVLFYRAHFGTDETILDGKEYDIYVSYARNAEEEEFVLLTLRGVLENEFGYKLCIFDRDSLPGGIVTDETLSFIQKSRRLLVVLSPNYVLQGTQALLELKAGLENMASRGNINVILVQYKAVKETKVKELKRAKTVLTVIKWKGEKSKYPQGRFWKQLQVAMPVKKSPRRSSSDEQGLSYSSLKNV

SEQ ID NO: 8585 - DNA, 5180 bp, Rattus norvegicus
  ref <308>: DATABASE ACCESSION NUMBER: EMBL / U48596
  ref <309>: DATABASE ENTRY DATE: 2000-03-04
gaattccgcacccggggcgggacaagaggtctgctttccaaagagaaggcttcgcgtctgtctgcagcaggcgacagtcccgggcgccacctgcgcttcgggcgcgggccaggctggtgcgcgccgggcccccagcgcccgctactgagagcgtgaagtgaccgaccgtgagtcctccggcttgcgtccccttccagcaccagggactcacgccccaattactgcttgctcaagggtggacgagctccggccgagccgctgccccgccccgtactacctggcagctgcccgggtgcagcgcacagcgccccgcgcggccccagcagagcccctgccctcccacctgcgccgcgcgcccgccgctccgtgctcccgagacaggagacgcggccccgctcccgctcgcgcccgcgcactcggcgcagcgcgcgcgcccgccgctccgcccgccccccgcgctctccccgccccctccctcccccgcaggcacgagcgaatgtagcccgcgagagaaaatggcggcggcggcgggcgatcgcgcctcgtcgtcgggattcccgggcgccgcggcggcgagccccgaggcgggcggcggcggcggagctctccagggaagcggcgcgcccgcagcgggcgcggggctgctgcgggagactggcagcgcgggccgcgagcgcgcggactggcggcggcagcagctgcgcaaagtaaggagtgtggagctggaccagctgccggagcagccgctcttcctcaccgcctcgccgccctgcccatctacttccccgtcgccggagcccgcggacgcggctgcaggagcgagtggcttccagcctgcggcgggaccgccacccccgggagcagcgagtcgctgcggctcccactctgccgagctggcggccgcgcgggacagcggcgcccggagccccgcgggggccgagccgccctctgcagcggccccctccggtcgagagatggagaataaagaaaccctcaaaggattgcacaagatggatgaccgcccagaggagcgaatgatcagggagaagctcaaggcgacctgtatgcctgcctggaagcacgagtggttagaaaggaggaacaggagaggccctgtggtggtgaaaccaatccctattaaaggagatggatctgaaatgagtaacttggcagctgagctccaaggagagggccaggcaggctctgctgcaccagctcccaagggccgacgaagcccgtctcctggaagctccccatcagggcgctcagggaagccggaatccccaggagtgagacggaaacgagtgtccccagtgcctttccagagtggcagaatcacaccacctcgaagagccccgtcgccagatggcttctcaccgtacagcccagaggagacgagccgccgtgtgaacaaagtgatgagggccaggctgtacctcctgcagcagataggacccaactctttcctgattggaggagacagtccagacaataaataccgcgtgtttattgggccacagaactgcagctgtgggcgtgggacattctgcattcacctcttgtttgtcatgctccgggtgttccagctagaaccctccgaccccatgctatggagaaaaactttaaaaaattttgaggttgagagtttgttccagaaataccacagtaggcgtagctcaagaatcaaagctccatctcggaacaccatccagaagtttgtctcacgcatgtcaaactgtcacacattgtcatcgtctagcacatccacatctagttcagaaaacagcatcaaggatgaagaggagcagatgtgtcccatctgcttgttgggcatgctggatgaggagagcctgactgtgtgtgaagacggctgcaggaacaagctgcaccaccactgcatgtcaatctgggcagaagaatgtagaagaaatagagaaccgttaatatgtcccctttgtagatctaagtggagatcccatgacttctacagccatgagttatcaagccctgtggattcccctacctccctgcgaggtgtacagcagccctcctccccgcaacagcctgtggccggatcacagcggaggaatcaggaaagcaattttaaccttactcattatggaacccagcagattcctcccgcttacaaagatttagccgagccatggattcaggcattcggaatggagctcgttggctgcttattctctagaaactggaacgtaagggagatggcccttaggcgcctttcccacgatgttagcggggccctgttgttggcgaacggggagagcactggaacttctggaggcggcagcggaggcagcctaagtgctggcgccgccagtgggtcttcccagcccagcatctcaggggacgtggtggaggcgttctgcagcgtcctgtctatcgtgtgcgctgaccctgtctacaaagtgtacgttgctgctttaaaaacactgagagccatgctggtatacactccttgccacagcctggcagaaagaatcaaacttcagagacttctccggccagtggtagacaccatcctagtgaagtgcgcagacgccaatagccgcacgagtcagctgtccatatcaacactgttggagctctgcaagggccaagcgggggagttggcagttggacgagaaatacttaaagctggatccatcggtgttggtggcgttgattacgtcttaagttgtattcttggaaaccaagctgaatcaaacaactggcaagaactcctgggtcgcctctgtcttatagacagattgctcttggaaatttctgcggaattttatcctcatattgtcagtaccgatgtctcacaagccgagcctgttgaaatcaggtataagaagctgctgtccctcttagcctttgccttgcaatccattgacaattcccactctatggtcggcaaactctcgcggaggatttatctgagctcagcacgaatggtgaccacagtgccccccctgttttccaagctggtaaccatgctaagtgcttctggatcctcccacttcgccaggatgcgccggcgtctgatggccattgcagacgaggtagaaattgccgaggtcatccagctgggttcggaagacactttggatggccagcaggacagctcgcaggcattggcccctccccgctatccagagagcagctcccttgagcacacagcccatgtagagaaaactggaaaaggattaaaagctacgagactgagtgccagctcagaggacatttctgacagactggctggcgtttctgtaggacttcctagttcagcaacaacagaacaaccaaagccaacagttcaaacaaaaggcagaccccacagtcagtgtttgaactcctctcctttgtctcctcctcagttaatgtttccagcaatatcagccccatgttcatctgccccgtctgtcccagctggctctgtaacagatgcttctaagcatagacctcgggcgtttgttccctgtaaaataccctctgcgtctccccaaacacagcgcaagttttccctacagttccagaggacctgctctgagaaccgagactcagaaaaactctccccagtctttactcagtcgagacccccaccctccagtaacatacacagggcaaaggcatcccgacccgttccgggtagcacaagcaaactaggggatgcctcaaaaaacagcatgacactcgacctgaacagtgcttcccagtgtgatgacagctttggcagtggcagcaacagtggcagcgccgtcatacccagtgaggagacggcattcaccccagcagaggacaagtgcaggttagatgtcaaccccgagctcaactccagtatcgaggaccttcttgaagcatctatgccttcaagtgacacaacagtcactttcaagtccgaagtcgccgtcctctctcctgagaaggccgaaagtgatgacacctacaaagatgacgtcaatcacaatcaaaagtgcaaagagaagatggaggctgaggaagaggaggcgctcgcgattgccatggcaatgtcggcttctcaggacgccctccccatagtccctcagctgcaggtggaaaatggagaggatatcatcatcatccagcaggatacaccagaaaccctaccagggcataccaaagcgaacgagccctacagagaagacaccgagtggctgaaagggcagcagataggcctcggagcattttcttcttgttaccaagcacaggatgtgggcactggaactttaatggctgtgaaacaggtgacctacgtcagaaacacatcttctgagcaggaggaagtggtggaagccttgagggaagagatcaggatgatgagccacctcaaccatccgaacatcatcaggatgctgggggccacgtgcgagaagagcaactacaacctcttcatcgagtggatggcgggagcctccgtggctcacctcttgagtaaatatggagctttcaaggagtcagtggtcattaactacacagagcagttactccgtggcctttcctatctccacgagaaccagatcattcacagagacgtcaaaggggccaatctgctcattgacagcaccggtcagcggctgagaattgcagacttcggtgctgccgccaggttggcatccaaaggaactggtgcaggagagttccagggacagttactggggacaattgcattcatggcgcctgaggtactaagaggtcagcagtacggtaggagctgtgacgtctggagtgttggctgcgccattatagaaatggcctgtgcaaaaccaccctggaacgcagaaaagcactccaatcatcttgctttgatatttaagattgcgagtgcaactactgcaccatccatcccgtcacacctgtccccgggcctgcgagacgtggctctgcgctgtttagaacttcaacctcaggacagacctccgtcaagagagctactgaagcatcctgtcttccgtacaacatggtagtcaactgctcagggtgcgcaacaaggaaagaaaactcgcgggcagccacgttgatagtctgctggcctcataccactgaccagaagaggggccagtggggagcccgcacctaagcatgtgactgacaaatcatgactgcacctgagctccgtctgcagacggctacaactcgtgcaggagctg

SEQ ID NO: 8586 - protein, 1493 aa, Rattus norvegicus
  ref <308>: DATABASE ACCESSION NUMBER: SWISS-Prot / Q62925
  ref <309>: DATABASE ENTRY DATE: 2001-10-16
MAAAAGDRASSSGFPGAAAASPEAGGGGGALQGSGAPAAGAGLLRETGSAGRERADWRRQQLRKVRSVELDQLPEQPLFLTASPPCPSTSPSPEPADAAAGASGFQPAAGPPPPGAASRCGSHSAELAAARDSGARSPAGAEPPSAAAPSGREMENKETLKGLHKMDDRPEERMIREKLKATCMPAWKHEWLERRNRRGPVVVKPIPIKGDGSEMSNLAAELQGEGQAGSAAPAPKGRRSPSPGSSPSGRSGKPESPGVRRKRVSPVPFQSGRITPPRRAPSPDGFSPYSPEETSRRVNKVMRARLYLLQQIGPNSFLIGGDSPDNKYRVFIGPQNCSCGRGTFCIHLLFVMLRVFQLEPSDPMLWRKTLKNFEVESLFQKYHSRRSSRIKAPSRNTIQKFVSRMSNCHTLSSSSTSTSSSENSIKDEEEQMCPICLLGMLDEESLTVCEDGCRNKLHHHCMSIWAEECRRNREPLICPLCRSKWRSHDFYSHELSSPVDSPTSLRGVQQPSSPQQPVAGSQRRNQESNFNLTHYGTQQIPPAYKDLAEPWIQAFGMELVGCLFSRNWNVREMALRRLSHDVSGALLLANGESTGTSGGGSGGSLSAGAASGSSQPSISGDVVEAFCSVLSIVCADPVYKVYVAALKTLRAMLVYTPCHSLAERIKLQRLLRPVVDTILVKCADANSRTSQLSISTLLELCKGQAGELAVGREILKAGSIGVGGVDYVLSCILGNQAESNNWQELLGRLCLIDRLLLEISAEFYPHIVSTDVSQAEPVEIRYKKLLSLLAFALQSIDNSHSMVGKLSRRIYLSSARMVTTVPPLFSKLVTMLSASGSSHFARMRRRLMAIADEVEIAEVIQLGSEDTLDGQQDSSQALAPPRYPESSSLEHTAHVEKTGKGLKATRLSASSEDISDRLAGVSVGLPSSATTEQPKPTVQTKGRPHSQCLNSSPLSPPQLMFPAISAPCSSAPSVPAGSVTDASKHRPRAFVPCKIPSASPQTQRKFSLQFQRTCSENRDSEKLSPVFTQSRPPPSSNIHRAKASRPVPGSTSKLGDASKNSMTLDLNSASQCDDSFGSGSNSGSAVIPSEETAFTPAEDKCRLDVNPELNSSIEDLLEASMPSSDTTVTFKSEVAVLSPEKAESDDTYKDDVNHNQKCKEKMEAEEEEALAIAMAMSASQDALPIVPQLQVENGEDIIIIQQDTPETLPGHTKANEPYREDTEWLKGQQIGLGAFSSCYQAQDVGTGTLMAVKQVTYVRNTSSEQEEVVEALREEIRMMSHLNHPNIIRMLGATCEKSNYNLFIEWMAGASVAHLLSKYGAFKESVVINYTEQLLRGLSYLHENQIIHRDVKGANLLIDSTGQRLRIADFGAAARLASKGTGAGEFQGQLLGTIAFMAPEVLRGQQYGRSCDVWSVGCAIIEMACAKPPWNAEKHSNHLALIFKIASATTAPSIPSHLSPGLRDVALRCLELQPQDRPPSRELLKHPVFRTTW

SEQ ID NO: 8587 - DNA, 5234 bp, Homo sapiens
  ref <308>: DATABASE ACCESSION NUMBER: Refseq / XM_042066
  ref <309>: DATABASE ENTRY DATE: 2002-08-01
cgagccctgaggcaggcggcggcggaggagccctcaaggcgagcagcgcgcccgcggctgccgcgggactgctgcgggaggcgggcagcgggggccgcgagcgggcggactggcggcggcggcagctgcgcaaagtgcggagtgtggagctggaccagctgcctgagcagccgctcttccttgccgcctcaccgccggcctcctcgacttccccgtcgccggagcccgcggacgcagcggggagtgggaccggcttccagcctgtggcggtgccgccgccccacggagccgcgagccgcggcggcgcccaccttaccgagtcggtggcggcgccggacagcggcgcctcgagtcccgcagcggccgagcccggggagaagcgggcgcccgccgccgagccgtctcctgcagcggcccccgccggtcgtgagatggagaataaagaaactctcaaagggttgcacaagatggatgatcgtccagaggaacgaatgatcagggagaaactgaaggcaacctgtatgccagcctggaagcacgaatggttggaaaggagaaataggcgagggcctgtggtggtaaaaccaatcccagttaaaggagatggatctgaaatgaatcacttagcagctgagtctccaggagaggtccaggcaagtgcggcttcaccagcttccaaaggccgacgcagtccttctcctggcaactccccatcaggtcgcacagtgaaatcagaatctccaggagtaaggagaaaaagagtttccccagtgccttttcagagtggcagaatcacaccaccccgaagagccccttcaccagatggcttctcaccatatagccctgaggaaacaaaccgccgtgttaacaaagtgatgcgggccagactgtacttactgcagcagatagggcctaactctttcctgattggaggagacagcccagacaataaataccgggtgtttattgggcctcagaactgcagctgtgcacgtggaacattctgtattcatctgctatttgtgatgctccgggtgtttcaactagaaccttcagacccaatgttatggagaaaaactttaaagaattttgaggttgagagtttgttccagaaatatcacagtaggcgtagctcaaggatcaaagctccatctcgtaacaccatccagaagtttgtttcacgcatgtcaaattctcatacattgtcatcatctagtacttctacgtctagttcagaaaacagcataaaggatgaagaggaacagatgtgtcctatttgcttgttgggcatgcttgatgaagaaagtcttacagtgtgtgaagacggctgcaggaacaagctgcaccaccactgcatgtcaatttgggcagaagagtgtagaagaaatagagaacctttaatatgtcccctttgtagatctaagtggagatctcatgatttctacagccacgagttgtcaagtcctgtggattccccttcttccctcagagctgcacagcagcaaaccgtacagcagcagcctttggctggatcacgaaggaatcaagagagcaattttaaccttactcattatggaactcagcaaatccctcctgcttacaaagatttagctgagccatggattcaggtgtttggaatggaactcgttggctgcttattttctagaaactggaatgtgagagagatggccctcaggcgtctttcccatgatgtcagtggggccctgctgttggcaaatggggagagcactggaaattctgggggcagcagtggaagcagcccgagtgggggagccaccagtgggtcttcccagaccagtatctcaggagatgtggtggaggcatgctgcagcgttctgtcaatggtctgtgctgaccctgtctacaaagtgtacgttgctgctttaaaaacattgagagccatgctggtatatactccttgccacagtttagcggaaagaatcaaacttcagagacttctccagccagttgtagacaccatcctagtcaaatgtgcagatgccaatagccgcacaagtcagctgtccatatcaacactgttggaactgtgcaaaggccaagcaggagagttggcagttggcagagaaatactaaaagctggatccattggtattggtggtgttgattatgtcttaaattgtattcttggaaaccaaactgaatcaaacaattggcaagaacttcttggccgcctttgtcttatagatagactgttgttggaatttcctgctgaattttatcctcatattgtcagtactgatgtttcacaagctgagcctgttgaaatcaggtataagaagctgctgtccctcttaacctttgctttgcagtccattgataattcccactcaatggttggcaaactttccagaaggatctacttgagttctgcaagaatggttactacagtaccccatgtgttttcaaaactgttagaaatgctgagtgtttccagttccactcacttcaccaggatgcgtcgccgtttgatggctattgcagatgaggtggaaattgccgaagccatccagttgggcgtagaagacactttggatggtcaacaggacagcttcttgcaggcatctgttcccaacaactatctggaaaccacagagaacagttcccctgagtgcacagtccatttagagaaaactggaaaaggattatgtgctacaaaattgagtgccagttcagaggacatttctgagagactggccagcatttcagtaggaccttctagttcaacaacaacaacaacaacaacaacagagcaaccaaagccaatggttcaaacaaaaggcagaccccacagtcagtgtttgaactcctctcctttatctcatcattcccaattaatgtttccagccttgtcaaccccttcttcttctaccccatctgtaccagctggcactgcaacagatgtctctaagcatagacttcagggattcattccctgcagaataccttctgcatctcctcaaacacagcgcaagttttctctacaattccacagaaactgtcctgaaaacaaagactcagataaactttccccagtctttactcagtcaagacccttgccctccagtaacatacacaggccaaagccatctagacctaccccaggtaatacaagtaaacagggagatccctcaaaaaatagcatgacacttgatctgaacagtagttccaaatgtgatgacagctttggctgtagcagcaatagtagtaatgctgttatacccagtgacgagacagtgttcaccccagtagaggagaaatgcagattagatgtcaatacagagctcaactccagtattgaggaccttcttgaagcatctatgccttcaagtgatacaacagtaacttttaagtcagaagttgctgtcctgtctcctgaaaaggctgaaaatgatgatacctacaaagatgatgtgaatcataatcaaaagtgcaaagagaagatggaagctgaagaagaagaagctttagcaattgccatggcaatgtcagcgtctcaggatgccctccccatagttcctcagctgcaggttgaaaatggagaagatatcatcattattcaacaggatacaccagagactctaccaggacataccaaagcaaaacaaccgtatagagaagacactgaatggctgaaaggtcaacagataggccttggagcattttcttcttgttatcaggctcaagatgtgggaactggaactttaatggctgttaaacaggtgacttatgtcagaaacacatcttctgagcaagaagaagtagtagaagcactaagagaagagataagaatgatgagccatctgaatcatccaaacatcattaggatgttgggagccacgtgtgagaagagcaattacaatctcttcattgaatggatggcagggggatcggtggctcatttgctgagtaaatatggagccttcaaagaatcagtagttattaactacactgaacagttactccgtggcctttcgtatctccatgaaaaccaaatcattcacagagatgtcaaaggtgccaatttgctaattgacagcactggtcagagactaagaattgcagattttggagctgcagccaggttggcatcaaaaggaactggtgcaggagagtttcagggacaattactggggacaattgcatttatggcacctgaggtactaagaggtcaacagtatggaaggagctgtgatgtatggagtgttggctgtgctattatagaaatggcttgtgcaaaaccaccatggaatgcagaaaaacactccaatcatcttgctttgatatttaaggtaattattgctagtgcaactactgctccatcgatcccttcacatttgtctcctggtttacgagatgtggctcttcgttgtttagaacttcaacctcaggacagacctccatcaagagagctactgaagcatccagtctttcgtactacatggtagccaattatgcagatcaactacagtagaaacaggatgctcaacaagagaaaaaaaacttgtggggaaccacattgatattctactggccatgatgccactgaacagctatgaacgaggccagtggggaacccttacctaagtatgtgattgacaaatcatgatctgtacctaagctcagtatgcaaaagcccaaactagtgcagaaactgtaaactgtgcctttcaaagaactggccctaggtgaacaggaaaacaatgaagtttgcatgactaaattgcagaagcataattttatttttttggagcactttttcagcaatattagcggctgaggggctcaggatctattttaatatttcaattattcttccatttcatatagtgatcacaagcagggggttctgcaattccgttcaaattttttgtcactggctataaaatcagtatctgcctcttttaggtcagagtatgctatgagtagcaatacatacatatatttttaaaagttgatacttctttatgacccacagttgacctttattttcttaaataccagggcagttgtggctcattgtgcattttactgttggcccattcatttcgtttttggaaattatggttttgtattttcatgtttatttacattcatttttgtttattcagggaaagctgatctttttttcaaaccagaaaaaaaaaatgaactagatatgaagtagagttcattaaatatcttgctattgtcag

SEQ ID NO: 8588 - protein, 1351 aa, Homo sapiens
  ref <308>: DATABASE ACCESSION NUMBER: Refseq / XP_042066
  ref <309>: DATABASE ENTRY DATE: 2002-08-01
MENKETLKGLHKMDDRPEERMIREKLKATCMPAWKHEWLERRNRRGPVVVKPIPVKGDGSEMNHLAAESPGEVQASAASPASKGRRSPSPGNSPSGRTVKSESPGVRRKRVSPVPFQSGRITPPRRAPSPDGFSPYSPEETNRRVNKVMRARLYLLQQIGPNSFLIGGDSPDNKYRVFIGPQNCSCARGTFCIHLLFVMLRVFQLEPSDPMLWRKTLKNFEVESLFQKYHSRRSSRIKAPSRNTIQKFVSRMSNSHTLSSSSTSTSSSENSIKDEEEQMCPICLLGMLDEESLTVCEDGCRNKLHHHCMSIWAEECRRNREPLICPLCRSKWRSHDFYSHELSSPVDSPSSLRAAQQQTVQQQPLAGSRRNQESNFNLTHYGTQQIPPAYKDLAEPWIQVFGMELVGCLFSRNWNVREMALRRLSHDVSGALLLANGESTGNSGGSSGSSPSGGATSGSSQTSISGDVVEACCSVLSMVCADPVYKVYVAALKTLRAMLVYTPCHSLAERIKLQRLLQPVVDTILVKCADANSRTSQLSISTLLELCKGQAGELAVGREILKAGSIGIGGVDYVLNCILGNQTESNNWQELLGRLCLIDRLLLEFPAEFYPHIVSTDVSQAEPVEIRYKKLLSLLTFALQSIDNSHSMVGKLSRRIYLSSARMVTTVPHVFSKLLEMLSVSSSTHFTRMRRRLMAIADEVEIAEAIQLGVEDTLDGQQDSFLQASVPNNYLETTENSSPECTVHLEKTGKGLCATKLSASSEDISERLASISVGPSSSTTTTTTTTEQPKPMVQTKGRPHSQCLNSSPLSHHSQLMFPALSTPSSSTPSVPAGTATDVSKHRLQGFIPCRIPSASPQTQRKFSLQFHRNCPENKDSDKLSPVFTQSRPLPSSNIHRPKPSRPTPGNTSKQGDPSKNSMTLDLNSSSKCDDSFGCSSNSSNAVIPSDETVFTPVEEKCRLDVNTELNSSIEDLLEASMPSSDTTVTFKSEVAVLSPEKAENDDTYKDDVNHNQKCKEKMEAEEEEALAIAMAMSASQDALPIVPQLQVENGEDIIIIQQDTPETLPGHTKAKQPYREDTEWLKGQQIGLGAFSSCYQAQDVGTGTLMAVKQVTYVRNTSSEQEEVVEALREEIRMMSHLNHPNIIRMLGATCEKSNYNLFIEWMAGGSVAHLLSKYGAFKESVVINYTEQLLRGLSYLHENQIIHRDVKGANLLIDSTGQRLRIADFGAAARLASKGTGAGEFQGQLLGTIAFMAPEVLRGQQYGRSCDVWSVGCAIIEMACAKPPWNAEKHSNHLALIFKVIIASATTAPSIPSHLSPGLRDVALRCLELQPQDRPPSRELLKHPVFRTTW

SEQ ID NO: 8589 - DNA, 5180 bp, Rattus norvegicus; identical to SEQ ID NO: 8585
  ref <308>: DATABASE ACCESSION NUMBER: EMBL / U48596
  ref <309>: DATABASE ENTRY DATE: 2000-03-04

SEQ ID NO: 8590 - protein, 1493 aa, Rattus norvegicus; identical to SEQ ID NO: 8586
  ref <308>: DATABASE ACCESSION NUMBER: SWISS-Prot / Q62925
  ref <309>: DATABASE ENTRY DATE: 2001-10-16

SEQ ID NO: 8591 - DNA, 5234 bp, Homo sapiens; identical to SEQ ID NO: 8587
  ref <308>: DATABASE ACCESSION NUMBER: Refseq / XM_042066
  ref <309>: DATABASE ENTRY DATE: 2002-08-01

SEQ ID NO: 8592 - protein, 1351 aa, Homo sapiens; identical to SEQ ID NO: 8588
  ref <308>: DATABASE ACCESSION NUMBER: Refseq / XP_042066
  ref <309>: DATABASE ENTRY DATE: 2002-08-01

SEQ ID NO: 8593 - DNA, 4180 bp, Rattus norvegicus
  ref <308>: DATABASE ACCESSION NUMBER: EMBL / U49058
  ref <309>: DATABASE ENTRY DATE: 2000-03-04
tgcggccgccgctagccggctgggctagtgtgagccagtgcgtgagggcgcggggggccgtgtcagcgcgacgcagagcgcagccgccaccaccaaacggacatgttggagccccgcgctgccgctgcctcccagctctcctccagctcacagaactgagcaggggcccgccgcctctgtctgcgctcgaccggcccagcctcgccgcctcggccgcagacccttcctgctcggccttcgccgcttgtcgcctcccgtcctcctcccccccacgccctagggccctgccggctcccggtcctactcagccgcggcgcgaggtctatgtgaccggcgggcccggagcagccgccgccgcaacgcgaacatgggacgccgtcaacgccttcaaccaggagctcttctcacttatggatatgaaaccacccatctctagagccaagatgattcttattactaaagctgctattaaagctattaagctttataagcatgttgttcaaatagtagaaaagttcatcaaaaagtgtaagccagagtacaaggttccaggcctgtatgtcattgactccatcgtgagacagtctcggcaccagtttggaactgataaagatgtttttgggccaagattctctgagaatataactgctacattccagtatttatatctttgtccatctgaagataaggctcacctccacccccagtaaaagtctcttctgaacttccacaagctcccacaaactccatgcctgctgtcccacagctgcccagctccgatgcctttgctgccgtggatcaactgtttcagacgactcaaggccagcagcttcagcagatccttcagacttttcaacaacctccaaaaccacagtctcccgcccttgacagtgctgtgatggctcaggttcaggctatcacagctcagttaaagacagctcctacacaaccacctgagcaaaaaactgcatttgacaagaagctgcttgacagatttgattatgatgatgagccagaagctgtggaagactcgaagaaagaggatgctgtcgccgttgccaccacagcccttgccacggctgcacctcctgtgcccgctgcagccacacctgctgttgctcctgctgtgcctgcgtcctctgctacctctccccctcctccacaggcgccatttgggtaccctggagacggcatgcagcagccagcgtacacacagcatcaaaatgtggaccagtttcaacctcgaatgatggcactgcagcaggatagcatgcagcatcaggtcccacttcctcctaacggacagatgccaggatttgggcttctctctgcaccacctccatttcctcccatgcctcagcccgggatgccccagcccgggatgcctcagcccgggatgcctcagcctgggttgtctcagcctgggttgccccagcccgggatgcctcagcccgggatgcctcagcccgggatgccccagcccgggatgccccagcctgggttggctcagcctgggttggcccagcccgggatgcctcagcccgggatgccccagcccgggatgccccagcccgggatgccccagcctggaatgcctccaactccaccagtacagccaactttccaacctacttttcaaccacaaaatgaaccccattcacaaaagccacatcagcaggaaatggaagtagagcagccttgtgtcacagaggttaagcggcatgtgcctgagagcagaaagtcgagatccaggtcaccaaaaagaagaagatctaggtctggctctaggtctcggagatcccgccaccgtcggtctcggtcccggtccagggataggcgccggcactcgcctcgctctcgctctcaagaaagacgggatcgagaaaaagagagggagcggcggcagaaaggcctccctcagatcaagtcagagactgcaagtgtttgcagcaccacactgtgggtgggacagctggacaaaaggactactcagcaggatgttgccagtctcttagaagagtttggtccaattgaatcaattaacatgattcctcccaggggctgcgcctacatagttatggttcataggcaagacgcataccgtgccctgcagaaactgagccgaggaaactataaagtgaaccagaaatccataaagattgcctgggccttaaacaaaggaataaaggcggattttaaacagtattgggatgttgaacttggtgttacttacattccatgggacaaagtcaaagctgaggagctggagagtttctgtgaaggaggcatgttggacagtgacacacttaacccagattggaaaggcatccccaaaaagcctgaaaatgaagttgcccaaaatggaggtgcagaagcctcccacacagagccagtgtcccccatccctaagcctgtgcccgtgcctgtgcctgcccttcctgttcctgcacctataacagtaccacctccacaggtcccaccgcatcagccgggccctcctgtcgttggtgctctccaaccgcctgctttcactcctcccttagggatcccccctccaggctttggccctggtgttcctcctcctcctcctcctccaccaccattttggggcccaggattcaacccaatgcatttaccaccaggttttcttcctcctggacccccacctcctataactccaccagtatccattcctccacctcacactccaccaataagcatcccaaacttggtgtctggggctagaggaaatgccgagtctgctgacagtgcgaaaatgtatggttctgctgggccacctgctgcacccacgagtctgcccacccctcctgtaacccagcctgtttcactgcttggcactcaaggagttgcacctggtcctgtgattgggctccaggcaccctctaccggtcttctcggtggcagacccggcctgatcccactccagcgccccccaggaatgcctccaccacacttgcaacggttccctatgatgccacctcggcccatgccacctcacatgatgcacaggggtccgccaccaggaccagggggctttgctatgcctccacctcatggaatgaaagggcctttcccaccacatggcccctttgttaggcctggtggaatgccagggcttgggggcccaggcccaggcccaggaggatcagaagacagagatggaaggcaacagcaaccgcagcagcagcagcagcagcagcagcagcagcagcagcagcagcagcagcagcagcagcaaccaccaccacagcagtcacagacacagcagcagccagcgccatcccagcagccagcgccagctcagcagcagccacagcagtttagaaatgataacaggcagcagttcaactcaggtagagaccaagaaaggtttggaagaagatcttttggaagtagggtggaaaatgaccgggagcggtatgggagccgtagtgatgagagagataatagcaaccgtgaaaggagagagtggggaaggaggagccctgagcgggacagacacagagacttggaagagagaagtagacgctctagtgggcatcgggacagagacagggattctagagatagagagtcccgtagagagaaggaagaaagtagaggaaaggagaagcacgaggtggcagacagggcaggtggtaacaaagctgtcgaagctccccttagccaagtgggaaacacagacactgtttcagaacttaataagggggaggccatggccacagtggtaaaacctgaagagtcacctgctgaggctacctcatccgttgaacctgagaaggattctggctcagcagcagaggctcctcgctagagactggatttgacagaatgtgacagtgacacttgggtgtagaacgtgaggtgtacagatgctgtataatattcgctcctgctacatcactccacagtagttggtggggattgtgagcaatttgattgctttccttctatttaaaaatagccacaaaataacaaaaaatactgaagatatattacccctttttttgctgtaactttttaaaagttttgacttttaaaagtttacaaatcctaattagaagtgctctctattttttttttttaatttaagaaaaggtaacggtgaaaagctcctcaaacaatagggatgtttttaataaactctattttcgtaacc

SEQ ID NO: 8594 - DNA, 1703 bp, Rattus norvegicus
  ref <308>: DATABASE ACCESSION NUMBER: EMBL / U49062
  ref <309>: DATABASE ENTRY DATE: 2001-09-11
ggcacgagtctccacgcaccggagcatccagagagtcgccgcgcgccgacggagcggacatgggcagagcgatggtggtcaggctagggctggggttgctgcttctggcactgctcctacccacgcagatttattgcaaccaaacatcggttgcaccattttccgggaaccagagtatctctgctgccccaaatccaactaatgctaccaccagatctgggtgtagctccctgcagtccacagccggtctcctggccctctctctctctctcctacatctctactgttagagactcaggccaagaaacgtctctacttccccatctagacccaccccgaatggcaaccacaagtccaatgtgagtgaccaggaagagacaggtccacatcaaatcggctgttaccattacctcaacagaaaacactgagaatccgaaattcgactggcttaaaggacgcgtgaagggtttgagagctgagagatgccaatatgggatctgctggagttttatgtccgagatgaagacaagcatccaaaattgacgtgatttgctcgaaatgtggcttaagaaatgtggacacttaaaactctcactcgaaatcgggcgtaggtttgatgtagagggagaaggatggggtgtggaatggaggtccattattttcattggttccttcgacctataaggccataatgcagttaggtggtattcaaaagcttctctgatgctatttctgtgtatgttggaaggaactaccaggtgttattttaaatccccgatgtgttgttttgttactactaatttaataggctaaactctaggtgaagtcccacgtcgttgacctctagttcttctctccggaacagaacgttttacaccctccttctgtggctttaggtcacccacccccaaatccagccacccctgagtaaatctgatttcaaaagtcacaacggcaaagcatttcccagtgtcttttctcactcaccacgggtactaagttcacttaggtgagctggttctccagagagcagaattctgttgatctcggctaatctccaaacgctgcgttttattttggcatatgtcgagggcttttcatgatttaaagcgtggtctgttagcaaggccaaaattatgagtcttgaaattctacaggcaaatatgcaacccagcatttgggatgtgaggactggaagctctcacagaattacacaaagtcttttatacaatttctgtaaatacttttttttttttaaagagaaaaacaaaaccatggatcggaataaccacgtttggaatactttggttatcagttcatatttttagatagtttgacattggtcctgtgcctgagagggggtttggttctacagtaagtttttttttcccccaatttccttgatacacacataccttctaaaacacagacatttcctcaaaaaaaaaaaaaaattccttttgttcgcatggtcacacactgatgcttgccattctgggatctaatacggtcacagtagtcttgataaccagaatcatttttttctccgtctttagaaacctacccgggaacaaggagacctcacagacccgaagctactgtgtgtgtgaatgaacactccccttgcctcatacccgaatgctgtacatctatttgattgtatattgtgtttgtgtattgtaaataaaagaaagaaatggctg

SEQ ID NO: 8595 - protein, 76 aa, Rattus norvegicus; identical to SEQ ID NO: 6955
  ref <308>: DATABASE ACCESSION NUMBER: SWISS-Prot / Q07490
  ref <309>: DATABASE ENTRY DATE: 2000-05-30

SEQ ID NO: 8596 - DNA, 284 bp, Homo sapiens; identical to SEQ ID NO: 6956
  misc_feature (1)..(284): n=a, c, g or t
  ref <308>: DATABASE ACCESSION NUMBER: EMBL / AI860750
  ref <309>: DATABASE ENTRY DATE: 2000-03-09

SEQ ID NO: 8597 - DNA, 1703 bp, Rattus norvegicus; identical to SEQ ID NO: 8594
  ref <308>: DATABASE ACCESSION NUMBER: EMBL / U49062
  ref <309>: DATABASE ENTRY DATE: 2001-09-11

SEQ ID NO: 8598 - protein, 76 aa, Rattus norvegicus; identical to SEQ ID NO: 6955
  ref <308>: DATABASE ACCESSION NUMBER: SWISS-Prot / Q07490
  ref <309>: DATABASE ENTRY DATE: 2000-05-30

SEQ ID NO: 8599 - DNA, 284 bp, Homo sapiens; identical to SEQ ID NO: 6956
  misc_feature (1)..(284): n=a, c, g or t
  ref <308>: DATABASE ACCESSION NUMBER: EMBL / AI860750
  ref <309>: DATABASE ENTRY DATE: 2000-03-09

SEQ ID NO: 8600 - DNA, 2412 bp, Rattus norvegicus
  ref <308>: DATABASE ACCESSION NUMBER: EMBL / U49099
  ref <309>: DATABASE ENTRY DATE: 2000-03-04
ggcacgaggatggcggcgggaaccagcaattactgggaagatcttaggaaacaagctcgacagctggaaaatgaacttgacctgaaactagtttccttcagtaaactgtgtacgagttacagtcacagcagcgcccgggatggaggccgcgataggtatagttctgacacaacacccctattaaatggatcaagccaagacaggatgttcgagacaatggccattgaaattgaacagcttttggcgaggcttacaggagtaaacgacaaaatggcagagtatactcacagtgcaggggtgccctccctgaacgcagccctgatgcacacgctacagcgacacagagacattctgcaggattatacacatgaattccataaaaccaaagcaaactttatggcaatacgggaaagggagaatctcatgggatcagtacgaaaagatattgagtcatataaaagtgggtctggagtaaacaacaggagaactgaactgtttctgaaagaacatgaccaccttcgaaactctgatcgtctgatagaagagacaataagcattgctatggcaacaaaagagaatatgacttcgcagagaggaatgctcaagtccattcacagcaagatgaacactctggccaaccgctttcccgccgtcaacagcctgatacaaaggatcaaccttaggaagcggcgcgactcgctcatccttggaggcgtcattggcatctgcaccatcctgttgctgctgtatgcattccactgagaggtcggccccaggactctgcccaccctctgcggcctgctttggcaatggggaacctgcaaaggagagagaccgtccggccatgagcctgccagcagatgaattctaaactgcaccgtggctctgacctggtcggcctgagctgaagccacagtttttctgtgcctatcttttctaatacatattactctgtttttaattttaaaaacaacaaaaggtttcagttgctgcatctccctaggaggtaagcaagcagaagctgagaacctgggctttagtgactggtgaagccagatgaccagcgggcctcatagctggactcctcacagcaccaggctctacatccaaagatggcctcactttcagccacgagattggatgtgaataaaaataattcttgtccttttatttaacacttgtgatgagaagtcagctgtcctttgctgatactccgtgatccaatcgcgtattctgtgtccctaatctcttggcagtcaagaaaaattccatttcccacggattctgtaagatgttggtaggccagcttcatgtttgaggcggtctgaaatggaaagtgctatagaaagggtgtctcttttctgtttcagttgtgagccctgggtcaactactgccaccagcacatcagaatggcgggccttacagaggagctggtcattgctttattatttcttcccttgggctgatatttgcttgtattgataaaaatgcatttccagtgatagcccgtcagtgactgtcatcggccctcgaagtcccatatcatgtgaagcttaatactaggaactgaaggagggacttggttctctgtgaggcctgctcgtgagccactgctgtgagggttgggaggataaaattatgttttgggttttggtggtgggagattattttggagttgttgttggttgggaatgtggtgagggatatagagtaaattagtcgagtatagaagaataggcttaatagggctatgatagctattagtgttgatagggttgagcagttgttttttagaagctcggagataattgctcattttggtaaaaatcctgtgagaggggggagtcctcctagtgataggaggatgatggatgctatggttaggattatgggagttttatttcatgcgagtgagagtgtgttgattgttgttgctgagtttgttatgagtgtaatgaatattggaacagtaagtaggatgtaaattgttaagtttaggagggttaagttagggttgtatggaaggattgctgttattcatcctatgtgggcaattgatgagtatgctatgcatttttcgtgtttgggtctggttaagtcctcctcaggcgccaacaaagactgatgaaattgcgagaatggtggtgatagttgggtttaggagttgataaaattggtatagaattgatagtggagcaattttttgtcatgttagtaagattaatccaatgtgtaggggaattccttgggtgacttcgggtagtcagtagtggaatggggctagtccaagttttatggctagtgaaatgagtattatgttgagtagtatgttattggtttgttgttggagggttcatattcctgattgtttgtagttgaggatgatgactagtaggataattctcgtgccg

SEQ ID NO: 8601 - protein, 250 aa, Rattus norvegicus
  ref <308>: DATABASE ACCESSION NUMBER: SWISS-Prot / Q62931
  ref <309>: DATABASE ENTRY DATE: 2002-06-15
MAAGTSNYWEDLRKQARQLENELDLKLVSFSKLCTSYSHSSARDGGRDRYSSDTTPLLNGSSQDRMFETMAIEIEQLLARLTGVNDKMAEYTHSAGVPSLNAALMHTLQRHRDILQDYTHEFHKTKANFMAIRERENLMGSVRKDIESYKSGSGVNNRRTELFLKEHDHLRNSDRLIEETISIAMATKENMTSQRGMLKSIHSKMNTLANRFPAVNSLIQRINLRKRRDSLILGGVIGICTILLLLYAFH

SEQ ID NO: 8602 - DNA, 999 bp, Homo sapiens
  ref <308>: DATABASE ACCESSION NUMBER: EMBL / AF073926
  ref <309>: DATABASE ENTRY DATE: 2000-03-03
gcacgagcaaagatggcggcagggaccagcagttactgggaagatctcaggaaacaggctcgacagctggaaaatgaacttgacctgaaactagtttccttcagcaaactatgtacaagttacagtcatagcagtacccgagatggaagacgcgacaggtatagttctgatacaacaccccttttaaatggatcaagccaagacagaatgtttgagacaatggcgattgagattgaacaacttttggcaaggcttacaggggtaaatgataaaatggcagaatataccaacagtgcaggtgtcccctccttgaatgcagccctgatgcatacattacagcggcatagagacatattgcaggattatacacatgaattccataaaaccaaagcaaactttatggcaatacgggaaagggagaatcttatgggatcagtacgaaaagatattgagtcatataaaagtgggtctggagtaaacaacagaagaactgagctatttttgaaagaacatgaccaccttcgaaactcagatcgtctgatagaagagacaataagcattgctatggcaacaaaagaaaatatgacttcacagagaggaatgttgaagtcaattcacagcaaaatgaacactttggccaatcgttttcctgctgtaaacagcctgatccagaggatcaacctgaggaagcggcgggactcgctcatcctagggggtgttattgggatctgtaccatcctgttgctgctgtatgcgttccattgatgggacatcttcagggactcttgacagccaccgctttcacaccctggtctggaataaggaaacatcggagggagaagttgactgtcttgataattagcctgaccagcaggatgaatgcaagactgacagtgatggactctgtgacatggtcaggttgagctgaagccacagtttctctgtgctgtgttttctaacacatttttctgtttttaattaaaaaaaaaaaaaaaaaaa

SEQ ID NO: 8603 - protein, 250 aa, Homo sapiens
  ref <308>: DATABASE ACCESSION NUMBER: SWISS-Prot / O95249
  ref <309>: DATABASE ENTRY DATE: 2001-10-16
MAAGTSSYWEDLRKQARQLENELDLKLVSFSKLCTSYSHSSTRDGRRDRYSSDTTPLLNGSSQDRMFETMAIEIEQLLARLTGVNDKMAEYTNSAGVPSLNAALMHTLQRHRDILQDYTHEFHKTKANFMAIRERENLMGSVRKDIESYKSGSGVNNRRTELFLKEHDHLRNSDRLIEETISIAMATKENMTSQRGMLKSIHSKMNTLANRFPAVNSLIQRINLRKRRDSLILGGVIGICTILLLLYAFH

SEQ ID NO: 8604 - DNA, 2539 bp, Rattus norvegicus
  ref <308>: DATABASE ACCESSION NUMBER: EMBL / U49953
  ref <309>: DATABASE ENTRY DATE: 2000-03-04
cccgggcggaaggtaccgccgcacggtgggcgctcctcaccgcttccccacacctcccagtcccactgcacctctaggctgcgcggagtcctctcggctattaccggctctttggagccgcctgtgccccctcagagcccgcgctctccacagtctcctcagagaaggaccccctcagagagcgcaccccgccccttcgcagtccgggcgcgcctcccgctccccgcggcccgcagcgtcccgccctccagagcccggctcgagcggcgagaggagaacgcggggctgccgcccgcgcacactcccgcgctctctctgggtttggctgccgccaggaggaggaggagcggagcgagcgcagaagtagctgctgctgctggtggtgacaatgtcaaataacggcttagacgtccaggacaaacccccagcccctccgatgagaaacaccagcactatgattggagctggcagcaaagaccctggaaccctaaaccacggttccaaacctctgcctccaaacccagaggagaagaaaaagaaggaccggttctatcgatccatcttagctggagataaaacaaataaaaagaaggagaaggagcggccagagatttctcttccttcagattttgagcatacaattcatgttggttttgatgctgtcacaggggagtttacggggatgccagaacagtgggcccgcttgcttcaaacatcaaatatcaccaagtcagagcagaagaaaaacccacaggctgttctggatgtgttggaattttataactccaagaagacctccaatagtcagaagtacatgagttttacagataagtcagctgaagattataattcttctaatactttgaatgtgaagactgtgtctgagaccccagcagtgccaccagtgtcagaagatgaagatgatgatgacgatgctaccccacctccagtgattgctccacgcccagaacacacaaaatctgtatatacacggtctgtgattgaaccacttcctgttactccaactcgggatgtggctacatctcctatttctcctactgagaataacaccactccgccagatgctttgacccggaatactgaaaagcagaagaagaagcctaaaatgtctgatgaggagatcttagagaaattacggagcatagtgagtgtgggcgatcctaagaagaagtacacacgcttcgagaagattggacaaggtgcttcaggcacagtgtacactgcaatggatgtagccacagggcaggaggtggccattaaacagatgaaccttcagcagcagccgaagaaagaactcattattaatgagatcctggtcatgagggaaaacaaaaacccaaacattgtgaactatctggacagttaccttgtgggagatgagctatgggttgtcatggaatacttggccggaggctccttaacagatgtggtgacagaaacctgtatggatgaaggccagatagcagctgtgtgccgagagtgtctacaagctttggagttcctgcattcaaaccaagtcattcacagagacatcaagagtgacaatattctgctgggaatggatggctctgtcaaattaactgactttggattctgtgcacagataactccagagcagagcaaaaggagcaccatggtgggaactccatattggatggcacctgaagttgtgacacgcaaggcctatggacccaaggttgacatctggtccctgggtattatggcaattgaaatgattgagggggagcccccatacctcaatgaaaaccctttgagagccttgtacctcattgctaccaatgggacgccagagcttcagaacccagagaagttgtcagctattttccgggactttttgaaccgctgtcttgagatggatgtggagaagagaggttcagctaaagagctactgcagcatcaattcctgaagattgccaagcctctctccagcctgactccactgattgctgcagcaaaagaggcaaccaagaacaatcactgaaaccacgctcaccccagcctcatgtgccaagccttctatgaaataaacactcgtttcgggaactccgacccctcatgtcctcttctcctttccttgcttctcccatttcctgatctagtgctctcaagactttgatccttggaaaccgtctagcactgaagagaaccgcaaccggatgactaatccagcagaggccatttctaaataggaattccctttagcttgtgggcatggaggggactgatgagcaagggtttacctgaataaacctgtttctacgaaacagaaatctcaaccatcccattccttacccctcacaatcagttcttaactctataaacttatggtttgatagcattatcaatttgctatcagttgaaattgcttttgttttttatttctgtgaccaaattgcccaaacacttcattgtatttgaaaaccagaacagctttgaaatgccacggggcctgataatctgccagggacatgaagaggtcttgtttccctgaacccac

SEQ ID NO: 8605 - protein, 544 aa, Rattus norvegicus
  ref <308>: DATABASE ACCESSION NUMBER: SWISS-Prot / P35465
  ref <309>: DATABASE ENTRY DATE: 2002-06-15
MSNNGLDVQDKPPAPPMRNTSTMIGAGSKDPGTLNHGSKPLPPNPEEKKKKDRFYRSILAGDKTNKKKEKERPEISLPSDFEHTIHVGFDAVTGEFTGMPEQWARLLQTSNITKSEQKKNPQAVLDVLEFYNSKKTSNSQKYMSFTDKSAEDYNSSNTLNVKTVSETPAVPPVSEDEDDDDDATPPPVIAPRPEHTKSVYTRSVIEPLPVTPTRDVATSPISPTENNTTPPDALTRNTEKQKKKPKMSDEEILEKLRSIVSVGDPKKKYTRFEKIGQGASGTVYTAMDVATGQEVAIKQMNLQQQPKKELIINEILVMRENKNPNIVNYLDSYLVGDELWVVMEYLAGGSLTDVVTETCMDEGQIAAVCRECLQALEFLHSNQVIHRDIKSDNILLGMDGSVKLTDFGFCAQITPEQSKRSTMVGTPYWMAPEVVTRKAYGPKVDIWSLGIMAIEMIEGEPPYLNENPLRALYLIATNGTPELQNPEKLSAIFRDFLNRCLEMDVEKRGSAKELLQHQFLKIAKPLSSLTPLIAAAKEATKNNH

SEQ ID NO: 8606 - DNA, 1975 bp, Rattus norvegicus
  ref <308>: DATABASE ACCESSION NUMBER: EMBL / U50185
  ref <309>: DATABASE ENTRY DATE: 2000-03-04
cgcgagcagctgaagcgctggatcggctccgagacggacctcgagcctcccgtggtgaagcgccagaagaccaaggtgaagttcgacgatggcgccgtcttcctcgccgcctgctccagcggcgacacggacgaggtcctcaagctgctgcaccgcggcgccgacatcaattacgccaatgtggacggactcaccgccctgcaccaggcttgcattgatgacaatgttgatatggtgaagtttctggtagaaaatggagcaaatatcaatcaacctgacaatgaaggctggattccactccatgcagccgcttcctgtggatatctggatattgcagaatttttgattggtcaaggagcacatgtaggagctgtcaacagtgaaggtgacacacctttagatattgcagaggaggaagcaatggaagagctacttcaaaatgaggttaatcggcaaggtgttgatatagaagcagctcgaaaagaagaggaacgcataatgcttagagacgcgaggcagtggttgaacagtggtcacatcagtgacgtccggcatgcaaagtccggaggcacagcactccacgtggcagcggccaaagggtatacagaagttttaaaacttttaatacaggcaggctatgatgttaatattaaagattatgatggctggacacctcttcatgctgcagctcactggggtaaagaagaagcatgtcggattttagtggacaatctgtgtgatatggagacggtcaacaaagtgggccaaacagcctttgatgtagcagatgaagacattttgggatatctagaggagttgcaaaaaaaacaaaatctgctccatagtgaaaagcgggataagaaatctccactgattgaatcaacagcaaatatggaaaataatcaaccacagaagaattttaaaaacaaggaaacgttgattattgagccagagaaaaatgcatctcgaatcgagtctctggagcaagaaaaggctgatgaggaggaggaaggcaagaaggatgagtccagctgctccagtgaggaggatgaggaggatgactccgagtccgaagcggagacagataagacaaaacccatggcttctgtaactaatgctcacactgccagcactcaggcagctcctgccgctgtgacaacacctactctgtcttccaaccaggggacccctacatcacctgttaaaaagtttcctacatcaactacaaaaatttctcccgaagaagaagaaagaaaagatgaatctcctgcatcctggaggttaggacttagaaagactggcagttatggtgccctggctgagatcactgcatctaaagaagctcagaaggagaaagacactgcaggcgtgatacgttcagcttcgagtcccagactctcgtcctctttggataataaagaaaaggagaaagacaataaaggaacaagacttgcatatgtcgcccctacaatcccaaggcgactaggcagtacgtctgacattgaagagaaggaaaacagagagtcttcaaatttgcgaacaagtagttcttacacaagaagaaaatgggaagatgatcttaaaaaaaatagttcaatcaatgaaggatctacttaccatagaagttgctcctttggtagaagacaagatgatttgattagttgtagtgttccaagcaccacatcaacaccaacagttacctctccagctgggcttcagaaaagcttcctttccagcacaagcactactgcaaagactcccccgggttcctccccagcaggcacacagagcaggtcatacctcactcctgttagggatgaagagtctgaatcccacaggaaagcaagatctagacaagcaagacagtctagacggtcaacacagggggtgacactgactgacctccaggaagccgaaaagacaataggaagaagccgttctacgagaaccagagaacaagaaaacgaagaaaaag

SEQ ID NO: 8607 - protein, 658 aa, Rattus norvegicus
  ref <308>: DATABASE ACCESSION NUMBER: SWISS-Prot / AAA92961
  ref <309>: DATABASE ENTRY DATE: 2001-12-01
REQLKRWIGSETDLEPPVVKRQKTKVKFDDGAVFLAACSSGDTDEVLKLLHRGADINYANVDGLTALHQACIDDNVDMVKFLVENGANINQPDNEGWIPLHAAASCGYLDIAEFLIGQGAHVGAVNSEGDTPLDIAEEEAMEELLQNEVNRQGVDIEAARKEEERIMLRDARQWLNSGHISDVRHAKSGGTALHVAAAKGYTEVLKLLIQAGYDVNIKDYDGWTPLHAAAHWGKEEACRILVDNLCDMETVNKVGQTAFDVADEDILGYLEELQKKQNLLHSEKRDKKSPLIESTANMENNQPQKNFKNKETLIIEPEKNASRIESLEQEKADEEEEGKKDESSCSSEEDEEDDSESEAETDKTKPMASVTNAHTASTQAAPAAVTTPTLSSNQGTPTSPVKKFPTSTTKISPEEEERKDESPASWRLGLRKTGSYGALAEITASKEAQKEKDTAGVIRSASSPRLSSSLDNKEKEKDNKGTRLAYVAPTIPRRLGSTSDIEEKENRESSNLRTSSSYTRRKWEDDLKKNSSINEGSTYHRSCSFGRRQDDLISCSVPSTTSTPTVTSPAGLQKSFLSSTSTTAKTPPGSSPAGTQSRSYLTPVRDEESESHRKARSRQARQSRRSTQGVTLTDLQEAEKTIGRSRSTRTREQENEEK

SEQ ID NO: 8608 - DNA, 4616 bp, Homo sapiens; identical to SEQ ID NO: 7740

SEQ ID NO: 8609 - protein, 1030 aa, Homo sapiens; identical to SEQ ID NO: 7741

SEQ ID NO: 8610 - DNA, 1975 bp, Rattus norvegicus; identical to SEQ ID NO: 8606
  ref <308>: DATABASE ACCESSION NUMBER: EMBL / U50185
  ref <309>: DATABASE ENTRY DATE: 2000-03-04

SEQ ID NO: 8611 - protein, 658 aa, Rattus norvegicus; identical to SEQ ID NO: 8607
  ref <308>: DATABASE ACCESSION NUMBER: SWISS-Prot / AAA92961
  ref <309>: DATABASE ENTRY DATE: 2001-12-01

SEQ ID NO: 8612 - DNA, 6113 bp, Homo sapiens
  ref <308>: DATABASE ACCESSION NUMBER: Refseq / XM_028840
  ref <309>: DATABASE ENTRY DATE: 2002-08-01
ccccggtgcaccgtgctagcccccagccagggcgttggggagggcggtggccatggccagtcacgtggacctgctgacggagctgcagctgctggagaaggtgcccacgctggagcggctgcgggctgcccagaagcgccgggcccagcagctgaagaaatgggcacagtacgagcaggacttgcagcaccgcaagcgaaagcatgagcggaagcgcagcacgggcggccgccgcaagaaagtgtccttcgaggccagcgtggccctgctggaggcctcgctgaggaacgacgccgaggaagtacgctacttcctgaagaataaggtcagccctgatttgtgcaatgaggacggactcacagccctacaccagtgctgcatcgacaactttgaggaaattgtgaagctgctcctctcccatggtgccaatgtgaacgccaaggacaacgagctgtggacacctctccatgctgcagccacctgcggccacatcaacctggtgaagatcctcgttcagtatggggccgacttgcttgctgtcaactcggatgggaacatgccatatgacctctgcgaggatgaacccaccctggatgtcatcgagacctgcatggcataccagggcatcacccaagagaaaatcaacgagatgcgggtggctcctgagcagcagatgattgcggacatccactgcatgatcgcagcgggccaggacctggactggatagatgcccagggtgccacactgctgcacatagctggagccaatggatacctgcgggcagctgagctcctcctggaccatggagtgcgtgtggatgtgaaggactgggatggctgggagcccctgcatgcagctgccttctggggacagatgcagatggcagagctattggtgtcccatggagctagtctcagtgcaaggacatccatggatgagatgccaatagacctgtgcgaggaggaagagttcaaggtcctgctgctggagctaaaacacaagcatgatgtgatcatgaagtcacagctgaggcacaagtcatccttgagccggaggacctccagcgcaggcagccgtgggaaggtggtgcggcgagccagcctgtcggacaggaccaacctgtataggaaggagtatgagggagaggccatcctgtggcagcggagtgcagctgaggatcagcggacctccacctacaacggggacatcagggagaccaggacagaccaagagaataaggaccctaaccccaggctggagaagcccgtgctactctccgaatttcctaccaagatcccacgaggtgaactggacatgcctgttgagaatggcctccgggctccggtcagtgcctaccagtatgcgctggccaacggggatgtctggaaggtgcatgaggtgcctgactacagcatggcctatggcaaccctggcgtggccgacgccaccccgccctggagcagctacaaggaacagagccctcagacgcttctggagctgaagcggcagcgggctgcagccaagctgctcagccaccccttccttagcacacacctgggcagcagcatggccaggacgggcgagagtagcagtgaaggcaaggcccccttgatcggaggcagaacttcaccgtacagcagcaatgggacctcggtatattacacggtcaccagcggagatcccccactcttaaagttcaaggcccccatagaggagatggaggagaaggtgcatggctgttgccgtatctcctagtctccgtgtgatggaggagggagatgcctggggaggggctcctggaatccaggccagcccaacagccctggctggggaggtgtcagggcagctggggagaggtgggctctgcttttcagaggaactcagaccccagccctcagctggctgcccatagcatcccatgtcccacgtcccgtggttctgcttcctgctgcatcgtctgccatctgacacaaggcctgtcgtggcctcctggttcactctgctgtctgatcttgggagggtgggcttgagatcccagctctattcttggtataaaggcttctccggatcagtacatgcatgtcacattaacacacacacacacacacatatacacacacacacaagctcgatcagtgtgtgtaggaatgacatacctgggctcaggggaagcaagggggcttagaatttgtggggtattcccaaaaggatggaagttaagactcagagtctcattaccactgccaatgtggttttagcaggggaggggacctgctaagctgagacccatagtcctgctcagagttatcccaaagtctgagccaccagccacacctgacaggggtgagaagtcctcgctgtgttcagagggagccaggaatctacatgggtagatgagatagacacagacctgctccccgcagccttgttgagagccacacttctgcccatgccaggagccagctgtgtgaccatccaggggtggagggggaaaaccaggcaatttcgttcctggaatcaaccaaatcatgttttcctcttggatggaagtgtcaaaggcagaagggtgtgggagggggacaaggtcagtatttaccaaagtgtatctgattttaaaaattcctttagtctgtaaaactcctagagggagggaggtaactgaattcacttctttttgtggatcgtatcaaggtcactgggttttactggctggtgctgggaaaatgaagctaagtgaggagcttccattggaatgcttttccagggagagaggccagttaatttaaaaaaaacagtcgctagttaacagcgacagagcccagcaccctggggtctttgtgaatatccagactgtttcagcccagcccatctcagccaaccctccttagactgagctgtcagagcaagcaattaggggccagcctgcctccacctcccacccccttccacctccatcagtcatgtgtgcagagtcagtgctcgggatcccgggcccagcttttgcctttttggggatgcttggtgagacagatttgccagtcagcccttttgagttcccgcctcacccaggggctcccagcctgcacttgcaggagtggtgatgccccaagtctgcgaatccagggtgcacgtggtcaatatcccctcctgcattcaggagagccatggtagggctagagttgggtcttgcccagccctgcagtttcatagtcccagccttcctggtgctggggagggaggactgtgaatggctgttctcccctcactgctgagtctcccaggaccccctttggagatgcccatggcatgggcactgcccacaggctcagccagaacctcttggtgtacccgataagctgcaggttatcccttgctctgtgcgccttttatttgtccttaaactacctccttagagctctgaaggggtctcctagttccagattttaatttggggaacagatctgggttctttttaaccctcttctttctcagtctatgagaaacttgccctgaggggcacctgggctaggggcttgggactggaagaccatccccgccttgtgccacaactttggtcatgggatctgctctttgtcattcttagccccctactgtggcccccatagccccataacccagagagggagctggacttcagggagcctgagtgatgctttcccaggagcagggcagctggctggaccagaaagtagagggcccatgggagtgactgcacccttggtggctgctggaaggggagaggttctcagcatcaggccacctccaccccaatgccaggatagatgtattctagagtaggggtggaggcggcccaggaggctgaagacaggtgcacagatgcttcccacgaccttgccatttggggtgggctcttcaacatctcaggctgtggctggaacaggacaggatgatctaaaacacacgtaccattggctgtaaaacagtatgagcccagactgacgctgaaatccctcatgagccaaccttagctacaaggtagggagttctgagggaagccgcgtgctcctcaggagagagctgtttaggttttccgatctttttgctcaggggccaaacactgaaggcacgtactgcccaacccactgagcgcctgaggccattccctccttttccgcatgcctcctgcctcctgggctattcctctccacccagaaggctgggaatcccagctgattccctgacaggagccgacttcacacacaggtgactctcaggcattggctcatgttttcagccagggataaaccatcccttcttggggctttaagtccctggggagctttccctgtaggtctcctgggtgttgagagacaagttggagaccaacctccaatgaatgagccgcggtcattcattaattcactcacgtaatttactgagtagctgcaacatgccagcctctacgttaggttctgcggataaaggaggaataagacagagtcaggagaactgttccttgtggtttccgtcccttggggaccacaggcatcagcagtcccattcaagtcacctgaggcaaagtgtctgcatcttcgtccagcgaccctttgcttttcggctcctagaatccttagagtctgaattcctttagctgggaacagctgtcatggtcacccctggataacatttgccaccaagtatagatgctggatcttgggttccaggcagacatcatccaggtccatctggaactttcagtgatagctgccttcagccagcatctttgggggactctataatagcagcttgagatcagtgtctagaagactgttctgcaatttgctgccaaatgcatctcaggtttttaaagtcattgtttcttgctcatggtggctcatttattacatagtcccctcaccccactaatggataatgggaggaaaagttgctgcttccttcagcatcaaagcctttccttgggaatctgcctccctccatggcaggggtggattcgggagctgggagtaaccaggcaaagtcaaccagatgcctagctcctgctgagacccaggtcctatggcagctcctcattagattaaaggagaccacttccaaagcaggtgctgcatggctcaccatcatatgccccaaacaactgaaagttggcggttatcaccagactgtgagtttctggcaagtagcttggggaagctgaataaactctaggcccagggctactaaagacttcaggatagaattctccatcaaatatacagcataagtaaaactgctctgcactgtttaatccatttccaaggggcttagaaaagctaacaagggtgtgtcccctgtcctgccccaccggtttgctggctttgtaataacataagaccattgtggttgttggtgtcagataccttcccatcctgagctctctcacctacctgctctctctcctagagcaggatactggggtacttttaagaagggtgctccttttaagatgcccagaaaagctgtatttaactcttgctatttgtaacttggggatggtctcccctgccccagggcacataagagcaaaggctccaatggtcagtggatgactctgcaaaagtgaccccctgtgccagaagctatagccctctccccaacaggtctctcttgttggccagagggcctgcttcccatgggcattgcaagtgccaccgtgcggggcctggctctgcacacccaggaaaagtctgcagacccccagccctccgcaataattcaccagaccagaagccactggtgtacagagaacacttaaaaaaatgtattttatgtgaaaaaaaattaaaactctgtatactgtatcagcagctttgtgtaaaaatggcaatcaagagagtctaatatatttaaaacttttttaaaaaaaatcttcgcagatctttgatatcgtactgaggtaacttccacgtagccccttgccacgcggcaccggtgggccttgggtccaaaactgtggctcagccacatcccaaagggggcacatgtccctggagttgcttccagctgccaaggcctgtgacagaattcgctgttaagagtttttaattaaaattattaaattccttttaataac

SEQ ID NO: 8613 - protein, 567 aa, Homo sapiens
  ref <308>: DATABASE ACCESSION NUMBER: Refseq / XP_028840
  ref <309>: DATABASE ENTRY DATE: 2002-08-01
MASHVDLLTELQLLEKVPTLERLRAAQKRRAQQLKKWAQYEQDLQHRKRKHERKRSTGGRRKKVSFEASVALLEASLRNDAEEVRYFLKNKVSPDLCNEDGLTALHQCCIDNFEEIVKLLLSHGANVNAKDNELWTPLHAAATCGHINLVKILVQYGADLLAVNSDGNMPYDLCEDEPTLDVIETCMAYQGITQEKINEMRVAPEQQMIADIHCMIAAGQDLDWIDAQGATLLHIAGANGYLRAAELLLDHGVRVDVKDWDGWEPLHAAAFWGQMQMAELLVSHGASLSARTSMDEMPIDLCEEEEFKVLLLELKHKHDVIMKSQLRHKSSLSRRTSSAGSRGKVVRRASLSDRTNLYRKEYEGEAILWQRSAAEDQRTSTYNGDIRETRTDQENKDPNPRLEKPVLLSEFPTKIPRGELDMPVENGLRAPVSAYQYALANGDVWKVHEVPDYSMAYGNPGVADATPPWSSYKEQSPQTLLELKRQRAAAKLLSHPFLSTHLGSSMARTGESSSEGKAPLIGGRTSPYSSNGTSVYYTVTSGDPPLLKFKAPIEEMEEKVHGCCRIS

SEQ ID NO: 8614 - DNA, 1975 bp, Rattus norvegicus; identical to SEQ ID NO: 8606
  ref <308>: DATABASE ACCESSION NUMBER: EMBL / U50185
  ref <309>: DATABASE ENTRY DATE: 2000-03-04

SEQ ID NO: 8615 - protein, 658 aa, Rattus norvegicus; identical to SEQ ID NO: 8607
  ref <308>: DATABASE ACCESSION NUMBER: SWISS-Prot / AAA92961
  ref <309>: DATABASE ENTRY DATE: 2001-12-01

SEQ ID NO: 8616 - DNA, 4616 bp, Homo sapiens; identical to SEQ ID NO: 7740

SEQ ID NO: 8617 - protein, 1030 aa, Homo sapiens; identical to SEQ ID NO: 7741

SEQ ID NO: 8618 - DNA, 1975 bp, Rattus norvegicus; identical to SEQ ID NO: 8606
  ref <308>: DATABASE ACCESSION NUMBER: EMBL / U50185
  ref <309>: DATABASE ENTRY DATE: 2000-03-04

SEQ ID NO: 8619 - protein, 658 aa, Rattus norvegicus; identical to SEQ ID NO: 8607
  ref <308>: DATABASE ACCESSION NUMBER: SWISS-Prot / AAA92961
  ref <309>: DATABASE ENTRY DATE: 2001-12-01

SEQ ID NO: 8620 - DNA, 6113 bp, Homo sapiens; identical to SEQ ID NO: 8612
  ref <308>: DATABASE ACCESSION NUMBER: Refseq / XM_028840
  ref <309>: DATABASE ENTRY DATE: 2002-08-01

SEQ ID NO: 8621 - protein, 567 aa, Homo sapiens; identical to SEQ ID NO: 8613
  ref <308>: DATABASE ACCESSION NUMBER: Refseq / XP_028840
  ref <309>: DATABASE ENTRY DATE: 2002-08-01

SEQ ID NO: 8622 - DNA, 3046 bp, Rattus norvegicus
  ref <308>: DATABASE ACCESSION NUMBER: EMBL / U50353
  ref <309>: DATABASE ENTRY DATE: 1999-01-06
ctccatttctctgccatatgtccagccagtgggacattcagaagaccttatgtctcaaggaacaagggcatgaatgttttgccaatgtggctctggagaactgtttagccctattggtggccaggagaggttgcatgctgttctttcagagtatgacttaaaatagatacttcaatcatatggcagactccattagaacctacaggagaattaatgtaaaatctcagtatggtatagtgtgcttactctgctgaatggcttaactagttccggcagttgtaactgaggtcctaggcaggtttactgagaactagttttcaaatccttctctttgtgctcattgaacatgtgttctagtcatctccacaaagccaaagtcctcatttacaggccacacatttcctgtatattctttcatacgtcctgataccagtgattaaactttagccacagagctatgcagcaaagctacttggagtgaatagcaatggacaaatgggtgttatctagtgttggactagataaataagaagtcctacttgtaagccctgctttgttcccagcttttccaaattgcttaactgcccttgcaccacaggtgtttcaggtatccaatagaaattaaccacaaaaaaattaagacatcacaagtgacccttaaataggagaagtctgtccaagatgtttcagctgctcctgtattccaaggcctggaaagaagagcgctgtgtctcttgctctgctctccctgcatacgccaaagtctgtaagtaatgaatgtaattttcaaagtatgggtatgtccctgaggcctaggtgcaagggactccctaaaggcaagggtgctctggaggaggccatgtcatcagaccccttctagtgttcttctatctggggctctggtatctgaaatggacagtaattcctgttaaggggaaactcagaaatctttcccaaaatacaaatgtcacccttgtcattacagtagagataataacataatctttaaaatgtctgtgtactataagaaatatctcttcttttcagtttgctttggctactgaattgcccacgatgtctatatattttaggtattagtttcttttcaaatgtatgctttgctaacttttacccccatgttctagcttcctatgtcaccgtgatgcttgtttcctcacctgtgcaaagactctaagggctgcaaagcccagtggaatcccacaatcccccttggccacctgctttgttgccagaacttttggtttcatgcaagacatcactttacagacccagtctgatctactctagtagtttatgctttacgtcttatgtctaggtctttactttagttgagaaaaggtcaatgtggtcaacaagcattaagtctctaaaccatcaggatcctggtgtcacccctgagtgtcaccttcagaaaacagattaagagcacatcttcagagatttagagttattggtccttagacttaatgcatgaaagtgctgtttcttttctctttttaacattaaaatacaaatactcattcaaattttagtacataatccaaatggtaacaggaaaccatagcagggtcctcctaatcctcaccagcttaaaccaaagatagccaccaaacattggaacaaagtttgttataagggatgctgtaagatcaaaggtatcaagaaattttgggggacaaatccctttccttatcaatgtagacactttctacctgcagggcctatgtcagattcttctcttcacatccaccaccacatacacagaaacacacacacacacacacacacacacacacacggtttctgacattttttcatcccttaggaaaccacagccatgaggaccctcactctgctcaccacccttctcctgctggccctccacacccaggcagaatctccccaaggaagcactaaggaagctccagatgaggagcaggatatttccgtattctttggaggggataaaggcactgctctccaagatgcaggtgagagacgttatcatgctagagacatggaggagagaggagtggggtatgctctgaatttgggtcacccgtttaactttattacttctttatgttcctcatttcacagcaagagacaaatagatcagtttcttgctgcaaagatctgtttggcggatatcatggggtttaatacataagaagactcagtgactgtttttttctagatctaaatgactagacttgcattttattttgtctattacattgtaaaaattggagatgtgtgtgtaagtatttatgtaatggcaggcacacatagaatgataacaaaattatgacaaaaggacatcggtctttagttttgtgattactatttgtatttattcctattgatcatgattgttcatgctgctgtcactaacaaccaaagcagcgagcccacttcacacagcacaaatgttgcccaagattcttcctccctgctgattcaggcactaagtacttcctatgatgtctgtttccccagctgtgaaggcaggcgtgacctgctcttgtagaacctcaagctgtcgttttggagaaaggctctctggggcatgtcgtctcaatggccgcatctaccgactctgttgctgagcacaaagaagaagaagaagaagaagaagaagaagaagaagaagaagaagaagaagaagaagaagaagaagaagaagaagaagaagaagaagaagaagaggaagaagaagaagaagaagaagaagaagaagaagaagaagaagaagaagaagaagaagaagaagaagaagaagaatccatttgtcatatgacttgaaggagactgttatttgtagtatgttgtgtcctagacctttctctttctttatatccaaataaacttcttacagcaagttatttctgtgtgtgcttgattaatatctcctagcaagactctgagaaccaagtaacagaatgatagaacgaaattcttatcttgggtctgtaggagtgtccaggttatcatcgattcttctgatgaataataagaaaggtaa

SEQ ID NO: 8623 - protein, 87 aa, Rattus norvegicus
  ref <308>: DATABASE ACCESSION NUMBER: SWISS-Prot / AAC99551
  ref <309>: DATABASE ENTRY DATE: 2002-06-15
MRTLTLLTTLLLLALHTQAESPQGSTKEAPDEEQDISVFFGGDKGTALQDAAVKAGVTCSCRTSSCRFGERLSGACRLNGRIYRLCC

SEQ ID NO: 8624 - DNA, 449 bp, Homo sapiens; identical to SEQ ID NO: 8168
  ref <308>: DATABASE ACCESSION NUMBER: Refseq / NM_021010
  ref <309>: DATABASE ENTRY DATE: 2001-02-03

SEQ ID NO: 8625 - protein, 94 aa, Homo sapiens; identical to SEQ ID NO: 8169
  ref <308>: DATABASE ACCESSION NUMBER: Refseq / NP_066290
  ref <309>: DATABASE ENTRY DATE: 2001-02-03

SEQ ID NO: 8626 - DNA, 1563 bp, Rattus norvegicus
  ref <308>: DATABASE ACCESSION NUMBER: EMBL / U50412
  ref <309>: DATABASE ENTRY DATE: 2000-03-04
cgcctcgggggctggagccacttggtagaagaacagcttctttggattttttttccccggtgggatactggcagttcaaagcgaaaccgttgaaatgcataacctgcaaacactgccccctaaaccacccaagcccacttctatagccaacaacagcatgaacaacaatatgtccttacaggatgctgaatggtactggggagatatctcaagggaagaagtaaatgaaaaactccgagacactgctgatgggacctttctggtacgagatgcatccactaaaatgcacggtgactacactctcacactaaggaaaggaggaaataacaaatcaatcaaaatctttcaccgagatgggaaatacggtttctctgatccattaaccttcaactctgtggttgaattaataacccactaccggaatgagtccttagctcagtacaatcccaagctggatgtgaagttactctacccagtgtctaaataccagcaggatcaagttgtcaaggaagataatattgaagctgtagggaaaaaattacatgaatataatactcaatttcaagaaaaaagtcgggaatatgatagattatatgaggaatacatccgtacttcccaggaaatacagatgaaaagaacagctatcgaagcatttaatgaaaccataaaaatattcgaagagcagtgccaaacccaggagcggtacagcaaagaatacatagagaagtttaaacgcgaaggcaacgagaaggaaattcaaaggataatgcataatcacgataagctgaagtctcggatcagcgagatcatcgacagcaggaggagactggaggaagacttgaagaagcaggcagccgagtatcgcgagatcgacaagcgcatgaatagcattaagccggacctcattcagctgagaaagacaagagatcaatacttgatgtggctgacgcagaaaggggtccggcagaagaagctgaacgaatggttgggaaacgaaaacacagaagaccaatactcactgctagaagatgacgaggatttgccccaccatgatgagaagacgtggaatgtggggagcagcaaccgaaacaaagccgagaacctattgcgagggaaacgagatggcactttcctggtccgggagagcagtaagcagggctgctatgcctgctctgtagtggtagatggcgaagtcaaacattgcgtcatcaacaagactgccaccggctatggcttcgccgagccctacaacctgtacagctccctgaaagagctggtgctacattaccaacacacctccctggtgcagcacaatgactccctcaatgtcacactagcatacccagtatatgcacaacagaggcgatgaagcgctgccctccctcggatacagttcctcaccttcaagccacccaaggcctctgggaagcaaagggctcctctccagcccgacctgtgaactgagctgcggaatcgaagccggatgtctgcacatgggactagagctttcttggacaaaaagaagtcggggaagacatgcagcctagggctgttggatgaccg

SEQ ID NO: 8627 - protein, 724 aa, Rattus norvegicus; identical to SEQ ID NO: 2140
  ref <308>: DATABASE ACCESSION NUMBER: SWISS-Prot / Q63787
  ref <309>: DATABASE ENTRY DATE: 2002-06-15

SEQ ID NO: 8628 - DNA, 3362 bp, Homo sapiens; identical to SEQ ID NO: 2141
  ref <308>: DATABASE ACCESSION NUMBER: Refseq / XM_043865
  ref <309>: DATABASE ENTRY DATE: 2002-08-01

SEQ ID NO: 8629 - protein, 724 aa, Homo sapiens; identical to SEQ ID NO: 2142
  ref <308>: DATABASE ACCESSION NUMBER: Refseq / XP_043865
  ref <309>: DATABASE ENTRY DATE: 2002-08-01

SEQ ID NO: 8630 - DNA, 1749 bp, Rattus norvegicus
  ref <308>: DATABASE ACCESSION NUMBER: EMBL / U50736
  ref <309>: DATABASE ENTRY DATE: 1999-02-01
cccgggcaggtccaggggttcagccacaagagggaaaaacatagactaacggctgccaacatgatggtttttcgagtagaggagctggtaacgggcaaaaagaacagcaatgggtcctcaggggagttccttcctggcgagttcagaaatggagagtatgaagctgctgttgccttggagaaacaagaggacttgaagacacttccagccaacagtgtgaacctgggggaagaacaacggaaaagtgagaaagttcgagaggcagagctcaaaaagaaaaaactagaacaaagatcaaagcttgaaaacttagaagaccttgaaataattgttcaactgaagaaaagaaaaaaatacaagaaaactaaagttccagttgtgaaggaaccggagcctgaaattattactgaacctgtggatgtgccaaggtttctgaaagctgcactggagaacaaactgccagttgtagagaaattcctgtcagacaagaacagccccgacgtctgcgatgagtataaacggaccgctctccatagagcatgcttagaaggacacttggcgatcgtggagaagttaatggaggctggagcccagattgaattccgagatatgctggaatccacagccatccactgggcatgtcgtggaggaaacctggatgtcctgaaactgttgctaaacaaaggtgccaaaatcagtgcccgagacaagctgctcagcacagcgctgcacgtggcggtgaggaccggtcactacgagtgtgctgagcacctcatcgcctgcgaggcggatctcaatgccaaggacagagaaggagacacccctctgcatgatgcggtgaggttgaatcgctacaagatgatccggctcttgatgaccttcggtgcggacctcaatgtcaagaactgtgctgggaagatccctatggatctggtgttgcactggcagaatggaaccaaagcgatattcgacagcctcaaggagaatgcctacaaaaactcgcgcatagctacgttctgaggaaagagactcgacaggagctgttctcagccgttttcaaaacatttcccagcagcggagcaaccagctataacacccagcttttgtttgccagccaaatagggagataagctttaaagacgcttcatggaaggaccctgggttagagatgctaacatgtcctctagcgatgctcaccatttttatctgctcctatttatttatttatttatttcatagcactggtagtcaggttttcatgagcatcattttgggggagcaagacttaatctgtgtgtaacattcggagtcttcccgtggctctaaaaccgcgtgggtgaatggtgtctaatctcccttttgtgtcctcacttgcattaaagctactcaaggtatttttgaaagccaagggttggtcggtcgctgcagcccttctctggattctcactgctgatatccgaatgaagcagcagaaggtgtacaggaatgcagaaggggatgggagcagttctgcaggacctaagccgtggctcgccaggcacccacaggtgtggtttgccggatcacacagtgccgaggtgaaggccacgtcaggagcgtgtgtggagggggatggagggagtaggcaatggggcctcactaacctgaggtcgatgagaggaaaaagtccaaaaggacatgccctgtaaatgtgtaaatggtattgtgttgtatgcatattttatattcctaataaatgcaaactaattc

SEQ ID NO: 8631 - protein, 320 aa, Rattus norvegicus
  misc_feature (1)..(320): Xaa=Unknown amino acid
MMVFRVEELVTGKKNSNGSSGEFLPGEFRNGEYEAAVALEKQEDLKTLPANSVNLGEEQRKSEKVREAELKKKKLEQRSKLENLEDLEIIVQLKKRKKYKKTKVPVVKEPEPEIITEPVDVPRFLKAALENKLPVVEKFLSDKNSPDVCDEYKRTALHRACLEGHLAIVEKLMEAGAQIEFRDMLESTAIHWACRGGNLDVLKLLLNKGAKISARDKLLSTALHVAVRTGHYECAEHLIACEADLNAKDREGDTPLHDAVRLNRYKMIRLLMTFGADLNVKNCAGKIPMDLVLHWQNGTKAIFDSLKENAYKNSRIATFX

SEQ ID NO: 8632 - DNA, 476 bp, Homo sapiens
  ref <308>: DATABASE ACCESSION NUMBER: EMBL / BF081129
  ref <309>: DATABASE ENTRY DATE: 2001-08-31
cgtatctccgttctctgtctttggcgttgaggtctgcctcacaggcgataagatgctccgcgcactcatagtggccagtcctcaccgccacatgcagcgctgtgctgagcaacttatctcgggcgctaatttttgctcctttattcagcaacaattttaaaacatccaggtttcctccacggcttgcccagtgaatggctgtggattcaagcatatcacggaattcgatctgggctccagcttccattaacttctccacaattgccaaatgtccttccaagcatgctctatgaagagctgtccgtttatcaatgatttcaggttctggttcctttacaactggaactttagttttcctgtattttttccttttcttcagttgaatgattatttcaaggtcttctaaattttcaagctttgatcttttgttctagttttttctttttgagctctgcctctcgttgtttctcgctttt

SEQ ID NO: 8633 - DNA, 2450 bp, Rattus norvegicus
  ref <308>: DATABASE ACCESSION NUMBER: EMBL / U51013
  ref <309>: DATABASE ENTRY DATE: 2000-03-04
cgcggccgcgcgcgggctgagcggcggcgatggcgcaaggcggacggcgggcgcgcggcgcggggccctagctgggcgggcgtgctcgggacggcgcggtggccgcgcagccatggccggggagctgcgccgggcgctgctggagctgctgacgcgtccggggaactcgcgctgcgctgactgcggagccccggatcctgactgggcgtcctacaccctgggtgtgttcatctgtttgagctgctctgggatccaccggaacatcccccaggtcagcaaggtgaagtcagttcgtctggatgcctgggatgagacccaagttgagttcatgacatctcatgggaacgaggctgccagagccacatttgagtccaaagtaccacccttctactaccggcccacgttctccgactgccaactcctacgtgagcagtggatccgtgccaagtatgagaggcaagaattccttcatgtggagaaacaggaaccgtactctacaggataccgtgagggccttctctggaaaggcggtgggccgggacaatggacagttcttaagtcggaagtttgtgctgacagaacgagagggtggcgtctgaaatacttcaacaaaaatgacgctaaggagcctaaggctgtcatgaagattgagcacctgaatgccaccttccagccagccaagatcggccacccccatggcctgcaggtcacctacttgaaggacaacagcactcgcaacatctttatctaccacgaggatggcaaggagatcgtggactggttcaatgcgctgcgagcagcccgcttccactacctgcaggtggctttcccaggagccagtgacgcagatctggtgcccaagctctctaggaactacctgaaggaaggctacatggagaagacagggcccaagcagacagaaggctttcggaagcgctggttcaccatggacgaccggaggctcatgtacttcaaagaccctctggatgcctttgcccgaggggaagtcttcattggcagcaaggaaagtggttacacggtcctggagggcctcccaccgtcaacccagagtcaccactggccccatggcatcaccattgtcacccctgaccgaaaattcctgttcacgtgtgagacagagtcagaccagagggagtggatagcagccttccagaaggtggtggacaggcccatgctgcctcaggagtacgcagtggaagcccacttcaagcatataaaccctaaggaagagagcccggaggccccaggattctgcactcgtgtggcggctcagctggacagcaggagagcctatgttcctcggtgtggcccaggcatggccaggtggggctcaggcaagcccatcagatagacagatttttcagaacctcattaaagttgaaggcagacttggttctgggcctcacttgaacccctggccctgtcatgacgctcccagccatgcccagccgacccacccattttcctgctgctggaggaagccctgcctcccaacttgagcaggaccctactaactcttctggcctgaggggatcttggcctcaggacaggacttggtgctgggctgctgtggacagccatggacagccatgaacagctgtggcagcgggctggcctggctgctggactcactctgggatgtgcagcatgcctcccctcctctcactcttccacttcaaacaagtatattattgagctacctgctgtgtgtcagtcagggatcaagggtcaggggtcagctctccttcccctagggctgacccagctggagggattgggggtcaggtatttttccaagagaactgtgtgcataggccctgcacccacctgtttgccccacccccccacccccaggccccttgggacagctggctggagaaaccagggagggagacctagcctgcagggtgctgtgcatggagcccaggagcggtttccttgggatgacaggaggccccccaatcccccatctgactttttggagctgtcagtgccccagctcggtgctgtccccagcattgtaacccatgccctctgccctgcccttacagtctttgagccccttgatgaatgaaagcccaaggaccaagaagtggtcattggcaggaatggctgccccccagccctgattgctgctggcaggccagtagttaaagctacctgtatttatttcccccactgccctctggccaccccaacagatgggctcccttctatgggatccccaaaagggcaggtcctggccagctggacagctggggagcattgatgggggacccatctgtgaatgacctggtccctcctcaaagctaagccctagggacctggggggaggggtccttagttgggcttctgctgccctgctgtcatgtcgcctggaataaagtgtggctctggcgttgtaaaaaaaaaaaaaaaaaaaaaaaaaa

SEQ ID NO: 8634 - protein, 419 aa, Rattus norvegicus
  ref <308>: DATABASE ACCESSION NUMBER: SWISS-Prot / AAC52683
  ref <309>: DATABASE ENTRY DATE: 2003-02-01
MAGELRRALLELLTRPGNSRCADCGAPDPDWASYTLGVFICLSCSGIHRNIPQVSKVKSVRLDAWDETQVEFMTSHGNEAARATFESKVPPFYYRPTFSDCQLLREQWIRAKYERQEFLHVEKQEPYSTGYREGLLWKGGGPGQWTVLKSEVCADRTRGWRLKYFNKNDAKEPKAVMKIEHLNATFQPAKIGHPHGLQVTYLKDNSTRNIFIYHEDGKEIVDWFNALRAARFHYLQVAFPGASDADLVPKLSRNYLKEGYMEKTGPKQTEGFRKRWFTMDDRRLMYFKDPLDAFARGEVFIGSKESGYTVLEGLPPSTQSHHWPHGITIVTPDRKFLFTCETESDQREWIAAFQKVVDRPMLPQEYAVEAHFKHINPKEESPEAPGFCTRVAAQLDSRRAYVPRCGPGMARWGSGKPIR

SEQ ID NO: 8635 - DNA, 2378 bp, Homo sapiens
  ref <308>: DATABASE ACCESSION NUMBER: EMBL / AF082324
  ref <309>: DATABASE ENTRY DATE: 1999-02-02
aattccctccgccgcggtcgctgagcgagtgcggcgggaatgcggaaccggcgcgcgggctgaggccgcccgggatggcgcaggggcggcggcggcgggcggcctgcgcggggccctagcgagccgggctgacgctcccggccccggccccggcatcggcatcgcgggcgcatcgcggccatggccaaggagcggcgcagggcggtcctggagctgctgcagcggccggggaacgcgcgctgcgcggactgcggcgccccggatcccgactgggcctcctacactctgggcgtcttcatctgcctgagctgctcgggaatccaccggaatatcccccaggtcagcaaggtgaagtccgtccgcctggacgcctgggaggaggcccaagtggagttcatggcctcccacgggaacgacgccgcgagagccaggtttgagtccaaagtaccctccttctactaccggcccacgccctccgactgccagctccttcgagagcagtggatccgggccaagtacgagcgacaggagttcatctacccggagaagcaggagccctactcggcagggtaccgtgagggttttctctggaagcgtggccgggacaacgggcagtttttgagccggaagtttgtgctgacagaacgagagggtgctctgaagtatttcaacagaaatgatgccaaggagcccaaggccgtgatgaagatcgagcacctgaatgccaccttccagccggccaagatcggccacccccacggcctgcaggtcacctacctgaaggacaacagcacccgtaacatcttcatctaccatgaggacgggaaggagattgtggactggttcaatgcactccgagctgctcgcttccactacctgcaggtggcattcccaggggccagcgacgcagatctggtgccaaagctctccaggaactacctgaaggaaggctacatggagaagacggggcccaagcaaacggaaggcttccggaagcgctggttcaccatggatgaccgcaggctcatgtacttcaaagaccccctggacgccttcgcccgaggggaagtcttcattggcagcaaggagagtggctacacggtgctgcatgggttcccgccgtccacccagggccaccactggccacatggcatcaccatcgtcacgcccgaccgcaagtttctgtttgcctgcgagacggagtccgaccagagggagtgggtggcggccttccagaaggcggtggacaggcccatgctgccccaggagtacgcagtggaggcgcacttcaagcataaaccttagcgagtgcggctggaggaccacggacattggactcactgtggctggacggaggggacccgtggatgggggggctctggcgtcctgaggccacctggccccacctgctcctcagggcagcccggcgcggccaggtagggcccgagcttcagcttccaggatgcttctctggaacctcaaggcaggcagcccaggccctgggcctgatctctaaccccgtcatgctgctgctgaccacacccagccaacctgcccctccctgacccggggccccctttcctccagggcccagtctggctcccgagctcagacacagcccccaggagccgcccaccacggctgtgggaacttccaggcctcagcgcagagccctgcttggggccagcacggtgggcagctgccggccgctggggactgggccctgctcgcatgccgccccgccctccccccacctccacgactatttattgagcgcctgttgtgtgtcacggggctatgagggccgtggggtgtttgggtggattatccacacaggtcccggcccctgcccgggctggagttgccacagcctgtgctcctggtcctcacctggaggggccagcaggctgccgtcccaccacacgtggcctctgcgcccagcacggtgctcgccgacagtggtgtctgaacccttggggacgagggcctgggccgcggtgaggccaccagaggcaggagtggccctgggggtcccgggcactgtcgcgcttgctgcaggcggcccagccgtgtatttatttttcacctatctccttcctgtcaaggcaggccgggctccagggctccccttgcgtggggcatgtaggtgggggaggcgtctgcaggtcacctggggggcccagccctctcccagccttgcctggctgagctgtgttccaggggagccctggacaagccctcataggcagggagggggtttccgaggccaggcatccgccgccccgtgtcgcatcctggaataaaatgtggctctggcatggttaaaaaaaaaaaaaaaaaaaaaaaaaaaaaaaaaaaaaaaaaaaaaaaaaaaaaaa

SEQ ID NO: 8636 - protein, 374 aa, Homo sapiens
  ref <308>: DATABASE ACCESSION NUMBER: Refseq / NP_006860
  ref <309>: DATABASE ENTRY DATE: 2002-11-05
MAKERRRAVLELLQRPGNARCADCGAPDPDWASYTLGVFICLSCSGIHRNIPQVSKVKSVRLDAWEEAQVEFMASHGNDAARARFESKVPSFYYRPTPSDCQLLREQWIRAKYERQEFIYPEKQEPYSAGYREGFLWKRGRDNGQFLSRKFVLTEREGALKYFNRNDAKEPKAVMKIEHLNATFQPAKIGHPHGLQVTYLKDNSTRNIFIYHEDGKEIVDWFNALRAARFHYLQVAFPGASDADLVPKLSRNYLKEGYMEKTGPKQTEGFRKRWFTMDDRRLMYFKDPLDAFARGEVFIGSKESGYTVLHGFPPSTQGHHWPHGITIVTPDRKFLFACETESDQREWVAAFQKAVDRPMLPQEYAVEAHFKHKP

SEQ ID NO: 8637 - DNA, 530 bp, Rattus norvegicus
  ref <308>: DATABASE ACCESSION NUMBER: EMBL / U52530
  ref <309>: DATABASE ENTRY DATE: 2000-03-04
tctagagaagggggagcggttggcacagccccagatctgcaccattgacgtctacatggtcatggtcaagtgctggatgattgatgagaatattcgcccaacctttaaagaactagccaatgagtttaccaggatggcccgtgacccaccaaggtatctggtcatcaagagagcgagtgggcctggaacacctcctgcggcagaaccctctgttctgaccaccaaagagttgcaggaggcagagctggagccagaactggacctagacctagacttggaggcagaggaggagggcctggccacctccctgggttctgctcccagcttgcctacgggaacgctcacccggccacgtgggagccagagccttttaagtccctcatctgggtacatgcccatgaaccagagcagtctcggagaggcttgtctggattctgcggttttggggggtcgtgaacagttctcccgtcccatctctctgcacccaattccacgggggcgtccagcatcagagtcatcagaggggcata

SEQ ID NO: 8638 - protein, 1339 aa, Rattus norvegicus
  ref <308>: DATABASE ACCESSION NUMBER: SWISS-Prot / AAC53050
  ref <309>: DATABASE ENTRY DATE: 2002-06-15
MRATGTLQVLCFLLSLARGSEMGNSQAVCPGTLNGLSVTGDADNQYQTLYKLYEKCEVVMGNLEIVLTGHNADLSFLQWIREVTGYVLVAMNEFSVLPLPNLRVVRGTQVYDGKFAIFVMLNYNTNSSHALRQLKFTQLTEILSGGVYIEKNDKLCHMDTIDWRDIVRVRGAEIVVKNNGANCPPCHEVCKGRCWGPGPDDCQILTKTICAPQCNGRCFGPNPNQCCHDECAGGCSGPQDTDCFACRRFNDSGACVPRCPEPLVYNKLTFQLEPNPHTKYQYGGVCVASCPHNFVVDQTFCVRACPPDKMEVDKHGLKMCEPCGGLCPKACEGTGSGSRYQTVDSSNIDGFVNCTKILGNLDFLITGLNVDPWHKIPALDPEKLNVFRTVREITGYLNIQSWPPHMHNFSVFSNLTTIGGRSLYNRGFSLLIMKNLNVTSLGFRSLKEISAGRVYISANQQLCYHHSLNWTRLLRGPSEERLDIKYDRPLGECLAEGKVCDPLCSSGGCWGPGPGQCLSCRNYSREGVCVTHCNFLQGEPREFVHEAQCFSCHPECLPMEGTSTCNGSGSDACARCAHFRDGPHCVNSCPHGILGAKGPIYKYPDAQNECRPCHENCTQGCNGPELQDCLGQAEVLMSKPHLVIAVTVGLAVILMILGGSFLYWRGRRIQNKRAMRRYLERGESIEPLDPSEKANKVLARIFKETELRKLKVLGSGVFGTVHKGIWIPEGESIKIPVCIKVIEDKSGRQSFQAVTDHMLAVGSLDHAHIVRLLGLCPGSSLQLVTQYLPLGSLLDHVKQHRETLGPQLLLNWGVQIAKGMYYLEEHSMVHRDLALRNVMLKSPSQVQVADFGVADLLPPDDKQLLHSEAKTPIKWMALESIHFGKYTHQSDVWSYGVTVWELMTFGAEPYAGLRLAEIPDLLEKGERLAQPQICTIDVYMVMVKCWMIDENIRPTFKELANEFTRMARDPPRYLVIKRASGPGTPPAAEPSVLTTKELQEAELEPELDLDLDLEAEEEGLATSLGSALSLPTGTLTRPRGSQSLLSPSSGYMPMNQSSLGEACLDSAVLGGREQFSRPISLHPIPRGRPASESSEGHVTGSEAELQEKVSVCRSRSRSRSPRPRGDSAYHSQRHSLLTPVTPLSPPGLEEEDGNGYVMPDTHLRGASSSREGTLSSVGLSSVLGTEEEDEDEEYEYMNRKRRGSPPRPPRPGSLEELGYEYMDVGSDLSASLGSTQSCPLHPMAIVPSAGTTPDEDYEYMNRRRGAGGAGGDYAAMGACPAAEQGYEEMRAFQGPGHHAPHVRYARLKTLRSLEATDSAFDNPDYWHSRLFPKANAQRT

SEQ ID NO: 8639 - DNA, 4879 bp, Homo sapiens
  ref <308>: DATABASE ACCESSION NUMBER: EMBL / M29366
  ref <309>: DATABASE ENTRY DATE: 2000-03-04
accaattcgccagcggttcaggtggctcttgcctcgatgtcctagcctaggggcccccgggccggacttggctgggctcccttcaccctctgcggagtcatgagggcgaacgacgctctgcaggtgctgggcttgcttttcagcctggcccggggctccgaggtgggcaactctcaggcagtgtgtcctgggactctgaatggcctgagtgtgaccggcgatgctgagaaccaataccagacactgtacaagctctacgagaggtgtgaggtggtgatggggaaccttgagattgtgctcacgggacacaatgccgacctctccttcctgcagtggattcgagaagtgacaggctatgtcctcgtggccatgaatgaattctctactctaccattgcccaacctccgcgtggtgcgagggacccaggtctacgatgggaagtttgccatcttcgtcatgttgaactataacaccaactccagccacgctctgcgccagctccgcttgactcagctcaccgagattctgtcagggggtgtttatattgagaagaacgataagctttgtcacatggacacaattgactggagggacatcgtgagggaccgagatgctgagatagtggtgaaggacaatggcagaagctgtcccccctgtcatgaggtttgcaaggggcgatgctggggtcctggatcagaagactgccagacattgaccaagaccatctgtgctcctcagtgtaatggtcactgctttgggcccaaccccaaccagtgctgccatgatgagtgtgccgggggctgctcaggccctcaggacacagactgctttgcctgccggcacttcaatgacagtggagcctgtgtacctcgctgtccacagcctcttgtctacaacaagctaactttccagctggaacccaatccccacaccaagtatcagtatggaggagtttgtgtagccagctgtccccataactttgtggtggatcaaacatcctgtgtcagggcctgtcctcctgacaagatggaagtagataaaaatgggctcaagatgtgtgagccttgtgggggactatgtcccaaagcctgtgagggaacaggctctgggagccgcttccagactgtggactcgagcaacattgatggatttgtgaactgcaccaagatcctgggcaacctggactttctgatcaccggcctcaatggagacccctggcacaagatccctgccctggacccagagaagctcaatgtcttccggacagtacgggagatcacaggttacctgaacatccagtcctggccgccccacatgcacaacttcagtgttttttccaatttgacaaccattggaggcagaagcctctacaaccggggcttctcattgttgatcatgaagaacttgaatgtcacatctctgggcttccgatccctgaaggaaattagtgctgggcgtatctatataagtgccaataggcagctctgctaccaccactctttgaactggaccaaggtgcttcgggggcctacggaagagcgactagacatcaagcataatcggccgcgcagagactgcgtggcagagggcaaagtgtgtgacccactgtgctcctctgggggatgctggggcccaggccctggtcagtgcttgtcctgtcgaaattatagccgaggaggtgtctgtgtgacccactgcaactttctgaatggggagcctcgagaatttgcccatgaggccgaatgcttctcctgccacccggaatgccaacccatggagggcactgccacatgcaatggctcgggctctgatacttgtgctcaatgtgcccattttcgagatgggccccactgtgtgagcagctgcccccatggagtcctaggtgccaagggcccaatctacaagtacccagatgttcagaatgaatgtcggccctgccatgagaactgcacccaggggtgtaaaggaccagagcttcaagactgtttaggacaaacactggtgctgatcggcaaaacccatctgacaatggctttgacagtgatagcaggattggtagtgattttcatgatgctgggcggcacttttctctactggcgtgggcgccggattcagaataaaagggctatgaggcgatacttggaacggggtgagagcatagagcctctggaccccagtgagaaggctaacaaagtcttggccagaatcttcaaagagacagagctaaggaagcttaaagtgcttggctcgggtgtctttggaactgtgcacaaaggagtgtggatccctgagggtgaatcaatcaagattccagtctgcattaaagtcattgaggacaagagtggacggcagagttttcaagctgtgacagatcatatgctggccattggcagcctggaccatgcccacattgtaaggctgctgggactatgcccagggtcatctctgcagcttgtcactcaatatttgcctctgggttctctgctggatcatgtgagacaacaccggggggcactggggccacagctgctgctcaactggggagtacaaattgccaagggaatgtactaccttgaggaacatggtatggtgcatagaaacctggctgcccgaaacgtgctactcaagtcacccagtcaggttcaggtggcagattttggtgtggctgacctgctgcctcctgatgataagcagctgctatacagtgaggccaagactccaattaagtggatggcccttgagagtatccactttgggaaatacacacaccagagtgatgtctggagctatggtgtgacagtttgggagttgatgaccttcggggcagagccctatgcagggctacgattggctgaagtaccagacctgctagagaagggggagcggttggcacagccccagatctgcacaattgatgtctacatggtgatggtcaagtgttggatgattgatgagaacattcgcccaacctttaaagaactagccaatgagttcaccaggatggcccgagacccaccacggtatctggtcataaagagagagagtgggcctggaatagcccctgggccagagccccatggtctgacaaacaagaagctagaggaagtagagctggagccagaactagacctagacctagacttggaagcagaggaggacaacctggcaaccaccacactgggctccgccctcagcctaccagttggaacacttaatcggccacgtgggagccagagccttttaagtccatcatctggatacatgcccatgaaccagggtaatcttggggagtcttgccaggagtctgcagtttctgggagcagtgaacggtgcccccgtccagtctctctacacccaatgccacggggatgcctggcatcagagtcatcagaggggcatgtaacaggctctgaggctgagctccaggagaaagtgtcaatgtgtagaagccggagcaggagccggagcccacggccacgcggagatagcgcctaccattcccagcgccacagtctgctgactcctgttaccccactctccccacccgggttagaggaagaggatgtcaacggttatgtcatgccagatacacacctcaaaggtactccctcctcccgggaaggcaccctttcttcagtgggtcttagttctgtcctgggtactgaagaagaagatgaagatgaggagtatgaatacatgaaccggaggagaaggcacagtccacctcatccccctaggccaagttcccttgaggagctgggttatgagtacatggatgtggggtcagacctcagtgcctctctgggcagcacacagagttgcccactccaccctgtacccatcatgcccactgcaggcacaactccagatgaagactatgaatatatgaatcggcaacgagatggaggtggtcctgggggtgattatgcagccatgggggcctgcccagcatctgagcaagggtatgaagagatgagagcttttcaggggcctggacatcaggccccccatgtccattatgcccgcctaaaaactctacgtagcttagaggctacagactctgcctttgataaccctgattactggcatagcaggcttttccccaaggctaatgcccagagaacgtaactcctgctccctgtggcactcagggagcatttaatggcagctagtgcctttagagggtaccgtcttctccctattccctctctctcccaggtcccagccccttttccccagtcccagacaattccattcaatctttggaggcttttaaacattttgacacaaaattcttatggtatgtagccagctgtgcactttcttctctttcccaaccccaggaaaggttttccttattttgtgtgctttcccagtcccattcctcagcttcttcacaggcactcctggagatatgaaggattactctccatatcccttcctctcaggctcttgactacttggaactaggctcttatgtgtgcctttgtttcccatcagactgtcaagaagaggaaagggaggaaacctagcagaggaaagtgtaattttggtttatgactcttaaccccctagaaagacagaagcttaaaatctgtgaagaaagaggttaggagtagatattgattactatcataattcagcacttaactatgagccaggcatcatactaaacttcacctacattatctcacttagtcctttatcatccttaaaacaattctgtgacatacatattatctcattttacacaaagggaagtcgggcatggtggctcatgcctgtaatctcagcactttgggaggctgaggcagaaggattacctgaggcaaggagtttgagaccagcttagccaacatagtaagacccccatctcttt

SEQ ID NO: 8640 - protein, 1342 aa, Homo sapiens
  ref <308>: DATABASE ACCESSION NUMBER: SWISS-Prot / P21860
  ref <309>: DATABASE ENTRY DATE: 2002-06-15
MRANDALQVLGLLFSLARGSEVGNSQAVCPGTLNGLSVTGDAENQYQTLYKLYERCEVVMGNLEIVLTGHNADLSFLQWIREVTGYVLVAMNEFSTLPLPNLRVVRGTQVYDGKFAIFVMLNYNTNSSHALRQLRLTQLTEILSGGVYIEKNDKLCHMDTIDWRDIVRDRDAEIVVKDNGRSCPPCHEVCKGRCWGPGSEDCQTLTKTICAPQCNGHCFGPNPNQCCHDECAGGCSGPQDTDCFACRHFNDSGACVPRCPQPLVYNKLTFQLEPNPHTKYQYGGVCVASCPHNFVVDQTSCVRACPPDKMEVDKNGLKMCEPCGGLCPKACEGTGSGSRFQTVDSSNIDGFVNCTKILGNLDFLITGLNGDPWHKIPALDPEKLNVFRTVREITGYLNIQSWPPHMHNFSVFSNLTTIGGRSLYNRGFSLLIMKNLNVTSLGFRSLKEISAGRIYISANRQLCYHHSLNWTKVLRGPTEERLDIKHNRPRRDCVAEGKVCDPLCSSGGCWGPGPGQCLSCRNYSRGGVCVTHCNFLNGEPREFAHEAECFSCHPECQPMEGTATCNGSGSDTCAQCAHFRDGPHCVSSCPHGVLGAKGPIYKYPDVQNECRPCHENCTQGCKGPELQDCLGQTLVLIGKTHLTMALTVIAGLVVIFMMLGGTFLYWRGRRIQNKRAMRRYLERGESIEPLDPSEKANKVLARIFKETELRKLKVLGSGVFGTVHKGVWIPEGESIKIPVCIKVIEDKSGRQSFQAVTDHMLAIGSLDHAHIVRLLGLCPGSSLQLVTQYLPLGSLLDHVRQHRGALGPQLLLNWGVQIAKGMYYLEEHGMVHRNLAARNVLLKSPSQVQVADFGVADLLPPDDKQLLYSEAKTPIKWMALESIHFGKYTHQSDVWSYGVTVWELMTFGAEPYAGLRLAEVPDLLEKGERLAQPQICTIDVYMVMVKCWMIDENIRPTFKELANEFTRMARDPPRYLVIKRESGPGIAPGPEPHGLTNKKLEEVELEPELDLDLDLEAEEDNLATTTLGSALSLPVGTLNRPRGSQSLLSPSSGYMPMNQGNLGESCQESAVSGSSERCPRPVSLHPMPRGCLASESSEGHVTGSEAELQEKVSMCRSRSRSRSPRPRGDSAYHSQRHSLLTPVTPLSPPGLEEEDVNGYVMPDTHLKGTPSSREGTLSSVGLSSVLGTEEEDEDEEYEYMNRRRRHSPPHPPRPSSLEELGYEYMDVGSDLSASLGSTQSCPLHPVPIMPTAGTTPDEDYEYMNRQRDGGGPGGDYAAMGACPASEQGYEEMRAFQGPGHQAPHVHYARLKTLRSLEATDSAFDNPDYWHSRLFPKANAQRT

SEQ ID NO: 8641 - DNA, 312 bp, Rattus norvegicus
  ref <308>: DATABASE ACCESSION NUMBER: EMBL / U52663
  ref <309>: DATABASE ENTRY DATE: 2000-03-04
cttattactttgcaatttccacaattttcagccttctttatgcttctcaacagcatataaacctttttaaactgcacgtaaataaaatttattagccatttgtaagttcccgattttatgatgaacgttgagcccttggatagaaaagggtgagagacacatttaaaaatgggccgtctttttttcccctttgtctcgtcttgttttgtttaaagcagatcatgaccgcaagctcgagtcaagttctggaagagtcctgggaagattccgaggtatgcctgtgacctttcagaatctctgtgtctggcccgg

SEQ ID NO: 8642 - protein, 976 aa, Rattus norvegicus; identical to SEQ ID NO: 2372
  ref <308>: DATABASE ACCESSION NUMBER: SWISS-Prot / AAC05607
  ref <309>: DATABASE ENTRY DATE: 2002-06-15

SEQ ID NO: 8643 - DNA, 2580 bp, Homo sapiens
  ref <308>: DATABASE ACCESSION NUMBER: EMBL / AF010472
  ref <309>: DATABASE ENTRY DATE: 2000-03-03
aagaggtttaaagaaactaccagaccattttccaatgaatgtcttggtaccaccagacccgtagttcctattgattcatcagattttgcattggatattcgcatgcctggggttacacctaaacagtccgatacatacttctgcatgtctatgcgaataccagtggatgaggaagccttcgtgattgacttcaagcctcgagccagcatggatactgtccatcacatgttactttttggatgcaatatgccttcatccactggaagttactggttttgtgatgaaggaacctgtacagataaagccaatattctgtatgcctgggcgagaaatgctccccctacccggctccccaaaggtgttggattcagagttggaggagagactggaagtaaatactttgtactacaggtacactatggggatattagtgcttttagagataataacaaggactgttctggtgtgtccttacacctcacacgtctgccacagcctttaattgctggcatgtaccttatgatgtctgttgacactgttatcccagcaggagaaaaagtggtgaattctgacatttcatgccattataaaaattatccaatgcatgtctttgcctatagagttcacactcaccatttaggtaaggtagtaagtggatacagagtaagaaatggacagtggacactgattggacggcagagccctcagctgccacaggctttctaccctgtggggcatccagttgatgtaagttttggtgacctactggctgcaagatgtgtattcactggtgaaggaaggacagaagccacacacattggtggcacgtctagtgatgaaatgtgcaacttatacattatgtattacatggaagccaagcatgcagtttctttcatgacctgtacccagaatgtagctccagatatgttcagaaccataccaccagaggccaacattccaattcccgtgaagtctgatatggttatgatgcatgaacatcataaagaaacagaatataaagataagattcctttactacagcagccaaaacgagaagaagaagaagtgttagaccagggtgatttctattcactactttccaagctgctaggagaaagggaagatgttgttcatgtgcacaaatataatcctacagaaaaggcagaatcagagtcagacctggtagctgagattgcaaatgtagtccaaaaaaaggatcttggtcgatctgatgccagagagggtgcagaacatgagaggggtaatgctattcttgtcagagacagaattcacaaattccacagactagtatctaccttgaggccaccagagagcagagttttctcattacagcagcccccacctggtgaaggcacctgggaaccagaacacacaggagatttccacatggaagaggcactggattggcctggagtatacttgttaccaggccaggtttctggggtggctctagaccctaagaataacctggtgattttccacagaggtgaccatgtctgggatggaaactcgtttgacagcaagtttgtttaccagcaaataggactcggaccaattgaagaagacactattcttgtcatagatccaaataatgctgcagtactccagtccagtggaaaaaatctgttttacttgccacatggcttgagtatagataaagatgggaattattgggtcacagacgtggctctccatcaggtgttcaaactggatccaaacaataaagaaggccctgtattaatcctgggaaggagcatgcaaccaggcagtgaccagaatcacttctgtcaacccactgatgtggctgtggatccaggcactggagccatttatgtatcagatggttactgcaacagcaggattgtgcagttttcaccaagtggaaagttcatcacacagtggggagaagagtcttcagggagcagtcctctgccaggccagttcactgttcctcacagcttggctcttgtgcctcttttgggccaattatgtgtggcagaccgggaaaatggtcggatccagtgttttaaaactgacaccaaagaatttgtgagagagattaagcattcatcatttggaagaaatgtatttgcaatttcatatataccaggcttgctctttgcagtgaatgggaagcctcattttggggaccaagaacctgtacaaggatttgtgatgaacttttccaatggggaaattatagacatcttcaagccagtgcgcaagcactttgatatgcctcatgatattgttgcatctgaagatgggactgtgtacattggagatgctcataccaacaccgtgtggaagttcaccttgactgagaaattggaacatcgatcagttaaaaaggctggcattgaggtccaggaaatcaaaggaaagggaagtggaggcttaaaccttggtaatttctttgcaagccgtaagggctacagtcgaaaagggtttgaccggcttagcactgagggcagtgaccaagagaaagaggatgatggaagtgaatcagaagaggagtattcagcacctctgcctgcgctcgcaccttcctcctcctga

SEQ ID NO: 8644 - protein, 974 aa, Homo sapiens [sequence omitted]

SEQ ID NO: 8645 - DNA, 487 bp, Rattus norvegicus
  ref <308>: DATABASE ACCESSION NUMBER: EMBL / U52950
  ref <309>: DATABASE ENTRY DATE: 2000-03-04
gcagagcagaggagcggcgggagaggaacacttctcccaggctttagcagagccggcaggatggcgaccgtggtggtggaagccaccgagccggagccatcgggcagcatcggcaacccggcggcgaccacctcgcccagcctgtcgcaccgcttcctagacagcaagttctacttgctggtggtggtcggcgagacggtgaccgaagagcacctgaggcgtgccatcggcaacatcgagctggggatccgatcgtgggagacaaacctgatcgagtgcaacttggaccaagagctcaaacttttcgtgtctcgacactccgcgagattctctcctgaagttccaggacaaaagatcctccatcaccgaagtgacgtcttagaaactgtagttctgatcaacccttcggatgaagcagtcagcaccgaggtgcgtttggtgatcactgacgccgcccgccataaattgctggtgctctccggacagt

SEQ ID NO: 8646 - protein, 2459 aa, Rattus norvegicus
  ref <308>: DATABASE ACCESSION NUMBER: SWISS-Prot / AAB17068
  ref <309>: DATABASE ENTRY DATE: 2002-06-15
MATVVVEATEPEPSGSIGNPAATTSPSLSHRFLDSKFYLLVVVGETVTEEHLRRAIGNIELGIRSWETNLIECNLDQELKLFVSRHSARFSPEVPGQKILHHRSDVLETVVLINPSDEAVSTEVRLMITDAARHKLLVLTGQCFENTGELILQSGSFSFQNFIEIFTDQEIGELLSTTHPANKASLTLFCPEEGDWKNSNLDRHNLQDFINIKLNSASILPEMEGLSEFTEYLSESVEVPSPFDILEPPTSGGFLKLSKPCCYIFPGGRGDSALFAVNGFNMLINGGSERKSCFWKLIRHLDRVDSILLTHIGDDNLPGINSMLQRKIAELEEESQGSTSNSDWMKNLISPDLGVVFLNVPENLKNPEPNIKMKRSTEEACFTLQYLNKLSMKPEPLFRSVGNAIEPVILFQKMGVGKLKMYVLNPVKSSKEMQYFMQQWTGTNKDKAELILPNGQEVDIPISYLASVSSLIVWHPANPAEKIIRVLFPGNSTQYNILEGLEKLKHLDFLKQPLATQKDLTGQVSTPPVKQVKLKQRADSRESLKPATKPLSSKSVRKESKEEAPEATKASQVEKTPKVESKEKVIVKKDKPGKVESKPSVTEKEVPSKEEQSPVKAEVAEKAATESKPKVTKDKVVKKEIKTKPEEKKEEKPKKEVAKKEDKTPLKKDEKPKKEEAKKEIKKEIKKEEKKELKKEVKKETPLKDAKKEVKKDEKKEVKKEEKEPKKEIKKISKDIKKSTPLSDTKKPAALKPKVAKKEEPTKKEPIAAGKLKDKGKVKVIKKEGKTTEAAATAVGTAAVAAAAGVAASGPAKELEAERSLMSSPEDLTKDFEELKAEEIDVAKDIKPQLELIEDEEKLKETEPGEAYVIQKETEVSKGSAESPDEGITTTEGEGECEQTPEELEPVEKQGVDDIEKFEDEGAGFEESSEAGDYEEKAETEEAEEPEEDGEDNVSGSASKHSPTEDEEIAKAEADVHIKEKRESVASGDDRAEEDMDEALEKGEAEQSEEEGEEEEDKAEDAREEDHEPDKTEAEDYVMAVVDKAAEAGVTEDQYDFLGTPAKQPGVQSPSREPASSIHDETLPGGSESEATASDEENREDQPEEFTATSGYTQSTIEISSEPTPMDEMSTPRDVMTDETNNEETESPSQEFVNITKYESSLYSQEYSKPVVASFNGLSDGSKTDATDGRDYNASASTISPPSSMEEDKFSKSALRDAYRPEETDVKTGAELDIKDVSDERLSPAKSPSLSPSPPSPIEKTPLGERSVNFSLTPNEIKASAEGEATAVVSPGVTQAVVEEHCASPEEKTLEVVSPSQSVTGSAGHTPYYQSPTDEKSSHLPTEVTENAQAVPVSFEFTEAKDENERSSISPMDEPVPDSESPIEKVLSPLRSPPLIGSESAYEDFLSADDKALGRRSESPFEGKNGKQGFSDKESPVSDLTSDLYQDKQEEKRAGFIPIKEDFSPEKKASDAEIMSSQSALALDERKLGGDGSPTQVDVSQFGSFKEDTKMSISEGTVSDKSATPVDEGAEDTYSHMEGVASVSTASVATSSFPEPTTDDVSPSLHAEVGSPHSTEVDDSLSVSVVQTPTTFQETEMSPSKEECPRPMSISPPDFSPKTAKSRTPVQDHRSEQSSMSIEFGQESPEHSLAMDFSRQSPDHPTVGAGMLHITENGPTEVDYSPSDIQDSSLSHKIPPTEEPSYTQDNDLSELISVSQVEASPSTSSAHTPSQIASPLQEDTLSDVVPPRDMSLYASLASEKVQSLEGEKLSPKSDISPLTPRESSPTYSPGFSDSTSGAKESTAAYQTSSSPPIDAAAAEPYGFRSSMLFDTMQHHLALSRDLTTSSVEKDNGGKTPGDFNYAYQKPESTTESPDEEDYDYESHEKTIQAHDVGGYYYEKTERTIKSPCDSGYSYETIEKTTKTPEDGGYSCEITEKTTRTPEEGGYSYEISEKTTRTPEVSGYTYEKTERSRRLLDDISNGYDDTEDGGHTLGDCSYSYETTEKITSFPESESYSYETTTKTTRSPDTSAYCYETMEKITKTPQASTYSYETSDRCYTPERKSPSEARQDVDLCLVSSCEFKHPKTELSPSFINPNPLEWFAGEEPTEESERPLTQSGGAPPPSGGKQQGRQCDETPPTSVSESAPSQTDSDVPPETEECPSITADANLDSEDESETIPTDKTVTYKHMDPPPAPMQDRSPSPRHPDVSMVDPEALAIEQNLGKALKKDLKEKAKTKKPGTKTKSSSPVKKGDGKSKPSAASPKPGALKESSDKVSRVASPKKKESVEKAMKTTTTPEVKATRGEEKDKETKNAANASASKSVKTATAGPGTTKTAKSSTVPPGLPVYLDLCYIPNHSNSKNVDVEFFKRVRSSYYVVSGNDPAAEEPSRAVLDALLEGKAQWGSNMQVTLIPTHDSEVMREWYQETHEKQQDLNIMVLASSSTVVMQDESFPACKIEL

SEQ ID NO: 8647 - DNA, 9416 bp, Homo sapiens
  ref <308>: DATABASE ACCESSION NUMBER: Refseq / NM_005909
  ref <309>: DATABASE ENTRY DATE: 2001-05-22
aagcgcgccgcctccccgccctctctcactccccgctcctctccgccgcgcactctcgcggcgctgggagagggcggagggggaggcggcgcgcggcgccagaggaggggggacgcagggggcggagcggagacagtaccttcggagataatcctttctcctgccgcagtggagaggagcggccggagcgagacacttcgccgaggcacagcagccggcaggatggcgaccgtggtggtggaagccaccgagccggagccgtccggcagcatcgccaacccggcggcgtccacctcgcctagcctgtcgcaccgcttccttgacagcaagttctacttgctggtggtcgtcggcgagatcgtgaccgaggagcacctgcggcgtgccatcggcaacatcgagctcggaatccgatcatgggacacaaacctgattgaatgcaacttggaccaagaactcaaactttttgtatctcgacactctgcaagattctctcctgaagtcccaggacaaaagatccttcatcaccgaagtgacgttttagaaacagtggtcctgatcaacccttctgatgaagcagtcagcaccgaggtgcgcttaatgatcactgatgctgcccgacacaagctgctcgtgctgaccgggcagtgctttgaaaataccggagagctcattctccagtccggctctttctccttccagaacttcatagagattttcaccgatcaagagatcggggagttactaagcaccacccatcctgccaacaaagccagcttaaccctgttctgtcctgaagaaggggactggaagaactccaatcttgacagacacaatctccaagacttcatcaatattaaactcaattcagcttctatcttgccagaaatggaaggactttctgagtttaccgagtatctctcagaatcagtggaagtcccatctccctttgacatcttggaacctcccacatcgggtggatttctgaagctctccaagccctgctgttatatttttccaggagggaggggcgattctgccttgtttgcagtgaatggtttcaatatgctcatcaatggcggatcagagagaaaatcctgcttctggaagctcatccgacacttagaccgagtggactccatcctgctcacccacattggggatgacaatttgcctggaataaacagcatgttacagcggaaaattgcagagctcgaggaagaacagtcccagggctccaccacaaatagtgactggatgaaaaacctcatctcccctgacttaggagttgtatttctcaatgtacctgaaaatctcaaaaatccagagccaaacatcaagatgaagagaagcatagaagaagcctgcttcactctccagtacctaaacaaattgtccatgaaaccagaacctctgtttagaagtgtaggcaatactattgatcctgtcattcttttccaaaaaatgggagtaggtaaacttgagatgtatgtgcttaatccagtcaagagcagcaaggaaatgcagtattttatgcagcagtggactggtaccaacaaagacaaggctgaattcattctgcctaatggtcaagaagtagatctcccgatttcctacttaacttcagtctcatctttgattgtgtggcatccagcaaaccctgcggagaaaatcatccgagtcctgtttcctgggaacagcacccagtacaacatcctggaagggttggaaaagctcaaacatctagactttctgaagcagccactggccacccaaaaggatctcactggccaggtgcccactcctgtggtgaaacaaacaaaactgaaacagagggctgatagccgagaaagtctgaagccagccgcaaaaccacttcctagcaaatccgtgcgcaaggagtcaaaagaagaaacccctgaggtcacaaaagtgaatcacgtggaaaagccacccaaagttgaaagcaaagaaaaggtaatggtgaaaaaagacaagccagtaaaaacagagaccaaaccttcagtgactgaaaaggaggttcccagcaaagaagagccatctccagtgaaagccgaggtggctgagaagcaagccacagatgtcaaacccaaagctgccaaggagaagacggtgaaaaaggaaacaaaggtaaagcctgaagacaagaaagaggagaaagaaaagccaaagaaagaagtggctaaaaaggaggacaaaacacctatcaagaaggaggaaaaaccaaaaaaggaagaggtgaaaaaagaagtcaaaaaagagatcaagaaagaagagaaaaaagaacccaagaaagaggttaagaaagaaacaccgccaaaggaagtcaagaaggaagttaagaaggaagagaagaaggaagtgaaaaaggaagaaaaggaacccaaaaaagaaattaagaagctccctaaagacgcaaagaaatcatctactcctctgtctgaagcaaaaaaaccagctgctttaaaaccaaaagtacccaagaaggaagagtctgtcaagaaagattctgttgctgccggaaagccaaaggagaaggggaaaataaaagtcattaagaaggaaggcaaggccgcagaggctgtcgctgcagctgtcggcactggagccaccacagcagctgtcatggcggcagctggaatagcagccattggccctgccaaagaactcgaagctgagaggtcccttatgtcatctcctgaggatctaaccaaggactttgaagagttaaaggctgaagaggtcgatgtaacaaaggacatcaagcctcagctggagctaatcgaagacgaagagaaactgaaggaaactgagccagtcgaagcctacgtcatccagaaggagagagaagtcaccaaaggtcctgccgagtcccctgatgagggaatcactaccactgaaggggagggcgaatgtgaacagacacctgaggagctggagcccgtcgagaagcagggagtagacgacattgaaaaatttgaagatgaaggagccggttttgaagaatcttcagagactggagactatgaagagaaggcagaaactgaggaggctgaggagccagaagaggatggggaggaacacgtatgtgtgagcgcctccaagcacagccccactgaggatgaggaaagtgccaaggcggaggctgatgcatacatcagggagaagagggagtctgtggccagtggggatgaccgagccgaagaagacatggatgaggccattgagaaaggagaggctgaacaatctgaagaggaggctgatgaggaggacaaagctgaagatgccagagaggaggaatatgagccggaaaaaatggaagctgaagactatgtgatggctgtggtcgacaaggctgcagaggctggtggtgccgaggagcagtatggattcctcaccacaccaaccaagcaactaggagcccagtctcctggccgagaacctgcatcttcaattcatgatgagactttacctggaggctcagagagcgaggccaccgcttctgatgaggagaatcgagaagaccagcctgaggaattcactgccacctctggctacactcagtctactattgagatatccagtgagcccacccccatggatgagatgtctacccctcgagacgtgatgagtgatgagaccaacaatgaagagacggagtccccttctcaggaattcgtaaatatcaccaaatatgaatcttcattgtattctcaggaatactctaaacctgctgatgttacaccgctcaacggattttctgaaggatcaaaaacagatgccactgatggcaaggattacaatgcttcagcctctaccatatcaccaccctcttccatggaggaagacaaattcagcagatctgctttacgtgatgcttactgctctgaagtgaaagccagcaccactttggacatcaaagatagcatctcagctgtttcaagtgaaaaggtcagcccatcgaagagcccgtccctgagtccatctccaccatcacccttagaaaagacccccctgggtgaacgtagtgtgaacttctctctgacgcccaatgagattaaagtctctgcagaggcagaagtagccccggtgtctcctgaggtgacccaagaagtagttgaagaacattgtgctagtcctgaggacaagactctggaagtggtgtcaccatctcagtccgtgactggcagtgctggtcacacaccttactatcaatctcctactgacgagaaatccagtcatctccctacagaagtcattgaaaaaccaccagcagttccagtgagttttgaattcagtgatgccaaagatgagaatgaaagggcttcagtaagccccatggatgagcccgtgcctgactcagagtctcctattgaaaaagttttgtctcctttacgcagcccgcccctcattggatccgagtctgcttatgaaagttttctaagtgctgatgacaaggcttctggcagaggtgccgaaagtccttttgaagaaaagagtggaaaacaaggctctccagaccaagtaagtccagtttctgaaatgacttctactagtctttaccaagacaaacaggaagggaaaagcacagactttgcaccaataaaagaagactttggccaagaaaagaaaactgatgatgttgaagccatgagttctcaaccagcactggctctggatgaaaggaaattaggagatgtttctcccacacaaatagatgtcagtcagtttggatcttttaaagaagacactaagatgtccatttctgaaggtactgtctcagacaagtcagctactcctgttgatgagggcgtagcagaagacacgtactctcatatggagggtgtggcctcagtgtccacagcctcagtggctacgagctcatttccagagccaacaacagatgatgtgtctccatctctgcatgctgaggttggctccccacattccacagaagtagatgactccctttcagtgtctgttgtgcaaacacctaccacattccaggaaacagaaatgtctccatctaaagaagaatgcccaagaccgatgtcaatttctccaccagatttctcccctaaaactgcaaagtccaggacacccgttcaagatcacagatctgaacagtcctcaatgtctattgaatttggccaagaatctcctgagcaatcccttgctatggacttcagtcgacagtctccagatcaccctacagtgggtgcaggcgtgcttcacatcactgaaaatgggccaactgaagtggactacagtccttctgacatgcaggactccagtttatcacataagataccacctatggaggagccgtcctacacccaagataatgatctttctgagctcatctcagtatctcaggtagaggcctccccgtccacctcttctgctcataccccttctcagatcgcttctcctctccaagaagatactctatccgatgttgctcctcccagagatatgtccttatatgcctcactcacctctgaaaaagtgcaaagtctggaaggagagaagctctctccaaaatctgatatctctccactcaccccacgagagtcctctcctttatattcacctactttttcagattctacctctgcagtcaaagagaaaacagcaacttgccacagttcctcttctccaccaatagatgcagcatccgcagagccctatggcttccgtgcctcagtgttattcgatacaatgcaacaccatctagccttgaatagagatttgtccacacctggcctggagaaggacagtggagggaagacacctggtgactttagctatgcctatcaaaagcctgaggaaacaaccaggtccccagatgaagaagattatgactatgagtcttatgagaagaccacccggacctcagatgtgggtggctattactatgagaagatagagagaaccacaaaatctccaagtgacagtggctactcctatgagaccattgggaaaactaccaagacccctgaagatggtgactattcctatgaaattattgagaagaccacacggacccctgaagagggtgggtactcatatgacataagtgaaaagaccaccagcccccccgaagtgagtggttacagctatgaaaagactgagaggtctagaaggcttctggatgacatcagcaatggctatgatgactctgaggatggtggccacacacttggggaccccagctactcttatgaaaccactgagaaaattaccagtttccctgagtctgaaggttattcctatgagacatctacaaagacaacacgaacccctgatacttccacatactgttacgagactgcagagaaaatcactagaacccctcaggcatccacatattcctacgagacttcagacctatgctacactgcagaaaagaagtccccctcagaagcccgtcaggatgtcgatttatgcctcgtgtcctcttgtgaatacaagcaccccaagacagagctttcaccctctttcattaatcccaatcctcttgagtggtttgccagtgaagaacccactgaagaatctgaaaagcccctcactcaatcagggggagccccaccgcctccaggaggaaagcaacagggccgacagtgtgatgaaacccctcccacctcagtcagcgagtcagccccatcccagaccgactctgatgttcccccggagactgaagagtgcccctccatcacggccgatgccaatatcgactctgaagacgagtcggaaaccatccccacagacaaaactgtcacgtacaaacacatggacccacctccagctcccgtgcaagaccgcagcccttcgccacgccaccctgatgtgtccatggtggacccagaggccttggccattgagcagaacctgggcaaagctctaaagaaagatctgaaagagaagaccaaaaccaaaaagccaggtacaaagaccaagtcatcttcacctgtcaaaaagagtgatgggaagtctaagcccttggcagcttcaccaaaaccagcgggcttgaaagaatcctcggataaagtgtccagggtggcttctcctaagaagaaagaatctgtggaaaaggcagcaaaacccaccaccactcctgaggtcaaagctgcacgtggggaagagaaagacaaggagaccaagaatgctgccaatgcctctgcatccaagtcggccaagaccgccactgcaggaccaggaactaccaagacgaccaagtcatctgctgtgcccccaggcctccctgtgtatttggacctgtgctacattcctaaccacagcaatagtaagaatgttgatgtggaatttttcaagagagtgcggtcttcctactacgtggtgagtgggaatgaccctgctgctgaggagcccagccgggctgtcctggacgctttgttggaaggaaaggctcagtggggcagcaacatgcaggtgacactgatcccaactcatgactcagaagtgatgagggaatggtaccaggagacccatgagaaacagcaagatctcaacatcatggttttagcaagcagcagcacagtggttatgcaagatgaatccttccctgcatgcaagattgaactgtaaaaaccaaggccagccacaccacaggatctgaactttgtttccagaaattcttcaatttgaaatcaccttttctaaaaagtcaattcatctagttaagtcgctgaacaattacctgccaaatgctatactgtgtcatggtgatgcaagtcactaaatttctcagtttttgctgattgctaagggaaataacagtatttccacaatagggttcaaattcctgcaaaattacctaccccagttcatctctgctgaacatttggaaaccatgcactagccaacccaactgacttctgctaggtagaggcatttgtcttagagagagagagagcgcgggagagagtgagagagagtgagagcacaaagataacgcaggagagagagagagaaagaatgagaaagaaaaggaatgcaagagaaggagatgtaatgacagagagttctggtgagatacccagagagaaaaagagagagcagggtggggtaaggaggagaaaataaaccaacaattaggtctgcattttctcaggcagtaggcattctttagtctacataggcaaagttttccatttttgtcagtctgagtcatcaaaaagagtcttaattttctaaaacaagttggctagaagaaagtaaaaagaacaacacttgttatgagggcatgtgatattttcacatcttaattaagctccttcagtttgaaggctgcacactgacataatgtagtgagtgtagactggccatgcaagtggtttgggccccattcagaactctcagactctaaacacacaagtagattgatctaaggcatgctcccagcatttgtccacccacttagtccactctgagtcgattaacctgcatgcagcaacacccaagtccaccccaattaactgaagcaaataccaaagcagttgggagtacatatggtagacaatttgccttaggaagtgacttgaatgtacaaagatacttgatgcacttattttttaatgtgagacagcaagtttataaaacatccatataggattatagatacttaaaggaacacgtgggtgagcgtgtgtgggggtactagaagctgatctgattggtccaacagtttgatgctgagtcatgcgtgttgaatcccacttcagtgcacctgtggcctctcagtcaaacaagttgtgcctttcacagcttctttactactgcaagttcaagactgaaatggcttctatgatcagaactgggaaaacagtgaatcttatggtggaagaggttctcagcaagtgtacagtatttaccttcctttgtcttacattggctttttaaattttccattaatttcaacataattatgggaacaagtgtacagaagaattttttttttaagatatgtgagaacttttcatagatgaactttttaacaaatgttttcatttacaggaaattgcaaagaaaattctcaagtgatagtctttttttttaagtgtttcgtaagacaaaaattgaataatgttttttgaagttctggcaagattgaagtctgatattgcagtaatgatatttattaaaaacccataactaccaggaataatgatacctcccaccccttgattcccataacataaaagtgctacttgagagtgggggagaatggcatggtaggctacttttcagggccttgacaagtacatcacccagtggtatcctacatacttctttcaagatcttcaaccatgaggtaaaagagccaagttcaaagaaccctagcacaaatttgctttgggattttcttttctgga

SEQ ID NO: 8648 - protein, 2468 aa, Homo sapiens
  ref <308>: DATABASE ACCESSION NUMBER: Refseq / NP_005900
  ref <309>: DATABASE ENTRY DATE: 2001-05-22
MATVVVEATEPEPSGSIANPAASTSPSLSHRFLDSKFYLLVVVGEIVTEEHLRRAIGNIELGIRSWDTNLIECNLDQELKLFVSRHSARFSPEVPGQKILHHRSDVLETVVLINPSDEAVSTEVRLMITDAARHKLLVLTGQCFENTGELILQSGSFSFQNFIEIFTDQEIGELLSTTHPANKASLTLFCPEEGDWKNSNLDRHNLQDFINIKLNSASILPEMEGLSEFTEYLSESVEVPSPFDILEPPTSGGFLKLSKPCCYIFPGGRGDSALFAVNGFNMLINGGSERKSCFWKLIRHLDRVDSILLTHIGDDNLPGINSMLQRKIAELEEEQSQGSTTNSDWMKNLISPDLGVVFLNVPENLKNPEPNIKMKRSIEEACFTLQYLNKLSMKPEPLFRSVGNTIDPVILFQKMGVGKLEMYVLNPVKSSKEMQYFMQQWTGTNKDKAEFILPNGQEVDLPISYLTSVSSLIVWHPANPAEKIIRVLFPGNSTQYNILEGLEKLKHLDFLKQPLATQKDLTGQVPTPVVKQTKLKQRADSRESLKPAAKPLPSKSVRKESKEETPEVTKVNHVEKPPKVESKEKVMVKKDKPVKTETKPSVTEKEVPSKEEPSPVKAEVAEKQATDVKPKAAKEKTVKKETKVKPEDKKEEKEKPKKEVAKKEDKTPIKKEEKPKKEEVKKEVKKEIKKEEKKEPKKEVKKETPPKEVKKEVKKEEKKEVKKEEKEPKKEIKKLPKDAKKSSTPLSEAKKPAALKPKVPKKEESVKKDSVAAGKPKEKGKIKVIKKEGKAAEAVAAAVGTGATTAAVMAAAGIAAIGPAKELEAERSLMSSPEDLTKDFEELKAEEVDVTKDIKPQLELIEDEEKLKETEPVEAYVIQKEREVTKGPAESPDEGITTTEGEGECEQTPEELEPVEKQGVDDIEKFEDEGAGFEESSETGDYEEKAETEEAEEPEEDGEEHVCVSASKHSPTEDEESAKAEADAYIREKRESVASGDDRAEEDMDEAIEKGEAEQSEEEADEEDKAEDAREEEYEPEKMEAEDYVMAVVDKAAEAGGAEEQYGFLTTPTKQLGAQSPGREPASSIHDETLPGGSESEATASDEENREDQPEEFTATSGYTQSTIEISSEPTPMDEMSTPRDVMSDETNNEETESPSQEFVNITKYESSLYSQEYSKPADVTPLNGFSEGSKTDATDGKDYNASASTISPPSSMEEDKFSRSALRDAYCSEVKASTTLDIKDSISAVSSEKVSPSKSPSLSPSPPSPLEKTPLGERSVNFSLTPNEIKVSAEAEVAPVSPEVTQEVVEEHCASPEDKTLEVVSPSQSVTGSAGHTPYYQSPTDEKSSHLPTEVIEKPPAVPVSFEFSDAKDENERASVSPMDEPVPDSESPIEKVLSPLRSPPLIGSESAYESFLSADDKASGRGAESPFEEKSGKQGSPDQVSPVSEMTSTSLYQDKQEGKSTDFAPIKEDFGQEKKTDDVEAMSSQPALALDERKLGDVSPTQIDVSQFGSFKEDTKMSISEGTVSDKSATPVDEGVAEDTYSHMEGVASVSTASVATSSFPEPTTDDVSPSLHAEVGSPHSTEVDDSLSVSVVQTPTTFQETEMSPSKEECPRPMSISPPDFSPKTAKSRTPVQDHRSEQSSMSIEFGQESPEQSLAMDFSRQSPDHPTVGAGVLHITENGPTEVDYSPSDMQDSSLSHKIPPMEEPSYTQDNDLSELISVSQVEASPSTSSAHTPSQIASPLQEDTLSDVAPPRDMSLYASLTSEKVQSLEGEKLSPKSDISPLTPRESSPLYSPTFSDSTSAVKEKTATCHSSSSPPIDAASAEPYGFRASVLFDTMQHHLALNRDLSTPGLEKDSGGKTPGDFSYAYQKPEETTRSPDEEDYDYESYEKTTRTSDVGGYYYEKIERTTKSPSDSGYSYETIGKTTKTPEDGDYSYEIIEKTTRTPEEGGYSYDISEKTTSPPEVSGYSYEKTERSRRLLDDISNGYDDSEDGGHTLGDPSYSYETTEKITSFPESEGYSYETSTKTTRTPDTSTYCYETAEKITRTPQASTYSYETSDLCYTAEKKSPSEARQDVDLCLVSSCEYKHPKTELSPSFINPNPLEWFASEEPTEESEKPLTQSGGAPPPPGGKQQGRQCDETPPTSVSESAPSQTDSDVPPETEECPSITADANIDSEDESETIPTDKTVTYKHMDPPPAPVQDRSPSPRHPDVSMVDPEALAIEQNLGKALKKDLKEKTKTKKPGTKTKSSSPVKKSDGKSKPLAASPKPAGLKESSDKVSRVASPKKKESVEKAAKPTTTPEVKAARGEEKDKETKNAANASASKSAKTATAGPGTTKTTKSSAVPPGLPVYLDLCYIPNHSNSKNVDVEFFKRVRSSYYVVSGNDPAAEEPSRAVLDALLEGKAQWGSNMQVTLIPTHDSEVMREWYQETHEKQQDLNIMVLASSSTVVMQDESFPACKIEL

SEQ ID NO: 8649 - DNA, 487 bp, Rattus norvegicus; identical to SEQ ID NO: 8645
  ref <308>: DATABASE ACCESSION NUMBER: EMBL / U52950
  ref <309>: DATABASE ENTRY DATE: 2000-03-04

SEQ ID NO: 8650 - protein, 2459 aa, Rattus norvegicus; identical to SEQ ID NO: 8646
  ref <308>: DATABASE ACCESSION NUMBER: SWISS-Prot / CAC16162
  ref <309>: DATABASE ENTRY DATE: 2002-06-15

SEQ ID NO: 8651 - DNA, 9416 bp, Homo sapiens
  ref <308>: DATABASE ACCESSION NUMBER: EMBL / L06237
  ref <309>: DATABASE ENTRY DATE: 2000-03-04
aagcgcgccgcctccccgccctctctcactccccgctcctctccgccgcgcactctcgcggcgctgggagagggcggagggggaggcggcgcgcggcgccagaggaggggggacgcagggggcggagcggagacagtaccttcggagataatcctttctcctgccgcagtggagaggagcggccggagcgagacacttcgccgaggcacagcagccggcaggatggcgaccgtggtggtggaagccaccgagccggagccgtccggcagcatcgccaacccggcggcgtccacctcgcctagcctgtcgcaccgcttccttgacagcaagttctacttgctggtggtcgtcggcgagatcgtgaccgaggagcacctgcggcgtgccatcggcaacatcgagctcggaatccgatcatgggacacaaacctgattgaatgcaacttggaccaagaactcaaactttttgtatctcgacactctgcaagattctctcctgaagtcccaggacaaaagatccttcatcaccgaagtgacgttttagaaacagtggtcctgatcaacccttctgatgaagcagtcagcaccgaggtgcgcttaatgatcactgatgctgcccgacacaagctgctcgtgctgaccgggcagtgctttgaaaataccggagagctcattctccagtccggctctttctccttccagaacttcatagagattttcaccgatcaagagatcggggagttactaagcaccacccatcctgccaacaaagccagcttaaccctgttctgtcctgaagaaggggactggaagaactccaatcttgacagacacaatctccaagacttcatcaatattaaactcaattcagcttctatcttgccagaaatggaaggactttctgagtttaccgagtatctctcagaatcagtggaagtcccatctccctttgacatcttggaacctcccacatcgggtggatttctgaagctctccaagccctgctgttatatttttccaggagggaggggcgattctgccttgtttgcagtgaatggtttcaatatgctcatcaatggcggatcagagagaaaatcctgcttctggaagctcatccgacacttagaccgagtggactccatcctgctcacccacattggggatgacaatttgcctggaataaacagcatgttacagcggaaaattgcagagctcgaggaagaacagtcccagggctccaccacaaatagtgactggatgaaaaacctcatctcccctgacttaggagttgtatttctcaatgtacctgaaaatctcaaaaatccagagccaaacatcaagatgaagagaagcatagaagaagcctgcttcactctccagtacctaaacaaattgtccatgaaaccagaacctctgtttagaagtgtaggcaatactattgatcctgtcattcttttccaaaaaatgggagtaggtaaacttgagatgtatgtgcttaatccagtcaagagcagcaaggaaatgcagtattttatgcagcagtggactggtaccaacaaagacaaggctgaattcattctgcctaatggtcaagaagtagatctcccgatttcctacttaacttcagtctcatctttgattgtgtggcatccagcaaaccctgcggagaaaatcatccgagtcctgtttcctgggaacagcacccagtacaacatcctggaagggttggaaaagctcaaacatctagactttctgaagcagccactggccacccaaaaggatctcactggccaggtgcccactcctgtggtgaaacaaacaaaactgaaacagagggctgatagccgagaaagtctgaagccagccgcaaaaccacttcctagcaaatccgtgcgcaaggagtcaaaagaagaaacccctgaggtcacaaaagtgaatcacgtggaaaagccacccaaagttgaaagcaaagaaaaggtaatggtgaaaaaagacaagccagtaaaaacagagaccaaaccttcagtgactgaaaaggaggttcccagcaaagaagagccatctccagtgaaagccgaggtggctgagaagcaagccacagatgtcaaacccaaagctgccaaggagaagacggtgaaaaaggaaacaaaggtaaagcctgaagacaagaaagaggagaaagaaaagccaaagaaagaagtggctaaaaaggaggacaaaacacctatcaagaaggaggaaaaaccaaaaaaggaagaggtgaaaaaagaagtcaaaaaagagatcaagaaagaagagaaaaaagaacccaagaaagaggttaagaaagaaacaccgccaaaggaagtcaagaaggaagttaagaaggaagagaagaaggaagtgaaaaaggaagaaaaggaacccaaaaaagaaattaagaagctccctaaagacgcaaagaaatcatctactcctctgtctgaagcaaaaaaaccagctgctttaaaaccaaaagtacccaagaaggaagagtctgtcaagaaagattctgttgctgccggaaagccaaaggagaaggggaaaataaaagtcattaagaaggaaggcaaggccgcagaggctgtcgctgcagctgtcggcactggagccaccacagcagctgtcatggcggcagctggaatagcagccattggccctgccaaagaactcgaagctgagaggtcccttatgtcatctcctgaggatctaaccaaggactttgaagagttaaaggctgaagaggtcgatgtaacaaaggacatcaagcctcagctggagctaatcgaagacgaagagaaactgaaggaaactgagccagtcgaagcctacgtcatccagaaggagagagaagtcaccaaaggtcctgccgagtcccctgatgagggaatcactaccactgaaggggagggcgaatgtgaacagacacctgaggagctggagcccgtcgagaagcagggagtagacgacattgaaaaatttgaagatgaaggagccggttttgaagaatcttcagagactggagactatgaagagaaggcagaaactgaggaggctgaggagccagaagaggatggggaggaacacgtatgtgtgagcgcctccaagcacagccccactgaggatgaggaaagtgccaaggcggaggctgatgcatacatcagggagaagagggagtctgtggccagtggggatgaccgagccgaagaagacatggatgaggccattgagaaaggagaggctgaacaatctgaagaggaggctgatgaggaggacaaagctgaagatgccagagaggaggaatatgagccggaaaaaatggaagctgaagactatgtgatggctgtggtcgacaaggctgcagaggctggtggtgccgaggagcagtatggattcctcaccacaccaaccaagcaactaggagcccagtctcctggccgagaacctgcatcttcaattcatgatgagactttacctggaggctcagagagcgaggccaccgcttctgatgaggagaatcgagaagaccagcctgaggaattcactgccacctctggctacactcagtctactattgagatatccagtgagcccacccccatggatgagatgtctacccctcgagacgtgatgagtgatgagaccaacaatgaagagacggagtccccttctcaggaattcgtaaatatcaccaaatatgaatcttcattgtattctcaggaatactctaaacctgctgatgttacaccgctcaacggattttctgaaggatcaaaaacagatgccactgatggcaaggattacaatgcttcagcctctaccatatcaccaccctcttccatggaggaagacaaattcagcagatctgctttacgtgatgcttactgctctgaagtgaaagccagcaccactttggacatcaaagatagcatctcagctgtttcaagtgaaaaggtcagcccatcgaagagcccgtccctgagtccatctccaccatcacccttagaaaagacccccctgggtgaacgtagtgtgaacttctctctgacgcccaatgagattaaagtctctgcagaggcagaagtagccccggtgtctcctgaggtgacccaagaagtagttgaagaacattgtgctagtcctgaggacaagactctggaagtggtgtcaccatctcagtccgtgactggcagtgctggtcacacaccttactatcaatctcctactgacgagaaatccagtcatctccctacagaagtcattgaaaaaccaccagcagttccagtgagttttgaattcagtgatgccaaagatgagaatgaaagggcttcagtaagccccatggatgagcccgtgcctgactcagagtctcctattgaaaaagttttgtctcctttacgcagcccgcccctcattggatccgagtctgcttatgaaagttttctaagtgctgatgacaaggcttctggcagaggtgccgaaagtccttttgaagaaaagagtggaaaacaaggctctccagaccaagtaagtccagtttctgaaatgacttctactagtctttaccaagacaaacaggaagggaaaagcacagactttgcaccaataaaagaagactttggccaagaaaagaaaactgatgatgttgaagccatgagttctcaaccagcactggctctggatgaaaggaaattaggagatgtttctcccacacaaatagatgtcagtcagtttggatcttttaaagaagacactaagatgtccatttctgaaggtactgtctcagacaagtcagctactcctgttgatgagggcgtagcagaagacacgtactctcatatggagggtgtggcctcagtgtccacagcctcagtggctacgagctcatttccagagccaacaacagatgatgtgtctccatctctgcatgctgaggttggctccccacattccacagaagtagatgactccctttcagtgtctgttgtgcaaacacctaccacattccaggaaacagaaatgtctccatctaaagaagaatgcccaagaccgatgtcaatttctccaccagatttctcccctaaaactgcaaagtccaggacacccgttcaagatcacagatctgaacagtcctcaatgtctattgaatttggccaagaatctcctgagcaatcccttgctatggacttcagtcgacagtctccagatcaccctacagtgggtgcaggcgtgcttcacatcactgaaaatgggccaactgaagtggactacagtccttctgacatgcaggactccagtttatcacataagataccacctatggaggagccgtcctacacccaagataatgatctttctgagctcatctcagtatctcaggtagaggcctccccgtccacctcttctgctcataccccttctcagatcgcttctcctctccaagaagatactctatccgatgttgctcctcccagagatatgtccttatatgcctcactcacctctgaaaaagtgcaaagtctggaaggagagaagctctctccaaaatctgatatctctccactcaccccacgagagtcctctcctttatattcacctactttttcagattctacctctgcagtcaaagagaaaacagcaacttgccacagttcctcttctccaccaatagatgcagcatccgcagagccctatggcttccgtgcctcagtgttattcgatacaatgcaacaccatctagccttgaatagagatttgtccacacctggcctggagaaggacagtggagggaagacacctggtgactttagctatgcctatcaaaagcctgaggaaacaaccaggtccccagatgaagaagattatgactatgagtcttatgagaagaccacccggacctcagatgtgggtggctattactatgagaagatagagagaaccacaaaatctccaagtgacagtggctactcctatgagaccattgggaaaactaccaagacccctgaagatggtgactattcctatgaaattattgagaagaccacacggacccctgaagagggcgggtactcatatgacataagtgaaaagaccaccagcccccccgaagtgagtggttacagctatgaaaagactgagaggtctagaaggcttctggatgacatcagcaatggctatgatgactctgaggatggtggccacacacttggggaccccagctactcttatgaaaccactgagaaaattaccagtttccctgagtctgaaggttattcctatgagacatctacaaagacaacacgaacccctgatacttccacatactgttacgagactgcagagaaaatcactagaacccctcaggcatccacatattcctacgagacttcagacctatgctacactgcagaaaagaagtccccctcagaagcccgtcaggatgtcgatttatgcctcgtgtcctcttgtgaatacaagcaccccaagacagagctttcaccctctttcattaatcccaatcctcttgagtggtttgccagtgaagaacccactgaagaatctgaaaagcccctcactcaatcagggggagccccaccgcctccaggaggaaagcaacagggccgacagtgtgatgaaacccctcccacctcagtcagcgagtcagccccatcccagaccgactctgatgttcccccggagactgaagagtgcccctccatcacggccgatgccaatatcgactctgaagacgagtcggaaaccatccccacagacaaaactgtcacgtacaaacacatggacccacctccagctcccgtgcaagaccgcagcccttcgccacgccaccctgatgtgtccatggtggacccagaggccttggccattgagcagaacctgggcaaagctctaaagaaagatctgaaagagaagaccaaaaccaaaaagccaggtacaaagaccaagtcatcttcacctgtcaaaaagagtgatgggaagtctaagcccttggcagcttcaccaaaaccagcgggcttgaaagaatcctcggataaagtgtccagggtggcttctcctaagaagaaagaatctgtggaaaaggcagcaaaacccaccaccactcctgaggtcaaagctgcacgtggggaagagaaagacaaggagaccaagaatgctgccaatgcctctgcatccaagtcggccaagaccgccactgcaggaccaggaactaccaagacgaccaagtcatctgctgtgcccccaggcctccctgtgtatttggacctgtgctacattcctaaccacagcaatagtaagaatgttgatgtggaatttttcaagagagtgcggtcttcctactacgtggtgagtgggaatgaccctgctgctgaggagcccagccgggctgtcctggacgctttgttggaaggaaaggctcagtggggcagcaacatgcaggtgacactgatcccaactcatgactcagaagtgatgagggaatggtaccaggagacccatgagaaacagcaagatctcaacatcatggttttagcaagcagcagcacagtggttatgcaagatgaatccttccctgcatgcaagattgaactgtaaaaaccaaggccagccacaccacaggatctgaactttgtttccagaaattcttcaatttgaaatcaccttttctaaaaagtcaattcatctagttaagtcgctgaacaattacctgccaaatgctatactgtgtcatggtgatgcaagtcactaaatttctcagtttttgctgattgctaagggaaataacagtatttccacaatagggttcaaattcctgcaaaattacctaccccagttcatctctgctgaacatttggaaaccatgcactagccaacccaactgacttctgctaggtagaggcatttgtcttagagagagagagagcgcgggagagagtgagagagagtgagagcacaaagataacgcaggagagagagagagaaagaatgagaaagaaaaggaatgcaagagaaggagatgtaatgacagagagttctggtgagatacccagagagaaaaagagagagcagggtggggtaaggaggagaaaataaaccaacaattaggtctgcattttctcaggcagtaggcattctttagtctacataggcaaagttttccatttttgtcagtctgagtcatcaaaaagagtcttaattttctaaaacaagttggctagaagaaagtaaaaagaacaacacttgttatgagggcatgtgatattttcacatcttaattaagctccttcagtttgaaggctgcacactgacataatgtagtgagtgtagactggccatgcaagtggtttgggccccattcagaactctcagactctaaacacacaagtagattgatctaaggcatgctcccagcatttgtccacccacttagtccactctgagtcgattaacctgcatgcagcaacacccaagtccaccccaattaactgaagcaaataccaaagcagttgggagtacatatggtagacaatttgccttaggaagtgacttgaatgtacaaagatacttgatgcacttattttttaatgtgagacagcaagtttataaaacatccatataggattatagatacttaaaggaacacgtgggtgagcgtgtgtgggggtactagaagctgatctgattggtccaacagtttgatgctgagtcatgcgtgttgaatcccacttcagtgcacctgtggcctctcagtcaaacaagttgtgcctttcacagcttctttactactgcaagttcaagactgaaatggcttctatgatcagaactgggaaaacagtgaatcttatggtggaagaggttctcagcaagtgtacagtatttaccttcctttgtcttacattggctttttaaattttccattaatttcaacataattatgggaacaagtgtacagaagaattttttttttaagatatgtgagaacttttcatagatgaactttttaacaaatgttttcatttacaggaaattgcaaagaaaattctcaagtgatagtctttttttttaagtgtttcgtaagacaaaaattgaataatgttttttgaagttctggcaagattgaagtctgatattgcagtaatgatatttattaaaaacccataactaccaggaataatgatacctcccaccccttgattcccataacataaaagtgctacttgagagtgggggagaatggcatggtaggctacttttcagggccttgacaagtacatcacccagtggtatcctacatacttctttcaagatcttcaaccatgaggtaaaagagccaagttcaaagaaccctagcacaaatttgctttgggattttcttttctgga

SEQ ID NO: 8652 - protein, 2468 aa, Homo sapiens; identical to SEQ ID NO: 8648
  ref <308>: DATABASE ACCESSION NUMBER: SWISS-Prot / AAA18904
  ref <309>: DATABASE ENTRY DATE: 2001-10-16

SEQ ID NO: 8653 - DNA, 487 bp, Rattus norvegicus; identical to SEQ ID NO: 8645
  ref <308>: DATABASE ACCESSION NUMBER: EMBL / U52950
  ref <309>: DATABASE ENTRY DATE: 2000-03-04

SEQ ID NO: 8654 - protein, 2459 aa, Rattus norvegicus; identical to SEQ ID NO: 8646
  ref <308>: DATABASE ACCESSION NUMBER: SWISS-Prot / AAB17068
  ref <309>: DATABASE ENTRY DATE: 2002-06-15

SEQ ID NO: 8655 - DNA, 9416 bp, Homo sapiens; identical to SEQ ID NO: 8647
  ref <308>: DATABASE ACCESSION NUMBER: Refseq / NM_005909
  ref <309>: DATABASE ENTRY DATE: 2001-05-22

SEQ ID NO: 8656 - protein, 2468 aa, Homo sapiens; identical to SEQ ID NO: 8648
  ref <308>: DATABASE ACCESSION NUMBER: Refseq / NP_005900
  ref <309>: DATABASE ENTRY DATE: 2001-05-22

SEQ ID NO: 8657 - DNA, 487 bp, Rattus norvegicus; identical to SEQ ID NO: 8645
  ref <308>: DATABASE ACCESSION NUMBER: EMBL / U52950
  ref <309>: DATABASE ENTRY DATE: 2000-03-04

SEQ ID NO: 8658 - protein, 2459 aa, Rattus norvegicus; identical to SEQ ID NO: 8646
  ref <308>: DATABASE ACCESSION NUMBER: SWISS-Prot / CAC16162
  ref <309>: DATABASE ENTRY DATE: 2002-06-15

SEQ ID NO: 8659 - DNA, 9416 bp, Homo sapiens; identical to SEQ ID NO: 8651
  ref <308>: DATABASE ACCESSION NUMBER: EMBL / L06237
  ref <309>: DATABASE ENTRY DATE: 2000-03-04

SEQ ID NO: 8660 - protein, 2468 aa, Homo sapiens; identical to SEQ ID NO: 8648
  ref <308>: DATABASE ACCESSION NUMBER: SWISS-Prot / AAA18904
  ref <309>: DATABASE ENTRY DATE: 2001-10-16

SEQ ID NO: 8661 - DNA, 2006 bp, Rattus norvegicus
  misc_feature (1)..(2006): n=a, c, g or t
  ref <308>: DATABASE ACCESSION NUMBER: EMBL / U53184
  ref <309>: DATABASE ENTRY DATE: 1998-02-14
gcgcgcgcggccagcgagacctcccggctccactggcggcgcgggcggcggtaaaatgtcggctccaggaccttaccaagcagctgcaggcccttctgtaatgcctactgcacccccaacctatgaagaaacagtgggtgtcaacagttactacccaacgcccccagcacctcagccgggaccagccacagggctcattacgggcccggatgggaagggcatgaatccaccttcgtactacacccagcccgtgcctgtccccaacgccaacgcaattgcagtgcagacggtttatgtgcagcagcccatctccttctacgaccgccccatccagatgtgctgtccttcctgcaacaagatgatcgtgacccagttgtcctacaatgcaggagccctcacctggctctcctgtggcagtctgtgtctgctgggatgcgtcgctggctgctgcttcattccgttttgcgtggacgccctgcaggatgtggaccattactgccccaactgcaaagcgctcctgggcacctacaaacgtttgtaggactcggccagccacaggggaggtagacaagtgctcccggaagtcacccaacccttgcccagcgcagccagaagacgtcccttccttgatctcttcatgagctcgtcttcgtgtcttttagggggtggggaaagtcggaaaagtaacaaacccccaaacccagaaactgctgctggagttgtgccctgcacatgcaaagacgtggaccttgggtgttgctttaagggtttaccgcctgatctcgttaccccactaactgtgattgttactccatttgcatctcgtctgctgatttgccactgcctgccccctcttcctcaagaagaggccttcctggtgccaggctcaaaacccgaagctacagtttgccttatttttcactgtttggcttgatctgtaccatctctcccagccctaatgacagagaccttgccttaaagactttgcggttctgtaattgcagacttctccagcactcagaatcactttcaattccatagagttgttcctctccacacacacccctcccccggtgcacagaagggctgccgacacccaccagactcatacagagaaggtcacaagtactaaatgaaaggctcccagcccaccttgtctcagcccctgtcctgtgaagggactccttcctcacacagtttctgtgacttccttttgttcttaaacacatggaagttacttggcagggagacatttctagaataatttttgtgatcacgatacacccttcattctccgtttgctggtatgtttttagttggtttggttttagttttccacatacagtctagctcgtggccagccttgagctccgaggagatcctccatcttctcctctcaaatacccagggcccagacatttgcctctgcacctgctgggctttttctctcatttttccttaaccagaaaaacaaacgggtaatttcatcgactgcctatgtaggtttggtgtggttttgaaaaccttgtttccatggggccctttgggggagtcagggggcccctgcacgagcccatgcttcaatgccgagagattggctgctggaaccccctgaagcatgatttcatgttttagagatgagcttctgtggtacggtcatcatggtctccaacatcaacagacaaggtagaaggatgtcaacgacaaagataagttcagggctctttctagggtcaccactctgtcctgtgtaacactgacacagtctggccagcctttcaggaggtcctggctccctcctaaacccatgtaggncttgctgcaagtaacagtgtatgaagtcaacctgacctggaacagaagtctgcatattggttaagatacagcctatgtatcttcatacaacgatccagaagtactagacatcatttttgcagtgaattatgggtaccatacatgactttgatgatatctgcttttaaacaaataaaatctttgatcactca

SEQ ID NO: 8662 - DNA, 2368 bp, Homo sapiens
  ref <308>: DATABASE ACCESSION NUMBER: EMBL / AB034747
  ref <309>: DATABASE ENTRY DATE: 2001-06-22
gtttctctccctgcccccgcgacttcgcgcaagatccgggaaggacacccgaggcccctgggagaccctggggaggtgaaagtcagagagcgaagcgggccgtggcccctaggcctgacccctccccgcggggtaaggcgggcaccccgcgagcgcaggggtcctcttactgctgatggcacccagctctgggcccagacgccgctcaccgtccaccgccggtgctgggtaaaatgtcggttccaggaccttaccaggcggccactgggccttcctcagcaccatccgcacctccatcctatgaagagacagtggctgttaacagttattaccccacacctccagctcccatgcctgggccaactacggggcttgtgacggggcctgatgggaagggcatgaatcctccttcgtattatacccagccagcgcccatccccaataacaatccaattaccgtgcagacggtctacgtgcagcaccccatcacctttttggaccgccctatccaaatgtgttgtccttcctgcaacaagatgatcgtgagtcagctgtcctataacgccggtgctctgacctggctgtcctgcgggagcctgtgcctgctggggtgcatagcgggctgctgcttcatccccttctgcgtggatgccctgcaggacgtggaccattactgtcccaactgcagagctctcctgggcacctacaagcgtttgtaggactcagccagacgtggagggagccgggtgccgcaggaagtcctttccacctctcatccagcttcacgcctggtggaggttctgccctggtggtctcacctctccagggggcccaccttcatgtcttcttttggggggaatacgtcgcaaaactaacaaatctccaaaccccagaaattgctgcttggagtcgtgcataggacttgcaaagacattccccttgagtgtcagttccacggtttcctgcctccctgagaccctgagtcctgccatctaactgtgatcattgccctatccgaatatcttcctgtgatctgccatcagtggctcttttttcctgcttccatgggcctttctggtggcagtctcaaactgagaagccacagttgccttatttttgaggctgttctgcccagagctcggctgaaccagcctttagtgcctaccattatcttatccgtctcttcccgtccctgatgacaaagatcttgccttacagactttacaggcttggctttgagattctgtaactgcagacttcattagcacacagattcactttaatttcttaattttttttttaaatacaaggagggggctattaacacccagtacagacatatccacaaggtcgtaaatgcatgctagaaaaatagggctggatcttatcactgccctgtctccccttgtttctctgtgccagatcttcagtgcccctttccatacagggatttttttctcatagagtaattatatgaacagtttttatgacctccttttggtctgaaatacttttgaacagaatttcttttttttaaaaaaaaacagagatggggtcttactatgttgcccaggctggtgtcgaactcctgggctcaagcgatccttctgccttggcctcccgaagtgctgggattgcaggcataagctaccatgctgggcctgaacataatttcaagaggaggatttataaaaccattttctgtaatcaaatgattggtgtcattttcccatttgccaatgtagtctcacttaaaaaaaaaaaaaagaaaaagaaatggataatttcatctactgcctttacttggggttaatgtgattcttaaacaccttcatcatggaactctcagagtggggtccgttttggtttcctggtggtgggttttgaaagataagggaaagcacattttgagcatgtctgggtaccatggtgcggatgcttgggaaccagaactgtttcagaggaatctaaagtctgattttagttttcagagacacagcttgttgtaaaacatgagaagacatgatttctaggactcaagcagcaagccaggattctaggttggctgctgtgtcatctttgaagtcaagacaaagctgggctcgaccttcaagggtcctcgttttgataatacttcagaatagggaactcatgtgaatactactatgtagaaataaaacctagaccttgagcgaacatctgtatattggttgaaaacgatagtggtaaccattgatcccccttcatttgatgtttggaaaattccagtaattatcatttttgcaacgaatatggataccacatagtactttggtgttacctgcttttgaaaaataaagtctttggttcacccggtaaaaaaaaaaaa

SEQ ID NO: 8663 - protein, 228 aa, Homo sapiens
  ref <308>: DATABASE ACCESSION NUMBER: SWISS-Prot / Q99732
  ref <309>: DATABASE ENTRY DATE: 2001-10-16
MSVPGPYQAATGPSSAPSAPPSYEETVAVNSYYPTPPAPMPGPTTGLVTGPDGKGMNPPSYYTQPAPIPNNNPITVQTVYVQHPITFLDRPIQMCCPSCNKMIVSQLSYNAGALTWLSCGSLCLLGVHSGLLLHPLLRGCPAGRGPLLSQLQSSPGHLQAFVGLSQTWREPGAAGSPFHLSSSFTPGGGSALVVSPLQGAHLHVFFWGEYVAKLTNLQTPEIAAWSRA

SEQ ID NO: 8664 - DNA, 2044 bp, Rattus norvegicus
  misc_feature (1)..(2044): n=a, c, g or t
  ref <308>: DATABASE ACCESSION NUMBER: Refseq / NM_030999
  ref <309>: DATABASE ENTRY DATE: 2002-11-05
ctaggtgcttctcaaccaggcctagtgacaggcnccacttcgccagcgcatctcagagcnctnnntcactgggtacnagcacctcgtctcggtgctggagaaggtgagtgggcctgggtgtcgccgccctgcagcctcaatttctatgcctgggtctccggaccgctcagggctgatatagaccttctgggccacaagccgggttagctgcggcggncgccaccgctgccnnnnnnctcgcgcactgccgcaagccggggtgcggggagacgaggttcagcacggccagggtgcggggatccggcccgggtttgggcagtggaccgaggaggcgggagccnncagccagcggaggggcgaggagcggaggagggaccgcaggggagaggagggagaaagaggaggggagcgaggcgagggggcggggagccgaggcgagaggcaggcggaccgtgggggaggcgactgggcaaggcgggatccaggcagtagagaggtgnnggcccggctgagtcgggagaaggctaccagactnnnnnngaagggcgagccagagctgccggtggggcggggcggggcggaagggtgcgaagcccggcacctgggcgcagatcacggcccggggagaccggccgcccaccggagaccgcagccgcncgccctccgctctgggatgtcggagcgatccaggcatccaggacgctgacggagcgagnccgaggatgggacggcgcccgcagctccggctcgtgaaggcccttctccttctggggctgaaccctgtgtccacctcccttcaggatcagcgctgtgagaacctgtccctgaccagcaatgtttctggcctgcagtgcaatgcatccgtggacctcattggcacctgctggccccggagccctgcgggccagttggtggtccgaccctgccctgcctttttctacggtgtccgctacaacacgacaaacaatggctaccgggagtgcctggccaacggcagctgggcagcccgtgtgaattattctgagtgccaggagattctcaacgaagagaagaagagcaaagtacactaccatgttgcagtcatcatcaactacctgggtcactgcatctccctggtagccctcctggtggcctttgtcctcttcttgcggctcaggagcatccggtgcctgagaaacatcatccactggaacctcatctcggctttcatcctacgcaacgccacgtggtttgtggtccagctcaccgtgagccccgaggtgcaccagagcaatgtggcctggtgtaggttggtgacagccgcctacaattacttccatgtaaccaacttcttctggatgttcggtgagggctgctacctgcacacagccattgtgctcacgtactccaccgaccgtctgcgcaagtggatgttcgtctgcattggctggggtgtacctttccccatcattgtggcttgggccattgggaagctgcactacgacaatgaaaagtgctggtttggcaaacgtcctggggtatacactgactacatctaccagggccccatgatcctggtcctgctgatcaactttatctttctcttcaacattgtccgcatcctcatgaccaaactccgggcatccactacatctgagaccattcagtacaggaaggctgtgaaggccactctggtgctcctgccccttctgggcatcacctacatgttgttcttcgtcaaccctggagaggacgaggtctccagggtcgtcttcatctacttcaactcttttctggagtcctttcagggcttctttgtgtctgtgttctactgttttctgaacagtgaggtccgctccgctatccggaagaggtggcgtcggtggcaggacaagcactccatcagagcccgagtggcccgagctatgtccatccccacctccccgaccagagtcagctttcacagcatcaagcagtccacagcagtgtgagctccaggccacagagcagcccccaagacctgaggccggggagatgatgcaagctcactgacgagccagtctgc

SEQ ID NO: 8665 - protein, 415 aa, Rattus norvegicus
  ref <308>: DATABASE ACCESSION NUMBER: Refseq / NP_112261
  ref <309>: DATABASE ENTRY DATE: 2002-11-05
MGRRPQLRLVKALLLLGLNPVSTSLQDQRCENLSLTSNVSGLQCNASVDLIGTCWPRSPAGQLVVRPCPAFFYGVRYNTTNNGYRECLANGSWAARVNYSECQEILNEEKKSKVHYHVAVIINYLGHCISLVALLVAFVLFLRLRSIRCLRNIIHWNLISAFILRNATWFVVQLTVSPEVHQSNVAWCRLVTAAYNYFHVTNFFWMFGEGCYLHTAIVLTYSTDRLRKWMFVCIGWGVPFPIIVAWAIGKLHYDNEKCWFGKRPGVYTDYIYQGPMILVLLINFIFLFNIVRILMTKLRASTTSETIQYRKAVKATLVLLPLLGITYMLFFVNPGEDEVSRVVFIYFNSFLESFQGFFVSVFYCFLNSEVRSAIRKRWRRWQDKHSIRARVARAMSIPTSPTRVSFHSIKQSTAV

SEQ ID NO: 8666 - DNA, 1285 bp, Homo sapiens
  ref <308>: DATABASE ACCESSION NUMBER: EMBL / L23332
  ref <309>: DATABASE ENTRY DATE: 1999-07-02
cccgggcattcaggacggtagccgagcgagcccgaggatgggagggcacccgcagctccgtctcgtcaaggcccttctccttctggggctgaaccccgtctctgcctccctccaggaccagcactgcgagagcctgtccctggccagcaacatctcaggactgcagtgcaacgcatccgtggacctcattggcacctgctggccccgcagccctgcggggcagctagtggttcggccctgccctgcctttttctatggtgtccgctacaataccacaaacaatggctaccgggagtgcctggccaatggcagctgggccgcccgcgtgaattactccgagtgccaggagatcctcaatgaggagaaaaaaagcaaggtgcactaccatgtcgcagtcatcatcaactacctgggccactgtatctccctggtggccctcctggtggcctttgtcctctttctgcggctcaggagcatccggtgcctgcgaaacatcatccactggaacctcatctccgccttcatcctgcgcaacgccacctggttcgtggtccagctaaccatgagccccgaggtccaccagagcaacgtgggctggtgcaggttggtgacagccgcctacaactacttccatgtgaccaacttcttctggatgttcggcgagggctgctacctgcacacagccatcgtgctcacctactccactgaccggctgcgcaaatggatgttcatctgcattggctggggtgtgcccttccccatcattgtggcctgggccattgggaagctgtactacgacaatgagaagtgctggtttggcaaaaggcctggggtgtacaccgactacatctaccagggccccatgatcctggtcctgctgatcaatttcatcttccttttcaacatcgtccgcatcctcatgaccaagctccgggcatccaccacgtctgagaccattcagtacaggaaggctgtgaaagccactctggtgctgctgcccctcctgggcatcacctacatgctgttcttcgtcaatcccggggaggatgaggtctcccgggtcgtcttcatctacttcaactccttcctggaatccttccagggcttctttgtgtctgtgttctactgtttcctcaatagtgaggtccgttctgccatccggaagaggtggcaccggtggcaggacaagcactcgatccgtgcccgagtggcccgtgccatgtccatccccacctccccaacccgtgtcagctttcacagcatcaagcagtccacagcagtctga

SEQ ID NO: 8667 - protein, 444 aa, Homo sapiens
  ref <308>: DATABASE ACCESSION NUMBER: SWISS-Prot / P34998
  ref <309>: DATABASE ENTRY DATE: 2001-10-16
MGGHPQLRLVKALLLLGLNPVSASLQDQHCESLSLASNISGLQCNASVDLIGTCWPRSPAGQLVVRPCPAFFYGVRYNTTNNGYRECLANGSWAARVNYSECQEILNEEKKSKVHYHVAVIINYLGHCISLVALLVAFVLFLRLRPGCTHWGDQADGALEVGAPWSGAPFQVRRSIRCLRNIIHWNLISAFILRNATWFVVQLTMSPEVHQSNVGWCRLVTAAYNYFHVTNFFWMFGEGCYLHTAIVLTYSTDRLRKWMFICIGWGVPFPIIVAWAIGKLYYDNEKCWFGKRPGVYTDYIYQGPMILVLLINFIFLFNIVRILMTKLRASTTSETIQYRKAVKATLVLLPLLGITYMLFFVNPGEDEVSRVVFIYFNSFLESFQGFFVSVFYCFLNSEVRSAIRKRWHRWQDKHSIRARVARAMSIPTSPTRVSFHSIKQSTAV

SEQ ID NO: 8668 - DNA, 1705 bp, Rattus norvegicus
  ref <308>: DATABASE ACCESSION NUMBER: EMBL / U53706
  ref <309>: DATABASE ENTRY DATE: 2000-03-04
gccggtgctgggctctgtagctcggtactccagcctctcgtcatggcctcggaaaagcctcaggacctaatggtcacctgcaccgcgccggtcaacatcgcggttatcaaatactggggaaagcgggatgaagcgctgatcctgcccatcaacccctccctgagcgtcacgctgcaccaggaccagctaaaaaccaccacaactgcggccattagcaaggacttcacagaggaccgcatctggctgaacggtcgtgaggaggacgtggggcagccacggctccaggcctgcctgagagagattcgccgcctggctcggaagcggaggagcacgggagacggggatgccctgcccctcagcctcggctataaggtgcacgtggcgtcagtgaacaacttccccaccgctgcaggcctggcttcctcagcagccggctacgcctgcctagcctataccttggcccgggtctacggggttgagggagacctctcagaagtggcccggcggggctcaggcagcgcatgccgcagcctctacgggggcttcgtggagtggcagatgggggaacaggccgatgggaaggacagcatcgcccggcagatagccccagagtggcactggccccagctccgagttcttatccttgtggtgagtgcagagaagaagccgacgggcagcacagtgggcatgcagaccagcgtggcgaccagtaccctgctcaagttccgggctgagtccattgtgcctgagcgcatgaaggagatgacccgttgcatccaagagcaggacttccaggccttcgcccagctgaccatgaaggacagcaaccagtttcacgccacctgcctcgacaccttcccgcccatctcctacctcaatgacacctccaggcgcatcatccagctagtccaccgcttcaacgcccaccatgggcagacgaaggtggcgtacacatttgatgcgggccccaatgctgtgatcttcactctggaggacaccgtggccgagtttgtggcggcagtaaggcacagcttcccccctgctgcgaatggagacaagtttctcaaggggctgcaggtggcacccgttcttctctccgatgagctgaaaacttcgctggctacggagcccagccctggtggggttcagtacatcattgccactcaggtgggaccaggacctcaagtcctagacgaccctcaccatcatctgctaggcccggatggcctgccacagcgggacctttgatctctcccatgtgcatctggagaaaggggttgctcccgggagctcgggagctcctgtgctgatgggccacgtccaaaggcttgcttgatgacacctaggggtgtctcctgtgatgagcagctgtctgggcagccggggacccctctcaagtgcctcaccttcctgctggctagccgaccttagggaagaggagtcggcgtctctcccaccgaagatgcccccgagggcctctaagcgtgaaggatgagggctcagacagcagtgcctctgttgagactcaggccacagtttctttgagaagcctcctggtgagggtaggggctgtggaacccacaggtagggtccattgtgggtgtggatgtaccacgaaggtgcagttgatggacccgatgaccacaggaataaagtgtgccactgctgcctgccaaaaaaaaaaaaaaaaaaaaaaaaaaaaacc

SEQ ID NO: 8669 - protein, 401 aa, Rattus norvegicus
  ref <308>: DATABASE ACCESSION NUMBER: SWISS-Prot / Q62967
  ref <309>: DATABASE ENTRY DATE: 2002-06-15
MASEKPQDLMVTCTAPVNIAVIKYWGKRDEALILPINPSLSVTLHQDQLKTTTTAAISKDFTEDRIWLNGREEDVGQPRLQACLREIRRLARKRRSTGDGDALPLSLGYKVHVASVNNFPTAAGLASSAAGYACLAYTLARVYGVEGDLSEVARRGSGSACRSLYGGFVEWQMGEQADGKDSIARQIAPEWHWPQLRVLILVVSAEKKPTGSTVGMQTSVATSTLLKFRAESIVPERMKEMTRCIQEQDFQAFAQLTMKDSNQFHATCLDTFPPISYLNDTSRRIIQLVHRFNAHHGQTKVAYTFDAGPNAVIFTLEDTVAEFVAAVRHSFPPAANGDKFLKGLQVAPVLLSDELKTSLATEPSPGGVQYIIATQVGPGPQVLDDPHHHLLGPDGLPQRDL

SEQ ID NO: 8670 - DNA, 1812 bp, Homo sapiens
  ref <308>: DATABASE ACCESSION NUMBER: Refseq / NM_002461
  ref <309>: DATABASE ENTRY DATE: 2002-02-10
tgggaccatggcctcggagaagccgctggcggcagtcacttgtacagcgccggtcaacatcgcggtcatcaagtactggggcaagcgcgatgaagagctggttctgcccatcaactcctccctgagcgtcactctgcaccaggaccagttaaaaaccaccacaacagccgtcatcagcaaggacttcaccgaggaccggatttggctgaatggccgggaggaggatgtggggcagccgaggctgcaggcctgcctgcgggagatccgctgcctggcccggaagcggaggaactcacgggatggggacccgctgccctccagcctcagctgcaaggtgcacgtggcatcggtgaacaacttccccacggctgcgggcctggcctcctcagcggcgggctatgcctgcctagcctacaccctggcccgtgtctacggcgtggagagtgacctctcagaagtggctcgccggggctcaggcagcgcctgccggagcctgtatgggggctttgtggagtggcagatgggagagcaggccgacgggaaggacagcatcgctcggcaagtggcccccgagtcacactggcctgaactccgcgtgctcatccttgtggtgagcgctgagaagaagctgacaggcagtaccgtgggcatgcgggccagtgtggagaccagccccctgcttcggttccgggccgagtccgtggtgcccgcgcgcatggcggagatggcccgctgcatccgggagcgagacttccccagcttcgcccagctgaccatgaaggacagcaaccagttccacgccacctgcctcgacaccttcccgcccatctcttacctcaatgccatctcctggcgcatcatccacctggtgcaccgcttcaacgcccaccacggggacaccaaggtggcgtacacctttgacgcgggccccaatgccgtgatcttcaccctggacgacactgtggctgagtttgtggctgctgtgtggcacggctttcccccaggctcgaatggagacacgtttctgaaggggctgcaggtgaggccggcccctctctcagctgagcttcaggctgcgctggccatggagccgacccccggtggggtcaaatacatcattgtcactcaggtggggccagggcctcaaatcctggatgacccctgcgcccacctcctgggtcctgacggcctgccgaagccagctgcctgactgcctcagcagggaccgcatgccgcttggagaaggggtggcctcgccggagctagggagcggatgtggtgggctggccggactcctgggacatgtgggtggtggcttgaccccgggcccatgggcagcttgctgtggggcagtgcagggagtcctgcggccgcccaggtgtcaggagaggtccccgccgagtgcttcagctgccctaagctgcaccagcgctttgccaagatgggatggggagggggtatgagaactggcagagcctcggtgcagcagggctgaagggctttctcaccccagctctggctatgcccagttctctgagaaaggagctcagtggggaggtggtccctccagcggaccagggaaggggtcactgtgctgggagcagcctccttgggcctcaggaaaccaccaagtgcctcggatggtggctgcccacggcgcttctgctgagaccctgcccccggcccaggtgtctcggagggtggctgcccacggcctgggtgtggctggaatggtggcaggagtgggcaccagtgcggccccggtggccatggggaataaaccagcattgctgccaaaaaaaaaaaaaaaaa

SEQ ID NO: 8671 - protein, 400 aa, Homo sapiens
  ref <308>: DATABASE ACCESSION NUMBER: SWISS-Prot / P53602
  ref <309>: DATABASE ENTRY DATE: 2002-06-15
MASEKPLAAVTCTAPVNIAVIKYWGKRDEELVLPINSSLSVTLHQDQLKTTTTAVISKDFTEDRIWLNGREEDVGQPRLQACLREIRCLARKRRNSRDGDPLPSSLSCKVHVASVNNFPTAAGLASSAAGYACLAYTLARVYGVESDLSEVARRGSGSACRSLYGGFVEWQMGEQADGKDSIARQVAPESHWPELRVLILVVSAEKKLTGSTVGMRASVETSPLLRFRAESVVPARMAEMARCIRERDFPSFAQLTMKDSNQFHATCLDTFPPISYLNAISWRIIHLVHRFNAHHGDTKVAYTFDAGPNAVIFTLDDTVAEFVAAVWHGFPPGSNGDTFLKGLQVRPAPLSAELQAALAMEPTPGGVKYIIVTQVGPGPQILDDPCAHLLGPDGLPKPAA

SEQ ID NO: 8672 - DNA, 1610 bp, Rattus norvegicus
  ref <308>: DATABASE ACCESSION NUMBER: EMBL / U53922
  ref <309>: DATABASE ENTRY DATE: 2001-10-30
ggccgggcggaactttccagaacgctcggtgggtggtagaggagcagcgtctggccgagctgcgctgtgctacgctcctctttccgctctccggcgccggcccgctcaccggctgtaaaaaatggtgaaagaaactacttactatgatgttctgggggtcaaacccaatgccacccaggaagaattgaaaaaggcatatagaaaattggccttgaagtaccaccctgataaaaatccaaatgaaggagaaaagtttaaacagatttctcaagcttatgaagttcttgctgattccaagaaaagggaactatatgataaagggggcgagcaggcgattaaggagggcggagcaggtggaggttttggctcgcccatggatatctttgatatgttctttggaggaggaggaaggatgcaaagagaaaggagaggtaaaaatgtcgtgcatcagctctcagtgaccttagaagacttatataatggtgcaacaaggaaactggctctgcaaaaaaatgtgatttgtgacaaatgtgaaggccgaggtggtaagaaaggagcagtagagtgctgtcccaactgccgggggactggcatgcagatcaggattcatcagattggaccaggaatggttcagcaaattcagtcagtgtgcatggagtgccagggtcatggagaacgcatcagtcctaaagacagatgtaaaagctgcaatggaagaaagatagttcgagagaagaaaattttagaagttcatattgataaaggcatgaaagatggtcagaagataacattccacggtgaaggagaccaagaaccaggactggagccaggagatattatcattgtgttagatcagaaggaccatgctgtttttacaaggcgaggagaagaccttttcatgtgtatggacatacagctggttgaagcattgtgtggcttccaaaagccaatatctactcttgacaaccgaaccatagtcatcacctctcatccaggtcagattgtcaagcatggggatataaaatgtgtgctaaatgaaggtatgccaatataccgtcggccatatgaaaagggacgtctaatcattgagtttaaggtaaactttcctgaaaatggctttctctctcctgataaactctctttgctggaaaaactccttcctgaaaggaaggaagtagaagagactgatgaaatggatcaggtagaactggtggactttgatccaaatcaggaaagacggcgtcattataatggagaagcgtatgaggatgatgagcatcaccccagaggtggcgttcagtgtcagacctcttaatgggccagtcactctttgaccttgtgtatgcagtagtgaatgtgggaaggactgtaatcataatatgctcactacttggctgttgtttttgttttaatattcaactatagtagtgttttaaaagttaaatgaagaataaacacaaatataaaagctctgactttgccctgtatgtatgatgactttaatgttcaagatgaaaatgaatacttgtaaaaaactagtttaaaaaatgccctagcatctgttaggccatatcttgtgtaactgataatagcgtgtacattagactgac

SEQ ID NO: 8673 - protein, 397 aa, Rattus norvegicus
  ref <308>: DATABASE ACCESSION NUMBER: SWISS-Prot / P54102
  ref <309>: DATABASE ENTRY DATE: 2001-10-16
MVKETTYYDVLGVKPNATQEELKKAYRKLALKYHPDKNPNEGEKFKQISQAYEVLADSKKRELYDKGGEQAIKEGGAGGGFGSPMDIFDMFFGGGGRMQRERRGKNVVHQLSVTLEDLYNGATRKLALQKNVICDKCEGRGGKKGAVECCPNCRGTGMQIRIHQIGPGMVQQIQSVCMECQGHGERISPKDRCKSCNGRKIVREKKILEVHIDKGMKDGQKITFHGEGDQEPGLEPGDIIIVLDQKDHAVFTRRGEDLFMCMDIQLVEALCGFQKPISTLDNRTIVITSHPGQIVKHGDIKCVLNEGMPIYRRPYEKGRLIIEFKVNFPENGFLSPDKLSLLEKLLPERKEVEETDEMDQVELVDFDPNQERRRHYNGEAYEDDEHHPRGGVQCQTS

SEQ ID NO: 8674 - DNA, 1474 bp, Homo sapiens
  ref <308>: DATABASE ACCESSION NUMBER: EMBL / BC008182
  ref <309>: DATABASE ENTRY DATE: 2001-07-13
gctcggtgagaggcggaggagcggtaactaccccggctgcgcacagctcggcgctccttcccgctccctcacacaccggcctcagcccgcaccggcagtagaagatggtgaaagaaacaacttactacgatgttttgggggtcaaacccaatgctactcaggaagaattgaaaaaggcttataggaaactggccttgaagtaccatcctgataagaacccaaatgaaggagagaagtttaaacagatttctcaagcttacgaagttctctctgatgcaaagaaaagggaattatatgacaaaggaggagaacaggcaattaaagagggtggagcaggtggcggttttggctcccccatggacatctttgatatgttttttggaggaggaggaaggatgcagagagaaaggagaggtaaaaatgttgtacatcagctctcagtaaccctagaagacttatataatggtgcaacaagaaaactggctctgcaaaagaatgtgatttgtgacaaatgtgaaggtagaggaggtaagaaaggagcagtagagtgctgtcccaattgccgaggtactggaatgcaaataagaattcatcagataggacctggaatggttcagcaaattcagtctgtgtgcatggagtgccagggccatggggagcggatcagtcctaaagatagatgtaaaagctgcaacggaaggaagatagttcgagagaagaaaattttagaagttcatattgacaaaggcatgaaagatggccagaagataacattccatggtgaaggagaccaagaaccaggactggagccaggcgatattatcattgtgttagatcagaaggaccatgctgtttttactcgacgaggagaagaccttttcatgtgtatggacatacagctcgttgaagcactgtgtggcttccagaagccaatatctactcttgacaaccgaaccatcgtcatcacctctcatccaggtcagattgtcaagcatggagatatcaagtgtgtactaaatgaaggcatgccaatttatcgtagaccatatgaaaagggtcgcctaatcatcgaatttaaggtaaactttcctgagaatggctttctctctcctgataaactgtctttgctggaaaaactcctacccgagaggaaggaagtggaagagactgatgagatggaccaagtagaactggtggactttgatccaaatcaggaaagacggcgccactacaatggagaagcatatgaggatgatgaacatcatcccagaggtggtgttcagtgtcagacctcttaatgggccagtgaataacactcactgctggcatttaatgtgcagtagtgaatgagtgaaggactgtaatcataatatgctcactacttgctcttgtttttgttttaataaactatagtagtgttttaaaaagttaaatgaagaataaacgcaaatataaaagcaaaaaaaaaaaaaaa

SEQ ID NO: 8675 - protein, 397 aa, Homo sapiens
  ref <308>: DATABASE ACCESSION NUMBER: SWISS-Prot / P31689
  ref <309>: DATABASE ENTRY DATE: 2002-06-15
MVKETTYYDVLGVKPNATQEELKKAYRKLALKYHPDKNPNEGEKFKQISQAYEVLSDAKKRELYDKGGEQAIKEGGAGGGFGSPMDIFDMFFGGGGRMQRERRGKNVVHQLSVTLEDLYNGATRKLALQKNVICDKCEGRGGKKGAVECCPNCRGTGMQIRIHQIGPGMVQQIQSVCMECQGHGERISPKDRCKSCNGRKIVREKKILEVHIDKGMKDGQKITFHGEGDQEPGLEPGDIIIVLDQKDHAVFTRRGEDLFMCMDIQLVEALCGFQKPISTLDNRTIVITSHPGQIVKHGDIKCVLNEGMPIYRRPYEKGRLIIEFKVNFPENGFLSPDKLSLLEKLLPERKEVEETDEMDQVELVDFDPNQERRRHYNGEAYEDDEHHPRGGVQCQTS

SEQ ID NO: 8676 - DNA, 1092 bp, Rattus norvegicus
  ref <308>: DATABASE ACCESSION NUMBER: EMBL / U54632
  ref <309>: DATABASE ENTRY DATE: 1999-01-07
aggggaagtcccgagacaaaggagcgccgccgcctctgccgccgcgacggtccgggccgcggtcgcccagggactttgaatatgtcggggattgccctcagccgacttgcgcaggagaggaaagcctggaggaaggaccacccttttggctttgtggctgtcccaacaaagaaccctgatggcacgatgaacctgatgaactgggagtgtgctatccctggaaagaaggggactccgtgggaaggaggcttgttcaagctacggatgcttttcaaagatgactatccgtcctcaccaccaaaatgtaaatttgagccaccactgtttcatccaaacgtgtatccttctggcacagtgtgcctgtccatcctggaggaagacaaggactggcggccagctattacgatcaaacagatcttattaggaatacaagaacttctaaatgaaccaaatattcaagacccagctcaagcagaggcctatacaatttactgccaaaacagagtggaatatgagaaaagggttcgagcacaagcgaagaagtttgccccctcataagcagcggcccgggctccatgacgaggaagggattggcttggcaagaacttgtttacaaccttttgcagatctaagtcgctccgtacagttactagtagcctgggagggttgagcgggcgccattttccatttccgccactggcatattcagtcttttgtatttttgattattgagtaaaacttgcttttattttaatattgatgtcagtatttcaactgctgtaaaatgataaacttttgtacttggtaagccctaggagctagtttcttctcgtccgctcggatcgaggcatgttccccactgttcagagctctggcctccagctggctgtatgacagaaccacactgtccctccttccttccctaccctcgtccttctcagaaacctgggctgttgcttatgagcctcagatccaaagttggccagcatctccattctgcaccacttcctttgtgtttatatggcgttttgtctgtgttgctgtttagagtaaataaactgtttatataaaaaaaaaaaaaaaaaaaaaaaa

SEQ ID NO: 8677 - protein, 158 aa, Rattus norvegicus [sequence omitted]

SEQ ID NO: 8678 - DNA, 1077 bp, Homo sapiens
  ref <308>: DATABASE ACCESSION NUMBER: EMBL / U29092
  ref <309>: DATABASE ENTRY DATE: 1999-06-30
aattcggcacgagggactttgaacatgtcggggatcgccctcagcagactcgcccaggagaggaaagcatggaggaaagaccacccatttggtttcgtggctgtcccaacaaaaaatcccgatggcacgatgaacctcatgaactgggagtgcgccattccaggaaagaaagggactccgtgggaaggaggcttgtttaaactacggatgcttttcaaagatgattatccatcttcgccaccaaaatgtaaattcgaaccaccattatttcacccgaatgtgtacccttcggggacagtgtgcctgtccatcttagaggaggacaaggactggaggccagccatcacaatcaaacagatcctattaggaatacaggaacttctaaatgaaccaaatatccaagacccagctcaagcagaggcctacacgatttactgccaaaacagagtggagtacgagaaaagggtccgagcacaagccaagaagtttgcgccctcataagcagcgaccttgtggcatcgtcaaaaggaagggattggtttggcaagaacttgtttacaacatttttgcaaatctaaagttgctccatacaatgactagtcacctgggggggttgggcgggcgccatcttccattgccgccgcgggtgtgcggtctcgattcgctgaattgcccgtttccatacagggtctcttccttcggtcttttgtatttttgattgttatgtaaaactcgcttttattttaatattgatgtcagtatttcaactgctgtaaaattataaacttttatacttgggtaagtcccccagggcgagttcctcgctctgggatgcaggcatgcttctcaccgtgcagagctgcacttggcctcagctggctgtatggaaatgcaccctccctcctgccgctcctctctagaaccttctagaacctgggctgtgctgcttttgagcctcagaccccagggcagcatctcggttctgcgccacttcctttgtgttatatggcgttttgtctgtgttgctgtttagagtaaataaactgtttatataaaaaaaaaaaaaaaaaaactcga

SEQ ID NO: 8679 - protein, 158 aa, Homo sapiens [sequence omitted]

SEQ ID NO: 8680 - DNA, 1092 bp, Rattus norvegicus; identical to SEQ ID NO: 8676
  ref <308>: DATABASE ACCESSION NUMBER: EMBL / U54632
  ref <309>: DATABASE ENTRY DATE: 1999-01-07

SEQ ID NO: 8681 - protein, 158 aa, Rattus norvegicus [sequence omitted]

SEQ ID NO: 8682 - DNA, 1077 bp, Homo sapiens; identical to SEQ ID NO: 8678
  ref <308>: DATABASE ACCESSION NUMBER: EMBL / U29092
  ref <309>: DATABASE ENTRY DATE: 1999-06-30

SEQ ID NO: 8683 - protein, 158 aa, Homo sapiens [sequence omitted]

SEQ ID NO: 8684 - DNA, 3726 bp, Rattus norvegicus
  ref <308>: DATABASE ACCESSION NUMBER: EMBL / U55815
  ref <309>: DATABASE ENTRY DATE: 2000-03-04
atgcctcacttcaccgtggtgccggtggacgggccgcgacgcggcgactatgacaacctcgaggggctcagttgggtggactacggggagcgcgccgagcgggaagactcggatggacagggtaaccacagagagaatagtcccttccttagccctttggacgcctccagaggaaatgactactatgaccggaacctggcactgtttgaggaggagctggacatccgcccaaaggtatcatctctcctgggcaagcttgtcagctataccaacctcacccaaggagccaaggagcacgaggaagctgagagtggagaaggtggccgtcggagagccgccaaggcacccagcatgggcacccttatgggagtgtacctgccctgcctgcagaatatcttcggggtcatcctcttcctgcggctgacctggatggtgggcacagctggcgtgctgcaggctctcctcattgtcctcatctgttgctgctgtaccctgctgacagccatctccatgagtgccatcgccaccaatggtgtggttccagctggtggctcttacttcatgatttcccgctctttgggaccagaattcggaggtgctgtgggcctatgcttctacctggggaccacatttgcagcagccatgtatatcctaggagccattgagatcttgctgacctacattgctccaccagctgccatcttttacccatcgggcacacacgacatgtcaagcgccaccttgaataacatgcgggtgtacggaaccattttcctgactttcatgaccctagtggtgtttgtcggtgtcaagtatgtgaacaagttcgcctcactcttcctggcctgtgtgatcatctccatcctctccatttacgtgggaggcatcaagtccgcttttgaccctcctgtttttccggtgtgcatgctgggcaataggactctgtctcgggaccagtttgacatctgtgccaagacagttgtggtggacaatgagacagtggccacccggctgtggactttcttctgccacagccccaaccttactgctgactcctgtgacccctacttcctgctcaacaatgtgacagagattcctggcatacctggggcagctgctggtgtgctccaggaaaacctgtggagtgcttacctggagaagggtgaggttgtggagaagcatgggctgccctccacagatacccttggcctgaaggagagcctgtccctgtatgtggtggccgacatcgccacatccttcaccgtgctggttggcatctttttcccttctgtaacaggcatcatggctggctcaaaccgttccggggacctccgtgatgctcagaagtctatccctgtggggaccattctggctattgtcaccacttcactcgtgtacttcagcagtgtgattctcttcggtgcctgcatcgagggtgtggtgctccgggacaagtacggtgatggcgtcagcaggaacctggtggtaggcaccttggcctggccttcaccttgggtcatcgtggtcggctccttcttctcaacatgtggtgccggcctccaaagtctcactggggcgccacgtttactgcaagccattgccaaggataacatcatccccttcctccgggtgtttggccacgggaaagccaatggtgagccaacgtgggccctcctcctgacagcgctcatcgctgagctgggcatcctcatcgcctcccttgacatggtggcccccattctttccatgttctttctgatgtgttacctctttgtaaacttggcctgtgctgtgcagacacttctgaggacccccaactggcggccccggttcaagtactatcactgggcgttgtctttcctgggcatgagtctgtgcctggctctcatgtttgtctcctcctggtactacgccctagtggccatggtcatcgcaggcatgatctacaagtacatcgagtaccaaggggctgagaaggagtggggtgatgggatccgaggcctgtccctgagtgccgcacgatatgcactgctgagactagaggaagggcctcctcacacgaagaactggcggcctcagctcctggtgctgctgaagttagacgaagatcttcatgtgaagtaccctcggctcctcacctttgcctcccaacttaaggctgggaaaggcctgacaatcgttggctctgtcatccagggcagctttctggagagctatggggaagcccaggctgctgagcagacaatcaagaacatgatggagattgagaaagtaaaaggcttctgccaggtagtggtggccagcaaggttcgagaggggctggcccacctcatccagtcttgcggcctgggtggcatgagacataactccgtggtgctgggctggccctatggctggcgacagagtgaggacccacgtgcctggaagacctttatcgacactgtgcgctgcaccacagctgcccacctggccctgctggtgccaaagaacatagctttctaccccagcaaccacgagcgctacctggagggccacattgatgtgtggtggatcgtgcatgacggaggcatgctgatgctgctgcccttcctgctgcgccagcataaggtttggaagaagtgccggatgcgcattttcaccgtggcccagatggacgacaacagcatccagatgaagaaggatctggccatcttcctgtatcacctccgcctggaagctgaagtggaggtggtagagatgcacaacagtgacatctcggcctacacctacgagcggacactgatgatggagcagcggtctcaaatgctgcgacagatgaggctgaccaaaacagagcgggatcgagaggcccagctggtgaaggacaggcactcggctctgaggctagagagcctctactccgacgaggaggatgagtctgtgacaggcgctgacaagatccagatgacatggaccagagacaagtacatggctgaaccctgggaccccagccatgcccctgacaacttccgggagctggtgcacattaagccggaccagtccaatgtgcggcgtatgcacactgctgtgaagctcaatgaagtcattgtcacacgctcccatgatgcccgcctggtcctactgaacatgcccggcccccctaagaacagtgagggtgatgagaactacatggaattccttgaagtcctaaccgagggccttgaacgggtgttgttggtgcgtggtggtggccgggaagtcatcaccatctattcttgagcccgatggagtcttgtggcctggagttgggttgtctaagacaacagtgcccagccttgcacctacttgccagttctgccttgcccagccttgctttggactagctttgctaggtctccagggaaaccaagcttgggccttgcaatgggaatggatccgagggcccacgggacctggaggatttagggactttcccctcccatactccaagggaggcctctcctgactcgagatgactggtgagggctgatgtgggatttgaagtcccagactggctcacaagtgctatttattgtatatttattgtgtggatgtcatcatttcagaaaggggggagacaataaaagggggagccgagctgggcctgtctgcaggaagatctggctcaggctgctgtgggcagcatcaagccaagtggaatggagctggccaagctgagcctgacttttttcaataaaacctcgtgcc

SEQ ID NO: 8685 - protein, 1085 aa, Rattus norvegicus
  ref <308>: DATABASE ACCESSION NUMBER: SWISS-Prot / AAC52634
  ref <309>: DATABASE ENTRY DATE: 2003-02-01
MPHFTVVPVDGPRRGDYDNLEGLSWVDYGERAEREDSDGQGNHRENSPFLSPLDASRGNDYYDRNLALFEEELDIRPKVSSLLGKLVSYTNLTQGAKEHEEAESGEGGRRRAAKAPSMGTLMGVYLPCLQNIFGVILFLRLTWMVGTAGVLQALLIVLICCCCTLLTAISMSAIATNGVVPAGGSYFMISRSLGPEFGGAVGLCFYLGTTFAAAMYILGAIEILLTYIAPPAAIFYPSGTHDMSSATLNNMRVYGTIFLTFMTLVVFVGVKYVNKFASLFLACVIISILSIYVGGIKSAFDPPVFPVCMLGNRTLSRDQFDICAKTVVVDNETVATRLWTFFCHSPNLTADSCDPYFLLNNVTEIPGIPGAAAGVLQENLWSAYLEKGEVVEKHGLPSTDTLGLKESLSLYVVADIATSFTVLVGIFFPSVTGIMAGSNRSGDLRDAQKSIPVGTILAIVTTSLVYFSSVILFGACIEGVVLRDKYGDGVSRNLVVGTLAWPSPWVIVVGSFFSTCGAGLQSLTGAPRLLQAIAKDNIIPFLRVFGHGKANGEPTWALLLTALIAELGILIASLDMVAPILSMFFLMCYLFVNLACAVQTLLRTPNWRPRFKYYHWALSFLGMSLCLALMFVSSWYYALVAMVIAGMIYKYIEYQGAEKEWGDGIRGLSLSAARYALLRLEEGPPHTKNWRPQLLVLLKLDEDLHVKYPRLLTFASQLKAGKGLTIVGSVIQGSFLESYGEAQAAEQTIKNMMEIEKVKGFCQVVVASKVREGLAHLIQSCGLGGMRHNSVVLGWPYGWRQSEDPRAWKTFIDTVRCTTAAHLALLVPKNIAFYPSNHERYLEGHIDVWWIVHDGGMLMLLPFLLRQHKVWKKCRMRIFTVAQMDDNSIQMKKDLAIFLYHLRLEAEVEVVEMHNSDISAYTYERTLMMEQRSQMLRQMRLTKTERDREAQLVKDRHSALRLESLYSDEEDESVTGADKIQMTWTRDKYMAEPWDPSHAPDNFRELVHIKPDQSNVRRMHTAVKLNEVIVTRSHDARLVLLNMPGPPKNSEGDENYMEFLEVLTEGLERVLLVRGGGREVITIYS

SEQ ID NO: 8686 - DNA, 4318 bp, Homo sapiens
  ref <308>: DATABASE ACCESSION NUMBER: EMBL / AK024493
  ref <309>: DATABASE ENTRY DATE: 2000-09-29
gacatcccggtctgcctcctggggaaccgcacgctgtcacggcgcagcttcgatgcctgcgtcaaggcctacggcatccacaacaactcagccacctccgcgctctggggcctcttctgcaacggctcccagcccagcgccgcctgtgacgagtacttcatccagaacaacgtcaccgaaatccagggcatcccgggcgcggccagtggtgtcttcctggagaacctgtggagtacgtacgcgcacgcgggggcgtttgtggagaagaaaggtgtgccctcggtgcccgtggcagaggagagccgtgccagcgcactgccctacgtgctcaccgacatcgcggcctccttcaccctgctggttggcatctacttcccctccgtgaccggtatcatggcgggttcaaaccggtccggggacctcaaggatgcacagaagtccatccccacggggaccatcctggccatagtgacgacgtctttcatctatctctcctgcattgtgctgtttggggcctgcattgaaggcgtggtcttacgagataagttcggggaggccctgcaggggaacctggtcatcggcatgctggcctggccctccccctgggtcatcgtcatcggctccttcttctccacctgcggtgccggcctgcagagcctcacgggggcaccgcgcctactgcaggccattgcccgtgacggcatcgtccccttcctgcaggtgtttggccacgggaaggccaacggggagcccacgtgggcgctgctgctgacagtcctcatctgcgagactggcatcctcatcgcctctctggacagcgtggccccgatcctctccatgttcttcctcatgtgctacctgttcgtgaacctggcctgcgccgtgcagaccctgctacgtacccccaactggcgtccacgcttcaagttctaccactggaccctgtcctttctgggtatgagcctgtgcctggcgctgatgttcatctgctcctggtactacgcgctgtccgccatgctcatcgctggctgcatctacaagtacatcgagtaccgcggggccgagaaggagtggggcgatggcatccgtggcctatccctgaacgccgcccgctacgccctgctgcgcgtggagcacggtcccccccacaccaagaactggaggccccaggtgctggtgatgctgaacctggacgcggagcaggccgtgaagcacccccgcctgctgtccttcacgtcgcagctgaaggccggcaagggcctgaccatcgtgggctcggtgctggaggggacgtacctggacaagcacatggaggctcagcgggccgaggagaacatacggtccctaatgagcacagagaagaccaagggcttctgccagctggtggtctcgtccagcctgcgggatggcatgtcccacctgatccagtcggccggcctgggcggcctgaagcacaacacggtgctcatggcctggcccgcatcctggaagcaggaggacaaccccttctcctggaagaactttgtagacaccgtccgcgacaccaccgccgcgcaccaggctctgctggtggccaagaacgtcgactcgtttccgcaaaaccaggagcgcttcggcgggggccacatcgacgtgtggtggatcgtgcacgacggcggcatgctcatgctgctgcccttcctgctgcgccagcacaaggtgtggaggaagtgccggatgcgtatcttcaccgtggcccaggtggacgacaacagcatccagatgaagaaggacctgcagatgttcttgtaccacttgcgcatcagcgccgaggtggaggtggtggagatggttgaaaacgacatatctgctttcacctacgagaggacactaatgatggagcagaggtcgcagatgctgaagcagatgcagctgtccaagaacgagcaggagcgagaggcccagctgatccacgacaggaacaccgcgtcccacaccgcggcggcagccaggacccaagcgccgcctacgccagacaaggtgcagatgacctggaccagggagaagctgatcgctgagaagtacaggagcagagacaccagcctatctggtttcaaagacctcttcagcatgaagccggaccagtccaacgtcaggcggatgcacacggctgtgaagctcaatggcgtcgtcctcaacaagtcccaggatgcgcagctggtcctgctcaacatgccaggtcctcccaaaaaccggcagggagacgagaactacatggagtttcttgaagtcctgaccgaggggctgaacagagtcctcctggtcaggggtggcggccgggaggtgatcaccatctactcctaatgcccaacagcatcacggcactctgggacaggcacggaggacggcgtgggcagcctgggcctgggcttggcccagggaaacagacggcagacacacctgtcccccagtgatgccacccaagctgcccatggggcttcctacggaagtttctaggcccgtcacctagggctctcctgttcagccttaacaggctcagcaaatcagggcgtggctggacgatttccttgcatctgagggcagacgctgctaccggagtgacctggacgtggccagatcttctcgcaggtcacaagaagccagtgagcccttgccttggtttctggaagttcttttccttggctggatttacccagtggttaggttgcatttctaccccatccagaacattcttggaagagcacccggagctgaagctgtccctgatgatgaaggtgaaacgtcagccctggccatggctccgctcagggccccggtcacctccgagtcactctgttccttgactgtctttgtgtttctgtacctcaaggcactgaagctggaggactctgtccatgcccgtgtcaccctcgtgtgggagcctctgggctcggcaggtccacatttcatgagctgaggcgtgggccagggccatctggaaagggaactcggcttttccagaacgtggtggatcatctgtcgggtgtgtggtgaacacgttcagttcatcagggcctacgctccgggaaggggcccccagctgtggctctgccatgccgggctgtgtttgcagctgtccgagtctccatccacctttagaaaaccagccacttcttttcataagcactgacagggcccagcccacagccacaggtgcgatcagtgcctcacgcaggcaaatgcactgaaacccaggggcacacgcgcgcagagtgaacagtgagttcccccgacagcccacgacagccaggactgccctccccaccccaccccaccccaggagcacggcacacagttcagcctctgagctggctcacacgtgccatccccaccccggtgctccagggaaggaggacacggacccgacgtgggaggtcctcaggcagcagtggcgcctggtgtcaggtctgtctggctgagtcccgggcgtcccctgccatggcctgtgccttgcatggaggcggcggtggcactgaagagatagctttcaagggcccaacactttgcacttcggctggctgtgagtttctgctttgtaggttgtggtcacatttgcaggctgcgggcagtggcaccgacttgggcctccctttctatgtggcatatttatttatttaaacaccccagggagttacgtggtaacaaggttgtccataaagaggttgcttctatatactagaggccccagatggccaggccttgggctacgtctggcttgcatggtctcccaagggaatcagccccatcaacaaagttcaaatcggggcagaggctgcacttgtgcccccagatgtttctgaggagccagactagggctggcattgctgtagagtgacggctgctgcccagagcgtgtcccagacatcacagcggggctcagcagttcccacagcctctgcctgccttggctaagcatgagttaagcagcaaaacgctcctccatgtctggatggggccggcaggtcctgtgtcccctgcacctggaggagagcaggctagaggcacagcggccacatggtgctggctctgaacgttggttggtggctggaaaacagccctgcttctgagggccgctcagttctgcacacgaaaccacctcctgagggctcagctctgcccccgccctgggctgcagcctctgcacgcaagcaccaggcatcctttgtgttgtcaactccgtgtaaccagtaactacagccatttacaattgactccgtttccttttgtaggtttccctgtctgtctgtgttagtagaaaaataaaatcctatgaaatctg

SEQ ID NO: 8687 - protein, 1085 aa, Homo sapiens
  ref <308>: DATABASE ACCESSION NUMBER: Refseq / NP_005063
  ref <309>: DATABASE ENTRY DATE: 2002-11-05
MPHFTVVPVDGPRRGDYDNLEGLSWVDYGERAELDDSDGHGNHRESSPFLSPLEASRGIDYYDRNLALFEEELDIRPKVSSLLGKLVSYTNLTQGAKEHEEAESGEGTRRRAAEAPSMGTLMGVYLPCLQNIFGVILFLRLTWMVGTAGVLQALLIVLICCCCTLLTAISMSAIATNGVVPAGGSYFMISRSLGPEFGGAVGLCFYLGTTFAAAMYILGAIEILLTYIAPPAAIFYPSGAHDTSNATLNNMRVYGTIFLTFMTLVVFVGVKYVNKFASLFLACVIISILSIYAGGIKSIFDPPVFPVCMLGNRTLSRDQFDICAKTAVVDNETVATQLWSFFCHSPNLTTDSCDPYFMLNNVTEIPGIPGAAAGVLQENLWSAYLEKGDIVEKHGLPSADAPSLKESLPLYVVADIATSFTVLVGIFFPSVTGIMAGSNRSGDLRDAQKSIPVGTILAIITTSLVYFSSVVLFGACIEGVVLRDKYGDGVSRNLVVGTLAWPSPWVIVIGSFFSTCGAGLQSLTGAPRLLQAIAKDNIIPFLRVFGHGKVNGEPTWALLLTALIAELGILIASLDMVAPILSMFFLMCYLFVNLACAVQTLLRTPNWRPRFKYYHWALSFLGMSLCLALMFVSSWYYALVAMLIAGMIYKYIEYQGAEKEWGDGIRGLSLSAARYALLRLEEGPPHTKNWRPQLLVLLKLDEDLHVKYPRLLTFASQLKAGKGLTIVGSVIQGSFLESYGEAQAAEQTIKNMMEIEKVKGFCQVVVASKVREGLAHLIQSCGLGGMRHNSVVLGWPYGWRQSEDPRAWKTFIDTVRCTTAAHLALLVPKNIAFYPSNHERYLEGHIDVWWIVHDGGMLMLLPFLLRQHKVWRKCRMRIFTVAQMDDNSIQMKKDLAVFLYHLRLEAEVEVVEMHNSDISAYTYERTLMMEQRSQMLRQMRLTKTEREREAQLVKDRHSALRLESLYSDEEDESAVGADKIQMTWTRDKYMTETWDPSHAPDNFRELVHIKPDQSNVRRMHTAVKLNEVIVTRSHDARLVLLNMPGPPRNSEGDENYMEFLEVLTEGLERVLLVRGGGREVITIYS

SEQ ID NO: 8688 - DNA, 3726 bp, Rattus norvegicus; identical to SEQ ID NO: 8684
  ref <308>: DATABASE ACCESSION NUMBER: EMBL / U55815
  ref <309>: DATABASE ENTRY DATE: 2000-03-04

SEQ ID NO: 8689 - protein, 1085 aa, Rattus norvegicus; identical to SEQ ID NO: 8685
  ref <308>: DATABASE ACCESSION NUMBER: SWISS-Prot / AAC52634
  ref <309>: DATABASE ENTRY DATE: 2003-02-01

SEQ ID NO: 8690 - DNA, 4318 bp, Homo sapiens; identical to SEQ ID NO: 8686
  ref <308>: DATABASE ACCESSION NUMBER: EMBL / AK024493
  ref <309>: DATABASE ENTRY DATE: 2000-09-29

SEQ ID NO: 8691 - protein, 1085 aa, Homo sapiens; identical to SEQ ID NO: 8687
  ref <308>: DATABASE ACCESSION NUMBER: Refseq / NP_005063
  ref <309>: DATABASE ENTRY DATE: 2002-11-05

SEQ ID NO: 8692 - DNA, 3726 bp, Rattus norvegicus; identical to SEQ ID NO: 8684
  ref <308>: DATABASE ACCESSION NUMBER: EMBL / U55815
  ref <309>: DATABASE ENTRY DATE: 2000-03-04

SEQ ID NO: 8693 - protein, 1085 aa, Rattus norvegicus; identical to SEQ ID NO: 8685
  ref <308>: DATABASE ACCESSION NUMBER: SWISS-Prot / AAC52634
  ref <309>: DATABASE ENTRY DATE: 2003-02-01

SEQ ID NO: 8694 - DNA, 4318 bp, Homo sapiens; identical to SEQ ID NO: 8686
  ref <308>: DATABASE ACCESSION NUMBER: EMBL / AK024493
  ref <309>: DATABASE ENTRY DATE: 2000-09-29

SEQ ID NO: 8695 - protein, 1085 aa, Homo sapiens; identical to SEQ ID NO: 8687
  ref <308>: DATABASE ACCESSION NUMBER: Refseq / NP_005063
  ref <309>: DATABASE ENTRY DATE: 2002-11-05

SEQ ID NO: 8696 - DNA, 1688 bp, Rattus norvegicus
  ref <308>: DATABASE ACCESSION NUMBER: EMBL / U56839
  ref <309>: DATABASE ENTRY DATE: 1998-02-05
gaattcctgcctcagtcccagtagctggtccaggcctgtgcacatgcgagtgaagaactggaacggacgctgagcatccaagagcacctgctgcagcacctgctgtcacaccaagagcaggagctgatcgggtccagggcaatggcagcaggcctggactcctggaatagtaccatcaatggcacctgggagggggacgaactgggttacaaatgtcgcttcaacgaggacttcaagtatgtgctgctgcccgtgtcctatggcgtggtgtgcgtgctcgggctgtgcctgaacgtcgtggccctctacatcttcctgtgccgcctcaagacctggaacgcctccaccacctacatgtttcacctggcagtttctgactctctctacgcagcctccctgccgctgctggtttattactacgcccagggtgaccactggccatttagcacagtgctctgcaagctggtgcgtttccttttctacactaacctctactgcagcatcctcttcctcacctgcatcagcgtgcaccggtgcctgggggtcctgcgccctctgcactccctgagctggggccatgcccgctatgcccgccgagtggctgcggttgtgtgggtgctagtgctggcctgccaggcacccgtgctctactttgtcaccaccagcgtgagagggacccgaatcacctgccacgacacctcggcccgagagctctttagccattttgtggcttacagctctgtcatgctgggtctgctttttgctgtgcccttttccatcatcctggtctgttacgtgctcatggcccgacggctgctcaaaccggcttatgggaccacaggtctgcctcgggccaagcgcaagtctgtgcgcaccatcgccttagtactggccgtcttcgccctctgcttcctgcctttccacgtcacccgcaccctctattactccttccgatcacttgacctcagttgccacaccctcaacgccatcaacatggcgtataagatcacccggccactggccagcgccaacagttgccttgaccctgtgctctacttcctggcagggcagagactggtccgctttgcccgagatgccaagcccgccacagagcctacacccagcccacaggctcgtcgtaagctggggctgcacaggcctaacagaactgacactgtgaggaaagatttgtcgatcagcagtgatgactcaagaaggacagagtccacaccagctggaagtgagactaaggacattcgtctatagcagctcagtcaggtgtcagttcatgtaggggagagctgtaggggaccaaagcttgttcaaaggggctgatatcctctgatatgatatcaacggctctcatttggcagggactcaggatactcatcctgtggtcccaagagtgacaggaccccaaagtccccaatcatttgtatgtgtgagttggggaatcgtatctaaggcaacgccacctgactcccatgcaaacagctgccattcctgccaaggtacctaggccgagcttcagcctcttaaatccaagggagaagcaggcccagggagaacacagcagagtccagactagctacctggattagaagtagaatcgaggggttggggatttagctcagcggtagagcgccctgggttcagtccccagctccggaaaaaaaaagaaaaaaaaa

SEQ ID NO: 8697 - protein, 374 aa, Rattus norvegicus
  ref <308>: DATABASE ACCESSION NUMBER: SWISS-Prot / P41232
  ref <309>: DATABASE ENTRY DATE: 2002-06-15
MAAGLDSWNSTINGTWEGDELGYKCRFNEDFKYVLLPVSYGVVCVLGLCLNVVALYIFLCRLKTWNASTTYMFHLAVSDSLYAASLPLLVYYYAQGDHWPFSTVLCKLVRFLFYTNLYCSILFLTCISVHRCLGVLRPLHSLSWGHARYARRVAAVVWVLVLACQAPVLYFVTTSVRGTRITCHDTSARELFSHFVAYSSVMLGLLFAVPFSIILVCYVLMARRLLKPAYGTTGLPRAKRKSVRTIALVLAVFALCFLPFHVTRTLYYSFRSLDLSCHTLNAINMAYKITRPLASANSCLDPVLYFLAGQRLVRFARDAKPATEPTPSPQARRKLGLHRPNRTDTVRKDLSISSDDSRRTESTPAGSETKDIRL

SEQ ID NO: 8698 - DNA, 2681 bp, Homo sapiens
  ref <308>: DATABASE ACCESSION NUMBER: EMBL / BC012104
  ref <309>: DATABASE ENTRY DATE: 2001-08-07
gaacagcgcagggaggtgggtagccgggctcccaggcacgtgggtctctgcggctgcggcgggacccgggcactggcacccgggagcggcggcgacggcaccccgagaggagaagcgcagcgcagtggcgagaggagccccttgtggcagcagcactacctgcccagaaaaatgctggaggctgggcgtggccccaggcctggggacctgtttttcctgtttcccgcagagttccctgcagcccggtccaggtccaggcgtgtgcattcatgagtgaggaacccgtgcaggcgctgagcatcctgacctgtagagcaggggctggtcaggttccagagcttggaggttccaggtccagatccaagtcagatggcaatgaaagccctggtcaggtggctgtgtcaggtcccctaggggcgctccggccacaaccctgatggccccacccctcccttccctgcagggcgatggcagcagacctgggcccctggaatgacaccatcaatggcacctgggatggggatgagctgggctacaggtgccgcttcaacgaggacttcaagtacgtgctgctgcctgtgtcctacggcgtggtgtgcgtgcttgggctgtgtctgaacgccgtggcgctctacatcttcttgtgccgcctcaagacctggaatgcgtccaccacatatatgttccacctggctgtgtctgatgcactgtatgcggcctccctgccgctgctggtctattactacgcccgcggcgaccactggcccttcagcacggtgctctgcaagctggtgcgcttcctcttctacaccaacctttactgcagcatcctcttcctcacctgcatcagcgtgcaccggtgtctgggcgtcttacgacctctgcgctccctgcgctggggccgggcccgctacgctcgccgggtggccggggccgtgtgggtgttggtgctggcctgccaggcccccgtgctctactttgtcaccaccagcgcgcgcgggggccgcgtaacctgccacgacacctcggcacccgagctcttcagccgcttcgtggcctacagctcagtcatgctgggcctgctcttcgcggtgccctttgccgtcatccttgtctgttacgtgctcatggctcggcgactgctaaagccagcctacgggacctcgggcggcctgcctagggccaagcgcaagtccgtgcgcaccatcgccgtggtgctggctgtcttcgccctctgcttcctgccattccacgtcacccgcaccctctactactccttccgttcgctggacctcagctgccacaccctcaacgccatcaacatggcctacaaggttacccggccgctggccagtgctaacagttgccttgaccccgtgctctacttcctggctgggcagagcctcgtacgctttgcccgagatgccaagccacccactggccccagccctgccaccccggctcgccgcaggctgggcctgcgcagatccgacagaactgacatgcagaggatagaagatgtgttgggcagcagtgaggactctaggcggacagagtccacgccggctggtagcgagaacactaaggacattcggctgtaggagcagaacacttcagcctgtgcaggtttatattgggaagctgtagaggaccaggacttgtgcagacgccacagtctccccagatatggaccatcagtgactcatgctggatgaccccatgctccgtcatttgacaggggctcaggatattcactctgtggtccagagtcaactgttcccataacccctagtcatcgtttgtgtgtataagttgggggaattaagtttcaagaaaggcaagagctcaaggtcaatgacacccctggcctgactcccatgcaagtagctggctgtactgccaaggtacctaggttggagtccagcctaatcaagtcaaatggagaaacaggcccagagaggaaggtggcttaccaagatcacataccagagtctggagctgagctacctggggtgggggccaagtcacaggttggccagaaaaccctggtaagtaatgagggctgagtttgcacagtggtctggaatggactgggtgccacggtggacttagctctgaggagtacccccagcccaagagatgaacatctggggactaatatcatagacccatctggaggctcccatgggctaggagccagtgtgaggctgtaacttatactaaaggttgtgttgcctgctgagctgtgccctattgtgtggtcgggggatgaggatatggcagggaagctttcaccagccacacaagggtcctttctccaatccgttcccttttgccacctgccttctcactagctgtctcaggagtagtctcatatcagggatcctctctccaggccccaggtcatcccccactgtaaagccagttggcttctgtgcctgactctgtgctgagcacagagaaaagtcaggtgcagtcccagtccttgagatttcccagtttaggtgatggccagtcatgtgctggtaaatgttaagccatttaactggagctccgatttaactgggaaccccttctttgtagaactgcccatttccatggtgcaaaaactcttatggccaaattcaaactataaacatgatgtcaacttccttgtaaaaaaaaaaaaaaaaaaaaaaaaa

SEQ ID NO: 8699 - protein, 377 aa, Homo sapiens
  ref <308>: DATABASE ACCESSION NUMBER: SWISS-Prot / P41231
  ref <309>: DATABASE ENTRY DATE: 2002-06-15
MAADLGPWNDTINGTWDGDELGYRCRFNEDFKYVLLPVSYGVVCVLGLCLNAVALYIFLCRLKTWNASTTYMFHLAVSDALYAASLPLLVYYYARGDHWPFSTVLCKLVRFLFYTNLYCSILFLTCISVHRCLGVLRPLRSLRWGRARYARRVAGAVWVLVLACQAPVLYFVTTSARGGRVTCHDTSAPELFSRFVAYSSVMLGLLFAVPFAVILVCYVLMARRLLKPAYGTSGGLPRAKRKSVRTIAVVLAVFALCFLPFHVTRTLYYSFRSLDLSCHTLNAINMAYKVTRPLASANSCLDPVLYFLAGQRLVRFARDAKPPTGPSPATPARRRLGLRRSDRTDMQRIEDVLGSSEDSRRTESTPAGSENTKDIRL

SEQ ID NO: 8700 - DNA, 1578 bp, Rattus norvegicus
  ref <308>: DATABASE ACCESSION NUMBER: EMBL / U56862
  ref <309>: DATABASE ENTRY DATE: 2000-03-04
cgaaaacctagaaacaaagtatttcctgtgggcacagacattggttctgcaagagtccctcctatatataggctccagatgaaaagaaagtgaactgtgatttccccacattcctcatttctgaacatgagagaactgtaaggaagaaccattaacacaaagacagttctgtctttcagtcccttgtaaccacatctccggtcactcacataaaaatctctcatatatctggcttgactggacacttacgaattaatattgaaaagaaattgtacgtattcagtgaatgtggcaaagcgttcatccaacttcagtagatgctaggcgagaatccttgtgcgaaacagaatgttggaaagccttcagcccgagtcagagcttctgcatgatgaacctgatcctggagagaaagtttatgaatgtgatgaatgtaggaaaacctttagcctagaacaacactttgtggaacataagaaaacgcacggtggggagaagtcacccgagtgtaccggatgtggtgaagagttctcgaaagcctcttcacttactcgacatctgagaagtcgctcacggagggaatcatataagtgtggtaactgtgggagaaccttcagccagagaggaaacttcctttctcaccagaaacaacatgctgaagagagacccagtgagtctaagaaaactcccgtccccatgacaaccatcgtcagaaatcagagaaacgccgggaataaaccatatgcgtgtaaggagtgtgggaaagcctttaatggcaaatcatatctcaaagaacatgagaaaattcataccggagagaaaccatttgaatgtaatcagtgtggtagagccttcagccagaagcagtacctcattaaacaccagaacgtccacagtgggaagaagccttttaagtgtaatgagtgtggtaaggcttttagccagaaagaaaacctcattatacaccagagaatccataccggagagaagccttatgaatgtaaagggtgtgggaaggccttcattcagaaatcaagcctcatcagacaccagaggagccatactggagagaaaccgtacacatgtaaggaatgtgggaaagccttcagcggcaaatcaaacctgactgagcatgagaaaattcatattggagagaaaccctataaatgtaacgagtgtggaacaattttcaggcagaagcagtacctcatcaaacatcacaacattcacacgggcgagaagccatatgagtgcaataagtgcggaaaggccttttctcgaatcacgtcgcttattgtgcatgtgagaattcacacaggcgataagccctatgagtgtaaagtctgtgggaaagccttctgtcagagttcgtctctaaccgtgcatatgaggagccacacgggtgagaaaccgtatggctgcaatgagtgtgggaaggctttttctcagttctccactcttgctttacacatgagaatccacactggcgagaagccttatcagtgcagtgagtgtgggaaggccttcagccagaagtcccatcacatcagacaccagagaatccatattcactaaaactct

SEQ ID NO: 8701 - protein, 407 aa, Rattus norvegicus
  ref <308>: DATABASE ACCESSION NUMBER: SWISS-Prot / Q62981
  ref <309>: DATABASE ENTRY DATE: 2001-10-16
MLESLQPESELLHDEPDPGEKVYECDECRKTFSLEQHFVEHKKTHGGEKSPECTGCGEEFSKASSLTRHLRSRSRRESYKCGNCGRTFSQRGNFLSHQKQHAEERPSESKKTPVPMTTIVRNQRNAGNKPYACKECGKAFNGKSYLKEHEKIHTGEKPFECNQCGRAFSQKQYLIKHQNVHSGKKPFKCNECGKAFSQKENLIIHQRIHTGEKPYECKGCGKAFIQKSSLIRHQRSHTGEKPYTCKECGKAFSGKSNLTEHEKIHIGEKPYKCNECGTIFRQKQYLIKHHNIHTGEKPYECNKCGKAFSRITSLIVHVRIHTGDKPYECKVCGKAFCQSSSLTVHMRSHTGEKPYGCNECGKAFSQFSTLALHMRIHTGEKPYQCSECGKAFSQKSHHIRHQRIHIH

SEQ ID NO: 8702 - DNA, 841 bp, Homo sapiens
  misc_feature (1)..(841): n=a, c, g or t
  ref <308>: DATABASE ACCESSION NUMBER: EMBL / AL542378
  ref <309>: DATABASE ENTRY DATE: 2001-02-11
cttgccactgaaggctttcccacattccttacacgtataakgtttctctcctgtgtgacttctctggtgtctaatgaggcttgacttctgaatgaaagctttcccacaccctttacattcataaggtttctctccagtatggattctctgatgtataatgaggttttccttctggctaaaagcttttccacactcactacatttaaagggcttctttccagtatggatgttctgatgtttaatgaggtattgcttctggctgaaggctcttccacactgattacattcaaatggtttttctccagtatgaattttctcatgctcagtgagatatgctttgccgttaaaggctttgccacattccttacatgcatagggtttggttcctgtatgatttttctggkgtctgatgatggttggcatctgaatagaaactttttcacattcataaggkttctctccagtgtgatgtttctgatgagaaaggaagttttccttctggctgaaggcttttccacatttattacatttatatgccttctttcctgtgtgacttctaaggtgtagagtaagaaatgagactcgagagcacactttaccacattcagtgcattcatgagatttctctccagtatgcattttcttatgctctacaaggttttgcttcaggctaaaagtttttctacattcattacattcataaggtttctctccagtatgaatttgatcatgctgaaggagatctgattcatgctgaagactttccaacatgcctatcatgcatgtgaatttaatcaggagattnccctagtatctaataagatgtaataagggtgaaagc

SEQ ID NO: 8703 - protein, 292 aa, Homo sapiens
  ref <308>: DATABASE ACCESSION NUMBER: SWISS-Prot / Q15072
  ref <309>: DATABASE ENTRY DATE: 2002-06-15
MSHLSQQKIYSGENPFACKVCGKVFSHKSNLTEHEHFHTREKPFECNECGKAFSQKQYVIKHQNTHTGEKLFECNECGKSFSQKENLLTHQKIHTGEKPFECKDCGKAFIQKSNLIRHQRTHTGEKPFVCKECGKTFSGKSNLTEHEKIHIGEKPFKCSECGTAFGQKKYLIKHQNIHTGEKPYECNECGKAFSQRTSLIVHVRIHSGDKPYECNVCGKAFSQSSSLTVHVRSHTGEKPYGCNECGKAFSQFSTLALHLRIHTGKKPYQCSECGKAFSQKSHHIRHQKIHTH

SEQ ID NO: 8704 - DNA, 3003 bp, Rattus norvegicus
  ref <308>: DATABASE ACCESSION NUMBER: EMBL / U57391
  ref <309>: DATABASE ENTRY DATE: 2000-03-04
gcgcccgccccgagagggtagcagatagtccctcggagtctccgccccaggggcatgtggagggtgtccaccgattaggatcgggtccgagtgattgaccacggggcccggagggtccgaacctggagcgcagcctgcaccctccaccacccgcccttctggaatgtcagaactaagccaagaggcaggtgcaccggaaaattgtgactgagccttcttggcagaagagaaactgagtcaccagtccaggaaccgcagggctgttggcgctcacctcgagtcttctggctgctttcctatttgctccctgcaggctccccctgtcctcctcctggggcacatcatgaatggtgccccttccccagaggatggggttttcccttctccaccagcgctgccaccaccccctcccccaagttggcaagagttctgtgagtcccatgcgagggctgctgccctggatcttgctcgccgttttcgcctctatctggcctcccacccacaatatgcagagccgggagcagaggctgccttttctggccgttttgctgagctcttcctgcagcacttcgaagctgaggtggctcgggcctcgggctcactctccccacctgtcttggctccattgagccctggtgtggaaatcccaccatcacatgacctgtcccttgagagctgcagggtgggtgggcccctggcagtgttgggcccttctcgatcttctgaggacctggctggaccccttccttcctcagtctcttcctctacaacgtcctcaaagccgaagctcaagaaacgcttctccctccgctcggtgggtcgttcagtcagaggttctgtccgaggcatcctgcagtggcggggggctgttgaatctccctcccaagctgggcctctggagaccacatcaggtcctccagttctaggtggaaacagcaactccaactcctctggtggtgctgggacagttggtagggcattggccaacgatggcacatcccctggggagagatggactcatcgctttgagaggctaaggctaagtcgtggagggggaaccttgagagacggagcaggagtgatacagagagaagagctgctgagtttcatgggggctgaagaggctgcccctgacccagcaggagtaggtcgtggaggaggggcagctgggctgacctcgggaggaggagggcagcctcagtggcagaaatgtcgattactgctccggagtgaaggagaaggaggaggaggaagtcgcttggagttctttgtaccacccaaggcatcccggccccgtcttagcattccctgttctactattactgatgtccgcacagccacagccctggagatgcctgacagggagaacacgtttgtggttaaggtagaaggcccttcagagtacatcctggagacaactgatgcacttcatgtgaaggcctgggtgtctgacatccaagagtgcctaagcccaggaccctgccctgctatcagcccccgtcccatgacccttcccctggcccctgggacctccttcctcacaaaggataacacagagagcctggagttgccctgcctgaatcattcagagagtctgcctagccaggatcttcttctgggacccagcgagagtaacgaccgcctgtcgcagggagcttatggaggcctctcagaccggccgtcagcgtccttctcccctagttctgcctccattgctgcttcccattttgactcaatggaactgcttcctccagagttgccccctcggattcccattgaggaggggcctccagcagggacagttcatcccctctctaccccgtaccctcccctggatactcctgaagcagccacagggtcattcctctttcaaggggaggcagaggggggtgagggggaccagcccctctcaggctacccttggttccacggcatgctctctcggctcaaagctgcccagttagtgttagaaggaggtaccagctcccatggtgtcttcttggtacgccagagtgagacaagacgtggtgaatatgtcctcactttcaacttccagggcaaggctaagcacctgcgtttgtcactaaatgaggagggtcagtgccgggtccaacatctgtggttccagtccattttcgatatgcttgagcacttccgggtgcaccccatccctctggagtctggaggctccagtgatgttgtccttgtcagctatgtgccctcccagcggcagcaggaacggagcacctcccgtgatccaacccagccctctgaaccccctccatggacagatcccccacatcctggggcagaagaggcgtcgggggcgccagaagtggcggcagccacagccgcagcagccaaagagaggcaagagaaggagaaagcgggcggcggaggggtccaggaagagctggtccccatggctgagctggtccccatggctgaattggaagaggccatagcaccaggcactgaggctcagggtggtgctggctctagtggggacttggaggtgtccctaatggttcagctccagcagttaccactagggggcaacggagaagaagggggtcacccccgagccattaataaccagtactcatttgtctgagatacctgcccaccctccattttcctgctcccagccttaagttgtgagactgggctgggtaaggacacagaggaaagtgggagtcccctccctacatgcttcctgacccttgtcagccaagggtgtgtatgttggtacaagtagaggttcaagagcccagttaagtccccagttactacactacaggtgcccttgccccgaggccaaggacttgggctccattacctccctgaggggctcttatggtcagccccatccctgggggctgtttcccccactaataacccccaacccaagcaagggtgagggggaagggctgtcagttatattaaggttgttgttgttgttttaaaccaaatggaaaagcataaataaataaagggtttatc

SEQ ID NO: 8705 - protein, 756 aa, Rattus norvegicus
  ref <308>: DATABASE ACCESSION NUMBER: SWISS-Prot / AAC52601
  ref <309>: DATABASE ENTRY DATE: 2003-02-01
MNGAPSPEDGVFPSPPALPPPPPPSWQEFCESHARAAALDLARRFRLYLASHPQYAEPGAEAAFSGRFAELFLQHFEAEVARASGSLSPPVLAPLSPGVEIPPSHDLSLESCRVGGPLAVLGPSRSSEDLAGPLPSSVSSSTTSSKPKLKKRFSLRSVGRSVRGSVRGILQWRGAVESPSQAGPLETTSGPPVLGGNSNSNSSGGAGTVGRALANDGTSPGERWTHRFERLRLSRGGGTLRDGAGVIQREELLSFMGAEEAAPDPAGVGRGGGAAGLTSGGGGQPQWQKCRLLLRSEGEGGGGSRLEFFVPPKASRPRLSIPCSTITDVRTATALEMPDRENTFVVKVEGPSEYILETTDALHVKAWVSDIQECLSPGPCPAISPRPMTLPLAPGTSFLTKDNTESLELPCLNHSESLPSQDLLLGPSESNDRLSQGAYGGLSDRPSASFSPSSASIAASHFDSMELLPPELPPRIPIEEGPPAGTVHPLSTPYPPLDTPEAATGSFLFQGEAEGGEGDQPLSGYPWFHGMLSRLKAAQLVLEGGTSSHGVFLVRQSETRRGEYVLTFNFQGKAKHLRLSLNEEGQCRVQHLWFQSIFDMLEHFRVHPIPLESGGSSDVVLVSYVPSQRQQERSTSRDPTQPSEPPPWTDPPHPGAEEASGAPEVAAATAAAAKERQEKEKAGGGGVQEELVPMAELVPMAELEEAIAPGTEAQGGAGSSGDLEVSLMVQLQQLPLGGNGEEGGHPRAINNQYSFV

SEQ ID NO: 8706 - DNA, 6043 bp, Homo sapiens
  ref <308>: DATABASE ACCESSION NUMBER: EMBL / AB037720
  ref <309>: DATABASE ENTRY DATE: 2000-03-14
gacggggtttcaccatgttggtcaggctggtctcaaactcctgacctcaagccatccgcccgcctcggcctcccaaagggctgggattacaggcgtgagccagcgctcccggccctgacctcattttttttttttctatttttaaaatagggattctagttctgttgcctgggctggagtgccgtggcgccatctcggctcaccgcaatctctgccttccggattcaagctattctcttgcctctgcctccggagggactgggactacaggcgcgcgccaccatgcccggctaatttttgtatttttagtagagacggggtttcaccatgttggccaggctggtctcgaactcctgacctcaggtgatccacctgcctcggccttccgaagtgctgggattacaggcatgagccactgcgcccggccctgacctcattatttctacccaccccctcccccaccactaccaccatcttcatctccagcctcagagatgcaaactcctggaccgcctgcccctttcctcagataaaccaaggtcgtaagttcaggctccgcctccccgcagggcctccccaaggtcacccgcttctttcctcgctcagctccttggtggcgttgtccgcgtgcccctccacagcggggccggcgctctaggctgcagcgggccgttcacacagcctcatcatctcgctggtttccggtgctcggcggctactctagccctcagccgggccctgggactctatcccctaaggccggttctctatggtcgacatcgcccctttgtcccgaatttcctccgggaggacgctctggtgggatccaagcacttcccccgctgcgtctgtggtcgcttttaggtgcaactggagaaggcactgaagccctacgagattcacaccgtcttcggtctcctggggtcggcgccgagtgggaggatggcggaagtaagtatgaaggtgcccttccctcccgccgctgttctctatggtctcttccttcagcgacgggaaagggggtcctgacgcctgcgcggaaccgggctgggcgctcgtcgcgtagtgggtgggggcgcagggagcgggagccgccgccgccgccgccgccgccggagctaacctcggggaccgagatgcaggtgggaccggaaccggaacccccctcttcaagtaccttttccctctccgcgacccggccctggcgcccgagaggattcctgggtgggggtgggcgtggagggccgggggctggagaggcactcggccccggagagtgcagcagacagggctggtcccgaggtggatgcggccccggaaaatgggcggctggggggtgtccagggagtagggtcggatcggagtatatggaccaccgggcccggagggtccgagccgagagcggagcctgcaccctccacctcccgcccttcgggaaatatcagaactgagccaggaggcaggtgcaccgggaaaatgtgtctgagtcctgcttggcagaagagaaactgagtcaccagcttaggagtcgcagggtcagcgggcctgaagggggctgggtctgtctgcggtgcggaggattgggtgggcctgtgtgagccgaggtggccgctggctggagattggtttgcacttcttggctgggttcccccgtgctccatgactcctgcatctcctgattgtttctcgttggtttggagttgtccctgcggttggagccatctgagcttgtagggtcgaggcccaggaggaaggggagggttcaccgacttacagcctggctgtaggtttgaacaggagtctgaggtcgctgagggtttggggaggctttcctgagctgctctggccccagtcctggggctgtcaccttccagtattgcgtggcgggaggagcgctaacaagagccaagggttgtaaattccacacccagctctgccactttctagttgtaagaccttgagagggctcctcctttctctaatttctattttagaaaattggaacaataatattcttctcccacatgaagatagtaacaatggcagtcgttcagcggatgcttactttgcgttcagcgctgacataccccattccatgtaattctctcaacatttcgaggggagggatcattagctttgtttaacagatagaaaaacggaggctcagagaggacgtggaatttgttcaagataacatcgctcataaggtggctggactgggtgctcataaggtggtttgagccctggtctgactcaagtccatggccttaaccagaaggctaacctgcctttagggcatactccccagtgggagaagaggaaggtgaaaaatcctagggccccagctctccctgtgatgttttgtttacgtgaggccagcaaagacttgacctgagccaacccagtttctcctctggggcccctgcggcctctggccccagactgaagggataccaaagaagtgggctgtagctatttcacatctccttcacgcagtgcgtgggtgctggactctggggtcagctttcaagacaattactgttttggtccatcatgcatccatcctcattaatgaatcggccccctccaaagagttggaccctaagatgcgtgaggcaggctctctaaggtctagaatcccagctcctctctagccccctgcgagctggggcggtgaggtgctatggctgaggctggcccagccgggccctggggacagggactatgaagtggggaaaacagtagacttggagttctgaaacttttctgagcttcggtttcctcatctgttcgagaggtctttgaaacctctcagggaaaggtaagataaccaagtgggagcctctagaatggctcatgggaagtgtgacatgaatattggaggatccgatgtagagggggggtgatctggaaaagttcccttttttagggggaaggtgctccaaagccctctactgctggatccaaagctaaggaaagtgggggcaaatgtggcaggctcggggcaggttagacgctggggagccagttggctggggcctgcagggtgccaggatctgggagagggaagggaggtgttgggctcccttccccattgctctctgcggagtctgaagtagggtcggacgtctctggctgggggtgggatgcagcctccggtgcgccctcagcagtgaccctcgtgtgtgcctctctcttcctttcgcagctgctgccgcccacccctcgtcttctggctgcctccctctttgtgccccacaggctccccctctccacctcctggggcccatcatgaatggtgccccttccccagaggacggggcctccccctcgtctcccccgctgcccccacccccgccccctagttggcgggagttctgtgagtcccacgcccgggctgcggctctggactttgcccgccgttttcgcctctacctggcctcccacccccaatatgcggggcccggggccgaggctgccttctcccgccgttttgctgagctcttcctgcagcactttgaagccgaggtggcccgggcctctggctccctgtcgccacccatcctggctcccctgagccctggtgcggagatttcgccacatgacctgtcccttgagagctgcagggtgggtgggcccctggctgtgctgggcccttctcgatcatctgaggacctggccggccccctcccttcctcagtctcttcctcctctacaacctcctccaagccgaagctcaagaagcgcttttccctgcgttcagtgggtcgctctgtccgaggctcagtccgtggcatcctgcagtggcgggggaccgttgaccctccctcctccgctgggcccctggagacctcgtcaggccccccagtcttaggtggaaacagcaactccaactcctctggcggggctgggaccgttggtaggggactggtcagtgatggaacgtcccctggggaaagatggactcaccgttttgagaggctgagactcagtcggggagggggcgccttgaaggatggagcagggatggtgcagagggaagagctgctgagtttcatgggggctgaggaggcagcccctgacccagccggagtgggccggggaggaggggtggctgggcctccttcagggggaggagggcagcctcagtggcagaagtgtcgcctgctgcttcgaagtgaaggagaaggaggaggaggaagtcgcctggagttctttgtaccacccaaggcctctcggccccgactcagcatcccctgctcttctatcacagacgtccggacaaccacagccctggagatgcctgaccgggagaacacgtttgtggttaaggtggaaggtccatccgagtatatcatggagacagtggatgcccagcatgtgaaggcctgggtgtctgacatccaagaatgcctgagcccaggaccctgccctgctaccagtccccgccccatgaccctccctctggcccctgggacctcattccttacaagggagaacacagacagcctggagctgtcctgcctgaatcactcggagagtctacccagccaggacctgctgcttggacccagcgagagcaatgaccgcctgtcgcagggggcatatgggggcctctcagaccgcccctcggcatccatctcccccagctctgcctccattgccgcctcccattttgactcgatggaactgcttcccccagagttgcccccccgcatccccattgaagagggacccccaacagggacagttcatcccctctcagccccctaccctcccttggacactccggaaacagccacagggtccttcctgttccagggggagccagagggcggtgagggggaccagcccctctcagggtatccttggttccacgggatgctctctcggctcaaggctgcacagttggtgctgactggcggcactggctcccacggtgtcttcctggtgcgccagagtgagacaaggcggggtgaatacgtcctcaccttcaacttccagggcaaggccaagcacctgcgtttgtcgctgaacgaggagggtcagtgccgggtccagcacctgtggttccagtccattttcgatatgctcgagcacttccgggtgcaccccatccctttggagtcgggaggctccagtgatgttgtccttgtcagctatgtcccatcctcccagcgacagcagggccgggagcaggctgggagccatgcgggggtgtgcgagggagatggatgccaccccgatgcctcctgcaccctcatgcccttcggagcgagtgactgtgtaaccgaccacctcccatgacccaccccagccccctgaacccccttcatggacagatcccccacagcctggggcagaagaggcgtcgagggcgccagaagtggcggcagcagcagccgcagcagccaaagagaggcaagagaaagagaaagcgggcggtggaggggtcccggaagagctggtccccgtggttgagctggtccccgtggttgaattggaagaggccatagccccaggctcagaggcccagggcgctgggtctggtggggacgcgggggtgcccccaatggtgcagctgcagcagtcaccactagggggtgatggagaggaagggggccaccccagggccattaacaaccagtactccttcgtgtgagccaaccccacccgctccaccctttttaaaccccccagccctgctcgtgagattgggctgggtagggacagaggaggccgaaatccctcccccatgcttcctgacccttgttggccaagggcatctttgatggtacaagcagaggctcgggagaggctcccgtcacacactacaggtcccctccccagggcaggggatttgggctccatgagctccttgaggggctcttctggtcagccccaccctgggggccatttccccattaactacccccagcccgaggcagggtgagggggaagggctgtcagttacattaaggtggttgttgttgttgttttaaacaaaatggagaagcataaataaataaaaaggtttatctcg

SEQ ID NO: 8707 - protein, 756 aa, Homo sapiens
  ref <308>: DATABASE ACCESSION NUMBER: SWISS-Prot / AAF73912
  ref <309>: DATABASE ENTRY DATE: 2003-02-01
MNGAPSPEDGASPSSPPLPPPPPPSWREFCESHARAAALDFARRFRLYLASHPQYAGPGAEAAFSRRFAELFLQHFEAEVARASGSLSPPILAPLSPGAEISPHDLSLESCRVGGPLAVLGPSRSSEDLAGPLPSSVSSSSTTSSKPKLKKRFSLRSVGRSVRGSVRGILQWRGTVDPPSSAGPLETSSGPPVLGGNSNSNSSGGAGTVGRGLVSDGTSPGERWTHRFERLRLSRGGGALKDGAGMVQREELLSFMGAEEAAPDPAGVGRGGGVAGPPSGGGGQPQWQKCRLLLRSEGEGGGGSRLEFFVPPKASRPRLSIPCSSITDVRTTTALEMPDRENTFVVKVEGPSEYIMETVDAQHVKAWVSDIQECLSPGPCPATSPRPMTLPLAPGTSFLTRENTDSLELSCLNHSESLPSQDLLLGPSESNDRLSQGAYGGLSDRPSASISPSSASIAASHFDSMELLPPELPPRIPIEEGPPAGTVHPLSAPYPPLDTPETATGSFLFQGEPEGGEGDQPLSGYPWFHGMLSRLKAAQLVLTGGTGSHGVFLVRQSETRRGEYVLTFNFQGKAKHLRLSLNEEGQCRVQHLWFQSIFDMLEHFRVHPIPLESGGSSDVVLVSYVPSSQRQQEPTTSHDPPQPPEPPSWTDPPQPGAEEASRAPEVAAAAAAAAKERQEKEKAGGGGVPEELVPVVELVPVVELEEAIAPGSEAQGAGSGGDAGVPPMVQLQQSPLGGDGEEGGHPRAINNQYSFV

SEQ ID NO: 8708 - DNA, 3003 bp, Rattus norvegicus; identical to SEQ ID NO: 8704
  ref <308>: DATABASE ACCESSION NUMBER: EMBL / U57391
  ref <309>: DATABASE ENTRY DATE: 2000-03-04

SEQ ID NO: 8709 - protein, 756 aa, Rattus norvegicus; identical to SEQ ID NO: 8705
  ref <308>: DATABASE ACCESSION NUMBER: SWISS-Prot / AAC52601
  ref <309>: DATABASE ENTRY DATE: 2003-02-01

SEQ ID NO: 8710 - DNA, 6043 bp, Homo sapiens; identical to SEQ ID NO: 8706
  ref <308>: DATABASE ACCESSION NUMBER: EMBL / AB037720
  ref <309>: DATABASE ENTRY DATE: 2000-03-14

SEQ ID NO: 8711 - protein, 756 aa, Homo sapiens; identical to SEQ ID NO: 8707
  ref <308>: DATABASE ACCESSION NUMBER: SWISS-Prot / AAF73912
  ref <309>: DATABASE ENTRY DATE: 2003-02-01

SEQ ID NO: 8712 - DNA, 1780 bp, Rattus norvegicus
  ref <308>: DATABASE ACCESSION NUMBER: EMBL / U57715
  ref <309>: DATABASE ENTRY DATE: 2000-03-04
cgcgcgggcaggtctatggggagggacgaggagtcccactctctctgcggcaacggttggctgagaaagggtcatgacgtcacacagggccctcgaagagggcaggtgagtggctagagtagtgagcaccaaacagcagtgacgttgggttcagaccccgcccctttccttggagcgcggagactcgctacggaagcttcggccaatcagaaggaagacccaaggatgatatggtgatggcatgcagccagaggtaaaatgacaaggtgacttattcgacatgtcaaaatcttgtttccagagctctctgactgctctcacgtactcaaaaatagtggggacagagccgacctggggaggcttggcttcaagagacgctagattataaagaaagccaggagtcccggtcgccaaaatggggaggagccagtgaagaaacgggcccagtttcctctttaagacccaccccagagcgctggccccgcctcacgccgttgctgctgcgacccgcccccttccactcgcccccgggctgggctggggctcccggttccgcgcccctggctacgggggtacggccccctagccaccactacttggggccttctgctcaagatccctccaggcactgcggatggaggcgtgggggagccttggaacctcagactagttttgaatccctgccctgccagtcactagcttgtggctttgagtctgacaagatgtaccaggtcccattgacactggaccgggatgggaccctagtccggctccgcttcactatggtggccctgatcacggtctgctgtccacttgtcgccttcttcttctgcatcctgtggtccctgctcttccacttcaaggagacaacatctacacactgtggggtgcccaattacctgccatcagtgagctctgccattggtggggaggttccccagcgctacgtgtggcgtttctgcattggcctgcactcggcaccccgcttcttgacagccttcgcctattggaaccactacctcagctgtgcatccccgtgcccgggttaccgccttctctgccgcctcaacttcagtctcaatgtggtggagaacctggcactgctcgtgctcacctatgtctcctcctccgaggacttcaccatccatgaaaatgctttcattgtgtttatcgcggcctccctcagttacatgctcctcacctgcattctctggcggctgaccaagaagcacacagatcgcaagtcctacagctggaaacaacggctcttcatcatcaacttcatctccttcttctcggcgctggctgtttacttccggcacaacatgtattgtgaggctggagtgtacaccatctttgccatcctggagtacactgtggtcctaaccaacatggcgttccacatgacagcctggtgggacttcgggaacaaagagctgctaataacctctcagcctgggaaaagagattctaaaccccgtctctgatcctggaaaacaagaaaccactctggccttccctatctcagtgtcctctctgggcccttctccgtctggggactgggagagaagagcaggaagggtaggacaaggctgaccccagcactgctgacttctccccccctctcatctctcatgggggtcttcaagaagcatcactactcactgaaaggtcctaaaaagctgagctggcaggaaagccctaccacttggtgctaagaaaaaaaaaaaaaaaaaaaaaaaaaaaaaaaaaaaaaaaaaaaaaaaaaaaaaaaaaaaaa

SEQ ID NO: 8713 - protein, 254 aa, Rattus norvegicus
  ref <308>: DATABASE ACCESSION NUMBER: SWISS-Prot / AAB07050
  ref <309>: DATABASE ENTRY DATE: 2001-12-01
MYQVPLTLDRDGTLVRLRFTMVALITVCCPLVAFFFCILWSLLFHFKETTSTHCGVPNYLPSVSSAIGGEVPQRYVWRFCIGLHSAPRFLTAFAYWNHYLSCASPCPGYRLLCRLNFSLNVVENLALLVLTYVSSSEDFTIHENAFIVFIAASLSYMLLTCILWRLTKKHTDRKSYSWKQRLFIINFISFFSALAVYFRHNMYCEAGVYTIFAILEYTVVLTNMAFHMTAWWDFGNKELLITSQPGKRDSKPRL

SEQ ID NO: 8714 - DNA, 1353 bp, Rattus norvegicus
  ref <308>: DATABASE ACCESSION NUMBER: EMBL / U59241
  ref <309>: DATABASE ENTRY DATE: 1996-10-25
ccccgcatcccggtcaccagttcaggagacaaagacacagcctcccacaatgtcctacagacgagagctggagaaatatcgagacctggatgaggatgaaatcctgggggccctcacagaggaggagctcaggacactggaaaacgagctggatgagctagaccctgataatgcactgctccctgcaggcctgaggcagaaggatcagaccaccaaggcacccacaggcccctttaaaagagaggagcttttggaccacttggaaaagcaagcgaaggaatttaaggaccgagaagacctggttccctacacaggggagaaacgaggaaagatctgggttcccaagcagaagccaatggatcccgtgctggagagcgtgacgctggagccggaactggaggaggccctagcaaatgcctcagatgccgaactatgtgacattgcagctattctgggcatgcacacgctcatgagcaaccagcagtactaccaagccttgggcagcagctccatcgtgaacaaggaggggctcaacagtgtgatcaaacccacacagtacaagcctgtgcctgatgaagaaccaaatccaacagatgtagaggaaacgctggagcgaataaagaacaatgacccagaacttgaagaggttaatcttaacaacatccggaatattcccatacccactctcaaggcgtacgcggaaagcctgaaagagaactcctacgtgaagaagttcagcatcgtggggacccgcagcaatgaccctgtggcatttgctcttgctgaaatgctgaaggtgaacaaggtgttgaagacgctgaatgtcgagtccaacttcatctccggagctgggatcctgtgcctggtggaagctctcccccacaacacttctctggtcgaactgaaaatcgacaaccagagccagcctttgggcaacaaagtggaaatggagatcgtgaacatgttggagaaaaacacaacactcctcaaatttggctaccactttacccagcaggggccccggctgcgggcatccaacgccatgatgaacaacaacgaccttgtgaggaagaggaggctcgcagacctgacggggcctattattcccaagtgccgcagcggtgtctagtgcgcaaagggacgcccacgcctataagctggacgtgttctaccgatggtgtgtgttccccagtggagaccaggaggcaaatgttggcgtgaactcttgtggttcagttctttgtgcactaaggtttagggtaactagtgactgtagttggaccttttataaaatatggttaatgtgaaggttttctttagtcacagaagttcagtctgataattatttaaaaa

SEQ ID NO: 8715 - protein, 359 aa, Rattus norvegicus
  ref <308>: DATABASE ACCESSION NUMBER: SWISS-Prot / AAC52855
  ref <309>: DATABASE ENTRY DATE: 2002-06-15
MSYRRELEKYRDLDEDEILGALTEEELRTLENELDELDPDNALLPAGLRQKDQTTKAPTGPFKREELLDHLEKQAKEFKDREDLVPYTGEKRGKIWVPKQKPMDPVLESVTLEPELEEALANASDAELCDIAAILGMHTLMSNQQYYQALGSSSIVNKEGLNSVIKPTQYKPVPDEEPNPTDVEETLERIKNNDPELEEVNLNNIRNIPIPTLKAYAESLKENSYVKKFSIVGTRSNDPVAFALAEMLKVNKVLKTLNVESNFISGAGILCLVEALPHNTSLVELKIDNQSQPLGNKVEMEIVNMLEKNTTLLKFGYHFTQQGPRLRASNAMMNNNDLVRKRRLADLTGPIIPKCRSGV

SEQ ID NO: 8716 - DNA, 2665 bp, Homo sapiens
  ref <308>: DATABASE ACCESSION NUMBER: EMBL / M77016
  ref <309>: DATABASE ENTRY DATE: 2000-03-04
agaaattcaggagacacagacaagttcttccacgatgtcgtacagacgagaactagagaaataccgtgacctggatgaagatgaaatccttggagccctaacagaggaagagctgaggaccctggaaaatgagctggatgagctggaccctgataatgcactgctgcctgcaggcctgaggcagaaggatcagaccaccaaggcgcccacgggcccctttaaaagagaggagctcttggatcacttggaaaagcaagcaaaggagtttaaggaccgagaagatctggtcccctacacaggggaaaaacgaggaaaggtctgggttcctaagcagaagccactggatcctgtgctggaaagtgtgacgctggaaccggagctggaggaagccttggcaaatgcttcagatgcagaactctgtgacattgcagcgatcctgggcatgcacacgctcatgagtaaccagcagtactaccaggccctgagcagcagctccatcatgaacaaggaggggctcaacagcgtgattaaacccacacaatacaagcctgtgcccgacgaagaaccaaattcaacagacgtagaggaaacgctggaacggataaagaacaacgacccaaaacttgaagaagttaacctcaataatatccggaatatccccatccccaccctcaaggcatatgcagaagccctgaaagaaaactcatatgtgaagaagttcagcatcgtggggacacggagtaatgaccccgtggcgtatgcccttgctgagatgctcaaggagaacaaggtgttgaagacactgaatgtggaatccaacttcatttctggagctgggattctgcgcctggtagaagccctcccatacaacacttctctggtggaaatgaaaattgacaaccagagccagcccctgggcaacaaagtggaaatggagattgtgagcatgttggaaaaaaacgcaacacttctcaaattcggctaccactttacccagcaaggaccccggcttcgggcatccaacgcaatgatgaacaacaatgaccttgtgaggaagaggaggcttgcggacctgactgggcccatcattcccaagtgccggagtggtgtctagtgtgtggcggtggagtccatgcctttgaactggatgtgttctattgatgacctgtgctctgcaggggaaaccagaaggcaaaatgctggcagcatgaaacccttttgtggttcagttctttatgcactaaggttttaggttgactagtggttgtagttgaaaattttataaaataccgttaatgtgaagtttttctttagtcacagaagttgaatctggttattatttaaaaactagaagcccccaaaccagcagatcttactgaagatgatgttccagcagcagcgacttagccccaggagcccagtttcaatggccttgctgtgtggtgtttcaagtgcatttaaaatgtgtgacacagaaacggcacactcttccacatgcttttgaagtattataaaacactttattacaaatttgtcttagctattagcaaataaaactgattatcattctttattaaccctccttggaattttgaaaacctcgattaaagttgccaaattgattactggatccagaacacaattttcccctcagaacagatagacagactgaagccactgaactctgccaggagtcaacatgagattccttttgctggatatgcagaaatgataggaaaaaaaccaatggtgaaatttcaagtttcaaaaaccaacctttcattaccaatcccaggcaacaaacatgtccctgagtgttctttaagaacatttgggatttatgtacaatttaatactggagttagaactttttccttattgaatgccaaccttatgatggatgtgaaaatctacggccaaatacttttgaaaacacctttctatattgcacagtgggcaaatggcttatgtgaggtaagacactagagggataaatttccagatcaacatggctatggtatttagtaatggcccagcttagagacttcagctactgatctcatcacttattagacaaattgctgctgaccttacgcctgtatattaagcctccgcaggatgccggacaatggtgaagaaactccagatatcaaggaattgggaaatcctggccaaaccaccccaagatgattacactgaaatgtagtattagtactgctgccagatctctttttaacatcatgtgcgtctcttgggatccagcaaaagtgttaagccacaatgcccttgtgccttttaatataccacagtgccagttaaactaatatttttgtttgttgcttttgggagttattttcattagtgatttcagcaaatctcatgataaaggacaaggtcaagaactccagagcactgagcagagaggctggtgatgaaaaggtgaaggcctgcgcactgaactgtaaggcagtgggcagtacagggtaactggaggcggggccagggcctcagcgctatggaagagtgtccactgaggctgcacatggcccaggagtggcaccatgttgcagggacaaccatccccatttggcttctccttaaaacacaattgcagctgcattctgcatcgctgaaaactgcaatataatattaaatctgttggtcg

SEQ ID NO: 8717 - protein, 359 aa, Homo sapiens
  ref <308>: DATABASE ACCESSION NUMBER: SWISS-Prot / P28289
  ref <309>: DATABASE ENTRY DATE: 2002-06-15
MSYRRELEKYRDLDEDEILGALTEEELRTLENELDELDPDNALLPAGLRQKDQTTKAPTGPFKREELLDHLEKQAKEFKDREDLVPYTGEKRGKVWVPKQKPLDPVLESVTLEPELEEALANASDAELCDIAAILGMHTLMSNQQYYQALSSSSIMNKEGLNSVIKPTQYKPVPDEEPNSTDVEETLERIKNNDPKLEEVNLNNIRNIPIPTLKAYAEALKENSYVKKFSIVGTRSNDPVAYALAEMLKENKVLKTLNVESNFISGAGILRLVEALPYNTSLVEMKIDNQSQPLGNKVEMEIVSMLEKNATLLKFGYHFTQQGPRLRASNAMMNNNDLVRKRRLADLTGPIIPKCRSGV

SEQ ID NO: 8718 - DNA, 1353 bp, Rattus norvegicus; identical to SEQ ID NO: 8714
  ref <308>: DATABASE ACCESSION NUMBER: EMBL / U59241
  ref <309>: DATABASE ENTRY DATE: 1996-10-25

SEQ ID NO: 8719 - protein, 359 aa, Rattus norvegicus; identical to SEQ ID NO: 8715
  ref <308>: DATABASE ACCESSION NUMBER: SWISS-Prot / AAC52855
  ref <309>: DATABASE ENTRY DATE: 2002-06-15

SEQ ID NO: 8720 - DNA, 2665 bp, Homo sapiens; identical to SEQ ID NO: 8716
  ref <308>: DATABASE ACCESSION NUMBER: EMBL / M77016
  ref <309>: DATABASE ENTRY DATE: 2000-03-04

SEQ ID NO: 8721 - protein, 359 aa, Homo sapiens; identical to SEQ ID NO: 8717
  ref <308>: DATABASE ACCESSION NUMBER: SWISS-Prot / P28289
  ref <309>: DATABASE ENTRY DATE: 2002-06-15

SEQ ID NO: 8722 - DNA, 2230 bp, Rattus norvegicus
  ref <308>: DATABASE ACCESSION NUMBER: EMBL / U59672
  ref <309>: DATABASE ENTRY DATE: 2000-03-04
gaattcgggcagaccctcggtctccaaagctacatagacacttggattcaagagggcacgagaaaagggggtcttggtgatcctcccagtacaccccagaaagccaggacacccctggcagcaccactccttcagggtcagccttagtgccctgtccaagagcactgctgtgaccacagggctgcaggtaccaggacaaaaggcctagttgctctcagagagccagtactgtcctaggcccagagctgattcgactctgaaactggggcaaggaagggtcaggatggacagtggggatggaagggggagctccccaaatgtccagggcagaagaacagcaagtctccatggagagagccacactgttcctttccgtgctgatagcccagggagaaggcagccggaggagggccacccaggcccacagcaccacccagcctgctctgctgaggctgtcagatcacctcctggctaactacaagaagggagtgcggcctgtgcgggactggaggaagcccaccctggtctccattgatgtcatcatgtatgccatcctcaacgtggatgagaagaaccaggttctgaccacctacatatggtaccggcagttctggaccgacgagtttctacagtggactcctgaggacttcgacaatgtcaccaaattgtccatccccaccgacagcatctgggtccctgacatcctcatcaatgagtttgtggacgtggggaagtctccaagcattccttatgtgtatgtgcaccatcaaggtgaagtccagaactacaagcccctacagctggtgaccgcctgtagccttgacatctataacttcccgttcgatgtgcagaactgctctctgaccttcaccagctggctgcataccatccaggacatcaacatttccctgtggcgaacaccagaagaagtgaggtcggacaagagcatcttcataaatcagggcgagtgggagctgctgggggtgttcaccaaatttcaggagttcagtatagaaaccagtaacagctatgcggaaatgaagttctacgtggtcatccgccggcggcctttattctacgcagtcagcctcttgctgcccagtatcttcctcatggtcgtggacattgtgggcttttgtctgcccccggacagtggtgagagagtgtctttcaagatcacgctccttctgggatactcagtctttctcatcatcgtgtcagacacactgcctgcaacggccatcggcactcccctcattggtgtctactttgtagtgtgcatggctctgctggtgataagcctcgctgagaccatcttcattgtgcagctggtgcataagcaggatttacagcgccctgtacctgactggctgaggcacctggtcctagacagaatagcctggctgctctgcctaggggagcagcccatggcccataggcccccagccaccttccaagccaacaagactgatgactgctcagccatgggaaaccactgcagccatgtcggaagccctcaggacttggagaagacctcgaggagcagagatagccctcttccaccaccaagggaggcctcgctggctgtgcgtggcctcttgcaagagctgtcctccatccgccactccctggagaagcgggatgagatgcgggaggtggcaagggactggttgcgggtgggatatgtgctggacaggctgctgtttcgcatctacctgctggccgtgctggcttacagcatcaccctggtcacgctctggtccatttggcattattcctgagtgggtacagcctggcagggaggggatgtgagtcctgcatcctgtttccaacaccaattcatctgagcaaccccagtccccttgtcccctaaacttagcactgaagacccggtcagaccccccgacttcgctatcatggctttaaagcatgatatcctagatcaagaggaaccaagactcctctaacttattaagacatcaagccctggttccttttccagtacttctgtgattatggcccttgggatggctcatttccacagtttttttttcctttttgatcagaggaaagcaaattctcttgcctaggtgcctgagacgtctgtgcctgttttatccaggccccagtggcttcttcttcagctcacttgtgggtacttccctagcgctcagcctcatcaaccaacggggggaggggataataaaatgctatgatatcccccgaattc

SEQ ID NO: 8723 - protein, 227 aa, Rattus norvegicus
  ref <308>: DATABASE ACCESSION NUMBER: SWISS-Prot / AAB18293
  ref <309>: DATABASE ENTRY DATE: 2003-02-01
PSIFLMVVDIGGFCLPPDSGERVSFKITLLLGYSVFLIIVSDTLPATAIGTPLIGVYFVVCMALLVISLAETIFIVQLVHKQDLQRPVPDWLRHLVLDRIAWLLCLGEQPMAHRPPATFQANKTDDCSAMGNHCSHVGSPQDLEKTSRSRDSPLPPPREASLAVRGLLQELSSIRHSLEKRDEMREVARDWLRVGYVLDRLLFRIYLLAVLAYSITLVTLWSIWHYS

SEQ ID NO: 8724 - DNA, 1642 bp, Homo sapiens
  ref <308>: DATABASE ACCESSION NUMBER: EMBL / AJ003078
  ref <309>: DATABASE ENTRY DATE: 2000-02-24
ctgagcactcggaggcactcctatgcttggaaagctcgctatgctgctgtgggtccagcaggcgctgctcgccttgctcctccccacactcctggcacagggagaagccaggaggagccgaaacaccaccaggcccgctctgctgaggctgtcggattaccttttgaccaactacaggaagggtgtgcgccccgtgagggactggaggaagccaaccaccgtatccattgacgtcattgtctatgccatcctcaacgtggatgagaagaatcaggtgctgaccacctacatctggtaccggcagtactggactgatgagtttctccagtggaaccctgaggactttgacaacatcaccaagttgtccatccccacggacagcatctgggtcccggacattctcatcaatgagttcgtggatgtggggaagtctccaaatatcccgtacgtgtatattcggcatcaaggcgaagttcagaactacaagccccttcaggtggtgactgcctgtagcctcgacatctacaacttccccttcgatgtccagaactgctcgctgaccttcaccagttggctgcacaccatccaggacatcaacatctctttgtggcgcttgccagaaaaggtgaaatccgacaggagtgtcttcatgaaccagggagagtgggagttgctgggggtgctgccctactttcgggagttcagcatggaaagcagtaactactatgcagaaatgaagttctatgtggtcatccgccggcggcccctcttctatgtggtcagcctgctactgcccagcatcttcctcatggtcatggacatcgtgggcttctacctgccccccaacagtggcgagagggtctctttcaaaattacactcctcctgggctactcggtcttcctgatcatcgtttctgacacgctgccggccactgccatcggcactcctctcattggtaaggcccctcctggcagcagagctcagtctggtgagaaacccgccccctcccacctcctgcatgtgtctcttgcctctgccctgggctgcacaggtgtctactttgtggtgtgcatggctctgctggtgataagtttggccgagaccatcttcattgtgcggctggtgcacaagcaagacctgcagcagcccgtgcctgcttggctgcgtcacctggttctggagagaatcgcctggctactttgcctgagggagcagtcaacttcccagaggcccccagccacctcccaagccaccaagactgatgactgctcagccatgggaaaccactgcagccacatgggaggaccccaggacttcgagaagagcccgagggacagatgtagccctcccccaccacctcgggaggcctcgctggcggtgtgtgggctgctgcaggagctgtcctccatccggcaattcctggaaaagcgggatgagatccgagaggtggcccgagactggctgcgcgtgggctccgtgctggacaagctgctattccacatttacctgctagcggtgctggcctacagcatcaccctggttatgctctggtccatctggcagtacgcttgagtgggtacagcccagtggaggagggggtacagtcctggttaggtggggacagaggatttctgcttaggc

SEQ ID NO: 8725 - protein, 478 aa, Homo sapiens; identical to SEQ ID NO: 2090
  ref <308>: DATABASE ACCESSION NUMBER: SWISS-Prot / P46098
  ref <309>: DATABASE ENTRY DATE: 2002-06-15

SEQ ID NO: 8726 - DNA, 2230 bp, Rattus norvegicus; identical to SEQ ID NO: 8722
  ref <308>: DATABASE ACCESSION NUMBER: EMBL / U59672
  ref <309>: DATABASE ENTRY DATE: 2000-03-04

SEQ ID NO: 8727 - protein, 227 aa, Rattus norvegicus; identical to SEQ ID NO: 8723
  ref <308>: DATABASE ACCESSION NUMBER: SWISS-Prot / AAB18293
  ref <309>: DATABASE ENTRY DATE: 2003-02-01

SEQ ID NO: 8728 - DNA, 1642 bp, Homo sapiens; identical to SEQ ID NO: 8724
  ref <308>: DATABASE ACCESSION NUMBER: EMBL / AJ003078
  ref <309>: DATABASE ENTRY DATE: 2000-02-24

SEQ ID NO: 8729 - protein, 478 aa, Homo sapiens; identical to SEQ ID NO: 2090
  ref <308>: DATABASE ACCESSION NUMBER: SWISS-Prot / P46098
  ref <309>: DATABASE ENTRY DATE: 2002-06-15

SEQ ID NO: 8730 - DNA, 167 bp, Rattus norvegicus
  ref <308>: DATABASE ACCESSION NUMBER: EMBL / U60578
  ref <309>: DATABASE ENTRY DATE: 2000-03-04
ccatctctccagcctgaaactaactttgtaaaattacattatgtttttagatgtctcatttccgtaaactgaacttcaattcggagggggaggctgaagaactgatggtggacaactggcgtccagctcagccgctgaagaacagaaagatcaaggcgtcctttaaa

SEQ ID NO: 8731 - protein, 259 aa, Rattus norvegicus
  ref <308>: DATABASE ACCESSION NUMBER: SWISS-Prot / AAC53104
  ref <309>: DATABASE ENTRY DATE: 2001-10-16
SHHWGYSKSNGPENWHKEFPIANGDRQSPVDIDTGTAQHDPSLQPLLICYDKVASKSIVNNGHSFNVEFDDSQDFAVLKEGPLSGSYRLIQFHFHWGSSDGQGSEHTVNKKKYAAELHLVHWNTKYGDFGKAVQHPDGLAVLGIFLKIGPASQGLQKITEALHSIKTKGKRAAFANFDPCSLLPGNLDYWTYPGSLTTPPLLECVTWIVLKEPITVSSEQMSHFRKLNFNSEGEAEELMVDNWRPAQPLKNRKIKASFK

SEQ ID NO: 8732 - DNA, 1551 bp, Homo sapiens
  ref <308>: DATABASE ACCESSION NUMBER: Refseq / NM_000067
  ref <309>: DATABASE ENTRY DATE: 2002-11-05
ggcgcccaagccgccgccgccagatcggtgccgattcctgccctgccccgaccgccagcgcgaccatgtcccatcactgggggtacggcaaacacaacggacctgagcactggcataaggacttccccattgccaagggagagcgccagtcccctgttgacatcgacactcatacagccaagtatgacccttccctgaagcccctgtctgtttcctatgatcaagcaacttccctgaggatcctcaacaatggtcatgctttcaacgtggagtttgatgactctcaggacaaagcagtgctcaagggaggacccctggatggcacttacagattgattcagtttcactttcactggggttcacttgatggacaaggttcagagcatactgtggataaaaagaaatatgctgcagaacttcacttggttcactggaacaccaaatatggggattttgggaaagctgtgcagcaacctgatggactggccgttctaggtatttttttgaaggttggcagcgctaaaccgggccttcagaaagttgttgatgtgctggattccattaaaacaaagggcaagagtgctgacttcactaacttcgatcctcgtggcctccttcctgaatccctggattactggacctacccaggctcactgaccacccctcctcttctggaatgtgtgacctggattgtgctcaaggaacccatcagcgtcagcagcgagcaggtgttgaaattccgtaaacttaacttcaatggggagggtgaacccgaagaactgatggtggacaactggcgcccagctcagccactgaagaacaggcaaatcaaagcttccttcaaataagatggtcccatagtctgtatccaaataatgaatcttcgggtgtttccctttagctaagcacagatctaccttggtgatttggaccctggttgctttgtgtctagttttctagacccttcatctcttacttgatagacttactaataaaatgtgaagactagaccaattgtcatgcttgacacaactgctgtggctggttggtgctttgtttatggtagtagtttttctgtaacacagaatataggataagaaataagaataaagtaccttgactttgttcacagcatgtagggtgatgagcactcacaattgttgactaaaatgctgcttttaaaacataggaaagtagaatggttgagtgcaaatccatagcacaagataaattgagctagttaaggcaaatcaggtaaaatagtcatgattctatgtaatgtaaaccagaaaaaataaatgttcatgatttcaagatgttatattaaagaaaaactttaaaaattattatatatttatagcaaagttatcttaaatatgaattctgttgtaatttaatgacttttgaattacagagatataaatgaagtattatctgtaaaaattgttataattagagttgtgatacagagtatatttccattcagacaatatatcataacttaataaatattgtattttagatatattctctaataaaattcagaattct

SEQ ID NO: 8733 - protein, 259 aa, Homo sapiens
  ref <308>: DATABASE ACCESSION NUMBER: SWISS-Prot / P00918
  ref <309>: DATABASE ENTRY DATE: 2002-06-15
SHHWGYGKHNGPEHWHKDFPIAKGERQSPVDIDTHTAKYDPSLKPLSVSYDQATSLRILNNGHAFNVEFDDSQDKAVLKGGPLDGTYRLIQFHFHWGSLDGQGSEHTVDKKKYAAELHLVHWNTKYGDFGKAVQQPDGLAVLGIFLKVGSAKPGLQKVVDVLDSIKTKGKSADFTNFDPRGLLPESLDYWTYPGSLTTPPLLECVTWIVLKEPISVSSEQVLKFRKLNFNGEGEPEELMVDNWRPAQPLKNRQIKASFK

SEQ ID NO: 8734 - DNA, 1201 bp, Rattus norvegicus
  ref <308>: DATABASE ACCESSION NUMBER: EMBL / U60882
  ref <309>: DATABASE ENTRY DATE: 2000-03-04
agatggcggcagccgaggccgcgaactgcatcatggaggtttcctgtggccaagcagaaagtagtgagaagcccaatgctgaggacatgacatccaaagactactactttgactcctatgcccactttggcatccacgaggagatgctaaaggatgaggtgcgaaccctcacgtaccgcaactccatgtttcacaatcggcatctcttcaaagacaaggtggtgctggatgtgggctcgggcactggcatcctctgcatgttcgctgccaaggcaggggcccgcaaggtcattgggatcgagtgctccagtatctctgattatgctgtgaagattgtcaaagccaataagttagaccacgtggtgaccatcatcaagggcaaggtggaggaggtggagctgcctgtggagaaggtggacatcatcatcagcgagtggatgggttattgcctcttctatgagtccatgctcaacactgtgctgcacgctcgtgacaagtggctggcacctgatggcctcatcttcccagaccgagccaccctgtatgtgacagccattgaggaccgacagtataaagactacaagatccactggtgggagaatgtatatggctttgatatgtcctgcattaaagacgtggccatcaaggagcccctggtggacgtggtggacccaaagcagctggtcaccaacgcctgcctcataaaggaggtggacatctacacagtcaaggtggaggacctgaccttcacctccccgttttgtctgcaagtgaagaggaatgactatgtgcatgcactagtggcctacttcaacatcgagttcacccgatgccacaagaggaccggcttctctaccagtcctgagtctccatacacacattggaagcagactgtgttctacatggaggactacctaacagtgaagaccggcgaggagatttttggcactattggaatgaggcccaacgccaaaaacaatcgtgacttggactttaccatcgacctggacttcaagggtcagctgtgtgagctctcttgttccaccgactaccggatgcgctgaggaggtgccaggctggccctcctgcaaaagggggctcaggggctgggcttgggggatgggagggtacatcgtggcagtgtttttcataacttatgtttttatatggttgcgtttatgccaataaatcctcagctgac

SEQ ID NO: 8735 - protein, 353 aa, Rattus norvegicus
  ref <308>: DATABASE ACCESSION NUMBER: SWISS-Prot / Q63009
  ref <309>: DATABASE ENTRY DATE: 2001-10-16
MAAAEAANCIMEVSCGQAESSEKPNAEDMTSKDYYFDSYAHFGIHEEMLKDEVRTLTYRNSMFHNRHLFKDKVVLDVGSGTGILCMFAAKAGARKVIGIECSSISDYAVKIVKANKLDHVVTIIKGKVEEVELPVEKVDIIISEWMGYCLFYESMLNTVLHARDKWLAPDGLIFPDRATLYVTAIEDRQYKDYKIHWWENVYGFDMSCIKDVAIKEPLVDVVDPKQLVTNACLIKEVDIYTVKVEDLTFTSPFCLQVKRNDYVHALVAYFNIEFTRCHKRTGFSTSPESPYTHWKQTVFYMEDYLTVKTGEEIFGTIGMRPNAKNNRDLDFTIDLDFKGQLCELSCSTDYRMR

SEQ ID NO: 8736 - DNA, 2606 bp, Homo sapiens
  ref <308>: DATABASE ACCESSION NUMBER: EMBL / AK026786
  ref <309>: DATABASE ENTRY DATE: 2000-09-29
attctctttcctgtgaacctccagaacaatttgcttgaacttctcttgtagaacaaaccttattccagcatctatcagagacaataagggtcttagaatctagaaaacagggtcctgggagggcacagttcccacacgtctatttcttccacaggacctgcacgctgccttgctgttggagatctgtgcagtaggcagttgtggaattaaaagcaacaccccatgtcgctgaatgttcagggatcacaggccactgccgtttcccacccactcccagcctccggggagtcttagcctgtggagtcccaggaagcacatggaaaagagagccttggaaccagagtggagtgacagctaaggggtgctggaggcccctgtgaccttgatcatgcacaatgcccagaccagctccgactttttcctctccttcacatatttaaatggagtcgatattggggtcagcttcatgcacggagccttcttcagctttagaggtgaacagccccccctcccagcccccccagcccgtcgtccctgctaagcccgtgcaatgcgtccatcatgtgtccactcaacccagctgcccaggacggggcaagatgtccaagctgctgaacccagaggagatgacctcgagagattattacttcgactcctatgcccactttgggatccacgaggaaatgctgaaggatgaggtgcggactctcacttaccggaactccatgtaccacaacaagcacgtgttcaaggacaaagtggtactggatgtggggagtggtactgggatcctttccatgttcgctgccaaggcaggggccaagaaggtgtttggggtgccctcacccttcctcaaggcgtggccagaggcgtcagaaactccctcagtgcccctttgcgagtacttctcaagggaatggtccctgcccgaggcctgggggtagtctgaggggcccccaagtgtggagatcgaatgctccagtatttctgactactcagagaagatcattaaggccaaccacttggacaacatcatcaccatatttaagggtaaagtggaagaggtggagctgcctgtggagaaggtggacatcatcatcagcgagtggatgggctactgtctgttctatgagtccatgctcaacacggtgatctttgccagggacaagtggctgaaacctggagggcttatgtttccagaccgggcagctttgtacgtggtagcgattgaagacagacagtacaaggacttcaaaatccactggctactgggaaataaatggccagcagaaagaagaaaaaaaaatctaatcccttgggtgatctgtgctctgaatgattgaaggtggggcagtccagctgaggagataagacccaaattaacccatataaagggtgggagaatgtctatggctttgacatgacctgcatccgggacgtggccatgaaggagcctctagtggacatcgtggatccaaagcaagtggtgaccaatgcctgtttgataaagatacagcgcaacgactacgtccacgccctggtcacctattttaatattgaatttaccaagtgccacaagaaaatggggtttcccacagcccctgatgctccctacacccactggaagcagaccgtcttctacttggaagattacctcactgtccggaggggggaggaaatctacgggaccatatccatgaagccaaatgccaaaaaatgtgcgagacctcgatttcacagtagacttggattttaagggacagctgtgtgaaacatctgtatctaatgactacaaaatgcgttagcacacgtgggaagctgcagagagcaacgagaaaaggaactctcacctcgatctgccgtgccgtcccaaagaataccgtttgcaggactacacacttgaaaaccagagttttcaactctgccttgaagattggtgaactccccagggctcccgtgggctctgccactggacagaaggcctccagctcctccgctctgccctggtagcccttaacgaaggctttgtgttgccaacaaagagcgacctggcgtgctgtggctgggccccgagggtggaaacgtattcgcgtctccccgtctcctccttaactgtgactctccgggtcttctgagttttgcatgctgcgggtgtctaggacagattgcttccactagaacctggagacatagcatctttgatagcataagccagattaatctgtgtgtgcggtggtgtgcgtgtgcgtgcatgtgtgaatgtgagcagcatagttgatatttacccacaaacacctgtatatgggtgcatatacaaccaagtgggtagacctaggtgttctctcagaggggtgtgtgtgtgtatgcgtgcgcgtgtgcctagaatatatattactctcagaggagattctgttgcttttgaataggaatttgttttgtgattagttcgccccttccccaccccttaccagatgttaagcagctatgaaacattctctgtactagttctggtctccttttgactggactgtggctctgaaccttgagcatagtaccacggactccgtgggcgctcaataaacacacatgagaacaaaaaaaaaaaa

SEQ ID NO: 8737 - protein, 168 aa, Homo sapiens
  misc_feature (1)..(168): Xaa=Unknown amino acid
MESILGSASCTEPSSALEVNSPPSQPPQPVVPAKPVQCVHHVSTQPSCPGRGKMSKLLNPEEMTSRDYYFDSYAHFGIHEEMLKDEVRTLTYRNSMYHNKHVFKDKVVLDVGSGTGILSMFAAKAGAKKVFGVPSPFLKAWPEASETPSVPLCEYFSREWSLPEAWGX

SEQ ID NO: 8738 - DNA, 2431 bp, Rattus norvegicus
  ref <308>: DATABASE ACCESSION NUMBER: EMBL / U61184
  ref <309>: DATABASE ENTRY DATE: 2000-03-04
tctcgaccatggcggcgactacagctaacccagaaatgacatcagatgtgccatcactgggtcccaccattgcttctggaaatcccggacctgggattcaaggtggaggagctgttgtccagagggctattaagcgacggtcagggctggattttgatgatgaaggagaagtgaacagtaaatttttgagatgtgacgatgagcagatgtgtaacgacaaagagcggtttgccaggtcggatgatgagcagagctctgccgataaagagagacttgccagggaaaatcatagtgaaatagagcggcggcgacggaacaagatgacagcttacatcacagaactgtcagacatggtacctacctgtagtgccctggctcgaaaaccagacaagctaaccatcttacgcatggctgtttctcacatgaagtccttgaggggaacgggcaatacatccactgacggctcctacaagccgtccttcctcactgatcaggaactgaaacatttgattttggaggcagcagatggttttctgtttattgtctcttgtgagactggccgagtggtgtatgtctctgactcggtgactcccgttttgaaccagccacagtctgaatggtttgggagcacactgtatgaccaagtgcacccagatgatgtggataaacttcgagagcagctttctacttcagaaaatgccctaacagggcggatcctggatctgaagactggaacagtgaaaaaggaaggtcagcagtcttccatgaggatgtgcatgggctcaagaagatcgttcatctgccggatgaggtgtggcaccagctctgtggaccctgtttccatgaatagactgagctttttgaggaacagatgcaggaatggacttggctctgtgaaggaaggagagcctcactttgtggtagtccactgcacaggttacatcaaggcctggccaccagcaggtgtctccctcccagatgatgatccagaggctggccaggggagcaaattctgcctagtggccattggcaggctgcaggtaaccagttctcctaactgtacagatatgagtaacatctgtcagccaacagagttcatctccagacataacattgaagggatattcacttttgtagatcatcgttgtgtggctactgttggctaccagccacaggagctcttaggaaagaatattgtagaattttgtcatcctgaagaccaacaacttctaagagacagctttcagcaggtggtgaaattaaaaggccaagtgctgtctgtcatgttccgattccgagctaagaaccgagaatggctgtggatgagaacaagctcctttactttccaaaacccgtattcagatgaaatgagtatatttatctgcaccaacaccaacgtgaagaactctagccaggaaccacggcctacattgtctaacacaatccagaggtcacagctaggtccgacaactaatttatccctagagatgggtacaggtgtcctggcatccaggcagcagcagcagcagcagcagcagcagcagcagcagcagcagcagcagacagaattggatatggtaccaggaagagatgggctggccagctatagtcattcccaggtttctgtccagcccgtggcaactgcaggatcagaacacagcaagccccttgagaagtcagaaggtctctttgtgcaggacagagatccgaggttttcagaaatctatcccaacatcagtgcagatcagagtaaaggcctctcctccagcactgtccctgccacccaacagctgttctcccagggcagctcattccctcctaacccccggccggcagaaaatttcaggaatagtggtcttacccctcccgtaaccattgtccagccgtcatcttctgcagggcagatattggcccagatttctcgtcactccaaccttacccagggatcagcaccaacttggacctctagcactcgcccaggtttctctgcccagctgcctactcaggctacagccaagactcgttcttcacaatttggtgtgaacaactttcagacttcgtcctccttcagtgccatgtctcttccgggtgctcccactgcctcacccagtactgctgcctaccctactcttcctaaccgtggatccaactttcctcctgagactggacagacaacaggacagttccagacccggacagcagagggtgtgggtgtctggccacagtggcaaggccagcagccccatcaccggtctagttccaatgagcaacatgttcagccaacatcagcacaaccaagtagccagcctgaggtctttcaagaaatgctgtccatgctgggggaccagagcaacacctacaacaatgaagagtttcctgatctaactatgtttccccctttttctgaatagaactattggggtgaggataa

SEQ ID NO: 8739 - protein, 800 aa, Rattus norvegicus
  ref <308>: DATABASE ACCESSION NUMBER: SWISS-Prot / P41739
  ref <309>: DATABASE ENTRY DATE: 2002-06-15
MAATTANPEMTSDVPSLGPTIASGNPGPGIQGGGAVVQRAIKRRSGLDFDDEGEVNSKFLRCDDEQMCNDKERFARSDDEQSSADKERLARENHSEIERRRRNKMTAYITELSDMVPTCSALARKPDKLTILRMAVSHMKSLRGTGNTSTDGSYKPSFLTDQELKHLILEAADGFLFIVSCETGRVVYVSDSVTPVLNQPQSEWFGSTLYDQVHPDDVDKLREQLSTSENALTGRILDLKTGTVKKEGQQSSMRMCMGSRRSFICRMRCGTSSVDPVSMNRLSFLRNRCRNGLGSVKEGEPHFVVVHCTGYIKAWPPAGVSLPDDDPEAGQGSKFCLVAIGRLQVTSSPNCTDMSNICQPTEFISRHNIEGIFTFVDHRCVATVGYQPQELLGKNIVEFCHPEDQQLLRDSFQQVVKLKGQVLSVMFRFRAKNREWLWMRTSSFTFQNPYSDEMSIFICTNTNVKNSSQEPRPTLSNTIQRSQLGPTTNLSLEMGTGVLASRQQQQQQQQQQQQQQQQTELDMVPGRDGLASYSHSQVSVQPVATAGSEHSKPLEKSEGLFVQDRDPRFSEIYPNISADQSKGLSSSTVPATQQLFSQGSSFPPNPRPAENFRNSGLTPPVTIVQPSSSAGQILAQISRHSNLTQGSAPTWTSSTRPGFSAQLPTQATAKTRSSQFGVNNFQTSSSFSAMSLPGAPTASPSTAAYPTLPNRGSNFPPETGQTTGQFQTRTAEGVGVWPQWQGQQPHHRSSSNEQHVQPTSAQPSSQPEVFQEMLSMLGDQSNTYNNEEFPDLTMFPPFSE

SEQ ID NO: 8740 - DNA, 1174 bp, Homo sapiens
  ref <308>: DATABASE ACCESSION NUMBER: EMBL / AF001307
  ref <309>: DATABASE ENTRY DATE: 2000-03-03
atggcggctcctcccactggggggggggtggcgcggcggcggtggcatctcggccatggcggcgactactgccaaccccgaaatgacatcagatgtaccatcactgggtccagccattgcctctggaaactctggacctggaattcaaggtggaggagccattgtccagagggctattaagcggcgaccagggctggattttgatgatgatggagaagggaacagtaaatttttgaggtgtgatgatgatcagatgtctaacgataaggagcggtttgccaggtcggatgatgagcagagctctgcggataaagagagacttgccagggaaaatcacagtgaaattgaacggcggcgacggaacaagatgacagcctacatcacagaactgtcagatatggtacccacctgtagtgccctggctcgaaaaccagacaagctaaccatcttacgcatggcagtttctcacatgaagtccttgcggggaactggcaacacatccactgatggctcctataagccgtctttcctcactgatcaggaactgaaacatttgatcttggaggcagcagatggctttctgtttattgtctcatgtgagacaggcagggtggtgtatgtgtctgactccgtgactcctgttttgaaccagccacagtctgaatggtttggcagcacactctatgatcaggtgcacccagatgatgtggataaacttcgtgagcagctttccacttcagaaaatgccctgacagggcgtatcctggatctaaagactggaacagtgaaaaaggaaggtcagcagtcttccatgagaatgtgtatgggctcaaggagatcgtttatttgccgaatgaggtgtggcagtagctctgtggacccagtttctgtgaataggctgagctttgtgaggaacagatgcaggaatggacttggctctgtaaaggatggggaacctcacttcgtggtggtccactgcacaggctacatcaaggcctggcccccagcaggtgtttccctcccagatgatgacccagcctgaggtcttccaggagatgctgtccatgctgggagatcagagcaacagctacaacaatgaagaattccctgatctaactatgtttccccccttttcagaatagaactattggggtgaggataaggggtgggggag

SEQ ID NO: 8741 - protein, 789 aa, Homo sapiens
  ref <308>: DATABASE ACCESSION NUMBER: SWISS-Prot / P27540
  ref <309>: DATABASE ENTRY DATE: 2002-06-15
MAATTANPEMTSDVPSLGPAIASGNSGPGIQGGGAIVQRAIKRRPGLDFDDDGEGNSKFLRCDDDQMSNDKERFARSDDEQSSADKERLARENHSEIERRRRNKMTAYITELSDMVPTCSALARKPDKLTILRMAVSHMKSLRGTGNTSTDGSYKPSFLTDQELKHLILEAADGFLFIVSCETGRVVYVSDSVTPVLNQPQSEWFGSTLYDQVHPDDVDKLREQLSTSENALTGRILDLKTGTVKKEGQQSSMRMCMGSRRSFICRMRCGSSSVDPVSVNRLSFVRNRCRNGLGSVKDGEPHFVVVHCTGYIKAWPPAGVSLPDDDPEAGQGSKFCLVAIGRLQVTSSPNCTDMSNVCQPTEFISRHNIEGIFTFVDHRCVATVGYQPQELLGKNIVEFCHPEDQQLLRDSFQQVVKLKGQVLSVMFRFRSKNQEWLWMRTSSFTFQNPYSDEIEYIICTNTNVKNSSQEPRPTLSNTIQRPQLGPTANLPLEMGSGQLAPRQQQQQTELDMVPGRDGLASYNHSQVVQPVTTTGPEHSKPLEKSDGLFAQDRDPRFSEIYHNINADQSKGISSSTVPATQQLFSQGNTFPPTPRPAENFRNSGLAPPVTIVQPSASAGQMLAQISRHSNPTQGATPTWTPTTRSGFSAQQVATQATAKTRTSQFGVGSFQTPSSFSSMSLPGAPTASPGAAAYPSLTNRGSNFAPETGQTAGQFQTRTAEGVGVWPQWQGQQPHHRSSSSEQHVQQPPAQQPGQPEVFQEMLSMLGDQSNSYNNEEFPDLTMFPPFSE

SEQ ID NO: 8742 - DNA, 1428 bp, Rattus norvegicus
  ref <308>: DATABASE ACCESSION NUMBER: EMBL / U61373
  ref <309>: DATABASE ENTRY DATE: 2000-03-04
atgcgaagtctcagcctggcgtggctgctgggaggtatcacccttctggcggcctcggcctcctgcaaccggaccgtgaatgcaccgggacccaacagtaaagggagaagtctgattggcagattggacacgccgcctcccatcactgggaaaggggctccagttgaaccaggcttttccgttgatgaattctctgcatccgtcctcaccgggaagctgaccaccgtctttctcccggtcatctacatcattgtctttgtaattggtttgcccagtaatggtatggccctctgggtcttcttcttccgaacgaagaagaagcaccctgctgtgatttacatggccaacctggccttggcagacctcctctctgtcatctggttccccctgaagatctcctaccacctccatggcaacgactggacctatggggatgcgctctgcaaggtgctcattggctttttctacggcaatatgtactgctccatccttttcatgacctgcctcagcgtgcagaggtactgggtgatcgtgaaccccatgggacactccaggaagagggccaacatcgctgttggcgtctccctggccatctggctcctgatttttctggtcaccatccctctgtacgtcatgaggcagaccatctacattccagccttgaacatcaccacctgtcacgacgtgctgcccgaggaggtcctggtgggggacatgttcagttacttcctctccctggccattggagtctttctgttcccagccctccttactgcgtctgcctacgtgctcatgatcaaaacgctccgctcttccgccatggacgagcactcggagaagaaaaggcggagggctatccgcctcatcatcacggtgctgtccatgtacttcatctgcttcgctcccagcaacgtgctgctcgtcgtgcattatttcctcatcaaaagccagaggcagagccacgtctacgccctctacctcgtcgccctctgcctgtccaccctcaacagctgcatagacccctttgtctactactttgtttcgaaagatttcagggaccaggccagaaacgcgctcctctgccgaagcgtccgcaccgtgaaacgcatgcagatatcgctcacctccaacaagttctccaggaaatccagctcttactcctccagctcaaccagtgttaaaacctcctactgagctgggtctgaggatatggagccagcttgatgatgatgctggtgatgatgatgatgatgatgatggtgatgatgctgatgatgctgatgatgctgatgatgctgatgatgatgatgtatgtgtgtgcaattgtgcgtgcatgcgtgtgtgtgtgtgtgtgtgtgtgtgtgtgtgtgtgttagggatgccaccacaacgcacggggctgtcatttccattccaagttgcactata

SEQ ID NO: 8743 - protein, 397 aa, Rattus norvegicus
  ref <308>: DATABASE ACCESSION NUMBER: SWISS-Prot / Q63645
  ref <309>: DATABASE ENTRY DATE: 2002-06-15
MRSLSLAWLLGGITLLAASASCNRTVNAPGPNSKGRSLIGRLDTPPPITGKGAPVEPGFSVDEFSASVLTGKLTTVFLPVIYIIVFVIGLPSNGMALWVFFFRTKKKHPAVIYMANLALADLLSVIWFPLKISYHLHGNDWTYGDALCKVLIGFFYGNMYCSILFMTCLSVQRYWVIVNPMGHSRKRANIAVGVSLAIWLLIFLVTIPLYVMRQTIYIPALNITTCHDVLPEEVLVGDMFSYFLSLAIGVFLFPALLTASAYVLMIKTLRSSAMDEHSEKKRRRAIRLIITVLSMYFICFAPSNVLLVVHYFLIKSQRQSHVYALYLVALCLSTLNSCIDPFVYYFVSKDFRDQARNALLCRSVRTVKRMQISLTSNKFSRKSSSYSSSSTSVKTSY

SEQ ID NO: 8744 - DNA, 2813 bp, Homo sapiens
  ref <308>: DATABASE ACCESSION NUMBER: EMBL / BC012453
  ref <309>: DATABASE ENTRY DATE: 2001-08-21
ctgactttctctcggtgcgtccagtggagctctgagtttcgaatcggtggcggcggattccccgcgcgcccggcgtcggggcttccaggaggatgcggagccccagcgcggcgtggctgctgggggccgccatcctgctagcagcctctctctcctgcagtggcaccatccaaggaaccaatagatcctctaaaggaagaagccttattggtaaggttgatggcacatcccacgtcactggaaaaggagttacagttgaaacagtcttttctgtggatgagttttctgcatctgtcctcactggaaaactgaccactgtcttccttccaattgtctacacaattgtgtttgtggtgggtttgccaagtaacggcatggccctgtgggtctttcttttccgaactaagaagaagcaccctgctgtgatttacatggccaatctggccttggctgacctcctctctgtcatctggttccccttgaagattgcctatcacatacatggcaacaactggatttatggggaagctctttgtaatgtgcttattggctttttctatggcaacatgtactgttccattctcttcatgacctgcctcagtgtgcagaggtattgggtcatcgtgaaccccatggggcactccaggaagaaggcaaacattgccattggcatctccctggcaatatggctgctgattctgctggtcaccatccctttgtatgtcgtgaagcagaccatcttcattcctgccctgaacatcacgacctgtcatgatgttttgcctgagcagctcttggtgggagacatgttcaattacttcctctctctggccattggggtctttctgttcccagccttcctcacagcctctgcctatgtgctgatgatcagaatgctgcgatcttctgccatggatgaaaactcagagaagaaaaggaagagggccatcaaactcattgtcactgtcctggccatgtacctgatctgcttcactcctagtaaccttctgcttgtggtgcattattttctgattaagagccagggccagagccatgtctatgccctgtacattgtagccctctgcctctctacccttaacagctgcatcgacccctttgtctattactttgtttcacatgatttcagggatcatgcaaagaacgctctcctttgccgaagtgtccgcactgtaaagcagatgcaagtatccctcacctcaaagaaacactccaggaaatccagctcttactcttcaagttcaaccactgttaagacctcctattgagttttccaggtcctcagatgggaattgcacagtaggatgtggaacctgtttaatgttatgaggacgtgtctgttatttcctaatcaaaaaggtctcaccacataccatgtggatgcagcacctctcaggattgctaggagctcccctgtttgcatgagaaaagtagtcccccaaattaacatcagtgtctgtttcagaatctctctactcagatgaccccagaaactgaaccaacagaagcagacttttcagaagatggtgaagacagaaacccagtaacttgcaaaaagtagacttggtgtgaagactcacttctcagctgaaattatatatatacacatatatatatatattttacatctgggatcatgatagacttgttagggcttcaaggccctcagagatgatcagtccaactgaacgaccttacaaatgaggaaaccaagataaatgagctgccagaatcaggtttccaatcaacagcagtgagatgggattggacagtagaatttcaatgtccagtgagtgaggttcttgtaccacttcatcaaaatcatggatcttggctgggtgcggtgcctcatgcctgtaatcctagcactttgggaggctgaggcaggcaatcacttgaggtcaggagttcgagaccagcctggccatcatggcgaaacctcatctctactaaaaatacaaaagttaaccaggtgtgtggtgcacgtttgtaatcccagttactcaggaggctgaggcacaagaattgagtatcactttaactcaggaggcagaggttgcagtgagccgagattgcaccactgcactccagcttgggtgataaaataaaataaaatagtcgtgaatcttgttcaaaatgcagattcctcagattcaataatgagagctcagactgggaacagggcccaggaatctgtgtggtacaaacctgcatggtgtttatgcacacagagatttgagaaccattgttctgaatgctgcttccatttgacaaagtgccgtgataatttttgaaaagagaagcaaacaatggtgtctcttttatgttcagcttataatgaaatctgtttgttgacttattaggactttgaattatttctttattaaccctctgagtttttgtatgtattattattaaagaaaaatgcaatcaggattttaaacatgtaaatacaaattttgtataacttttgatgacttcagtgaaattttcaggtagtctgagtaatagattgttttgccacttagaatagcatttgccacttagtattttaaaaaataattgttggagtatttattgtcagttttgttcacttgttatctaatacaaaattataaagccttcagagggtttggaccacatctctttggaaaatagtttgcaacatatttaagagatacttgatgccaaaatgactttatacaacgattgtatttgtgacttttaaaaataattattttattgtgtaattgatttataaataacaaaattttttttacaacttaaaaaaaaaa

SEQ ID NO: 8745 - protein, 397 aa, Homo sapiens
  ref <308>: DATABASE ACCESSION NUMBER: SWISS-Prot / P55085
  ref <309>: DATABASE ENTRY DATE: 2002-06-15
MRSPSAAWLLGAAILLAASLSCSGTIQGTNRSSKGRSLIGKVDGTSHVTGKGVTVETVFSVDEFSASVLTGKLTTVFLPIVYTIVFVVGLPSNGMALWVFLFRTKKKHPAVIYMANLALADLLSVIWFPLKIAYHIHGNNWIYGEALCNVLIGFFYGNMYCSILFMTCLSVQRYWVIVNPMGHSRKKANIAIGISLAIWLLILLVTIPLYVVKQTIFIPALNITTCHDVLPEQLLVGDMFNYFLSLAIGVFLFPAFLTASAYVLMIRMLRSSAMDENSEKKRKRAIKLIVTVLAMYLICFTPSNLLLVVHYFLIKSQGQSHVYALYIVALCLSTLNSCIDPFVYYFVSHDFRDHAKNALLCRSVRTVKQMQVSLTSKKHSRKSSSYSSSSTTVKTSY

SEQ ID NO: 8746 - DNA, 1619 bp, Rattus norvegicus
  ref <308>: DATABASE ACCESSION NUMBER: EMBL / U61729
  ref <309>: DATABASE ENTRY DATE: 2000-03-04
ccaacacgttcatggtccttgccccgaaccttccagcagcagcctccgccgccgccccgtgacgcctgctccccgtcgtctgccgagccccgcgccatgactgtcgtctccgttccacagcgagatctcgctctgggcggccgctagcgccgttgggttcctcggggccctcccgatggtgagcccggccccgccgcccttgccgcgccttccggacccgcgcgctctgccacccaccctcttcctgccgcacttcctcggaggggacgggccgtgcctcgcccgcgcctcgcaccgctgcaccgtccagctgcagcttggtcccggccgctgccccacggcagcgcccaagaagcggcggaagaaaaaggtgcgggccagcccggccgggcagctcccaagccgcttccaccagtttcagcagcaccggccgagcctggagggtggccgcagcccggtgccggggccgatcgcagcgcaggaggagcggggtccaggggccactgccctgctatacagacagcccccactcgcgaaggaggttttaaaatcaaagatgggaaaatcggagaaaatttcccctccccatagccagcttgtgcatggtatacacttgtgtgaacaaccaaagataagcagacagaaaagcaaatttaacttgccactaaccaagatcacctctgcaaaaaggaatgaaaatgacttttggcaagattccgcttcctctgatagaatgcagaagcaggaaaaaaagcctctgaaaaatactgagaacattaagaataaccatttgaagaaatcagcatttctaacagaagggagccaaaaggaaaattacgccggagccaagttcagcgacccaccgtcccctagtgtcctcccaaagcctccgagtcactggatgggaagtaccactgagaatcccagccagagccgggagctgatggcagtgcacttgaaaacgctcctcaaagtgcagacctaggctccagtctgcagtgtgtattagacacagattcccccccatcctcggactgaaggaagtggatacggcagtggaaatttgccgtatcgcagcatccgacacaatgagcttatgtcacacaagcagcttgtattatattttgtattttgtaaatactgtataccatgtattatgtgtatattgttcatacttgagaggtacattatagttttgttatgaaagtatgtattttccctgcggatgtggtgggtgttttgtatatatacagtggagatattttaagtgggtgctaaggcacgtggaagactgtttatttgcacaggtactgacatttttttaagaacagctgtcaaatctcaaaagtgaagatctaaatgtgaacagtttacctaatgtactactgaagcttaagtctggcacaatcactgtaaacatggagtttgtgtttctctaaattgacttgacttttaatctgtaattactagaaagcttcctatttttaccaaacttgacttctggatatcagtatattgccattattgaaaagatttaaaacacctctaattttaaataccaacaaaattggttgtaatcaaattttaaatcaataataatttggcctcccccccttaaa

SEQ ID NO: 8747 - protein, 269 aa, Rattus norvegicus
  ref <308>: DATABASE ACCESSION NUMBER: SWISS-Prot / AAB09057
  ref <309>: DATABASE ENTRY DATE: 1998-11-01
MVSPAPPPLPRLPDPRALPPTLFLPHFLGGDGPCLARASHRCTVQLQLGPGRCPTAAPKKRRKKKVRASPAGQLPSRFHQFQQHRPSLEGGRSPVPGPIAAQEERGPGATALLYRQPPLAKEVLKSKMGKSEKISPPHSQLVHGIHLCEQPKISRQKSKFNLPLTKITSAKRNENDFWQDSASSDRMQKQEKKPLKNTENIKNNHLKKSAFLTEGSQKENYAGAKFSDPPSPSVLPKPPSHWMGSTTENPSQSRELMAVHLKTLLKVQT

SEQ ID NO: 8748 - DNA, 616 bp, Homo sapiens
  ref <308>: DATABASE ACCESSION NUMBER: EMBL / AW974441
  ref <309>: DATABASE ENTRY DATE: 2000-06-09
aaaggggggaggccaaattattattattgatttaaaatttgattacaaccaattttgttggtatttaaaattagaggtgttttaaatctccataatggcaatataccaatatccagaaatgaagtttggtaaaaacgggaagctttctaggaattgcagattaaaagtcaagttgtcaatttagagcaacacagactccatgattacagtgattgtgccgaatttcaccttcagtagtacataaggaaattgttcacagttacatcttcacttttgagatttgacagctgttcttaaaaaaatttcggtacctgtgcaaataaacagtcttccatgtgccttagcacccacttagactatctccactgtatatatacaaaacaccaccacagctgcagggcaaaatacatactttcataacaaaactataatgtcctctcaagtatgaacaatgtacacataatacatggtatacagtatttacaaaatataaaatataatacaagctgcttgtgtgacttaagcttaattgggcggatgctgcaaccaggcaaagttttactgttgtatccgtttccttttgagtccaaagatttgggggaaattgatgtttccc

SEQ ID NO: 8749 - protein, 327 aa, Homo sapiens
  ref <308>: DATABASE ACCESSION NUMBER: Refseq / NP_006804
  ref <309>: DATABASE ENTRY DATE: 2002-11-05
MTVVSVPQREPLVLGGRLAPLGFSSRGYFGALPMVTTAPPPLPRIPDPRALPPTLFLPHFLGGDGPCLTPQPRAPAALPNRSLAVAGGTPRAAPKKRRKKKVRASPAGQLPSRFHQYQQHRPSLEGGRSPATGPSGAQEVPGPAAALAPSPAAAAGTEGASPDLAPLRPAAPGQTPLRKEVLKSKMGKSEKIALPHGQLVHGIHLYEQPKINRQKSKYNLPLTKITSAKRNENNFWQDSVSSDRIQKQEKKPFKNTENIKNSHLKKSAFLTEVSQKENYAGAKFSDPPSPSVLPKPPSHWMGSTVENSNQNRELMAVHLKTLLKVQT

SEQ ID NO: 8750 - DNA, 2481 bp, Rattus norvegicus
  ref <308>: DATABASE ACCESSION NUMBER: EMBL / U62316
  ref <309>: DATABASE ENTRY DATE: 2000-03-04
tctcactatagggctcgagcggccgcccgggcaggtcggctggcgaggacacgtcaggggacataaataaataaataattccattcagcggatgacagcgaggcgaggcggctgcagctgggcggggggaccgggagagcagcggtgcgcaccgggtgtcagagccagagctgaggaccgaacccagggccttgcacttgctaggttgttttcgtctccagtagaagctcagaaatgccatcagagtcttcagtaaaggcaacggcggcgccgcctccattcccacttcctccggacggagggtggggctgggttgtagtctgcgcatccttcatctccattgggttctcctatgccttccccaaagccgtcacggtattcttcaatgacatcaaggacattttcaagaccacctccagtcagatcgcgtggatatcctccattatgctggctgtcatgtacgcaggaggtcccatcagtagtgtgttggtgaataactatggcagccggcctgtggtgatagtaggaggattactgtgctgtactggaatgatcttggcttctttcagcagcagtgtgatagaactttacctcaccgtcggcttcattggaggtttaggattagcattcaacctgcaaccagccttaacaataatcgggaaatacttctataggaagcgaccccttgcaaatggctttgccatggctggaagtcctgttttcttaagcacactggctcctttcaatcagttcctatttaacagctatggctggaaggggagttttttgattttgggggccatatttttgcactcctgtgtggccgggtgcctcatgagacctgttgggccaagtccacgtgctgcgaagtctaaaagtaaggttggctcaagacaagattcaagtacgaagagactcagtaaggtatcaacagcagaaaagattaatcggtttttagatttcggcctttttacacatagaggatttttgatctacctgtctggaaatgtcgtgttgtttttagggatgtttgcccctattatattcttggctccgtatgctaaggacaaaggagtggatgactataattcagctttcttgctgtctgtgatggcttttaccgatatgtttgctcggccttcggtaggattaatagccaacactagcttaatccgtccacgaatccagtacttgttcagcgtggcaatcatgttcactggcatatgccatctcctctgccccctagcccattcctacacagctttggtggtctacgttatattttttggaataggatttggaagtattagcagtctcctctttgaatgtcttatggaccaggttggagcctccaggttctccagtgctgtggggctcgtcactatcgtggagtgttgcccagttcttcccggccctcccctggctggtaaattgctcgatataactggacaatataaatacctgtacatagccagtgggatagtcgtgttatcatcaggcatttacctactgatttgcaatgctataaactatagacttctcgagaaggaaaggaagagagagaaagcaaggaggaagaaatcagcctcgcaggcatccaaagaaatggaggctttgagcagatctaaacaggacgatgttactgtgaaagtttcaaatacacacaatcctccctcagacagggacaaagaaagtagtatttaacaagtctcatctccgaatcagtgttcagaaatttaattatgagtttctttgtgtttttttcaatgaattgcaaaggattttagctgcaacaaaagatcgcaaacagtaacgaaactggtatcttcctcaatgacgaactaaaaatcagtgctttaatatttgttaaagatggttaacttttgagattgtgcacataaaaaatccacacagctgcttatctgcacaccaaagctgtgatgaaaatgaatttttttaaatcttctgccaacttttacttttagctatagaatgagatctgcatcccagaccccggctgacctaagcacaattcaacattaattccacataactaccctcttcaaggttcatttttcgtcggatactaagtcatgaagtgaattgaagacaatcattctttctattcaacacacaaagaattacacatgtagccacgcaaacactgagtaacgggatatcataaagaaataaatgaatttgagaaaattattatcatagtcatttttaagtcaaaggaaataagactctggcaagtgggaatgtaatatatttgtgtgcagtcatccagtgtggtttccaaataacagtctatgttgaaaattcaagtgttattaactcaaaacacgctaaaggggaaactatctacagtgggtgagtttggctaaacccccacacagctctactagttttcaccatcactctgccacatttgtgcctattttatccacatcacctgtctgcactgtttcagcacaatag

SEQ ID NO: 8751 - protein, 489 aa, Rattus norvegicus
  ref <308>: DATABASE ACCESSION NUMBER: SWISS-Prot / Q63344
  ref <309>: DATABASE ENTRY DATE: 2002-06-15
MPSESSVKATAAPPPFPLPPDGGWGWVVVCASFISIGFSYAFPKAVTVFFNDIKDIFKTTSSQIAWISSIMLAVMYAGGPISSVLVNNYGSRPVLIVGGLLCCTGMILASFSSSVIELYLTVGFIGGLGLAFNLQPALTIIGKYFYRKRPLANGFAMAGSPVFLSTLAPFNQFLFNSYGWKGSFLILGAIFLHSCVAGCLMRPVGPSPRAAKSKSKVGSRQDSSTKRLSKVSTAEKINRFLDFGLFTHRGFLIYLSGNVVLFLGMFAPIIFLAPYAKDKGVDDYNSAFLLSVMAFTDMFARPSVGLIANTSLIRPRIQYLFSVAIMFTGICHLLCPLAHSYTALVVYVIFFGIGFGSISSLLFECLMDQVGASRFSSAVGLVTIVECCPVLFGPPLAGKLLDITGQYKYLYIASGIVVLSSGIYLLICNAINYRLLEKERKREKARRKKSASQASKEMEALSRSKQDDVTVKVSNTHNPPSDRDKESSI

SEQ ID NO: 8752 - DNA, 2104 bp, Homo sapiens
  ref <308>: DATABASE ACCESSION NUMBER: EMBL / AF058056
  ref <309>: DATABASE ENTRY DATE: 1999-07-05
ggaaacttctgcctcaggtggggagaggagtccatagatcagggaaacttatgtcttggtgaaatggaagaccatgtttctaaacacctgtcgccaggttacttgaatttccactagaggagcagaaatgccaccaatgccaagtgccccacctgtgcatccacctccagatggaggatggggttggattgtggttggagcagcttttatctccattggattttcctatgcattccccaaagctgtcaccgtattcttcaaagaaattcagcaaatattccacactacctacagtgaaatagcatggatttcatccattatgctggctgttatgtacgcaggaggtcctgtaagtagtgttttggtgaataaatacggcagccggccggtggtgatagcaggaggcttattatgctgtcttggaatggtgttggcctcctttagtagcagcgtggtacagctgtacctcactatgggattcattacaggtttaggtttagccttcaacctgcaacccgccttaaccataattggcaaatacttctataggaagcgacccatggcaaatggattggccatggcaggaagtcctgttttcttaagttcattggctcctttcaatcagtacctttttaatacttttggctggaaaggaagcttcctgattttgggaagtctacttttgaatgcctgtgtggctggttccctcatgagaccccttggacccaatcaaaccacttctaagtctaaaaataagactggcaaaacagaagatgattcaagcccaaagaaaatcaaaacgaagaaatcaacttgggaaaaagttaataagtatttagatttctccctttttaagcatagaggatttctgatatatctgtctggaaatgtcattatgttcctaggtttttttgcccccattatattcttggctccatatgctaaagaccaaggaattgatgagtactcggcagcttttctgctatctgttatggctttcgttgatatgtttgctaggccttctgtaggattaattgcaaactccaaatatattcgacctcgaattcagtacttcttcagttttgcaatcatgttcaatggagtgtgtcacctcttgtgcccactggcacaggactacacaagcctggtattatatgctgtattttttggccttggatttgggagtgttagcagtgttctctttgaaactctcatggacctcgtgggtgcaccaagattttccagtgccgtcggacttgtcacaattgtggagtgtggcccagttcttcttggccctcctcttgcaggtaaattggtggatttaactggagaatataaatacatgtacatgtcctgtggggctattgtggtagcagcaagcgtgtggctgctcattggcaatgctatcaactatagattgcttgcaaaggaaaggaaggaggaaaatgcaaggcagaagtccagagaatctgaacccttgagcaaatctaaacattcggaagatgttaacgtcaaagtttcaaatgcacagagtgtaacctcagaaagagaaactaacatttaacaagaatcacatctctgatttcagtgtttatgactttatctaggagtttgtttttcattttgtttttttaaagtattagaaaaggttttagctgaaatgaggagtcacaattdaaggatggaggtgatattttcctcaatggcaaattttaaattagtttttaaaaacttacttatttgggtagttaaattttgagattatgcatagaaagaatccatgctataggtttatttccatacctgactctgggtgtggtggttaaaatactaattttaaagtcttccagtgactttcggtcttggttatatggagaattctgaatcccaaacccctggtttaagtaggtagaaggaggatgcctaatcctacaaagtgaccctttatacatttcattttttatttgatattaaagtatgagatagagttgagagacaattaattatcccctcttacacacaaacacacatactcccacatacttacccacatgtacacagagtatctggagaataaaacccaaattcaaaaaaaaaaaaaaaa

SEQ ID NO: 8753 - protein, 478 aa, Homo sapiens
  ref <308>: DATABASE ACCESSION NUMBER: SWISS-Prot / O60669
  ref <309>: DATABASE ENTRY DATE: 2001-10-16
MPPMPSAPPVHPPPDGGWGWIVVGAAFISIGFSYAFPKAVTVFFKEIQQIFHTTYSEIAWISSIMLAVMYAGGPVSSVLVNKYGSRPVVIAGGLLCCLGMVLASFSSSVVQLYLTMGFITGLGLAFNLQPALTIIGKYFYRKRPMANGLAMAGSPVFLSSLAPFNQYLFNTFGWKGSFLILGSLLLNACVAGSLMRPLGPNQTTSKSKNKTGKTEDDSSPKKIKTKKSTWEKVNKYLDFSLFKHRGFLIYLSGNVIMFLGFFAPIIFLAPYAKDQGIDEYSAAFLLSVMAFVDMFARPSVGLIANSKYIRPRIQYFFSFAIMFNGVCHLLCPLAQDYTSLVLYAVFFGLGFGSVSSVLFETLMDLVGAPRFSSAVGLVTIVECGPVLLGPPLAGKLVDLTGEYKYMYMSCGAIVVAASVWLLIGNAINYRLLAKERKEENARQKSRESEPLSKSKHSEDVNVKVSNAQSVTSERETNI

SEQ ID NO: 8754 - DNA, 2481 bp, Rattus norvegicus; identical to SEQ ID NO: 8750
  ref <308>: DATABASE ACCESSION NUMBER: EMBL / U62316
  ref <309>: DATABASE ENTRY DATE: 2000-03-04

SEQ ID NO: 8755 - protein, 489 aa, Rattus norvegicus; identical to SEQ ID NO: 8751
  ref <308>: DATABASE ACCESSION NUMBER: SWISS-Prot / Q63344
  ref <309>: DATABASE ENTRY DATE: 2002-06-15

SEQ ID NO: 8756 - DNA, 2104 bp, Homo sapiens; identical to SEQ ID NO: 8752
  ref <308>: DATABASE ACCESSION NUMBER: EMBL / AF058056
  ref <309>: DATABASE ENTRY DATE: 1999-07-05

SEQ ID NO: 8757 - protein, 478 aa, Homo sapiens; identical to SEQ ID NO: 8753
  ref <308>: DATABASE ACCESSION NUMBER: SWISS-Prot / O60669
  ref <309>: DATABASE ENTRY DATE: 2001-10-16

SEQ ID NO: 8758 - DNA, 540 bp, Rattus norvegicus
  ref <308>: DATABASE ACCESSION NUMBER: EMBL / U62635
  ref <309>: DATABASE ENTRY DATE: 2000-04-30
ggaggtgcggctgccatggcgcggaatgtgttgtaccccctctaccagctgggcggccctcagctccgtgtgtttcgaactaacttcttcattcagttggtgcggcctggtaccgcacagcctgaagatacagtgcaattccggatccccatggagatgaccagggtggaccttcgaaattaccttgagcagatttacaacgttcctgtggctgctgtgcgcacacgggtacagcatggctccaacaggaggagggaccataagaatgtgaggatcaagaaaccggactacaaagtggcctacgtgcagctggcccacgggcagaccttcactttcccagatcttttcccagaaaaggaacccacttctccagaccctctggaagaggagctaccccagcagaggcaaagcagcgacccacggtgccctggtatcccttcctggtttggcctatgacctctgacagcaggttctgggccacagaccctagtgagcacagtggttctgacaagcccaaataaaaattttttgtggagaaag

SEQ ID NO: 8759 - protein, 146 aa, Rattus norvegicus
  ref <308>: DATABASE ACCESSION NUMBER: SWISS-Prot / AAB05795
  ref <309>: DATABASE ENTRY DATE: 2001-12-01
MARNVLYPLYQLGGPQLRVFRTNFFIQLVRPGTAQPEDTVQFRIPMEMTRVDLRNYLEQIYNVPVAAVRTRVQHGSNRRRDHKNVRIKKPDYKVAYVQLAHGQTFTFPDLFPEKEPTSPDPLEEELPQQRQSSDPRCPGIPSWFGL

SEQ ID NO: 8760 - DNA, 700 bp, Homo sapiens
  ref <308>: DATABASE ACCESSION NUMBER: EMBL / U26596
  ref <309>: DATABASE ENTRY DATE: 1999-06-30
gggcgggcgcgctgctcctccgcctcgcggaccccggaagcgcgcgtggccgccatggcgcggaatgtggtgtaccccctgtaccggctgggtggcccacaacttcgggtgttccgaaccaacttcttcattcagctggtgcggcccggtgtggcccagcccgaggacaccgtgcagttccggatccccatggaaatgacaagggtggacctcaggaattacctcgagggcatctataacgtgcccgtggctgctgtgcggacacgggtgcagcatggctctaacaagagaagagatcacagaaacgtgaggatcaagaagccggactacaaggtcgcctacgtgcagctggcccatggacagaccttcacgttcccagatctgtttcccgagaaagacgagagccctgaaggcagcgctgccgacgacctctacagcatgctcgaggaggagaggcagcagaggcagagcagcgacccgcggcggggcggcgtccccagctggttcgggctgtgacggggtggccagcagggacgcgccccaggtgggcagctgtggcagagcagcgacccgcggcggggcggcatccccagctggttcgggccgtgacggggcggccagcagggacgcgccccaggtgggcagctgtggcagagcagtcccgacacctaaataaaagtcttgctgcaggagaaagaaa

SEQ ID NO: 8761 - protein, 153 aa, Homo sapiens
  ref <308>: DATABASE ACCESSION NUMBER: Refseq / NP_066957
  ref <309>: DATABASE ENTRY DATE: 2001-07-06
MARNVVYPLYRLGGPQLRVFRTNFFIQLVRPGVAQPEDTVQFRIPMEMTRVDLRNYLEGIYNVPVAAVRTRVQHGSNKRRDHRNVRIKKPDYKVAYVQLAHGQTFTFPDLFPEKDESPEGSAADDLYSMLEEERQQRQSSDPRRGGVPSWFGL

SEQ ID NO: 8762 - DNA, 1697 bp, Rattus norvegicus
  ref <308>: DATABASE ACCESSION NUMBER: EMBL / U63740
  ref <309>: DATABASE ENTRY DATE: 2000-03-04
tagctggcttgcccgctgccgttgcactgcaccgggccacctctagccggtggatggggatgtctggctgaaccccgggatccgattccctcctccaggacctgctcagggaaacggatcttgacagttgccatcattgtactacggtgccaggatggaggctccactggtgagtctggatgaagagtttgaagatatcaggccctgctgcactgaggacccagaggaaaagccacaaagtctctatggcacatctcctcaccacctggaggacccttccctctccgagcttgagaatttttcttccgaaataatcagcttcaagtccatggaggacctcgtgaatgaatttgatgagaagctcaatgtctgctttcggaactacaatgccaagaccgagaacctggctccagtgaagaaccagttgcagatccaggaggaggaggagactcttcgggatgaggaggtttgggatgctctgacagacaattacatcccttcactctcagaagactggagggacccaaacattgaagctctgaatggcaacagctctgacactgagatccacgagaaggaagaagaagatgagttcattgagaagagtgaaaacgactctggtatcaacgaggagcctctcctcacagctgaccaggtgattgaggagatcgaagaaatgatgcagaactccccagatcctgaggaggaagtggaggtgctggaagaggaggatggaggagaaatctcgtctcaggcagattcagtcctgctacaagagatgcaggccctgacgcagaccttcaacaacaactggtcctatgaagggctgagacacatgtctgggtctgagctgacagagctgctggaccaggtggagggtgccatccgtgacttctcggaggagctggtccaccagctggcccgcagagatgagctggagtttgagaaggaagtgaagaactctttcatcacggtgctcattgaggttcagaataagcagaaggagcagcgggaactgatgaagaagaggcggaaagagaaggggttaagcctgcagagcagtcggatagagaaggggaaccagatgcctctcaagcgtttcagcatggagggcatctccaacatcctgcagagtggcatccgccagacctttggctcctcaggagctgacagacagtacctgaacacagtcatcccttatgagaagaaatcttctcctccctctgtggaagacctgcagatgctgacaaacattctcttcgccatgaaggaggataacgagaaggtgcctactttgctaacggactacattttaaaagtgctctgtccaacctaacctcacctttggagcagcctcactgcaggaggtcactgagcaagaaagtcattccatcactgggattgcatgacaccacgtaacctccggcgtgtatttaaacgtgtatagcttaacctggattaaacatgagcaaccgcgcacgcgcggggtcctttgctgttggcttctagtgctagtaatcattggatgcatgatcgggcgtagggccagtgactctgctccctctaacctgtgttggggaagacaggtgccctcaccactcattatgtagtctggctccagccctcaacccagcttatactcttcagactaattttgaaataaaccttcatttaattaatatcaaaaaaaaaaaaaa

SEQ ID NO: 8763 - protein, 393 aa, Rattus norvegicus
  ref <308>: DATABASE ACCESSION NUMBER: SWISS-Prot / P97577
  ref <309>: DATABASE ENTRY DATE: 2001-10-16
MEAPLVSLDEEFEDIRPCCTEDPEEKPQSLYGTSPHHLEDPSLSELENFSSEIISFKSMEDLVNEFDEKLNVCFRNYNAKTENLAPVKNQLQIQEEEETLRDEEVWDALTDNYIPSLSEDWRDPNIEALNGNSSDTEIHEKEEEDEFIEKSENDSGINEEPLLTADQVIEEIEEMMQNSPDPEEEVEVLEEEDGGEISSQADSVLLQEMQALTQTFNNNWSYEGLRHMSGSELTELLDQVEGAIRDFSEELVHQLARRDELEFEKEVKNSFITVLIEVQNKQKEQRELMKKRRKEKGLSLQSSRIEKGNQMPLKRFSMEGISNILQSGIRQTFGSSGADRQYLNTVIPYEKKSSPPSVEDLQMLTNILFAMKEDNEKVPTLLTDYILKVLCPT

SEQ ID NO: 8764 - DNA, 1654 bp, Homo sapiens
  ref <308>: DATABASE ACCESSION NUMBER: EMBL / U60060
  ref <309>: DATABASE ENTRY DATE: 2000-03-04
acgagggtccggctgagccccgggatccgcctccctccgccaggacccgcacagataaactcatcctgaaagtcgctgttgttctcctgctgagcaagaatggaggccccactggtgagtctggatgaagagtttgaggaccttcgaccctcctgctcggaggacccggaggagaagccccagtgtttctatggttcatctccccaccatctcgaggacccctccctctccgagcttgagaatttttcttccgaaataatcagcttcaagtccatggaggacctcgtaaatgaatttgatgagaagctcaatgtctgctttcggaactacaacgccaagaccgagaacctagctcccgtgaagaaccagttacagatccaagaggaggaggagacccttcaggacgaggaggtttgggatgctctgacagacaattacatcccttcactctcagaagactggagggatccaaacatcgaggctctgaatggcaactgctctgacactgagatccatgagaaagaagaggaagagttcaatgagaagagtgaaaatgattccggtatcaacgaggagcctctgctcacagcagatcaggtaattgaggagattgaggaaatgatgcagaactccccagaccctgaggaagaagaggaggttctggaagaagaggatggaggagaaacttcctcccaggcagactcggtcctcctgcaggagatgcaggcattgacacagaccttcaacaacaactggtcctatgaagggctgaggcacatgtctgggtctgagctgaccgagctgctggaccaggtggagggtgccatccgtgacttctcggaggagctggtgcagcagctggcccgccgggacgagctggagtttgagaaggaagtgaagaactcctttatcacggtgcttattgaggttcagaacaagcagaaggagcagcgagaactgatgaaaaagaggcggaaagagaaagggctgagcctgcagagcagccggatagagaagggaaaccagatgcctctcaagcgcttcagcatggaaggcatctccaacattctgcagagtggcatccgccagacctttggctcctcaggaactgacaaacagtatctgaacacagtcattccttacgagaagaaagcctctcctccctcagtggaagacctgcagatgctgacaaacattctctttgccatgaaggaggataatgagaaggtgcctactttgctaacggactacattttaaaagtgctctgccctacctaaccttgccctttggagcagcctcgctgcaggaggtcactgagcaagagtcattccatcacagggactgcatgagaccatgtaacctccgacatgtatttaaacgtgtatagcttaacctggattaaacacgagcaagcgcgcggggtcctttgccgttggcttctagtgctagtaatcattggatgcatgatggggcagggccggtgatggtgcctcccccttgctggtgtcaggagaggggaaggcagccgctttcaccgctcattatgtagtctggctacagccctccaaaacagcttatactcttaagactaattttgaaataaaaccttcatttaattaaaaaaaaaaaaaaaaaaaaaaaaaaaaaattaaa

SEQ ID NO: 8765 - protein, 392 aa, Homo sapiens
  ref <308>: DATABASE ACCESSION NUMBER: SWISS-Prot / Q99689
  ref <309>: DATABASE ENTRY DATE: 2002-06-15
MEAPLVSLDEEFEDLRPSCSEDPEEKPQCFYGSSPHHLEDPSLSELENFSSEIISFKSMEDLVNEFDEKLNVCFRNYNAKTENLAPVKNQLQIQEEEETLQDEEVWDALTDNYIPSLSEDWRDPNIEALNGNCSDTEIHEKEEEEFNEKSENDSGINEEPLLTADQVIEEIEEMMQNSPDPEEEEEVLEEEDGGETSSQADSVLLQEMQALTQTFNNNWSYEGLRHMSGSELTELLDQVEGAIRDFSEELVQQLARRDELEFEKEVKNSFITVLIEVQNKQKEQRELMKKRRKEKGLSLQSSRIEKGNQMPLKRFSMEGISNILQSGIRQTFGSSGTDKQYLNTVIPYEKKASPPSVEDLQMLTNILFAMKEDNEKVPTLLTDYILKVLCPT

SEQ ID NO: 8766 - DNA, 1690 bp, Rattus norvegicus
  misc_feature (1)..(1690): n=a, c, g or t
  ref <308>: DATABASE ACCESSION NUMBER: EMBL / U63972
  ref <309>: DATABASE ENTRY DATE: 2000-03-04
gaattcggcacgagaccagaggtggtggtgaggcatcccaagcgcaagatgtcgggagaggncgagttttacctgtttcagaatatctcctcagtggggccctgggatgggcctcagtaccacattgctcccgtctgggccttccacctccaggcagccttcatgggatttgtcttctttgcagggaccccactcaatgccacagtgttggtggccacactgcactacaaaaagttgcggcagcccctcaactacattctggtcaatgtatccctcggaggcttcctcttctgcatcttctctgtcttcacagtcttcatcgccagctgtcatggatacttcctctttggtcgccacgtttgtgctctggaggccttcttgggctctgtagcaggtctagtgacaggatggtccttggctttcctggcctttgagcgctaccttgtcatctgtaaaccctttggcaacatccgcttcaactccaagcacgcactgacggtggttctgattacttggaccattggcatcggggtgtccatcccgcccttctttggctggagcaggttcatccctgagggcctgcagtgctcctgtggcccggactggtacaccgtgggcaccaagtatcgaagcgagcactatacctggtttctgttcatcttctgtttcatcattcctctttccctcatctgtttctcctacttccagttgctgaggactctcagagctgtggcggcccagcagcaagagtcagctacaactcaaaaggctgaacgggaggtgagccatatggtggtggtgatggtgggatccttctgtctctgctacgtgccctatgctgccctggccatgtacatggtcaacaatcgtaaccacgggctgtacttacggcttgtcaccatccccgccttcttttccaagagttcatgtgtctacaaccccatcatctactgcttcatgaataagcagttccgggcctgcatcctggagatggtgtgcaggaagcccatgacagacgaatctgacatgtctggctctcagaaaacagaagtttctactgtttcttccagcaaagttggccctcactaaggaccctcagttggcctgctggcagcaaccatggggccacattgaattatctacatctccattagaattcaaaccattaacaatgtagggaacagacaggagcagtggcatctggccggtcagtttcattttcctgttactctctccctgtcagcagggccacacgggccatttcaacagtcacagtttctaagtgataccttcatctctggagaactgtgagagaagggccgtgcctctggtgtatgggtaacacctggttgttcttttattccgtgctgggatctgagttgatatatcctgttagaataagcttggcatggggcagtgtgaagaaaaagcagcagacaccaaacacctgcagtgagctgaagctttcctatgcggcctctcccagttgctgccgtctgggctatggctgccctgcccagaactgccccncctcactcatctgacagttattctaagtcttctcccctccatttggctaaatgtatccatttaaagctgtgtgttgattaaagttagtgtcttaatctcttgacgacctcaaaaaaaaaaaaaaaaaactcagagtacttctagagcgccgcggcccatc

SEQ ID NO: 8767 - protein, 346 aa, Rattus norvegicus
  misc_feature (1)..(346): Xaa=Unknown amino acid
  ref <308>: DATABASE ACCESSION NUMBER: SWISS-Prot / Q63652
  ref <309>: DATABASE ENTRY DATE: 2001-10-16
MSGEXEFYLFQNISSVGPWDGPQYHIAPVWAFHLQAAFMGFVFFAGTPLNATVLVATLHYKKLRQPLNYILVNVSLGGFLFCIFSVFTVFIASCHGYFLFGRHVCALEAFLGSVAGLVTGWSLAFLAFERYLVICKPFGNIRFNSKHALTVVLITWTIGIGVSIPPFFGWSRFIPEGLQCSCGPDWYTVGTKYRSEHYTWFLFIFCFIIPLSLICFSYFQLLRTLRAVAAQQQESATTQKAEREVSHMVVVMVGSFCLCYVPYAALAMYMVNNRNHGLYLRLVTIPAFFSKSSCVYNPIIYCFMNKQFRACILEMVCRKPMTDESDMSGSQKTEVSTVSSSKVGPH

SEQ ID NO: 8768 - DNA, 1101 bp, Homo sapiens
  ref <308>: DATABASE ACCESSION NUMBER: Refseq / NM_001708
  ref <309>: DATABASE ENTRY DATE: 2001-01-23
ggcatccatgagaaaaatgtcggaggaagagttttatctgttcaaaaatatctcttcagtggggccgtgggatgggcctcagtaccacattgcccctgtctgggccttctacctccaggcagctttcatgggcactgtcttccttatagggttcccactcaatgccatggtgctggtggccacactgcgctacaaaaagttgcggcagcccctcaactacattctggtcaacgtgtccttcggaggcttcctcctctgcatcttctctgtcttccctgtcttcgtcgccagctgtaacggatacttcgtcttcggtcgccatgtttgtgctttggagggcttcctgggcactgtagcaggtctggttacaggatggtcactggccttcctggcctttgagcgctacattgtcatctgtaagcccttcggcaacttccgcttcagctccaagcatgcactgacggtggtcctggctacctggaccattggtattggcgtctccatcccacccttctttggctggagccggttcatccctgagggcctgcagtgttcctgtggccctgactggtacaccgtgggcaccaaataccgcagcgagtcctatacgtggttcctcttcatcttctgcttcattgtgcctctctccctcatctgcttctcctacactcagctgctgagggccctgaaagctgttgcagctcagcagcaggagtcagctacgacccagaaggctgaacgggaggtgagccgcatggtggttgtgatggtaggatccttctgtgtctgctacgtgccctacgcggccttcgccatgtacatggtcaacaaccgtaaccatgggctggacttacggcttgtcaccattccttcattcttctccaagagtgcttgcatctacaatcccatcatctactgcttcatgaataagcagttccaagcttgcatcatgaagatggtgtgtgggaaggccatgacagatgaatccgacacatgcagctcccagaaaacagaagtttctactgtctcgtctacccaagttggccccaactgaggacccaatattggcctgtttgcaacagctagaattaaattttactt

SEQ ID NO: 8769 - protein, 348 aa, Homo sapiens
  ref <308>: DATABASE ACCESSION NUMBER: SWISS-Prot / P03999
  ref <309>: DATABASE ENTRY DATE: 2002-06-15
MRKMSEEEFYLFKNISSVGPWDGPQYHIAPVWAFYLQAAFMGTVFLIGFPLNAMVLVATLRYKKLRQPLNYILVNVSFGGFLLCIFSVFPVFVASCNGYFVFGRHVCALEGFLGTVAGLVTGWSLAFLAFERYIVICKPFGNFRFSSKHALTVVLATWTIGIGVSIPPFFGWSRFIPEGLQCSCGPDWYTVGTKYRSESYTWFLFIFCFIVPLSLICFSYTQLLRALKAVAAQQQESATTQKAEREVSRMVVVMVGSFCVCYVPYAAFAMYMVNNRNHGLDLRLVTIPSFFSKSACIYNPIIYCFMNKQFQACIMKMVCGKAMTDESDTCSSQKTEVSTVSSTQVGPN

SEQ ID NO: 8770 - DNA, 952 bp, Rattus norvegicus
  ref <308>: DATABASE ACCESSION NUMBER: EMBL / U64030
  ref <309>: DATABASE ENTRY DATE: 1999-09-26
ggcctccagcgccatgccgctcttgtgcgcgctgctgcgcagccgactccaaccttctctgctccgctcgcttacgctcacgtccgcgcaaagcctaagctgcggcggaagcagaggagtccggacctggagcgcgcggaccggacccggagcgtgcgctgaccctgcggtctctgtctctaagagggctcgagcggaagatgacgcttctctgcgtttcgtgcggctctcggagcacgctacggctcccacccgcgggtccgcgcgcgctgcaggctacgacctgtacagtgcctatgattatacaattccatccatggagaaagcccttgtgaagacagacattcagatagctgttccttctgggtgctatggaagagtggctccacgttctggcttggctgtaaagcacttcatagatgtaggagccggtgtcatagacgaagattatagaggaaatgtcggcgtcgtgctgttcaattttggaaaagagaagttcgaggtgaaaaaaggtgaccggatcgcgcagctcatttgtgagcggattctttatccagacttagaggaggtgcaaacactggataacactgagagaggttcaggaggcttcggctccacgggaaagaattaaaactttgcttgaagtactttgctgtttgaacactgtaaacgagctttaatttcagaagcattttgtgttctaggatgtaggaaaggatacctatcacggtggaactgctctgttctctagttgatggttgcctgtaaatctgtatcgtgagaactggcagtgacatgcagacttggttattagatattttttttaaatttggtattgtatttaaattatagtcctataagaactgattttgctctaattgctatattatttgtaattttttttttttatccaataagtccgaagtctttagcgaaaaaaaaaaaaaaaaaa

SEQ ID NO: 8771 - protein, 205 aa, Rattus norvegicus
  ref <308>: DATABASE ACCESSION NUMBER: SWISS-Prot / P70583
  ref <309>: DATABASE ENTRY DATE: 2002-06-15
MPLLCALLRSRLQPSLLRSLTLTSAQSLSCGGSRGVRTWSARTGPGACADPAVSVSKRARAEDDASLRFVRLSEHATAPTRGSARAAGYDLYSAYDYTIPSMEKALVKTDIQIAVPSGCYGRVAPRSGLAVKHFIDVGAGVIDEDYRGNVGVVLFNFGKEKFEVKKGDRIAQLICERILYPDLEEVQTLDNTERGSGGFGSTGKN

SEQ ID NO: 8772 - DNA, 1816 bp, Homo sapiens
  ref <308>: DATABASE ACCESSION NUMBER: Refseq / NM_001948
  ref <309>: DATABASE ENTRY DATE: 2002-11-05
ctcgccttctggctctgccatgccctgctctgaagagacacccgccatttcacccagtaagcgggcccggcctgcggaggtgggcggcatgcagctccgctttgcccggctctccgagcacgccacggcccccacccggggctccgcgcgcgccgcgggctacgacctgtacagtgcctatgattacacaataccacctatggagaaagctgttgtgaaaacggacattcagatagcgctcccttctgggtgttatggaagagtggctccacggtcaggcttggctgcaaaacactttattgatgtaggagctggtgtcatagatgaagattatagaggaaatgttggtgttgtactgtttaattttggcaaagaaaagtttgaagtcaaaaaaggtgatcgaattgcacagctcatttgcgaacggattttttatccagaaatagaagaagttcaagccttggatgacaccgaaaggggttcaggaggttttggttccactggaaagaattaaaatttatgccaagaacagaaaacaagaagtcatacctttttcttaaaaaaaaaaaaaaagtttttgcttcaagtgttttggtgttttgcacttctgtaaacttactagctttaccttctaaaagtactgcattttttacttttttttatgatcaaggaaaagatcgttaaaaaaaaacacaaagaagtttttctttgtgtttggatcaaaaagaaactttgtttttccgcaattgaaggttgtatgtaaatctgctttgtggtgacctgatgtaaacagtgtcttcttaaaatcaaatgtaaatcaattacagattaaaaaaaaaagcctgtatttaactcatatgatctcccttcagcaacttattttgctttaattgctttaaatcttaagcaatattttttattcagtaaacaaattctttcacaaggtacaaaatcttgcataagctgaactaaaataaaaatgaaaaggagagattaaaggtattccttgttcttcccttctcttcactagtctaaaaacttctttttaatcttaagattctttgtgatgagggtgagaaaaagaatcctcagtttatttttccactattaatctttcttttgataaatcctctattgactgggtagaggtatgtttgtgaaagacatgtaacttggggatttgttactttaggtttgttcccttgaatttcatctcatcaggcaaattgtactagttgtagttacgagttttccctcagtgaagtagcaataggctgtaatcaagaaaatatgccatttatagagataagataaatgaaataatacttcagccaccaggtttttctgtctcacatacataagcagcatttcattgcagatatgggactgattctgtggcttaccttgattaacatcttttggaagttttgctagtgtgctttcctttctttactatgtttctcagattcctttgtatcagggttttgggtgtcacttaggttttgtccatcagattctgtgagacaccaggcatcgttttgaggatgtgggttatacacatggagtgcttctggaactatcagcccacttgaccacccagtttgtggaagcacaggcaagagtgttcttttctggtgattctccaggccatttaataccctgcaatgtaattgtccctctgtggctcacatttcattagtgagccatgaaatcaactcagtgggacatagccagcatttttgcataccaggttgggctataaaatatttctgttgtcaataaattttaaatgttttcctgctaaaaaaaaaaaaaa

SEQ ID NO: 8773 - protein, 252 aa, Homo sapiens [sequence omitted]

SEQ ID NO: 8774 - DNA, 976 bp, Rattus norvegicus
  ref <308>: DATABASE ACCESSION NUMBER: EMBL / U64689
  ref <309>: DATABASE ENTRY DATE: 2000-03-04
gagaagctgagcctgtgcttccgccccacgtcggacgccgaccccccgcgggcggccgtgcggcccatcacggagcgcagcctcttgcaaggggacgagatttggaatgccctgacagataattatgggaatgtcatgcctgtagactggaagtcgtcccatacgaggaccttgcatttgcttactctgaacctcacagagaaagggatgagtgatggccttcccttcgacacctcagatgaggaggagctgagggagcagctggatatgcattcaatcattgtctcctgtgtcaacgaggagcccctcttcactgcagaccaggttattgaagaaattgaagaaatgatgcaggagtcaccagacctagaagacgatgagacccccacacagtcagaccggctctccatgctctcccaggagattcagactctcaagagctctagcatgagcagctgtgaagagcgagtgaaaaggctgtcagtgtctgagctaaacgaactgctggaagaaattgagacggccattaaggagtactctgaggagctagtgcagcagttggccctgagagatgagctggagtttgagaaggaagtggagaacagctttatttctgctctgattgaagtgcagaacaagcagaaagaacacaaggagacagccaagaagaagaagaagctcaaaaatggcagctctcagaatgggaggaatgagagaagtcacatgccaggcacacgcttcagcatggaagggatctcaaatgtcattcagaatggcctccgccacacctttggaaactcaggtggagagaaacagtatttgacgacagtcatcccttacgagaaaaagaatggcccgccgtctgtggaagatcttcaaatattaacaaaaattctgcatgccatgaaggaggacagtgagaaagttccaagcttgttaacggactatatactgaaagttctgtgtccgacataga

SEQ ID NO: 8775 - protein, 324 aa, Rattus norvegicus
  ref <308>: DATABASE ACCESSION NUMBER: SWISS-Prot / P97578
  ref <309>: DATABASE ENTRY DATE: 2001-10-16
EKLSLCFRPTSDADPPRAAVRPITERSLLQGDEIWNALTDNYGNVMPVDWKSSHTRTLHLLTLNLTEKGMSDGLPFDTSDEEELREQLDMHSIIVSCVNEEPLFTADQVIEEIEEMMQESPDLEDDETPTQSDRLSMLSQEIQTLKSSSMSSCEERVKRLSVSELNELLEEIETAIKEYSEELVQQLALRDELEFEKEVENSFISALIEVQNKQKEHKETAKKKKKLKNGSSQNGRNERSHMPGTRFSMEGISNVIQNGLRHTFGNSGGEKQYLTTVIPYEKKNGPPSVEDLQILTKILHAMKEDSEKVPSLLTDYILKVLCPT

SEQ ID NO: 8776 - DNA, 886 bp, Homo sapiens
  misc_feature (1)..(886): n=a, c, g or t
  ref <308>: DATABASE ACCESSION NUMBER: EMBL / U69140
  ref <309>: DATABASE ENTRY DATE: 2000-03-04
gactggaagtcatcgcatactaggaccttgcacttgcttactctgaacctctcagaaaaaggggtaagtgncagtttgctctttgatacgtcagatgatgaagagctgagagaacagctggatatgcactcaatcatcgtctcctgtgttaatgatgaacccctcttcacggcagaccaggttattgaagaaattgaagaaatgatgcaggaatcaccggacccagaagatgatgaaacccctacacagtcagatcggctttcaatgctttcccaggaaattcaaactctcaagaggtctagtaccggcagttatgaagagagagtgaaaaggctctcagtgtctgagttaaatgaaatcctggaagaaattgagactgccattaaggagtactctgaggagctggtgcagcagttggctttacgagatgaactggagtttgaaaaggaagtgaaaaacagctttatttctgttcttattgaagtgcaaaacaaacagaaagagcacaaagaaacagcaaaaaagaaaaagaaactaaaaaatggcagctctcagaatgggaagaatgagagaagtcatatgcccggcacatatttgactacagtcattccttatgagaaaaaaaacggaccaccgtctgttgaagatcttcaaatattaacaaaaattcttcgtgccatgaaggaggacagtgaaaaagttccgagcttgttaactgattatattctgaaagtgctgtgtcctacatagagcagcaactttatctgcggtgggctccaagctagatttccgacagcattattctgagagctggctaccattacccttcttgctattggaaactcagcacatttgaacttgggtttgattcagtattaacagatct

SEQ ID NO: 8777 - protein, 320 aa, Homo sapiens
  ref <308>: DATABASE ACCESSION NUMBER: SWISS-Prot / Q9UHY8
  ref <309>: DATABASE ENTRY DATE: 2001-10-16
MGERRGRDGLGAPTVSRPWLQLGGEAEPVLPPLGSGRRARGRPCGHHGAQLLQGDEIWNALTDNYGNVMPVDWKSSHTRTLHLLTLNLSEKGVSDSLLFDTSDDEELREQLDMHSIIVSCVNDEPLFTADQVIEEIEEMMQESPDPEDDETPTQSDRLSMLSQEIQTLKRSSTGSYEERVKRLSVSELNEILEEIETAIKEYSEELVQQLALRDELEFEKEVKNSFISVLIEVQNKQKEHKETAKKKKKLKNGSSQNGKNERSHMPGTYLTTVIPYEKKNGPPSVEDLQILTKILRAMKEDSEKVPSLLTDYILKVLCPT

SEQ ID NO: 8778 - DNA, 4189 bp, Rattus norvegicus
  ref <308>: DATABASE ACCESSION NUMBER: EMBL / U65007
  ref <309>: DATABASE ENTRY DATE: 1996-11-22
atgaaggctcccaccgcgctggcacctggcattctgctgctgctgctgaccttggcgcagaggagccatggggagtgcaaggaggccctagtgaagtctgagatgaacgtgaacatgaagtaccagcttcccaacttcaccgcagaaacccccatccagaatgtcgtcctccatgggcaccatatttatctcggagccacaaactacatttatgttttaaatgacaaagaccttcagaaggtatctgagttcaagaccgggcccgtggtggaacacccagattgttttccttgtcaggactgcagcagcaaagccaatgtgtcaggaggtgtttggaaagacaacgtcaacatggcgctgcttgttgacacttactatgacgaccagctcatcagctgtggcagcgtcaacagagggacctgccaaaggcatgtccttcctcctgacaatgctgccgacattcagtccgaggttcactgcatgttctccccacttgcggaggaagagtcaggccagtgtcccgactgtgtagtgagtgccctgggagccaaagtcctcctgtctgaaaaggaccggttcatcaatttcttcgtggggaatacgataaactcttcctaccctcccgattattcattgcattcaatatcggtgaggcggctgaaggaaacccaggacggttttaagtttttgacagaccagtcctacattgatgtcctgggagaattccgagattcctaccccatcaagtacatacatgccttcgaaagcaaccattttatctactttctgactgtccagaaggaaaccctagatgctcagactttccatacaagaataatcaggttctgttctgtagactctgggttgcactcctacatggaaatgcctctggagtgcattctgacggaaaaaagaagaaagagatccacaagggaagaagtgtttaatatcctccaagccgcgtatgtcagtaaaccaggggccaatcttgctaagcaaataggggccagcccgtatgatgacattctctacggggtgtttgcacaaagcaagccagattctgctgagcccatgaaccgatcagcggtctgtgcattccccatcaaatatgtcaatgacttcttcaacaagattgtcaacaaaaacaacgtacggtgtctccagcatttttatggacccaaccacgagcactgtttcaataggaccctgctgagaaattcatcgggctgcgaagtgcgcagtgacgagtaccggacggagtttaccacagcgctgcaggctgtggatttattcatgggccggctcaaccatgtactcttgacgtctatctctaccttcatcaaaggtgacctcaccattgctaatctagggacatcagaaggtcgcttcatgcaggtggtgctctctcgcacagcacatttcaccccccatgtgaatttcctcctggattcccatcctgtgtctccggaagttattgtcgaacatccatcaaatcaaaatggctataccctggtggtcacagggaagaagatcaccaagattccactgaatggcctaggctgtgggcatttccagtcctgcagtcagtgtctctctgccccctactttatacagtgtggctggtgccacaatcggtgtgtgcattccaatgaatgccccagcggtacatggactcaagagatctgtctgccagcagtttataaggttttccccactagtgcacccctcgaaggaggaacaatgctgaccatatgtggctgggactttggattcaagaagaataataaatttgatttaaggaaaaccaaagttctgcttggcaacgagagctgtaccttgaccttaagcgagagcacgacaaatacgttgaaatgcacagttggccccgcgatgagtgagcacttcaatgtgtctgtgatcgtctcaaacagtcgagagacaacacagtacagtgcgttttcctatgtggatcctgtaataacaagtatttctccaaggtatggtcctcatgccggaggcaccttactcactttgactggaaaatacctcaacagcggcaattctagacacatttcaatcggagggaaaacatgtactttaaaaagtgtatcagatagcattctcgaatgctacaccccaggccacaccgtctctgccgagtttcccgtgaaattgaaaatcgacctggctgaccgagtgacaagcagcttcagttacggggaagacccgtttgtctctgaaatccacccgaccaaatcttttatcagtggtggaagcacaataacggggattggaaagaacctgaattcagttagcaccccaaagctggtaatagaagtgcatgacgtgggcgtgaactacaccgtggcgtgccaacatcgctcgagttcagagatcatctgctgcaccactccttccctgcaacagctggacctgcaactccccctgaagaccaaagccttcttcctgctggacgggatcctttccaaacactttgatctcacttatgtacatgatcctatgtttaagccttttgaaaagccagtaatgatctccatgggcaatgagaatgtagtggaaattaagggagacgatattgaccctgaagcagttaaaggtgaagtgttaaaagtcgggaataagagctgtgagaatctccactggcattctgaagctttgttgtgtacggtccccagtgacctgctgaagctgaacggcggcgagctaaatatagagtggaagcaagcagtctcttcaactgtccttggaaaagtgatcgttcaaccggatcagaattttgcaggattgatcattggtgcggtctcaatatcagtggtagttttgttagtatccgggctcttcctgtggctgagaaagagaaagcataaagatctgggcagtgaattagttcgctatgacgcaagagtacacactcctcatttggataggcttgtaagtgcccgaagtgtaagcccaactacagagatggtctcaaatgagtctgtagactacagagctacttttccagaagaccagtttcccaactcctctcagaatggagcctgcagacaagtgcagtatccactgacagatctgtcccccatcctgacgagtggagactctgatatatccagcccattactacaaaacactgttcacattgacctcagcgctctaaatccagagctggtccaagcggtgcagcacgtagtgattggacccagtagcctgattgtgcatttcaatgaagtcataggaagagggcattttggctgtgtctatcatgggactttgttggacagtgacggaaagaaaattcactgtgctgtgaaatccttgaatagaatcacagatatagaagaagtctcccagtttctgactgagggaatcatcatgaaagatttcagccaccccaatgttctctcactcttgggaatctgcctgcggagtgaagggtcccctctggtggttctgccctatatgaagcacggagatcttcgcaatttcattcgaaacgagactcataacccaactgtgaaagatcttataggattcggtcttcaagtagccaagggcatgaaatatcttgccagcaaaaagtttgtccacagagacttagctgcaagaaactgcatgttggatgaaaaattcactgtcaaggttgctgatttcggtcttgccagagacatgtacgacaaagagtattatagcgtccacaacaaaacgggtgcgaaactaccggtgaagtggatggctttagagagtctgcagacgcaaaagttcaccaccaagtcagacgtgtggtccttcggtgtgcttctctgggagctcatgacgagaggagcccctccttatcctgacgtgaacacatttgatatcactatatacctgttgcaaggcagaagactcttgcaaccagagtactgtccagacgccttgtatgaagtgatgctaaaatgctggcaccccaaagcagaaatgcgcccatcgttttctgaactggtctccagaatatcctcaatcttctccactttcattggcgagcactatgtccatgtgaacgctacttatgtgaatgtaaaatgtgttgctccatatccttctctgttgccatcccaagacaacattgacggcgaagcgaacacatgacggataagaggcccgccagcccacttccaagaaacagttc

SEQ ID NO: 8779 - protein, 1382 aa, Rattus norvegicus
  ref <308>: DATABASE ACCESSION NUMBER: SWISS-Prot / P97523
  ref <309>: DATABASE ENTRY DATE: 2002-06-15
MKAPTALAPGILLLLLTLAQRSHGECKEALVKSEMNVNMKYQLPNFTAETPIHNVVLPGHHIYLGATNYIYVLNDKDLQKVSEFKTGPVVEHPDCFPCQDCSSKANVSGGVWKDNVNMALLVDTYYDDQLISCGSVNRGTCQRHVLPPDNAADIQSEVHCMFSPLAEEESGQCPDCVVSALGAKVLLSEKDRFINFFVGNTINSSYPPDYSLHSISVRRLKETQDGFKFLTDQSYIDVLPEFRDSYPIKYIHAFESNHFIYFLTVQKETLDAQTFHTRIIRFCSVDSGLHSYMEMPLECILTEKRRKRSTREEVFNILQAAYVSKPGANLAKQIGASPYDDILYGVFAQSKPDSAEPMNRSAVCAFPIKYVNDFFNKIVNKNNVRCLQHFYGPNHEHCFNRTLLRNSSGCEVRSDEYRTEFTTALQRVDLFMGRLNHVLLTSISTFIKGDLTIANLGTSEGRFMQVVLSRTAHFTPHVNFLLDSYPVSPEVIVEHPSNQNGYTLVVTGKKITKIPLNGLGCGHFQSCSQCLSPPYFIQCGWCHNRCVHSNECPSGTWTQEICLPAVYKVFPTSAPLEGGTMLTICGWDFGFKKNNKFDLRKTKVLLGNESCTLTLSESTTNTLKCTVGPAMSEHFNVSVIVSNSRETTQYSAFSYVDPVITSISPRYGPHAGGTLLTLTGKYLNSGNSRHISIGGKTCTLKSVSDSILECYTPGHTVSAEFPVKLKIDLADRVTSSFSYREDPVVSEIHPTKSFISGGSTITGIGKNLNSVSTPKLVIEVHDVGVNYTVACQHRSSSEIICCTTPSLRQLDLQLPLKTKAFFLLDGILSKHFDLTYVHDPMFKPFEKPVMISMGNENVVEIKGDDIDPEAVKGEVLKVGNKSCENLHWHSEALLCTVPSDLLKLNGGELNIEWKQAVSSTVLGKVIVQPDQNFAGLIIGAVSISVVVLLVSGLFLWLRKRKHKDLGSELVRYDARVHTPHLDRLVSARSVSPTTEMVSNESVDYRATFPEDQFPNSSQNGACRQVQYLLTDLSPILTSGDSDISSPLLQNTVHIDLSALNPELVQAVPHVVIGPSSLIVHFNEVIGRGHFGCVYHGTLLDSDGKKIHCAVKSLNRITDIEEVSQFLTEGIIMKDFSHPNVLSLLGICLRSEGSPLVVLPYMKHGDLRNFIRNETHNPTVKDLIGFGLQVAKGMKYLVSKKFVHRDLAARNCMLDEKFTVKVADFGLARDMYDKEYYSVHNKTGAKLPVKWMALESLQTQKFTTKSDVWSFGVLLWELMTRGAPPYPDVNTFDITIYLLQGRRLLQPEYCPDALYEVMLKCWHPKAEMRPSVSELVSRISSIFSTFIGEHYVHVNATYVNVKCVAPYPSLLPSQDNIDGEANT

SEQ ID NO: 8780 - DNA, 432 bp, Homo sapiens
  ref <308>: DATABASE ACCESSION NUMBER: EMBL / U11813
  ref <309>: DATABASE ENTRY DATE: 2001-10-27
tggtcctttggcgtcgtcctctgggagctgatgacaagaggagccccaccttatcctgatgtaaacacctttgatataactgtttacttgttgcaagggagaagactcctacaacccgaatactgcccagaccccttgtaagtagtctttctgcacctcttacgttctttacttttacagaaatgcctgccttcaaagggtcttcttacagcatgtctttctttttggaacagatatgaagtaatgctaaaatgctggcaccctaaagccgaaatgcgcccatccttttctgaactggtgtcccggatatcagcaatcttctctactttcattggggagcactatgtccatgtgaacgctacttatgtgaacgtaaaatgtgtcgctccatatccttctctgttgtcatcagaagataacgctgatgatgag

SEQ ID NO: 8781 - protein, 1390 aa, Homo sapiens [sequence omitted]

SEQ ID NO: 8782 - DNA, 620 bp, Rattus norvegicus
  ref <308>: DATABASE ACCESSION NUMBER: EMBL / U65217
  ref <309>: DATABASE ENTRY DATE: 2000-03-04
gcggtgaccgagctggggcggccctcagccgagtactttaacaagcagtacctggagcggacgcgggccgagctggacacggtctgcagacacaactacgagaagacagaggtccccacctccctgcggcggcttgagcagcccaatgtggccatctccctgtccaggacagaggccctcaaccaccacaacttgctggtctgctcagtgacagatttctacccagcccagatcaaagtgcgctggttccggaatggccaggaggagatggcgggggtcgtgtccacacagcttattaggaacggggactggacctttcagatcctggtcatgctggagatgacgcctcagcggggagatgtgtacacctgccgtgttgaccaccccagcctcgatagccctgtcacagtggagtggcgggcacagtccgagtctgcccagagcaagatgctgagtggcatcgggggccttgtgctgggggtgatcttccttgggcttggccttttcatccattataagagtcagaaaggacctcaggggcctcctccagcaaggtctcctacagtgactcagagtgttttgagtgagtagactgtctcacacggtcaggccctgaaaat

SEQ ID NO: 8783 - protein, 196 aa, Rattus norvegicus
  ref <308>: DATABASE ACCESSION NUMBER: SWISS-Prot / AAB39559
  ref <309>: DATABASE ENTRY DATE: 2003-02-01
AVTELGRPSAEYFNKQYLERTRAELDTVCRHNYEKTEVPTSLRRLEQPNVAISLSRTEALNHHNLLVCSVTDFYPAQIKVRWFRNGQEEMAGVVSTQLIRNGDWTFQILVMLEMTPQRGDVYTCRVDHPSLDSPVTVEWRAQSESAQSKMLSGIGGLVLGVIFLGLGLFIHYKSQKGPQGPPPARSPTVTQSVLSE

SEQ ID NO: 8784 - DNA, 1763 bp, Homo sapiens
  ref <308>: DATABASE ACCESSION NUMBER: EMBL / M16276
  ref <309>: DATABASE ENTRY DATE: 2000-03-04
gcactggactgagaaccttcaccaaaaaaatgtctgcccagagacagatgaggtccttcagctccagtgctgattggttcttttccaaaggcccatctaatcctaccacgcacggaaatatccacaggtttttattctttctgccagctacatcagatccatcaggtccgagctgagttgactaccactacttttccctttgtctcaattatgtcttggaagaaggctttgcggatccccggaggccttcgggcaccaactgtgaccttgatgctggcgatgctgagcaccccagtggctgagggcagagaccctcccgaggatttcgtgctccagtttaaggccatgtgctacttcaccaatgggacggagcgcgtgcgttatgtgaccagatacatctataaccgagaggaggacgtgcgcttcgacagcgacgtgggggtgtatcgggcggtgacggcgcaggggcggcctgacgccgagtactggaacagccagaaggacatcctggagaggacccgagcggagttggacacggtgtgcagacacaactacgaggtggcgttccgcgggatcttgcagaggagagtggagcccacagtgaccatctccccatccaggacagaggccctcaaccaccacaacctgctggtctgctcggtgacagatttctatccaggccagatcaaagtccggtggtttcggaatgaccaggaggagacagctggcgttgtgtccaccccccttattaggaacggtgactggaccttccagatcctggtgatgctggaaatgactccccagcatggagacgtctacacctgccacgtggagcaccccagcctccagagccccatcaccgtggagtggcgggctcagtctgaatctgcccagaacaagatgctgagtggcattggaggcttcgtgctggggctgatcttcctcgggctgggccttatcatccgtcaaaggagtcagaaaggacctcaagggcctccaccagcagggcttctgcactgactcctgagactattttaactaggattggttatcactcttctgtgatgcctgcttgtgcctgcccagaattcccagctgcctgtgtcagcttgtcccccgagatcaaagtcctacagtggctgtcacgcagccaccaggtcatctcctttcatccccaccccaaggcgctggctgtgactctgcttcctgcactgacccagagcctctgcctgtgcacggccagctgcgtctactcaggtcccaaggggtttctgtttctattctctcctcagactgctcaagagaagcacatgaaaaacattacctgactttagagcttttttacataattaaacatgatcctgagttaaaaaaaaaaaaggaaatcgctgcagaatgaaggaatatcccttgaggtgacccagccaacctgtggccagaaggagggttgtaccttgaaaagaccactgaaagcattttggggtgtcaagtaagggtgggcagaggaggtagaaaatcaattcaattgtcgcatcattcatggttctttaatattgatgctcagtgcattggccttagaatatcccagcctctcttctggtttggtgagtgctgtgtaagtaagcatggtagaattgtttggagacatatatagtgatccttggtcactggtgtttcaaacattctggaaagtcacatcgatcaagaatattttttatttttaagaaagcataaccagcaataaaaatactatttttgagtct

SEQ ID NO: 8785 - protein, 261 aa, Homo sapiens [sequence omitted]

SEQ ID NO: 8786 - DNA, 1058 bp, Rattus norvegicus
  ref <308>: DATABASE ACCESSION NUMBER: EMBL / U65417
  ref <309>: DATABASE ENTRY DATE: 2000-03-04
tggaattaagtgaggagcacagctggatgagcaacaggacagaccttcagtacgagctgaaccccggagaggtggccacagccagcattttctttggcgctttgtggttgttctctatctttggcaattcccttgtgtgtctggtcatccataggagccggaggactcagtccaccaccaactaccttgtggtctccatggcgtgtgctgaccttctcatcagtgtggccagcacaccgtttgtcgtgctgcagttcactaccgggaggtggaccctcgggagcgccatgtgcaaggtggtccgctacttccagtatctcaccccaggcgtccagatctacgtgctgctctccatctgcatagaccgcttctacaccatcgtctaccctctgagcttcaaggtgtccagagaaaaggccaagagaatgatcgcagcctcctggatcttggacgcagccttcgtgacgcctgtcttctttttctacggctctaactgggatagccactgtaactacttcctcccaccctcctgggagggaactgcctatactgttatccacttcttggtgggctttgtgattccctctgtcctcataatcctgttttaccagaaagtcataaagtatatctggagaataggcacggacgggcggaccctgaggaggacaatgaacattgtccccaggaccaaggtgaagacggtcaagatgtttctgctcttcaaccttgtgttcctgttctcctggctgcctttccatgtggctcagctctggcatccccatgagcaagagtacaggaagagctcccttgttttcacagcagtcacgtgggtgtctttcagctcttcggcctctaaacccactctgtactctatttataacgccaattttcggagagggatgaaagagactttctgcatgtcctcaatgaaatgttaccgcagcaatgcctacaccatcacgaccagttcaaggatggccaaaagaaactatgtgggcatttcggaaatccctcccgtgagcaggacgataaccaaagactcgatctatgactcatta

SEQ ID NO: 8787 - protein, 352 aa, Rattus norvegicus
  ref <308>: DATABASE ACCESSION NUMBER: SWISS-Prot / AAB49752
  ref <309>: DATABASE ENTRY DATE: 2002-06-15
ELSEEHSWMSNRTDLQYELNPGEVATASIFFGALWLFSIFGNSLVCLVIHRSRRTQSTTNYLVVSMACADLLISVASTPFVVLQFTTGRWTLGSAMCKVVRYFQYLTPGVQIYVLLSICIDRFYTIVYPLSFKVSREKAKRMIAASWILDAAFVTPVFFFYGSNWDSHCNYFLPPSWEGTAYTVIHFLVGFVIPSVLIILFYQKVIKYIWRIGTDGRTLRRTMNIVPRTKVKTVKMFLLFNLVFLFSWLPFHVAQLWHPHEQEYRKSSLVFTAVTWVSFSSSASKPTLYSIYNANFRRGMKETFCMSSMKCYRSNAYTITTSSRMAKRNYVGISEIPPVSRTITKDSIYDSL

SEQ ID NO: 8788 - DNA, 1409 bp, Homo sapiens
  ref <308>: DATABASE ACCESSION NUMBER: Refseq / NM_006143
  ref <309>: DATABASE ENTRY DATE: 2002-11-05
aattaagagaaaaaaagtgaatatggtttttgctcacagaatggataacagcaagccacatttgattattcctacacttctggtgcccctccaaaaccgcagctgcactgaaacagccacacctctgccaagccaatacctgatggaattaagtgaggagcacagttggatgagcaaccaaacagaccttcactatgtgctgaaacccggggaagtggccacagccagcatcttctttgggattctgtggttgttttctatcttcggcaattccctggtttgtttggtcatccataggagtaggaggactcagtctaccaccaactactttgtggtctccatggcatgtgctgaccttctcatcagcgttgccagcacgcctttcgtcctgctccagttcaccactggaaggtggacgctgggtagtgcaacgtgcaaggttgtgcgatattttcaatatctcactccaggtgtccagatctacgttctcctctccatctgcatagaccggttctacaccatcgtctatcctctgagcttcaaggtgtccagagaaaaagccaagaaaatgattgcggcatcgtggatctttgatgcaggctttgtgacccctgtgctctttttctatggctccaactgggacagtcattgtaactatttcctcccctcctcttgggaaggcactgcctacactgtcatccacttcttggtgggctttgtgattccatctgtcctcataattttattttaccaaaaggtcataaaatatatttggagaataggcacagatggccgaacggtgaggaggacaatgaacattgtccctcggacaaaagtgaaaactatcaagatgttcctcattttaaatctgttgtttttgctctcctggctgccttttcatgtagctcagctatggcacccccatgaacaagactataagaaaagttcccttgttttcacagctatcacatggatatcctttagttcttcagcctctaaacctactctgtattcaatttataatgccaattttcggagagggatgaaagagactttttgcatgtcctctatgaaatgttaccgaagcaatgcctatactatcacaacaagttcaaggatggccaaaaaaaactacgttggcatttcagaaatcccttccatggccaaaactattaccaaagactcgatctatgactcatttgacagagaagccaaggaaaaaaagcttgcttggcccattaactcaaatccaccaaatacttttgtctaagttctcattctttcaattgttatgcaccagagattaaaaagctttaactataaaaacagaagctatttacatatttgttttcactcaactttccaagggaaatgttttattttgtaaaatgcattcatttgtttactgt

SEQ ID NO: 8789 - protein, 415 aa, Homo sapiens
  ref <308>: DATABASE ACCESSION NUMBER: Refseq / NP_006134
  ref <309>: DATABASE ENTRY DATE: 2002-11-05
MVFAHRMDNSKPHLIIPTLLVPLQNRSCTETATPLPSQYLMELSEEHSWMSNQTDLHYVLKPGEVATASIFFGILWLFSIFGNSLVCLVIHRSRRTQSTTNYFVVSMACADLLISVASTPFVLLQFTTGRWTLGSATCKVVRYFQYLTPGVQIYVLLSICIDRFYTIVYPLSFKVSREKAKKMIAASWIFDAGFVTPVLFFYGSNWDSHCNYFLPSSWEGTAYTVIHFLVGFVIPSVLIILFYQKVIKYIWRIGTDGRTVRRTMNIVPRTKVKTIKMFLILNLLFLLSWLPFHVAQLWHPHEQDYKKSSLVFTAITWISFSSSASKPTLYSIYNANFRRGMKETFCMSSMKCYRSNAYTITTSSRMAKKNYVGISEIPSMAKTITKDSIYDSFDREAKEKKLAWPINSNPPNTFV

SEQ ID NO: 8790 - DNA, 3053 bp, Rattus norvegicus
  ref <308>: DATABASE ACCESSION NUMBER: EMBL / U65656
  ref <309>: DATABASE ENTRY DATE: 2000-03-04
ctggcgtctgcccgcccttgtttccgctgcatccagacttccccgggtggctggaggctctgtgtgcatccagaactttagatatacaaagggattactaggacctgcaagcacccgcagccgtggtgcgtactggtacgtgggatcccgttatgagaccctgagcccggagaagctgaggcaattgagtaaaggggtctcagaacgccgtggagagcaggcgccagccgggtggaccccagggcacagccagcgacctcagggtgacacgcggagcccgggagcgcaaggatggaggcacgattggtctggggagtgctcgtcggccctctgcgggttctctgcgtcctgtgctgcctgctgggccacgccatcgctgcaccgtcgcccatcatcaagttccccggcgatgtctcccccaaaacagacaaagagttggcagtgcaatacctgaacactttctatggctgccccaaggagagttgcaacctctttgtgctgaaggacaccctcaagaagatgcagaagttctttgggctgccccagacaggtgaccttgaccagaacaccatcgagaccatgcggaaaccaagatgtggcaacccagatgtggccaactacaacttctttccccgcaagcccaagtgggacaagaatcagatcacatacaggatcattggttacacacctgacctggaccctgagacagtggatgatgcctttgctcgggccttaaaagtatggagcgacgtaactccactacgcttttctcgaatccatgatggggaagctgacatcatgatcaactttggtcgatgggagcatggagatggatacccatttgacggcaaggacggactcctggcacatgcctttgccccgggcactggtgttgggggagattctcactttgatgacgatgagctgtggactctaggagaaggacaagtggtccgagtaaagtatgggaacgctgatggcgagtactgcaagttccccttcttgtttaatggtcgggaatacagcagctgcacagacactggccggagtgacggcttcctctggtgttccaccacgtacaactttgagaaggacggcaaatatggcttctgtccccacgaagccttgtttaccatgggtggcaatggagatggacagccctgcaagttcccgttccgcttccagggcacctcttacaacagctgtaccaccgagggccgtacagacggctaccgctggtgtggcaccaccgaggattatgaccgggataagaagtatggattctgcccagagactgctatgtccactgtgggtggaaattcagaaggtgccccatgtgtcttccccttcacttttctgggcaacaagtatgagagctgcaccagcgctggccgaagcgatggcaaggtgtggtgtgcaaccacaaccaactacgatgatgaccggaagtggggcttctgtcccgaccaaggatatagcctattccttgtggcagcccatgagttcggccatgccatggggctggaacactcacaggaccctggagctttgatggcccctatctacacctacaccaagaacttccgactatccaatgatgacatcaaggggatccaggagctctatgggccctcccctgatgctgatactgacactggtactggacccacgcctacactgggacctgtcactcccgagatctgcaagcaagacattgtctttgatggcattgctcagatccgtggtgagatcttcttcttcaaggatcggtttatttggcggacagtgacaccacgtgacaagcccacaggtcccttgctggtggccacattctggcctgagctcccggaaaagattgatgccgtgtacgaggccccacaggaagagaaggctgtgttcttcgcagggaatgagtactgggtctattctgccagcactttggaaagaggataccccaagccactgaccagcctgggtttaccccctgatgtccagcaagtagacgctgcctttaactggagtaagaacaagaagacatacatcttttctggggacaagttctggagatacaatgaagtaaagaagaaaatggaccccggtttcccgaagctcatcgcagactcctggaatgccatccctgataacctggatgcagtcgtggacctgcagggtggtggtcacagctatttcttcaagggtgcttattacctgaagttggagaaccaaagtctgaagagtgtgaagtttggaagcatcaaatcggactggctgggctgctgagctggccctgttctgacgggccgtacaatcttcactgcacaccgggcccaggaccctggggaaggacgtgaagaggcctggttaccctgtctcctgctctgtagttaatcagccttctccttcacctggtgatttcagatttaagagggtggcttcttttttgtgcccaaagaaaggtgctgaccgtatccctcccaggtgctactttctcccgcccacccaaggggatgcttggatattcacaatgcagccctcctttgggctgccctggtgctccacacttcaggttctccagcatgaatgatcttttgtgggttacagcacactcagagtcaacagagactgtcttaggagggcactggtggctcaacagcctggcacagggcagtgggatacaggtgtgccaaggtggaaaccagagacatctggtgtctcccttacggctgccctggcacttttactactttagctgtttgctttgtttgccctttgctgtttggttcaaccttttcagttttccaccacactgcatttttctcaccgaaggactccggttgtcggacatcactgcacgatgcatctggcctggcctatggatggctcccctcctcactttgtgtagaagcaactccagtcacttcctccactggttggaggagaaccaagtcatcggcttcctgctcagccttcttgcttctccctttaacagttccccatgggaaatggcaaaaagtataaataaaggcaccctttgagtggcaaaaaaaaaaaaa

SEQ ID NO: 8791 - protein, 662 aa, Rattus norvegicus
  ref <308>: DATABASE ACCESSION NUMBER: SWISS-Prot / P33436
  ref <309>: DATABASE ENTRY DATE: 2002-06-15
MEARLVWGVLVGPLRVLCVLCCLLGHAIAAPSPIIKFPGDVAPKTDKELAVQYLNTFYGCPKESCNLFVLKDTLKKMQKFFGLPQTGDLDQNTIETMRKPRCGNPDVANYNFFPRKPKWDKNQITYRIIGYTPDLDPETVDDAFARALKVWSDVTPLRFSRIHDGEADIMINFGRWEHGDGYPFDGKDGLLAHAFAPGTGVGGDSHFDDDELWTLGEGQVVRVKYGNADGEYCKFPFLFNGREYSSCTDTGRSDGFLWCSTTYNFEKDGKYGFCPHEALFTMGGNADGQPCKFPFRFQGTSYNSCTTEGRTDGYRWCGTTEDYDRDKKYGFCPETAMSTVGGNSEGAPCVFPFTFLGNKYESCTSAGRNDGKVWCATTTNYDDDRKWGFCPDQGYSLFLVAAHEFGHAMGLEHSQDPGALMAPIYTYTKNFRLSHDDIKGIQELYGPSPDADTDTGTGPTPTLGPVTPEICKQDIVFDGIAQIRGEIFFFKDRFIWRTVTPRDKPTGPLLVATFWPELPEKIDAVYEAPQEEKAVFFAGNEYWVYSASTLERGYPKPLTSLGLPPDVQQVDAAFNWSKNKKTYIFAGDKFWRYNEVKKKMDPGFPKLIADSWNAIPDNLDAVVDLQGGGHSYFFKGAYYLKLENQSLKSVKFGSIKSDWLGC

SEQ ID NO: 8792 - DNA, 758 bp, Homo sapiens
  misc_feature (1)..(758): n=a, c, g or t
  ref <308>: DATABASE ACCESSION NUMBER: EMBL / AU123141
  ref <309>: DATABASE ENTRY DATE: 2002-08-06
ttgtagagaccctggccagaatacaaagaaacagacctgctaatactttttcaaggacgattactttgccaaaaaaaatgaagaaagaaaacaaaataaagtggaagctaaattaagagctaaacaggagcaagaagcaaaacaaaagttagaagaagatgctatctggggctttaaacatacaaagggattgccaggacccgccgcgccgtcgcccatcatcaagttccccggcgatgtcgcccccaaaacggacaaagagttggcagtgcaatacctgaacaccttctatggctgccccaaggagagctgcaacctgtttgtgctgaaggacacactaaagaagatgcagaagttctttggactgccccagacaggtgatcttgaccagaataccatcgaagaccatgcggaaagccacgctgcggcaacccagatgtggccaactacaacttcttccctcgcaagcccaagtgggacaagaaccagatcacatacagggatcattggctacacacctgatctggacccagaagacagtggatgatgcctttgctcgtgccttccaagtctggnagcgatgttgacccccactgcggttttctcgaatcccattgatgggagaggcaagacattcattgatcaactttttgggccgcttggggaagcattgggcgaatggggaatacccccttttgnaacnggttaagggaaccgggaacttccctggggcttcattggcctttccgcccccaagg

SEQ ID NO: 8793 - protein, 408 aa, Homo sapiens
  ref <308>: DATABASE ACCESSION NUMBER: SWISS-Prot / P05455
  ref <309>: DATABASE ENTRY DATE: 2002-06-15
MAENGDNEKMAALEAKICHQIEYYFGDFNLPRDKFLKEQIKLDEGWVPLEIMIKFNRLNRLTTDFNVIVEALSKSKAELMEISEDKTKIRRSPSKPLPEVTDEYKNDVKNRSVYIKGFPTDATLDDIKEWLEDKGQVLNIQMRRTLHKAFKGSIFVVFDSIESAKKFVETPGQKYKETDLLILFKDDYFAKKNEERKQNKVEAKLRAKQEQEAKQKLEEDAEMKSLEEKIGCLLKFSGDLDDQTCREDLHILFSNHGEIKWIDFVRGAKEGIILFKEKAKEALGKAKDANNGNLQLRNKEVTWEVLEGEVEKEALKKIIEDQQESLNKWKSKGRRFKGKGKGNKAAQPGSGKGKVQFQGKKTKFASDDEHDEHDENGATGPVKRAREETDKEEPASKQQKTENGAGDQ

SEQ ID NO: 8794 - DNA, 1257 bp, Rattus norvegicus
  ref <308>: DATABASE ACCESSION NUMBER: EMBL / U66470
  ref <309>: DATABASE ENTRY DATE: 2000-03-04
cacgaagccggagccccagacgcgcacaggccgccgcagcagctccggtgttcagcaggatgtcccggtggctaatgcaaatgttgatgctgcccctattgctgctccctttgggtcaagctgcccccaaggatggagttgcaaggctggaccctgaggcacaacagcagctcacaaccaaccccttccagccaggccctgagcagctccgacgtctgcgggattatctcaagggactggagaagatggaagaggaccctgaacaaatgaaccgggagcaagtcctgctatatctctttgctcttcacgactttgaccagaacggacaactggacggcctggaactcttgtccatgctgacagcagctctggcccctggagctgcacacttccccatcaacccggtgatcctggtagtagacatggtgcttgagactcaggacctggatggagacgggctcatgactcctgcagagctcatcaacttcccaggagaagcccccaagcgcgcagagtcccttcccccagctctccaggagccacaacctgccggaagtcagccgcttttagccaacagtccgctgcaatcagaaacccagcaatccctggggactaaagaagaaattacaagtcaggtagaggccaaaagggccttggagcctgaacaggaggctggacatcacatagagactaaagtagatgctctaagccctgaaggggaggctaggggtcaggcagagtctgaaggagatgccccaggtccccgagaggatgctgagagacaggtggagagcaaggacaacgaaggggaagccaaagacctgccagcggaaacactagagacccaaaacactccaaatgtggttgaggctcatagcatccaactggaaaacgacgagatatgagctagacacacaggctcatgcccctcaggatctcagtgcagaacagaagcatcaagtgtgaatacagtgggtctggagccacctctgacatgggtatggtggtccaagctcgtactcccagaagcactgagagctccaggctagcctaggccacttagcaagtttgaagccaggctgggctacttcgtgaggccctgtcttgaggaggggaaaagaaacgctctcccacgtctcctttctggccctcagtaggaagcaggacttttcttcgcagctcaggggagaccacaagctgagaggcagatttcaggccccaaacaatcaataaaaaacaaaatggatttgtctccat

SEQ ID NO: 8795 - protein, 281 aa, Rattus norvegicus
  ref <308>: DATABASE ACCESSION NUMBER: SWISS-Prot / AAC52950
  ref <309>: DATABASE ENTRY DATE: 2002-06-15
MSRWLMQMLMLPLLLLPLGQAAPKDGVARLDPEAQQQLTTNPFQPGPEQLRRLRDYLKGLEKMEEDPEQMNREQVLLYLFALHDFDQNGQLDGLELLSMLTAALAPGAAHFPINPVILVVDMVLETQDLDGDGLMTPAELINFPGEAPKRAESLPPALQEPQPAGSQPLLANSPLQSETQQSLGTKEEITSQVEAKRALEPEQEAGHHIETKVDALSPEGEARGQAESEGDAPGPREDAERQVESKDNEGEAKDLPAETLETQNTPNVVEAHSIQLENDEI

SEQ ID NO: 8796 - DNA, 1175 bp, Homo sapiens
  ref <308>: DATABASE ACCESSION NUMBER: EMBL / U66468
  ref <309>: DATABASE ENTRY DATE: 1999-07-01
gggcggcgcacgagcaggagcgcccacggagctggacccccagagccgcgcgcccgcgcagcagttccaggaaggatgttacctttgacgatgacagtgttaatcctgctgctgctccccacgggtcaggctgccccaaaggatggagtcacaaggccagactctgaagtgcagcatcagctcctgcccaaccccttccagccaggccaggagcagctcggacttctgcagagctacctaaagggactaggaaggacagaagtgcaactggagcatctgagccgggagcaggttctcctctacctctttgccctccatgactatgaccagagtggacagctggatggcctggagctgctgtccatgttgacagctgctctggcccctggagctgccaactctcctaccaccaacccggtgatattgatagtggacaaagtgctcgagacgcaggacctgaatggggatgggctcatgacccctgctgagctcatcaacttcccgggagtagccctcaggcacgtggagcccggagagccccttgctccatctcctcaggagccacaagctgttggaaggcagtccctattagctaaaagcccattaagacaagaaacacaggaagcccctggtcccagagaagaagcaaagggccaggtagaggccagaagggagtctttggatcctgtccaggagcctgggggccaggcagaggctgatggagatgttccagggcccagaggggaagctgagggccaggcagaggctaaaggagatgcccctgggcccagaggggaagctgagggccaggcagaggctaaaggagatgcccctgggcccagaggggaagctgggggccaggcagaggccagggagaatggagaggaggccaaggaacttccaggggaaacactggagtctaagaacacccaaaatgactttgaggtgcacattgttcaagtggagaatgatgagatctagatcttaagatacaggtacccacagaagtctcagtgccagaacataagccctgaagtgggcaggggaaatgtacgctgggacaaggaccatctctgtgccccctgtctggtcccagtaggtatcaggtctttctatgcagctcagggagaccctaagttaaggggcagattaccaataaagaactgaatgaattc

SEQ ID NO: 8797 - protein, 301 aa, Homo sapiens
MLPLTMTVLILLLLPTGQAAPKDGVTRPDSEVQHQLLPNPFQPGQEQLGLLQSYLKGLGRTEVQLEHLSREQVLLYLFALHDYDQSGQLDGLELLSMLTAALAPGAANSPTTNPVILIVDKVLETQDLNGDGLMTPAELINFPGVALRHVEPGEPLAPSPQEPQAVGRQSLLAKSPLRQETQEAPGPREEAKGQVEARRESLDPVQEPGGQAEADGDVPGPRGEAEGQAEAKGDAPGPRGEAGGQAEAEGDAPGPRGEAGGQAEARENGEEAKELPGETLESKNTQNDFEVHIVQVENDEI

SEQ ID NO: 8798 - DNA, 1265 bp, Rattus norvegicus
  ref <308>: DATABASE ACCESSION NUMBER: EMBL / U66471
  ref <309>: DATABASE ENTRY DATE: 2000-03-04
cctgggcgagtgaggacctacaaagtttgtccgctccggggcgccataccagctcggttcccggccggccggctggtccgggcttagccaggagaccccgatggccgcagtgttcctggttacgctctacgaatactcgccgctcttctacatcgcggtggtcttcacctgcttcatcgccaccaccggcctggtattaggatggcttggctgggacgttccagtaattctgagaaactcagaagaaacccagttcagcacaagagctttcaagaaacaaatgagacaagtgaagaatccgttcggcttagagatcactaactcatccgcagcttccctagcaacaggtgtaaccttgacgacagactgcctggaagacagtcgtcttacgtgctactgggggtgcagtgttcaaaagctctatgaagctcttcagaagcacgtttactgcttcaggataagcactccgcaagccttggaagaggcgctgtacagtgactatctccaccgagaacagtattttattaaaaagcacagcaaagaagaaatatattgccaattaccaagcagtactggggttgaagactttggtccagtgcccagatctcgctatccgttggtagctctgttgaccctcgctgatgaggatgacagggaaatttatgacattatttccatggtgtctgtcattcatattcctgataagacttacaaacttccctgcagaatattgtatcaatatttaatcctggctcaaggtcaattttatgatcttaagcaacttttcatgtctgcaaataatagtgctactccctccagagaccagtctcccgcagacgggagtgtggagcacagcttgttggagaaggcggggctggctggggctgaagtggacccggtggaggagagcagcaaagactgtgtggtgtgccagaacgggggtgtgaactgggtgctcctgccttgccggcacgcctgcctgtgcgacagctgtgtgtgctacttcaagcagtgtcccatgtgccgccagtttgtgcaggaatcctttgcactgtgtggtcagaaagaggcagacaaggacatactagaaacttcctgaagaatcacagccggagagtgtactttctacacaagggcagaacctcgtgtccttagagtcaatcctaacagagtctgcagtcttacctgtcggagagagctctgtgtgcactttcatactttgtacagtacatggatgacgggaataaagtcttctgctcagtgcg

SEQ ID NO: 8799 - protein, 332 aa, Rattus norvegicus
  ref <308>: DATABASE ACCESSION NUMBER: SWISS-Prot / AAC52951
  ref <309>: DATABASE ENTRY DATE: 2002-10-01
MAAVFLVTLYEYSPLFYIAVVFTCFIATTGLVLGWLGWDVPVILRNSEETQFSTRAFKKQMRQVKNPFGLEITNSSAASLATGVTLTTDCLEDSRLTCYWGCSVQKLYEALQKHVYCFRISTPQALEEALYSDYLHREQYFIKKHSKEEIYCQLPSSTGVEDFGPVPRSRYPLVALLTLADEDDREIYDIISMVSVIHIPDKTYKLPCRILYQYLILAQGQFYDLKQLFMSANNSATPSRDQSPADGSVEHSLLEKAGLAGAEVDPVEESSKDCVVCQNGGVNWVLLPCRHACLCDSCVCYFKQCPMCRQFVQESFALCGQKEADKDILETS

SEQ ID NO: 8800 - DNA, 1258 bp, Homo sapiens
  ref <308>: DATABASE ACCESSION NUMBER: EMBL / U66469
  ref <309>: DATABASE ENTRY DATE: 1999-07-01
ccgggctctacccagagcaagaccctgatggctgcggtgtttctggtaacgctttatgaatactcgccgcttttctacatcgcggtggtctttacctgcttcatcgtgaccaccggcctggtattgggatggtttggttgggatgttccagtaattctgagaaattcagaagagacccagttcagcacaagagttttcaaaaagcaaatgagacaagtcaagaatccttttggcttagagatcactaatccatcttcagcttcaattacaactggcataaccttgacaacagattgccttgaagatagcctccttacatgctactgggggtgcagtgttcaaaaattatatgaagctctgcagaagcatgtttattgcttcagaataagcactccccaagcattagaagatgctctgtatagtgaatatctctatcaggaacagtattttattaaaaaggatagcaaagaagaaatatattgccagttaccaagagatactaaaattgaagactttggtacagtacccagatctcgctatccattggtagcgctattgaccttagctgatgaggatgaccgggaaatttatgatattatttccatggtgtcagtgattcatattcctgataggacttataaactatcctgcagaatattgtatcaatatttactcttggctcaaggtcaatttcatgatcttaagcaacttttcatgtctgcaaataataatttcactccctccaacaattcctcttcagaagaaaaaaacacagacagaagtttgttggaaaaggtgggactctctgaaagtgaagttgagccatcggaagagaacagcaaggactgtgttgtttgccagaatgggactgtgaactgggtactcttaccatgcagacacacatgcctgtgtgatggctgtgtgaagtattttcagcagtgcccaatgtgcaggcagtttgttcaggaatcttttgcactttgcagtcaaaaagagcaagataaagacaaaccgaagactctttgaagacatcgtaacactgaaaagtacactttctactaaagatgcagaaattgatgatcttggaattcatcataacatggaatctacagtactgaccatcaatgaaaattatattttaacttcatatttgtatggtacttggatgataaaaattaattattcctttctgcttagtgaatgaatactggaatccatctgtgttgatacaataaaaattcattcaactcttgaaaag

SEQ ID NO: 8801 - protein, 332 aa, Homo sapiens
  ref <308>: DATABASE ACCESSION NUMBER: Refseq / NP_006559
  ref <309>: DATABASE ENTRY DATE: 2001-07-25
MAAVFLVTLYEYSPLFYIAVVFTCFIVTTGLVLGWFGWDVPVILRNSEETQFSTRVFKKQMRQVKNPFGLEITNPSSASITTGITLTTDCLEDSLLTCYWGCSVQKLYEALQKHVYCFRISTPQALEDALYSEYLYQEQYFIKKDSKEEIYCQLPRDTKIEDFGTVPRSRYPLVALLTLADEDDREIYDIISMVSVIHIPDRTYKLSCRILYQYLLLAQGQFHDLKQLFMSANNNFTPSNNSSSEEKNTDRSLLEKVGLSESEVEPSEENSKDCVVCQNGTVNWVLLPCRHTCLCDGCVKYFQQCPMCRQFVQESFALCSQKEQDKDKPKTL

SEQ ID NO: 8802 - DNA, 1265 bp, Rattus norvegicus; identical to SEQ ID NO: 8798
  ref <308>: DATABASE ACCESSION NUMBER: EMBL / U66471
  ref <309>: DATABASE ENTRY DATE: 2000-03-04

SEQ ID NO: 8803 - protein, 332 aa, Rattus norvegicus; identical to SEQ ID NO: 8799
  ref <308>: DATABASE ACCESSION NUMBER: SWISS-Prot / AAC52951
  ref <309>: DATABASE ENTRY DATE: 2002-10-01

SEQ ID NO: 8804 - DNA, 1258 bp, Homo sapiens; identical to SEQ ID NO: 8800
  ref <308>: DATABASE ACCESSION NUMBER: EMBL / U66469
  ref <309>: DATABASE ENTRY DATE: 1999-07-01

SEQ ID NO: 8805 - protein, 332 aa, Homo sapiens; identical to SEQ ID NO: 8801
  ref <308>: DATABASE ACCESSION NUMBER: Refseq / NP_006559
  ref <309>: DATABASE ENTRY DATE: 2001-07-25

SEQ ID NO: 8806 - DNA, 2002 bp, Rattus norvegicus
  ref <308>: DATABASE ACCESSION NUMBER: EMBL / U66478
  ref <309>: DATABASE ENTRY DATE: 2000-03-04
accaaggcgaggccagggccgaggcgcggggacggcggccgagagctaagcgacgtgggacggtgactgggaacggatcggagcgcgggacccggcccgggtctcgtgcgtccccgccgatgggcctccgccgagccggtgctaactgggtcttccctgaagcagaaggaacagtatttcctacctttccgaaccgaagaccaagaagctagagaatctatgtaaataaactgaaatctctgttggctttgcaccccaccccggagccgtcacttttacctggtctgaggagcgtgtagacctcggccagccgctatgaatgtgaccagcttgttttcattcacaagcccagctgtgaagagactccttgggtggaaacagggcgacgaagaagagaaatgggcggagaaggctgtggacgctttggtgaagaaactgaagaagaagaaaggggccatggaagagctggagaaggccctgagctgccccgggcagcccagtaactgtgtcaccattcctcgctccctggatggcaggttgcaggtgtcccaccggaagggactgcctcatgtcatttattgccgcgtgtggcgctggcccgacctccagagccatcatgaactaaagcctctggaatgctgcgagttcccatttggttccaagcagaaggaagtctgcatcaatccctaccactataagcgagtggagagccccgttctcccaccggtgctggttccgaggcacagcgagtacaaccctcagcacagccttctggctcagttccgaaacctgggacaaaatgagccccacatgccactgaatgccacgttccccgactccttccagcagccacacagccacccgtttgcccagtaccccaacagcagctaccccaactctcctggcagcagcagcagcacctaccctcactccccgaccagctcagacccgggcagcccttttcagatgccagccgacacacccccgcctgcttacctgcctcctgaagaccccatggcccaggatggctctcagcctatggacacgaacatgacgaacatgacggcaccgacactgcccgcggagatcaatagaggagatgttcaagcagttgcttacgaggaaccaaaacactggtgctctattgtgtactatgagctcaacaaccgtgtgggcgaacggttccatgcctcctccaccagcgtgttggtggatggtttcaccgatccttccaacaataagaaccgattctgccttgggctgctctccaatgttaaccggaactccactattgaaaataccaggcgacacatcgggaaaggagtccacctttattacgtcggaggagaggtgtatgcggagtgcctcagtgacagcagcatcttcgtgcagagtcgaaactgcaactaccaccatggctttcatcccaccacggtctgcaagatccccagcgggtgcagcttgaaaatcttcaacaaccaagagttcgctcagctactggcgcagtctgtgaaccatgggttcgagacagagtatgaactcaccaaaatgtgcactattcgaatgagcttcgtgaagggctggggagcggagtaccaccggcaggatgtcactagcaccccctgctggattgagatacacctgcatggccctctccagtggctggataaagtccttacccagatgggttcgccccacaaccctatttcgtcggtgtcttaaaggccctcggcttctgtctcttgcaaactattgggccttgcagtacttgaaggacggagaagtcagacaggatggggagctgtaaaggagccgtgatacttgacctctgtgaccaaccgttggatggagaagctgacaggccttggtaacaagctgttgatatcaagaacccgcttagtttacattgtgacattctgttgtaaaatcaactaaaatgctgacttttagcaggactttgtgaatagttagaaaagagatggccaagccaggggcaaattat

SEQ ID NO: 8807 - protein, 468 aa, Rattus norvegicus
  ref <308>: DATABASE ACCESSION NUMBER: SWISS-Prot / P97588
  ref <309>: DATABASE ENTRY DATE: 2002-06-15
MNVTSLFSFTSPAVKRLLGWKQGDEEEKWAEKAVDALVKKLKKKKGAMEELEKALSCPGQPSNCVTIPRSLDGRLQVSHRKGLPHVIYCRVWRWPDLQSHHELKPLECCEFPFGSKQKEVCINPYHYKRVESPVLPPVLVPRHSEYNPQHSLLAQFRNLGQNEPHMPLNATFPDSFQQPHSHPFAQYPNSSYPNSPGSSSSTYPHSPTSSDPGSPFQMPADTPPPAYLPPEDPMAQDGSQPMDTNMTNMTAPTLPAEINRGDVQAVAYEEPKHWCSIVYYELNNRVGERFHASSTSVLVDGFTDPSNNKNRFCLGLLSNVNRNSTIENTRRHIGKGVHLYYVGGEVYAECLSDSSIFVQSRNCNYHHGFHPTTVCKIPSGCSLKIFNNQEFAQLLAQSVNHGFETEYELTKMCTIRMSFVKGWGAEYHRQDVTSTPCWIEIHLHGPLQWLDKVLTQMGSPHNPISSVS

SEQ ID NO: 8808 - DNA, 1990 bp, Homo sapiens
  ref <308>: DATABASE ACCESSION NUMBER: EMBL / U59423
  ref <309>: DATABASE ENTRY DATE: 1999-07-02
gaattccgggggtattggcagctgaggagtggaggctgggcagctccgactccctgacgccagcgcgaccagatcaatccaggctccaggagaaagcaggcgggcgggcggagaaaggagaggccgagcggctcaacccgggccgaggctcggggagcggagagtggcgcaccgcccggccgtccggacccgggccgcgagaccccgctcgcccggccactcgtgctcccgcacggacgggcgcgccgccaacccggtgctgactgggttacttttttaaacactaggaatggtaatttctactcttctggacttcaaactaagaagttaaagagacttctctgtaaataaacaaatctcttctgctgtccttttgcatttggagacagctttatttcaccatatccaaggagtataactagtgctgtcattatgaatgtgacaagtttattttcctttacaagtccagctgtgaagagacttcttgggtggaaacagggcgatgaagaagaaaaatgggcagagaaagctgttgatgctttggtgaaaaaactgaagaaaaagaaaggtgccatggaggaactggaaaaggccttgagctgcccagggcaaccgagtaactgtgtcaccattccccgctctctggatggcaggctgcaagtctcccaccggaagggactgcctcatgtcatttactgccgtgtgtggcgctggcccgatcttcagagccaccatgaactaaaaccactggaatgctgtgagtttccttttggttccaagcagaaggaggtctgcatcaatccctaccactataagagagtagaaagccctgtacttcctcctgtgctggttccaagacacagcgaatataatcctcagcacagcctcttagctcagttccgtaacttaggacaaaatgagcctcacatgccactcaacgccacttttccagattctttccagcaacccaacagccacccgtttcctcactctcccaatagcagttacccaaactctcctgggagcagcagcagcacctaccctcactctcccaccagctcagacccaggaagccctttccagatgccagctgatacgcccccacctgcttacctgcctcctgaagaccccatgacccaggatggctctcagccgatggacacaaacatgatggcgcctcccctgccctcagaaatcaacagaggagatgttcaggcggttgcttatgaggaaccaaaacactggtgctctattgtctactatgagctcaacaatcgtgtgggtgaagcgttccatgcctcctccacaagtgtgttggtggatggtttcactgatccttccaacaataagaaccgtttctgccttgggctgctctccaatgttaaccggaattccactattgaaaacaccaggcggcatattggaaaaggagttcatctttattatgttggaggggaggtgtatgccgaatgccttagtgacagtagcatctttgtgcaaagtcggaactgcaactaccatcatggatttcatcctactactgtttgcaagatccctagtgggtgtagtctgaaaatttttaacaaccaagaatttgctcagttattggcacagtctgtgaaccatggatttgagacagtctatgagcttacaaaaatgtgtactatacgtatgagctttgtgaagggctggggagcagaataccaccgccaggatgttactagcaccccctgctggattgagatacatctgcacggccccctccagtggctggataaagttcttactcaaatgggttcacctcataatcctatttcatctgtatcttaaatggccccagcatctgcctctggaaaactattgagccttgcatgtacttgaaggatggatgagtcagacacgattgagaactgacaaaggagccttgataatacttgacctctgtgaccaactgttggattcagaaatttaaacaaaaaaaaaaaaaaaa

SEQ ID NO: 8809 - protein, 465 aa, Homo sapiens
  ref <308>: DATABASE ACCESSION NUMBER: SWISS-Prot / Q15797
  ref <309>: DATABASE ENTRY DATE: 2002-06-15
MNVTSLFSFTSPAVKRLLGWKQGDEEEKWAEKAVDALVKKLKKKKGAMEELEKALSCPGQPSNCVTIPRSLDGRLQVSHRKGLPHVIYCRVWRWPDLQSHHELKPLECCEFPFGSKQKEVCINPYHYKRVESPVLPPVLVPRHSEYNPQHSLLAQFRNLGQNEPHMPLNATFPDSFQQPNSHPFPHSPNSSYPNSPGSSSSTYPHSPTSSDPGSPFQMPADTPPPAYLPPEDPMTQDGSQPMDTNMMAPPLPSEINRGDVQAVAYEEPKHWCSIVYYELNNRVGEAFHASSTSVLVDGFTDPSNNKNRFCLGLLSNVNRNSTIENTRRHIGKGVHLYYVGGEVYAECLSDSSIFVQSRNCNYHHGFHPTTVCKIPSGCSLKIFNNQEFAQLLAQSVNHGFETVYELTKMCTIRMSFVKGWGAEYHRQDVTSTPCWIEIHLHGPLQWLDKVLTQMGSPHNPISSVS

SEQ ID NO: 8810 - DNA, 2002 bp, Rattus norvegicus; identical to SEQ ID NO: 8806
  ref <308>: DATABASE ACCESSION NUMBER: EMBL / U66478
  ref <309>: DATABASE ENTRY DATE: 2000-03-04

SEQ ID NO: 8811 - protein, 468 aa, Rattus norvegicus; identical to SEQ ID NO: 8807
  ref <308>: DATABASE ACCESSION NUMBER: SWISS-Prot / P97588
  ref <309>: DATABASE ENTRY DATE: 2002-06-15

SEQ ID NO: 8812 - DNA, 1990 bp, Homo sapiens; identical to SEQ ID NO: 8808
  ref <308>: DATABASE ACCESSION NUMBER: EMBL / U59423
  ref <309>: DATABASE ENTRY DATE: 1999-07-02

SEQ ID NO: 8813 - protein, 465 aa, Homo sapiens; identical to SEQ ID NO: 8809
  ref <308>: DATABASE ACCESSION NUMBER: SWISS-Prot / Q15797
  ref <309>: DATABASE ENTRY DATE: 2002-06-15

SEQ ID NO: 8814 - DNA, 2830 bp, Rattus norvegicus
  ref <308>: DATABASE ACCESSION NUMBER: EMBL / U67081
  ref <309>: DATABASE ENTRY DATE: 2000-03-04
gaattcggcacgagggagctactcggatatgatgaaccttatgcggctggaggagcagctaagccccaggtctagaacgttctccagctgtgccaaggaggatgggtgtcatgagagggatgatgacaccacctcagtgaactcagacaggtctgaggaagtatttgacatgaccaagggcaacctgactctgctagagaaagccattgccttggagacagagagagccaaggccatgcgagagaagatggccatggatgctgggagaagggataacctgagatcctatgaggaccagtctccaagacagctggctggggaagacagaaaatccaaatccagtgacagccatgtcaaaaagccatactatgatccctcaagaacagaaaagagagagagcaagtgtccaacccccgggtgtgatggaaccggccacgtaactgggctttacccgcatcaccgcagtctgtctggatgcccgcacaaagatagggtccctccagaaattcttgccatgcatgaaaatgttctcaagtgtcccactccaggctgcacagggcgagggcatgtgcatagcaacaggaactcgcacagaagcctctctggatgccctattgctgctgcagaaaaactggcaaaggcccaggagaaacatcagagctgtgatgtgtccaaatccaaccaggcctcagaccgagtcctcaggccaatgtgctttgtcaaacagcttgagattcctcagtatggctacagaaacaatgttcccacaactacaccgcgctccaacctggccaaggagcttgagaaatattccaagacttcgtttgagtacaacagttacgacaaccatacttatggcaaaagagccatagctcccaaggtgcaaaccagggacatatcccccaaaggatatgacgatgccaagcggtactgcaagaatgccagccccagcagcagcaccaccagcagctatgcacccagcagcagcagcaacctcagctgtggtggtggcagcagtgccagtagcacgtgtagcaagagcagctttgactacacacatgacatggaggccgcacacatggcagccacagccattctcaacctgtccacacgttgccgggaaatgccacagaacctgtccaccaagccacaggacctgtgcactgcccggaacccagacatggaggtggatgagaatgggaccctggacctgagcatgaacaagcagaggcctcgagacagctgctgcccagtcctgacacccctggagcccatgtccccccagcagcaggcagtgatgacgagccgatgcttccaactgagcgagggggattgttgggacttacccgtagactacaccaaaatgaagcctcggagggtagatgaggaggaccccaaagagattaccccagaagacttggacccattccaggaggctctggaagaaagaagatatccaggggaggtgaccatcccaagccccaaacccaagtaccctcaatgcaaggaaagcaaaaaggacttaataactctgtctggctgccccctggcggacaaaagcattcgaagtatgctggccaccagttcccaagagctcaagtgccccacccctggctgtgacggttctggacacatcactggcatctacgcttctcatcgaagcctttccgggtgcccaagagcaaagaagagtggtatccggatagcacaaagcaaagaagacaaggaagaccaggagccaatcaggtgtccggtacctggctgtgatggtcagggacatatcactgggaagtacgcatcccaccgcagcgcctctgggtgccccttggcagccaagaggcagaaagatgggtaccttaatggctcccagttctcctggaagtcagtcaagacagagggcatgtcctgccctacacccgggtgtgatgggtcaggacacgtcagtgctagcttcctcacacaccgcagcttgtcaggatgtccaagagccacatcagcaatgaagaaagcaaagctgtctggagaacagatgttgactatcaagcagcgagccagcaacggtatagaaaacgatgaggagatcaagcagttggatgaagagatcaaggagctcaatgagtccaattcccagatggaggccgacatgatcaaactcagaactcagatcaccacaatggatagcaacctgaagacgattgaggaggagaacaaagtcattgagcagcagaatgagtcgctcctgcacgagttggccaacctgagccagtccctgatccacagcctcgccaacatccagctgcctcacatggatccaatcaatgaacaaaattttgatgcttacgtgactactttgacggaaatgtatacaaatcaagatcgttatcagagtccagaaaataaagccctactggaaaatataaagcaggctgtgagaggaattcaggtctgaacagctgctctagtggtgactcatgcttaaaaaggatgcctcttgtttcttgctgctgtaacttaccagaaagtgttatatatttatttctgtcggaacagtgttatgctacaagacttcataatggttttgtgtgctctcgagatagtacctgcagactagttttggatacattcacattttgtacgttttcatataagctgacatagtgtgatttcccatgtaatgtttatagctgctgctgtctgcacatttgggggtctctatatttctgaagaggtaagctgacgaaaataaatagagtgtaaattctttttaatgctttagtgattaaatgttttagtattttgaactgaaatggacaaaaaaaaaaaaaaaaaa

SEQ ID NO: 8815 - protein, 815 aa, Rattus norvegicus
  ref <308>: DATABASE ACCESSION NUMBER: SWISS-Prot / AAB40718
  ref <309>: DATABASE ENTRY DATE: 2002-10-01
NSARGSYSDMMNLMRLEEQLSPRSRTFSSCAKEDGCHERDDDTTSVNSDRSEEVFDMTKGNLTLLEKAIALETERAKAMREKMAMDAGRRDNLRSYEDQSPRQLAGEDRKSKSSDSHVKKPYYDPSRTEKRESKCPTPGCDGTGHVTGLYPHHRSLSGCPHKDRVPPEILAMHENVLKCPTPGCTGRGHVHSNRNSHRSLSGCPIAAAEKLAKAQEKHQSCDVSKSNQASDRVLRPMCFVKQLEIPQYGYRNNVPTTTPRSNLAKELEKYSKTSFEYNSYDNHTYGKRAIAPKVQTRDISPKGYDDAKRYCKNASPSSSTTSSYAPSSSSNLSCGGGSSASSTCSKSSFDYTHDMEAAHMAATAILNLSTRCREMPQNLSTKPQDLCTARNPDMEVDENGTLDLSMNKQRPRDSCCPVLTPLEPMSPQQQAVMTSRCFQLSEGDCWDLPVDYTKMKPRRVDEEDPKEITPEDLDPFQEALEERRYPGEVTIPSPKPKYPQCKESKKDLITLSGCPLADKSIRSMLATSSQELKCPTPGCDGSGHITGIYASHRSLSGCPRAKKSGIRIAQSKEDKEDQEPIRCPVPGCDGQGHITGKYASHRSASGCPLAAKRQKDGYLNGSQFSWKSVKTEGMSCPTPGCDGSGHVSASFLTHRSLSGCPRATSAMKKAKLSGEQMLTIKQRASNGIENDEEIKQLDEEIKELNESNSQMEADMIKLRTQITTMDSNLKTIEEENKVIEQQNESLLHELANLSQSLIHSLANIQLPHMDPINEQNFDAYVTTLTEMYTNQDRYQSPENKALLENIKQAVRGIQV

SEQ ID NO: 8816 - DNA, 3164 bp, Homo sapiens
  ref <308>: DATABASE ACCESSION NUMBER: EMBL / AK057398
  ref <309>: DATABASE ENTRY DATE: 2002-08-06
agtcaataacctagggcttcaccatgccaaatccaaaatgttctgttgttgatctctggtatcaacagctcagaaactgcagaacagacccctgacagttaccaacactttcctccaaacagcattctgtttactgtttcatgtattctcaggagttcaactttgctccactttgggaagtggaacaaacgctctggtgaagacagggagcacaggacatatttacctggaggggatatcaaagagcagcctcaagacttgcaaaacaaagtcgtcccaatgaattatctgtgcctacagccgcacttggcaccttcggctaagccagcgtctgacaagcagttgttcccacggcagccacccctgccttccatcttagggactcacccagaaaattctccaacctgctccacgactacaaaactcttctaatgcttttgaacgcccaccatttgttctccattcatccaaccaactttccactgcacatcttctctctctaccggcgcccaggcaaggggccacttctcatctgtatgctaattattttgccacatggacaaaagtaataatgctttcagacaggaaactaacaggcctgaagtcgaagatggaaattaataagttgacaccactaaacgacagggaagacgggcatgcgtacagcgctctgccgggcgggtgaagtgcagcctccatcaaaaggcagcagacagacagcgccgggctgcgagtcccgcctgtgctgcgtgcatcaggctcacgctcccttagagaccacatcgctgcagcagaagagcctcggaagcatcctgctgacttaccctgtctcaggctgcctccttgaagcaacacaaaacatatccacttccccaaatcctaaggtgggagggaacttcactgctgatctagatatttttcaagctacagctgtggattaaaccagtaatttctaaccttcctgtgtatcaagcttgcaacagtcagacacgagtggagatgtgtgcagtatgctgcttgccttgtacccacaggcccctaaatctctagagcagaatgtgtatcatgagcagtgctgtatttaatgtaatagatgagaactgtaaataccggagtcaggctgttagcagctaccagctaggcaatatatctaaaaatatctctcgtatcattgatgttatggtaaattcatgctgtggccaaagaaacctcacagaagtaagctgaacctacagtattttagatggcattgctggttaacatccaagcaaaacaaaaagaggttccaaaacctgtcacttcttaaaataaaagaatggtgacacaagagttaactctaaccaattcttaaaatcgttttcgggttgccaacctcactatattattctgtttcagtatgagcttcttgcatcgttttcttttaaaacaaaagctatgaaactacttgtctaagaaagttaaaacatttttcaccttttattattgtttgaagaaaaaaatatagaaaaagttttctttgaaaagacaagtcctaatatggtttttaaaatagctaagggaacatagatacctgatgttcattagcatttttttctggcttaaaaaagtgctgattttataagtggcttcttgagtcaagccacagatgttttactctggtggtgaccataccgtttcactctctgcaaacctctctcctataacactcaccgctatgaaaggctacgttaaatcataaaggctactttagcacctcccaccctcgccccaggaaactagccttgaatacacagactcatgtttaacaacaactccgggcagcatgcagacatagcagtgcccacaatggcattacactgaaggagaagctcttttgagagagggtccattgttggcgcgttcacacgcctaaccaagagactttaggaagtgttgtgtatgcaatcaaatgagagctggagataggcaggcaggtggagaaacaactatttttgaagtacttaagagaagaactgggagctgcaaccaccaggcaaattaagaaaaaaagaaatcctatgtaacctttacaataaaaggaaagaggtacctttttgtggaagagctggtggccatcaagccaaatcctgttccgcagtctgcttctcacccacgcagggctctgtctgccgtggagagaccatcgcacgtgctggtcacagttccctctgtgtttccattccattcacccctaccctctggcgcccgcactccaccagcccactatccacagtgagtgagagtcgagagcagaacagcacgagggagcagccactgcaggctttccacagagcatagctctgactgtggtttccgtggggagactgacagagaagccccaagttaccaggaacaccctcctccagctctcagaggtaattcctctgaagaccgagctcttccctgatgtgttgggaccagacttactggttactatagaggctgcaattcccttcccatcgagccctgctagacaccactgcagtctgaaagcaaggaaagctttaagagaatgtcctgtaccattccatcttctcacaacacaatactccttacagtaagactaaaatattccccccccccaacttttccaataatcaccacgtggggagcagagattattttaaaagaggtacatggtaggaaaattttcctagcagaacagcctaatacagcaatgcttatcactctttctctatctaataaataagcattcatgcattctttctagttttataacacctggcttacattttctctgccatctctgattacttctacagataccctgaggactcattatgatgtcaaagccaaaaacacttccattgtagaaacatgcatagaaaaatcactgtgtatgcttgaacaatgcaggtgtgaaagaaacacagagagaagagagggtggcaaaacagacaaacagggaccaagttaaagagagagggggcagaagagagagaaaggaaagtggggagaaagagagagaagagacaagacacaaagatattacaaacagaaccacattgcattgaaatagcccactgatggaaaaaatggatagctgttgcctttaaataatctaatatcagaaaaaatcatgcaataaaatactataaaagtag

SEQ ID NO: 8817 - protein, 1192 aa, Homo sapiens
  ref <308>: DATABASE ACCESSION NUMBER: SWISS-Prot / AAF14051
  ref <309>: DATABASE ENTRY DATE: 2003-02-01
MEVDTEEKRHRTRSKGVRVPVEPAIQELFSCPTPGCDGSGHVSGKYARHRSVYGCPLAKKRKTQDKQPQEPAPKRKPFAVKADSSSVDECDDSDGTEDMDEKEEDEGEEYSEDNDEPGDEDEEDEEGDREEEEEIEEEDEDDDEDGEDVEDEEEEEEEEEEEEEEEENEDHQMNCHNTRIMQDTEKDDNNSDEYDNYDELVAKSLLNLGKIAEDAAYRARTESEMNSNTSNSLEDDSDKNENLGRKSELSLDLDSDVVRETVDSLKLLAQGHGVVLSENMNDRNYADSMSQQDSRNMNYVMLGKPMNNGLMEKMVEESDEEVCLSSLECLRNQCFDLARKLSETNPQERNPQQNMNIRQHVRPEEDFPGRTPDRNYSDMLNLMRLEEQLSPRSRVFASCAKEDGCHERDDDTTSVNSDRSEEVFDMTKGNLTLLEKAIALETERAKAMREKMAMEAGRRDNMRSYEDQSPRQLPGEDRKPKSSDSHVKKPYYGKDPSRTEKKESKCPTPGCDGTGHVTGLYPHHRSLSGCPHKDRVPPEILAMHESVLKCPTPGCTGRGHVNSNRNSHRSLSGCPIAAAEKLAKAQEKHQSCDVSKSSQASDRVLRPMCFVKQLEIPQYGYRNNVPTTTPRSNLAKELEKYSKTSFEYNSYDNHTYGKRAIAPKVQTRDISPKGYDDAKRYCKDPSPSSSSTSSYAPSSSSNLSCGGGSSASSTCSKSSFDYTHDMEAAHMAATAILNLSTRCREMPQNLSTKPQDLCATRNPDMEVDENGTLDLSMNKQRPRDSCCPILTPLEPMSPQQQAVMNNRCFQLGEGDCWDLPVDYTKMKPRRIDEDESKDITPEDLDPFQEALEERRYPGEVTIPSPKPKYPQCKESKKDLITLSGCPLADKSIRSMLATSSQELKCPTPGCDGSGHITGNYASHRSLSGCPRAKKRGIRIAQSKEDKEDQEPIRCPVPGCDGQGHITGKYASHRSASGCPLAAKRQKEGYLNGSQFSWKSVKTEGMSCPTPGCDGSGHVSGSFLTHRSLSGCPRATSAMKKAKLSGEQMLTIKQRASNGIENDEEIKQLDEEIKELNESNSQMEADMIKLRTQITTMESNLKTIEEENKVVEQQNESLLHELANLSQSLIHSLANIQLPHMDPINEQNFDAYVTTLTEMYTNQDRYQSPENKALLENIKQAVRGIQFRSEQLL

SEQ ID NO: 8818 - DNA, 3348 bp, Rattus norvegicus
  ref <308>: DATABASE ACCESSION NUMBER: EMBL / U67140
  ref <309>: DATABASE ENTRY DATE: 2000-09-30
gaattcggcacgagcggcagcgtgctggagggatgtgtgtcgcagtcctcagtcccacacccgcttccgaggtgtcatctgcagcatacttgccggctaccatttttcctgtgcacgcgtctccctggttggacagctgctgcctgggacaggtgacaccagtgcccaactagggcaaaggcccccgccccgtgggccaggatcatgaaaggcctcggtgacagccgcccccgccacctctccgacagcctggacccacctcatgagcccctctttgccgggcctgaccgcaacccctacctgctgtcgcccaccgaggcctttgcccgggaagcccgtttccctgggcaaaacacactgccgggggatgggctcttcccactcaacaaccagctgcccccaccaagcagcacctttccccggatccactataactcccactttgaggtgcccgaggaaagtccgttccccagccatgcccaagccaccaagatcaaccggctgcctgccaacctcctggaccagtttgagaaacaactgcctatccaccgggatggtttcagcaccctccagttcccccggggcgaggccaaggcccggggtgagagtcctggccgcattcgccacctggtccactccgtccagcgtctcttcttcactaaggcaccctcgatggagggcaccacgggcaaggtgggtggcaacggcggcaagaaaggtgtcctggaggacgggaaaggccggagggccaaaagcaaggaacgggccaaggctggggagcccaaacggcgaagccgctccaacatctcgggctggtggagttccgatgacaacctggacggtgagggtggtgccttccgcagcggccctgcctcggggctgatgactctgggccgccagccagaacgtacccagccccgctacttcatgcacgcctacaacaccatcagcggacacatgctcaaaaccaccaagaacactaccaccgagctgactgccccaccacccccgcctgctccccctgctacctgtcccagccttggagtgggcactgacaccaactatgtcaaacgtggttcatggtccactctgaccctcagccatgcccacgaggtctgccagaagacctcagccactttggataagagcctgctgaagtccaaatcctgtcaccagggtttggcctaccattacttgcaggtgcccggcggagggggagagtggagcaccacgctgctgtcccctcgagatatggatagcaccgctgaggggccgatcccgtgccggcgcatgcgcagtggcagctatatcaaggccatgggcgacgaagacagtgatgagtctggaggtggtagccccaagccttctcccaagactgcggcacggcgtcagagctatctgagggccacgcagcagtccctgggagagcagagcaacccccgcaggagcttggaccgcttggattcagtggacatgccgctgccgtccaagtaccccagctgggaagaggactacaaccccatcagtgacagcctcaatgactccggctgtatcagccaggtttttggacaggcttccctgatccctcagttgtttggccatgatcaacaggtccgggaggcagacctgagtgaccagtatgaggcagcctgtgagtcggcctgcagtgaggctgagtcgacagccgcagaggcgctcgacttgtcgctgcccagctacttccgctcacgcagccacagctacctgcgagccatccaggcgggctgctcgcaggaggaggacagtgtctccctgcagtccctctccccaccgcccagcaccggcagcctcagcaacagccgtacacttccaagttcatcatgcctagtggcatataagaagaccccaccaccggtccctccacgtaccacatcgaaaccgttcatctcagttaccgttcagagcagtactgagtctgctcaggacacctacctggacagtcaagaccacaagagtgaagtgacaagccagtcgggcttgagtaactcatcagacagcctggacagcagtacccggccacccagtgtgacacggggtggaattacgccaggccctgaggctccagagccaccccctaagcatgcagctctgaagagtgaacacgggacactgacgagctctgagtcccactccgaggccgtccccaaaaggaaactgtcatcaataggaatacaagttgactgcattcagccagtgccaaaagaggagcccagtcccgctaccaaattccagtccatcggggttcaggtagaggacgactggcgaagcagcgccccctctcacagcatgtcctcccgtcgggacactgactccgatacccaggacgccaatgactccagttgtaagtcatctgagaggagtctcccagactgtacctcacaccccaattccatcagcattgatgctggcccccgacaggcccccaagattgcccagatcaagcgcaacctctcctatggagacaacagcgaccctgccctggaggcatcttcgctgcccccacccgacccttggatggagacttcctccagctccccagcagagccagctcagccaggggcctgccgcagggatggctactggttcctgaagctccttcaggctgaaacggagaggctggaaggatggtgctgtcagatggacaaggagaccaaagagaacaacctctctgaagaagtcttaggaaaagttctcagtgctgtgggcagcgcccagctcctgatgtcccagaaattccaacagttccgtggcatttgtgagcagaacttgaaccctgatgccaacccccgtccgacagcccaggacctggcagggttctgggacctgctgcagctgtccattgaggacatcagcatgaagttcgatgagctctaccacctcaaggccaacagctggcagctggtggagacccccgagaagaggaaggaagagaagaaaccaccccctccagtcccgaagaagccagccaaatccaaggcggcagtgagccgcgacaaggcctcagatgcgggggacaagcagcggcaggaggccagaaagagactcctggccgccaagcgggcagcatctgtgcggcagaactcggccacagagagtgcagacagcatcgagatttatgtccctgaggcccagaccaggctctaaggccacaaaggagaaagcactcattttaaatcattaaaaactcaatgcaaacggaacagcgtttctcaccctttggtatggttattatctctagagaccctgagccaactttccaattgacacgtacaagggctcacaaggtggcttttctctcgtgccgaattc

SEQ ID NO: 8819 - protein, 992 aa, Rattus norvegicus
  ref <308>: DATABASE ACCESSION NUMBER: SWISS-Prot / P97839
  ref <309>: DATABASE ENTRY DATE: 2002-06-15
MKGLGDSRPRHLSDSLDPPHEPLFAGPDRNPYLLSPTEAFAREARFPGQNTLPGDGLFPLNNQLPPPSSTFPRIHYNSHFEVPEESPFPSHAQATKINRLPANLLDQFEKQLPIHRDGFSTLQFPRGEAKARGESPGRIRHLVHSVQRLFFTKAPSMEGTTGKVGGNGGKKGVLEDGKGRRAKSKERAKAGEPKRRSRSNISGWWSSDDNLDGEGGAFRSGPASGLMTLGRQPERTQPRYFMHAYNTISGHMLKTTKNTTTELTAPPPPPAPPATCPSLGVGTDTNYVKRGSWSTLTLSHAHEVCQKTSATLDKSLLKSKSCHQGLAYHYLQVPGGGGEWSTTLLSPRDMDSTAEGPIPCRRMRSGSYIKAMGDEDSDESGGGSPKPSPKTAARRQSYLRATQQSLGEQSNPRRSLDRLDSVDMPLPSKYPSWEEDYNPISDSLNDSGCISQVFGQASLIPQLFGHDQQVREADLSDQYEAACESACSEAESTAAEALDLSLPSYFRSRSHSYLRAIQAGCSQEEDSVSLQSLSPPPSTGSLSNSRTLPSSSCLVAYKKTPPPVPPRTTSKPFISVTVQSSTESAQDTYLDSQDHKSEVTSQSGLSNSSDSLDSSTRPPSVTRGGITPGPEAPEPPPKHAALKSEHGTLTSSESHSEAVPKRKLSSIGIQVDCIQPVPKEEPSPATKFQSIGVQVEDDWRSSAPSHSMSSRRDTDSDTQDANDSSCKSSERSLPDCTSHPNSISIDAGPRQAPKIAQIKRNLSYGDNSDPALEASSLPPPDPWMETSSSSPAEPAQPGACRRDGYWFLKLLQAETERLEGWCCQMDKETKENNLSEEVLGKVLSAVGSAQLLMSQKFQQFRGICEQNLNPDANPRPTAQDLAGFWDLLQLSIEDISMKFDELYHLKANSWQLVETPEKRKEEKKPPPPVPKKPAKSKAAVSRDKASDAGDKQRQEARKRLLAAKRAASVRQNSATESADSIEIYVPEAQTRL

SEQ ID NO: 8820 - DNA, 556 bp, Rattus norvegicus
  ref <308>: DATABASE ACCESSION NUMBER: EMBL / U67207
  ref <309>: DATABASE ENTRY DATE: 2000-03-04
ggaaatcagaccaatctcactttcctgtgggcagaatcagcacacactgttacagttctggccatcaattccatcggtgcctcccttgtgaattttaaccttacgttctcatggcccatgagtaaagtgaatgctgtgcagtcactcagtgcttatcccctgagcagcagctcgctcatcctttcctggacactgtcacctaatgattatagtctgttatatctggttattgaatggaagaaccttaatgatgatgatggaatgaagtggcttagaatcccttcgaatgttaacaagtattatatccatgataattttattcctatcgagaaatatcagtttagtctttacccagtatttatggaaggagttggaaaaccaaagataattaatggtttcaccaaagatgatatcgccaaacagcaaaatgatgcagggctgtatgtcattgtaccgataattatttcctcttgtgtcctgctgctcggaacactgttaatttcacaccagagaatgaaaaagttgttttgggacgatgttccaaaccccaagaatt

SEQ ID NO: 8821 - DNA, 2991 bp, Homo sapiens
  ref <308>: DATABASE ACCESSION NUMBER: EMBL / U52912
  ref <309>: DATABASE ENTRY DATE: 1999-06-30
gcgcgcgcgacgcaggtgcccgagccccggcccgcgcccatctctgccttcggtcgagttggacccccggatcaaggtgtacttctctgaagtaagatgatttgtcaaaaattctgtgtggttttgttacattgggaatttatttatgtgataactgcgtttaacttgtcatatccaattactccttggagatttaagttgtcttgcatgccaccaaattcaacctatgactacttccttttgcctgctggactctcaaagaatacttcaaattcgaatggacattatgagacagctgttgaacctaagtttaattcaagtggtactcacttttctaacttatccaaagcaactttccactgttgctttcggagtgagcaagatagaaactgctccttatgtgcagacaacattgaaggaaggacatttgtttcaacagtaaattctttagtttttcaacaaatagatgcaaactggaacatacagtgctggctaaaaggagacttaaaattattcatctgttatgtggagtcattatttaagaatctattcaggaattataactataaggtccatcttttatatgttctgcctgaagtgttagaagattcacctctggttccccaaaaaggcagttttcagatggttcactgcaattgcagtgttcatgaatgttgtgaatgtcttgtgcctgtgccaacagccaaactcaacgacactctccttatgtgtttgaaaatcacatctggtggagtaattttccggtcacctctaatgtcagttcagcccataaatatggtgaagcctgatccaccattaggtttgcatatggaaatcacagatgatggtaatttaaagatttcttggtccagcccaccattggtaccatttccacttcaatatcaagtgaaatattcagagaattctacaacagttatcagagaagctgacaagattgtctcagctacatccctgctagtagacagtatacttcctgggtcttcgtatgaggttcaggtgaggggcaagagactggatggcccaggaatctggagtgactggagtactcctcgtgtctttaccacacaagatgtcatatactttccacctaaaattctgacaagtgttgggtctaatgtttcttttcactgcatctataagaaggaaaacaagattgttccctcaaaagagattgtttggtggatgaatttagctgagaaaattcctcaaagccagtatgatgttgtgagtgatcatgttagcaaagttacttttttcaatctgaatgaaaccaaacctcgaggaaagtttacctatgatgcagtgtactgctgcaatgaacatgaatgccatcatcgctatgctgaattatatgtgattgatgtcaatatcaatatctcatgtgaaactgatgggtacttaactaaaatgacttgcagatggtcaaccagtacaatccagtcacttgcggaaagcactttgcaattgaggtatcataggagcagcctttactgttctgatattccatctattcatcccatatctgagcccaaagattgctatttgcagagtgatggtttttatgaatgcattttccagccaatcttcctattatctggctacacaatgtggattaggatcaatcactctctaggttcacttgactctccaccaacatgtgtccttcctgattctgtggtgaagccactgcctccatccagtgtgaaagcagaaattactataaacattggattattgaaaatatcttgggaaaagccagtctttccagagaataaccttcaattccagattcgctatggtttaagtggaaaagaagtacaatggaagatgtatgaggtttatgatgcaaaatcaaaatctgtcagtctcccagttccagacttgtgtgcagtctatgctgttcaggtgcgctgtaagaggctagatggactgggatattggagtaattggagcaatccagcctacacagttgtcatggatataaaagttcctatgagaggacctgaattttggagaataattaatggagatactatgaaaaaggagaaaaatgtcactttactttggaagcccctgatgaaaaatgactcattgtgcagtgttcagagatatgtgataaaccatcatacttcctgcaatggaacatggtcagaagatgtgggaaatcacacgaaattcactttcctgtggacagagcaagcacatactgttacggttctggccatcaattcaattggtgcttctgttgcaaattttaatttaaccttttcatggcctatgagcaaagtaaatatcgtgcagtcactcagtgcttatcctttaaacagcagttgtgtgattgtttcctggatactatcacccagtgattacaagctaatgtattttattattgagtggaaaaatcttaatgaagatggtgaaataaaatggcttagaatctcttcatctgttaagaagtattatatccatgatcattttatccccattgagaagtaccagttcagtctttacccaatatttatggaaggagtgggaaaaccaaagataattaatagtttcactcaagatgatattgaaaaacaccagagtgatgcaggtttatatgtaattgtgccagtaattatttcctcttccatcttattgcttggaacattattaatatcacaccaaagaatgaaaaagctattttgggaagatgttccgaaccccaagaattgttcctgggcacaaggacttaattttcagaagatgcttgaaggcagcatgttcgttaagagtcatcaccactccctaatctcaagtacccagggacacaaacactgcggaaggccacagggtcctctgcataggaaaaccagagacctttgttcacttgtttatctgctgaccctccctccactattgtcctatgaccctgccaaatccccctctgtgagaaacacccaagaatgatcaataaaaaaaaaaaaa

SEQ ID NO: 8822 - protein, 1165 aa, Homo sapiens
  ref <308>: DATABASE ACCESSION NUMBER: SWISS-Prot / P48357
  ref <309>: DATABASE ENTRY DATE: 2002-06-15
MICQKFCVVLLHWEFIYVITAFNLSYPITPWRFKLSCMPPNSTYDYFLLPAGLSKNTSNSNGHYETAVEPKFNSSGTHFSNLSKTTFHCCFRSEQDRNCSLCADNIEGKTFVSTVNSLVFQQIDANWNIQCWLKGDLKLFICYVESLFKNLFRNYNYKVHLLYVLPEVLEDSPLVPQKGSFQMVHCNCSVHECCECLVPVPTAKLNDTLLMCLKITSGGVIFQSPLMSVQPINMVKPDPPLGLHMEITDDGNLKISWSSPPLVPFPLQYQVKYSENSTTVIREADKIVSATSLLVDSILPGSSYEVQVRGKRLDGPGIWSDWSTPRVFTTQDVIYFPPKILTSVGSNVSFHCIYKKENKIVPSKEIVWWMNLAEKIPQSQYDVVSDHVSKVTFFNLNETKPRGKFTYDAVYCCNEHECHHRYAELYVIDVNINISCETDGYLTKMTCRWSTSTIQSLAESTLQLRYHRSSLYCSDIPSIHPISEPKDCYLQSDGFYECIFQPIFLLSGYTMWIRINHSLGSLDSPPTCVLPDSVVKPLPPSSVKAEITINIGLLKISWEKPVFPENNLQFQIRYGLSGKEVQWKMYEVYDAKSKSVSLPVPDLCAVYAVQVRCKRLDGLGYWSNWSNPAYTVVMDIKVPMRGPEFWRIINGDTMKKEKNVTLLWKPLMKNDSLCSVQRYVINHHTSCNGTWSEDVGNHTKFTFLWTEQAHTVTVLAINSIGASVANFNLTFSWPMSKVNIVQSLSAYPLNSSCVIVSWILSPSDYKLMYFIIEWKNLNEDGEIKWLRISSSVKKYYIHDHFIPIEKYQFSLYPIFMEGVGKPKIINSFTQDDIEKHQSDAGLYVIVPVIISSSILLLGTLLISHQRMKKLFWEDVPNPKNCSWAQGLNFQKPETFEHLFIKHTASVTCGPLLLEPETISEDISVDTSWKNKDEMMPTTVVSLLSTTDLEKGSVCISDQFNSVNFSEAEGTEVTYEAESQRQPFVKYATLISNSKPSETGEEQGLINSSVTKCFSSKNSPLKDSFSNSSWEIEAQAFFILSDQHPNIISPHLTFSEGLDELLKLEGNFPEENNDKKSIYYLGVTSIKKRESGVLLTDKSRVSCPFPAPCLFTDIRVLQDSCSHFVENNINLGTSSKKTFASYMPQFQTCSTQTHKIMENKMCDLTV

SEQ ID NO: 8823 - DNA, 1235 bp, Rattus norvegicus
  ref <308>: DATABASE ACCESSION NUMBER: EMBL / U67910
  ref <309>: DATABASE ENTRY DATE: 2000-03-04
tagagaagatcaaagacagctgaggtgatctctcccagagcctccgacatctgagtgttgcgctgaagcagagtggccaagccactagagacctcaagctcctggaatggacctaccctcctgctccctggttcctggcttattctgcacaccacaacctgttgggcctagccagccctcacctccaaccgggcccgtactactcactgtgtccgaatgctgaagctgctgctgctgacactgcctctcctgtccagcctggtgcacgcagcccctagtctagctatgccacgagagggcattgtggggggacaggaggcgtctgggaacaagtggccctggcaggtgagcctgcgtgtcaatgacacctactggatgcatttctgcggcggctccctcatccacccacagtgggtgctcactgcggcacactgtgtgggaccgaataaggctgaccccaacaagctcagggtacagcttcgtaagcagtatctctattatcatgaccacctgctgaccgtgagccagatcatctcacaccctgacttctacatcgcccaggatggggcagacattgccctgctgaaactcactaaccctgtgaacattaccagcaatgtccacactgtctccctgcctcccgcctcagagaccttcccctcagggacattgtgctgggtgacaggctggggtaacatcaacaatgatgtaagcctgccaccgccatttcctttggaggaggtgcaagttcccattgtagaaaaccgcctctgtgacttgaagtatcacaaaggtctcaacacaggtgacaacgtccacattgtccgtgacgacatgctgtgtgctgggaatgaaggacatgactcctgccagggcgactccggaggacctctggtctgcaaggttgaagatacctggctgcaggcaggtgttgtgagctggggtgagggctgcgcacagcccaacaggcctggcatctacactcgggtcacctattacctggactggatctaccgctatgtccccaagtacttctgagttgcatccagggtgacctctgttgtttccaacatgctgctttctgcctccctgcttccctgctccccagcctgagccccaactctgctctacctgagcccctgaccacttgtgtccctcccgctcaggtagccacactgtacaggcagccactctgctatggctcaataaaatgcattaaagcaaaaaaaaaaaaa

SEQ ID NO: 8824 - protein, 273 aa, Rattus norvegicus
  ref <308>: DATABASE ACCESSION NUMBER: SWISS-Prot / P27435
  ref <309>: DATABASE ENTRY DATE: 2001-10-16
MLKLLLLTLPLLSSLVHAAPSLAMPREGIVGGQEASGNKWPWQVSLRVNDTYWMHFCGGSLIHPQWVLTAAHCVGPNKADPNKLRVQLRKQYLYYHDHLLTVSQIISHPDFYIAQDGADIALLKLTNPVNITSNVHTVSLPPASETFPSGTLCWVTGWGNINNDVSLPPPFPLEEVQVPIVENRLCDLKYHKGLNTGDNVHIVRDDMLCAGNEGHDSCQGDSGGPLVCKVEDTWLQAGVVSWGEGCAQPNRPGIYTRVTYYLDWIYRYVPKYF

SEQ ID NO: 8825 - DNA, 1154 bp, Homo sapiens
  ref <308>: DATABASE ACCESSION NUMBER: EMBL / M30038
  ref <309>: DATABASE ENTRY DATE: 1999-07-02
ggaattccgtggccaggatgctgagcctgctgctgctggcgctgcccgtcctggcgagccgcgcctacgcggcccctgccccagtccaggccctgcagcaagcgggtatcgtcgggggtcaggaggcccccaggagcaagtggccctggcaggtgagcctgagagtccgcgaccgatactggatgcacttctgcgggggctccctcatccacccccagtgggtgctgaccgcggcgcactgcctgggaccggacgtcaaggatctggccaccctcagggtgcaactgcgggagcagcacctctactaccaggaccagctgctgccagtcagcaggatcatcgtgcacccacagttctacatcatccagactggagcggatatcgccctgctggagctggaggagcccgtgaacatctccagccgcgtccacacggtcatgctgccccctgcctcggagaccttccccccggggatgccgtgctgggtcactggctggggcgatgtggacaatgatgagcccctcccaccgccatttcccctgaagcaggtgaaggtccccataatggaaaaccacatttgtgacgcaaaataccaccttggcgcctacacgggagacgacgtccgcatcatccgtgacgacatgctgtgtgccgggaacagccagagggactcctgcaagggcgactctggagggcccctggtgtgcaaggtgaatggcacctggctacaggcgggcgtggtcagctgggacgagggctgtgcccagcccaaccggcctggcatctacacccgtgtcacctactacttggactggatccaccactatgtccccaaaaagccgtgagtcaggcctgggtgtgccacctgggtcactggaggaccaacccctgctgtccaaaacaccactgcttcctacccaggtggcgactgccccccacaccttccctgccccgtcctgagtgccccttcctgtcctaagccccctgctctcttctgagccccttcccctgtcctgaggacccttccccatcctgagcccccttccctgtcctaagcctgacgcctgcactgctccggccctcccctgcccaggcagctggtggtgggcgctaatcctcctgagtgctggacctcattaaagtgcatggaaatc

SEQ ID NO: 8826 - protein, 275 aa, Homo sapiens
  ref <308>: DATABASE ACCESSION NUMBER: SWISS-Prot / P15157
  ref <309>: DATABASE ENTRY DATE: 2001-10-16
MLSLLLLALPVLASRAYAAPAPVQALQQAGIVGGQEAPRSKWPWQVSLRVRDRYWMHFCGGSLIHPQWVLTAAHCLGPDVKDLATLRVQLREQHLYYQDQLLPVSRIIVHPQFYIIQTGADIALLELEEPVNISSRVHTVMLPPASETFPPGMPCWVTGWGDVDNDEPLPPPFPLKQVKVPIMENHICDAKYHLGAYTGDDVRIIRDDMLCAGNTRRDSCKGDSGGPLVCKVNGTWLQAGVVSWDEGCAQPNRPGIYTRVTYYLDWIHHYVPKKP

SEQ ID NO: 8827 - DNA, 1018 bp, Rattus norvegicus
  ref <308>: DATABASE ACCESSION NUMBER: EMBL / U67915
  ref <309>: DATABASE ENTRY DATE: 2000-03-04
tccaggctgcaccactggcaacaaaaaatgcaggccctactattcctgatggctcttctcttgccttctggagctggagctgaggagattatcggtggtgtggagtctagaccacactcccgtccttacatggcccatctggagatcaccactgagagaggttacaaggccacctgtggtgggtttcttgtgacccgccaatttgtgatgactgccgcacactgtaagggaagagaaaccactgttacccttggagttcatgatgtgagcaagacagaatccacacagcagaagataaaagtcgaaaaacaaattgttcacccaaattataacttctattccaatctccatgatatcatgttactgaagcttcaaaagaaagccaaggtgactcctgctgtggatgtaattcccctgcctcagccctctgactttctcaagcctgggaagatgtgccgggcagctggctgggggcaaactggagtgacaaaaccaacctcaaatacactgagggaggtgaaacagagaatcatggataaagaggcctgtaaaaactattttcattataactataacttccaggtctgcgtgggcagtccaagaaagataagatcagcatataagggagactccggaggaccactagtgtgtgctggggtggcccatggtattgtatcttatggacgtggagatgcaaagccccctgcagtcttcacccgaatctccccatatgtgccctggattaataaagtcataaagggcaaggatctgaccagcctgagtctgcacgagtcagagtctccaagctagagaactcttttgatatcccttgggatcaacaaagcctgtccccagcctgtcacctgcttgtcccatacctgttcccagcctgcccccaacttgcccccagcccatccccagcctgtcccaagcctgtccctaggatgatctcaacaatacacaagtctgtggtgatggattgttccctgtaaagcacctcaataaagacataacctca

SEQ ID NO: 8828 - protein, 260 aa, Rattus norvegicus
  ref <308>: DATABASE ACCESSION NUMBER: SWISS-Prot / P09650
  ref <309>: DATABASE ENTRY DATE: 2002-06-15
MQALLFLMALLLPSGAGAEEIIGGVESRPHSRPYMAHLEITTERGYKATCGGFLVTRQFVMTAAHCKGRETTVTLGVHDVSKTESTQQKIKVEKQIVHPNYNFYSNLHDIMLLKLQKKAKVTPAVDVIPLPQPSDFLKPGKMCRAAGWGQTGVTKPTSNTLREVKQRIMDKEACKNYFHYNYNFQVCVGSPRKIRSAYKGDSGGPLVCAGVAHGIVSYGRGDAKPPAVFTRISPYVPWINKVIKGKDLTSLSLHESESPS

SEQ ID NO: 8829 - DNA, 769 bp, Homo sapiens
  ref <308>: DATABASE ACCESSION NUMBER: EMBL / M69136
  ref <309>: DATABASE ENTRY DATE: 2000-03-04
agcctctctgggaagatgctgcttcttcctctccccctgctgctctttctcttgtgctccagagctgaagctggggagatcatcgggggcacagaatgcaagccacattcccgcccctacatggcctacctggaaattgtaacttccaacggtccctcaaaattttgtggtggtttccttataagacggaactttgtgctgacggctgctcattgtgcaggaaggtctataacagtcacccttggagcccataacataacagaggaagaagacacatggcagaagcttgaggttataaagcaattccgtcatccaaaatataacacttctactcttcaccacgatatcatgttactaaagttgaaggagaaagccagcctgaccctggctgtggggacactccccttcccatcacaattcaactttgtcccacctgggagaatgtgccgggtggctggctggggaagaacaggtgtgttgaagccgggctcagacactctgcaagaggtgaagctgagactcatggatccccaggcctgcagccacttcagagactttgaccacaatcttcagctgtgtgtgggcaatcccaggaagacaaaatctgcatttaagggagactctgggggccctcttctgtgtgctggggtggcccagggcatcgtatcctatggacggtcggatgcaaagccccctgctgtcttcacccgaatctcccattaccggccctggatcaaccagatcctgcaggcaaattaatcctggatcc

SEQ ID NO: 8830 - protein, 247 aa, Homo sapiens
  ref <308>: DATABASE ACCESSION NUMBER: SWISS-Prot / P23946
  ref <309>: DATABASE ENTRY DATE: 2002-06-15
MLLLPLPLLLFLLCSRAEAGEIIGGTECKPHSRPYMAYLEIVTSNGPSKFCGGFLIRRNFVLTAAHCAGRSITVTLGAHNITEEEDTWQKLEVIKQFRHPKYNTSTLHHDIMLLKLKEKASLTLAVGTLPFPSQFNFVPPGRMCRVAGWGRTGVLKPGSDTLQEVKLRLMDPQACSHFRDFDHNLQLCVGNPRKTKSAFKGDSGGPLLCAGVAQGIVSYGRSDAKPPAVFTRISHYRPWINQILQAN

SEQ ID NO: 8831 - DNA, 410 bp, Rattus norvegicus
  ref <308>: DATABASE ACCESSION NUMBER: EMBL / U67994
  ref <309>: DATABASE ENTRY DATE: 2000-03-04
acgtgaaagtatttgaacagtttctcgaaaacctggataaatctcggaaaggggcacttctcaagaagagcgatttacaaaaagatttctgaagaaaacaaccccatcaaaccaatgtgaatgccttctacattcaaccatggagcatttagtcaatgcagtagaatcgtcagtgtgactgaatccttaaagcagagctttcttttcttttctttcttttttctttttttcggagctggggacgaacccagggccttgagcttgttaggcaagcgctctaccactgagctgaatccccaacccctcagagctttcttttgagaaatcatttatgtcaaagagacctggtttctgagaccaaagagggtgtcaaaggccctgaaagaaacaataaatcaaggaataaatgc

SEQ ID NO: 8832 - protein, 29 aa, Rattus norvegicus
  ref <308>: DATABASE ACCESSION NUMBER: SWISS-Prot / AAB39619
  ref <309>: DATABASE ENTRY DATE: 2001-12-01
VKVFEQFLENLDKSRKGALLKKSDLQKDF

SEQ ID NO: 8833 - DNA, 1399 bp, Homo sapiens
  ref <308>: DATABASE ACCESSION NUMBER: EMBL / X74330
  ref <309>: DATABASE ENTRY DATE: 1994-11-14
cttaccgtggcgagttccgcgctcaatggagacgtttgaccccaccgagctgcccgagctgcttaaactttattaccggaggctctttccctactctcagtactatcgctggctcaactacggtggagtgataaagaattactttcaacaccgtgaattttcattcacactgaaagatgatatttacattcgctaccaatccttcaacaaccagagtgatctggaaaaggagatgcagaaaatgaatccatacaagattgatataggcgcagtatattctcacagacccaatcaacacaatacagtgaagctgggagctttccaggctcaggaaaaagaactggtatttgacattgacatgacagactacgacgatgtgaggagatgttgtagttctgcagacatatgtcctaagtgctggaccctcatgacaatggccatacgcatcattgacagagcattgaaggaggactttggatttaagcatcgtctctgggtatattctggaaggagaggtgttcattgttgggtctgtgatgaatcagttagaaaactgtcttctgcagtacgttctgggatagttgagtatttgagccttgtaaagggtggtcaagacgttaaaaagaaagttcacctaagtgaaaaaattcacccttttatcagaaaatctataaacataataaaaaaatactttgaagaatatgccttggttaatcaagatattctcgaaaataaagaaagctgggataagattttagcccttgttcctgaaacaattcatgatgaacttcaacaaagcttccaaaagtctcacaattcacttcagcgttgggagcacttgaagaaagtagccagcagatatcagaataacatcaaaaatgacaaatatggaccctggctggagtgggagattatgctccagtactgttttccacggctggatatcaatgtcagcaaaggaatcaatcatctactgaagagcccttttagtgttcatcctaaaacaggtcgcatctctgtgcctattgatttgcagaaagtggaccagtttgatccatttactgttccgaccataagcttcatctgccgtgaattggatgccatttccactaatgaagaggaaaaagaggagaatgaagctgaatctgatgtcaaacatagaaccagagattataagaagaccagtctagcaccttatgtgaaagtttttgaacattttcttgaaaatctggataaatcccgaaaaggagaacttcttaagaagagtgatttacaaaaagatttctgaagacagagctcctcaaaccattgtggatatcttctgccttcaaccacagatcaaatacttcaagagccatttaataaatatggcagaactataaagaaaaaaaaaaaaagg

SEQ ID NO: 8834 - protein, 420 aa, Homo sapiens
  ref <308>: DATABASE ACCESSION NUMBER: SWISS-Prot / P49642
  ref <309>: DATABASE ENTRY DATE: 2002-06-15
METFDPTELPELLKLYYRRLFPYSQYYRWLNYGGVIKNYFQHREFSFTLKDDIYIRYQSFNNQSDLEKEMQKMNPYKIDIGAVYSHRPNQHNTVKLGAFQAQEKELVFDIDMTDYDDVRRCCSSADICPKCWTLMTMAIRIIDRALKEDFGFKHRLWVYSGRRGVHCWVCDESVRKLSSAVRSGIVEYLSLVKGGQDVKKKVHLSEKIHPFIRKSINIIKKYFEEYALVNQDILENKESWDKILALVPETIHDELQQSFQKSHNSLQRWEHLKKVASRYQNNIKNDKYGPWLEWEIMLQYCFPRLDINVSKGINHLLKSPFSVHPKTGRISVPIDLQKVDQFDPFTVPTISFICRELDAISTNEEEKEENEAESDVKHRTRDYKKTSLAPYVKVFEHFLENLDKSRKGELLKKSDLQKDF

SEQ ID NO: 8835 - DNA, 474 bp, Rattus norvegicus
  ref <308>: DATABASE ACCESSION NUMBER: EMBL / U68272
  ref <309>: DATABASE ENTRY DATE: 2000-03-04
attatgtgccgaaaggggaaggttggaccgcctggcctggacatcggaaggaaggaagatcagctgattgtccacatatttcaccctaaggtcaatgtgagtcaggaaaccatgtttggtgacggaaatacctgttacacattcgactacactgtgtttgtgaaacattacaggagtggggagatcctacatacagaacatagcgtcctaaaagaagattgtagcgaaactctgtgtgagttaaacatctcagtgtccacgctgaattccaattactgtgtttcagtagttggaaagtcgtctttctggcaagttaatacagaaacatcaaaagacgtctgtatcccctttctccatgatgacagagaagaatcaatttggatgctgctcgttgctcctcttctcttccttacaatagttgtcccggcacttgtgtgttgttacattaagaagaatccatttaagagaaaaagc

SEQ ID NO: 8836 - protein, 158 aa, Rattus norvegicus
  ref <308>: DATABASE ACCESSION NUMBER: SWISS-Prot / AAB17055
  ref <309>: DATABASE ENTRY DATE: 2001-12-01
IMCRKGKVGPPGLDIGRKEDQLIVHIFHPKVNVSQETMFGDGNTCYTFDYTVFVKHYRSGEILHTEHSVLKEDCSETLCELNISVSTLNSNYCVSVVGKSSFWQVNTETSKDVCIPFLHDDREESIWMLLVAPLLFLTIVVPALVCCYIKKNPFKRKS

SEQ ID NO: 8837 - DNA, 1641 bp, Homo sapiens
  ref <308>: DATABASE ACCESSION NUMBER: EMBL / AF056979
  ref <309>: DATABASE ENTRY DATE: 2001-04-09
ccagcgaccgtcggtagcagcatggctctcctctttctcctaccccttgtcatgcagggcgtgagcagggctgagatgggcaccgcggatctggggccgtcctcagtgcctacaccaaccaatgttacaattgaatcctataacatgaaccctatcgtatattgggagtaccagatcatgccacaggtccctgtttttaccgtagagggaaagaactatggtgttaagaattcagaatggattgatgcctgcatcaatatttctcatcattattgtaatatttctgatcatgttggtgatccatcaaattctctttgggtcagagttaaagccagggttggacaaaaagaatctgcctatgcaaagtcagaagaatttgctgtatgccgagatggaaaaattggaccacctaaactggatatcagaaaggaggagaagcaaatcatgattgacatatttcacccttcagtttttgtaaatggagacgagcaggaagtcgattatgatcccgaaactacctgttacattagggtgtacaatgtgtatgtgagaatgaacggaagtgagatccagtataaaatactcacgcagaaggaagatgattgtgacgagattcagtgccagttagcgattccagtatcctcactgaattctcagtactgtgtttcagcagaaggagtcttacatgtgtggggtgttacaactgaaaagtcaaaagaagtttgtattaccattttcaatagcagtataaaaggttctctttggattccagttgttgctgctttactactctttctagtgcttagcctggtattcatctgtttttatattaagaaaattaatccattgaaggaaaaaagcataatattacccaagtccttgatctctgtggtaagaagtgctactttagagacaaaacctgaatcaaaatatgtatcactcatcacgtcataccagccattttccttagaaaaggaggtggtctgtgaagagccgttgtctccagcaacagttccaggcatgcataccgaagacaatccaggaaaagtggaacatacagaagaactttctagtataacagaagtggtgactactgaagaaaatattcctgacgtggtcccgggcagccatctgactccaatagagagagagagttcttcacctttaagtagtaaccagtctgaacctggcagcatcgctttaaactcgtatcactccagaaattgttctgagagtgatcactccagaaatggttttgatactgattccagctgtctggaatcacatagctccttatctgactcagaatttcccccaaataataaaggtgaaataaaaacagaaggacaagagctcataaccgtaataaaagcccccacctcctttggttatgataaaccacatgtgctagtggatctacttgtggatgatagcggtaaagagtccttgattggttatagaccaacagaagattccaaagaattttcatgagatcagctaagttgcaccaactttgaagtctgattttcctggacagttttctgctttaatttcatgaaaagattatgatctcagaaattgtatcttagttggtatcaaccaaatggagtgacttagtgtacatgaaagcgtaaagaggat

SEQ ID NO: 8838 - protein, 489 aa, Homo sapiens
  ref <308>: DATABASE ACCESSION NUMBER: SWISS-Prot / P15260
  ref <309>: DATABASE ENTRY DATE: 2002-06-15
MALLFLLPLVMQGVSRAEMGTADLGPSSVPTPTNVTIESYNMNPIVYWEYQIMPQVPVFTVEVKNYGVKNSEWIDACINISHHYCNISDHVGDPSNSLWVRVKARVGQKESAYAKSEEFAVCRDGKIGPPKLDIRKEEKQIMIDIFHPSVFVNGDEQEVDYDPETTCYIRVYNVYVRMNGSEIQYKILTQKEDDCDEIQCQLAIPVSSLNSQYCVSAEGVLHVWGVTTEKSKEVCITIFNSSIKGSLWIPVVAALLLFLVLSLVFICFYIKKINPLKEKSIILPKSLISVVRSATLETKPESKYVSLITSYQPFSLEKEVVCEEPLSPATVPGMHTEDNPGKVEHTEELSSITEVVTTEENIPDVVPGSHLTPIERESSSPLSSNQSEPGSIALNSYHSRNCSESDHSRNGFDTDSSCLESHSSLSDSEFPPNNKGEIKTEGQELITVIKAPTSFGYDKPHVLVDLLVDDSGKESLIGYRPTEDSKEFS

SEQ ID NO: 8839 - DNA, 1548 bp, Rattus norvegicus
  ref <308>: DATABASE ACCESSION NUMBER: EMBL / U68417
  ref <309>: DATABASE ENTRY DATE: 1997-08-27
cgggatcatgtctgcagctatactaggacaggtctggacccggaagcttctgcctattccctggcgtctatgtgtgcccggaagatgtgtgtcctccaacttcaaggcggcagacctccaggttcaggtgaccagagagccacagaagaagccagcccctagccagcctctgctgtttgggaagacattcacggaccacatgctgatggtggagtggaacagcaagacaggctggggccctccaaggatccagcccttccagaacctcacactgcacccagcctgctccggcctgcactactcattgcagctctttgaaggcttgaaagcttataaaggcagagacaagcaggtacgcctcttccggccctggctcaacatggacaggatgctacgttctgcaaggcgcctctgcctgccagactttgacaagcaggaactgctggagtgcatccgccagctcattgaagtagacaaagactgggttcccgatggcaatggaacaagcctctatgtgcggccggtgcttattggaaatgagccctccctgggtgttggaatggtcacacaagccctcctgttcgtcattctgtgccctgtgggctcctacttccccggagactccatgacacctgtctccctcctggcggacccctcattcgtcagagcctggattggtggggtcggtgactgcaagttgggggggaattacggccccactgtggctgtgcaacaagaagcccagaagaaaggctgcgagcaggtcctctggctgtacgggccggaccaccagctcaccgaggtgggaaccatgaacatctttgtctactggactcatgaagacggagaactggagctggcaacccccccactggatggcatcatcctccccggagtggttcgacaaagcctgctggatctggccaggacttggggtgagttccgggtggcagaacgcaaggtcactatgaaggaattgaagcgggcactggaggagggccgggtgcgagaagtcttcggctcaggcactgcttgtcaggtctgcccagtgcaccaaatcctatatgaaggcaagcaactccacattcctaccatggaaaatgggccggaactcatcctgcgcttccagaaggagttgaaggctattcagtacggaaccagtgcccacgattggatgcttcgtgtgtgacgttagggaggttgtgccctacctggttggatccgctgacgtgcagcatccagttcagcgtcctcgcctcccagagactcaagagaagtgcaatagggaaggtcgttccagactgctggctctctggcaccctcacgtggaagttacactccaaagccttaagggcggacccatgtaatttggaccccacctcagttcagctcgtccgcgtcctggtgttcaagagagaaccttggcttcttctcgatctccgttctcaggcggatccccggtgctcttcatgtctttttttttttttttttccgtctctctctccttgctgcaattttgaaataaaaatgccaaagaacaagaaaaaa

SEQ ID NO: 8840 - protein, 393 aa, Rattus norvegicus
  ref <308>: DATABASE ACCESSION NUMBER: SWISS-Prot / O35854
  ref <309>: DATABASE ENTRY DATE: 2000-05-30
MSAAILGQVWTRKLLPIPWRLCVPGRCVSSNFKAADLQVQVTREPQKKPAPSQPLLFGKTFTDHMLMVEWNSKTGWGPPRIQPFQNLTLHPACSGLHYSLQLFEGLKAYKGRDKQVRLFRPWLNMDRMLRSARRLCLPDFDKQELLECIRQLIEVDKDWVPDGNGTSLYVRPVLIGNEPSLGVGMVTQALLFVILCPVGSYFPGDSMTPVSLLADPSFVRAWIGGVGDCKLGGNYGPTVAVQQEAQKKGCEQVLWLYGPDHQLTEVGTMNIFVYWTHEDGELELATPPLDGIILPGVVRQSLLDLARTWGEFRVAERKVTMKELKRALEEGRVREVFGSGTACQVCPVHQILYEGKQLHIPTMENGPELILRFQKELKAIQYGTSAHDWMLRV

SEQ ID NO: 8841 - DNA, 1569 bp, Homo sapiens
  ref <308>: DATABASE ACCESSION NUMBER: EMBL / BC001900
  ref <309>: DATABASE ENTRY DATE: 2001-07-13
cgccgcacggatcatggccgcagccgctctggggcagatctgggcacgaaagcttctctctgtcccttggcttctgtgtggtcccagaagatatgcctcctccagtttcaaggctgcagacctgcagctggaaatgacacagaagcctcataagaagcctggccccggcgagcccctggtgtttgggaagacatttaccgaccacatgctgatggtggaatggaatgacaagggctggggccagccccgaatccagcccttccagaacctcacgctgcacccagcctcctccagcctccactactccctgcagctgtttgagggcatgaaggcgttcaaaggcaaagaccagcaggtgcgcctcttccgcccctggctcaacatggaccggatgctgcgctcagccatgcgcctgtgcctgccgagtttcgacaagctggagttgctggagtgcatccgccggctcatcgaagtggacaaggactgggtccccgatgccgccggcaccagcctctatgtgcggcctgtgctcattgggaacgagccctcgctgggtgtcagccagcccacgcgcgcgctcctgttcgtcattctctgcccagtgggtgcctacttccctggaggctccgtgaccccggtctccctcctggccgacccagccttcatccgggcctgggtgggcggggtcggcaactacaagttaggtgggaattatgggcccaccgtgttagtgcaacaggaggcactcaagcggggctgtgaacaggtcctctggctgtatgggcccgaccaccagctcaccgaggtgggaaccatgaacatctttgtctactggacccacgaagatggggtgctggagctggtgacgcccccgctgaatggtgttatcctgcctggagtggtcagacagagtctactggacatggctcagacctggggtgagttccgggtggtggagcgcacgatcaccatgaagcagttgctgcgggccctggaggagggccgcgtgcgggaagtctttggctcgggcaccgcttgccaggtctgcccagtgcaccgaatcctgtacaaagacaggaacctccacattcccaccatggaaaatgggcctgagctgatcctccgcttccagaaggagctgaaggagatccagtacggaatcagagcccacgagtggatgttcccggtgtgaagctgcaggctgtgctccagatccaccgacccgtagcatctcgtcacgccagcactcgcctccctaccaatgactcacctgaagtgcaatacgaaataaaaggccagcgggcggcgtctgggtctctggcgcccccatgtggttgcgacactcccaaagccgtaagggccgacccaggcatcttggcccccagcccctcgtcgcgggttcaggtccgcccattactccttgtcgtgcggtcaaggatacaccttggccccgattccggatctctccgttctcaggccagacccctggtgctgccgttgatttttttttctctgtctttgctgcaattttgaaataaaatgccaaagaacaaaaaaaaaaaaaaaaaa

SEQ ID NO: 8842 - protein, 392 aa, Homo sapiens
  ref <308>: DATABASE ACCESSION NUMBER: SWISS-Prot / O15382
  ref <309>: DATABASE ENTRY DATE: 2002-06-15
MAAAALGQIWARKLLSVPWLLCGPRRYASSSFKAADLQLEMTQKPHKKPGPGEPLVFGKTFTDHMLMVEWNDKGWGQPRIQPFQNLTLHPASSSLHYSLQLFEGMKAFKGKDQQVRLFRPWLNMDRMLRSAMRLCLPSFDKLELLECIRRLIEVDKDWVPDAAGTSLYVRPVLIGNEPSLGVSQPTRALLFVILCPVGAYFPGGSVTPVSLLADPAFIRAWVGGVGNYKLGGNYGPTVLVQQEALKRGCEQVLWLYGPDHQLTEVGTMNIFVYWTHEDGVLELVTPPLNGVILPGVVRQSLLDMAQTWGEFRVVERTITMKQLLRALEEGRVREVFGSGTACQVCPVHRILYKDRNLHIPTMENGPELILRFQKELKEIQYGIRAHEWMFPV

SEQ ID NO: 8843 - DNA, 13894 bp, Rattus norvegicus
  ref <308>: DATABASE ACCESSION NUMBER: EMBL / U68562
  ref <309>: DATABASE ENTRY DATE: 2000-03-04
ctttgggtcacccaggaactgtatgaagttgcaattgagaaaatgcctttattagattggcccacaggagagctgatggtacagaatctgaatgatggatgtaggaagcatctctgggtcatgccacccctgggtaggtggcagtgggctgtgtaagaaagcaggctgagaagggtgcaagctgtaacagcctaggtccatgctctttgctttagcccctgcccatggtttcctgtaagtttccttgaagttgagataaactttcttctcagagtagctcttgctcagcagttatcacaggaatagaatataaactaagacagtacctaagtgtaagtccccattcatctatgtaataatgccaaattcatcctgaaagatcatttacctagaaatccattatttctcataactctttaactctgtagcttacttgaaggaaaagcaccttaaattaccagactgtccactcatttatattatttatttggaaatgtttgtaacagtacagtgaaactaaatttcagagacaatggctgtcagtttaggcatcatccgtttattataaaagggaggcatggaaattatttacatgatgaaatagttcagaatatcagtggaatgggcagcttcatgtgacaccatttcaacagtgatttcagtcgacatactttccaagaatgtcgccatctctaaataagaagtaatcctgtgaataaagagaccactgattaagatagtaataacaaatataaactgattttttttttggttcttttttttttttttcggagctggggaccgaacccagggccttgcacttcctaggcaagccctctaccactgagctaaatccccagcccctaaactgattttaaatcattagctttacttaccttgtcgtctagtactactttggtgcctccgtgttctgggagaagaactttatctccaactttcacactgacaggctgaatctctccaccctgatgaaaacagacacttgttagcaaagatgtatgtcttgttcactagatacacattaaagtttttgtttcagtatgtacaccaggagcctcctgcctcaggtttgtgttaattataggcattaatcacattaaaactgtaacttttaagtcactaaatttgtaaaagtgctcaaaccagtatctggcaggtacctaattagtggttaagcaatatagaccttacctacattaaatgtagaccttcataatatagcatcactgtagttactatatgacagagatgccttcagtgggcagctaaggttggctaactttttactgttaaatattaacacaccgtaagaccaagggaagggaagtaaagcaggtacttgttacactagacagcaaatggtcatgtatgacttcgaacaaatcgaaaaaattggcattacttttctccatttaatatacatttattgacttaatgtccttgttgtcaagacacagacttggtcagagactgaaggagaatgtccactcccccatactctagcggtttagttaagtgaagaacacccagagtagttcacctcctttctcaagtaggccaactaaaactcgaaatggtgtaggatgatttcagtgtctgggctaagccaacagtcaggctcctccacccatcaccgcacccttgcttttggggaacgggagtggggtgatggggtctatgtaaaaactgactggccattaattctggatccccctcactcagcactgtacctgtgctagaattagttttgtgccttattaaatacctcctccttcaattctgaaaagacccctgggtttatctacttgtatgactctttctgtctatttaaaatttgaagagtaggctacaaaataactacagaggtatttctttttttttttcagagctggggaccgaacccagggccttgcgcttgctaggcaaggcctctaccactgagctaaatccccaacccactacagaggtatttcattttgtgaggttttgttttactttgagatatggtctcgtcctgtacctcctgttggcctacaaggctctataatccacttgccttggcctccaaagaacctgggttagaggcatgaggcactatcaaggcaggcactttttaatctgtagtgtggggcactgctgaattagctcagtgggtaaagagacttgctatcaaagtatgggaacccaagttgccatcccaacactatagtaaaaaggatgtaacccccaacatgctcaggccagaaaccagactagttcaacacgactttaccccaaaagagtaaggtggagatggccctgcaacacatcatacagacatgtgcacatacagtcataccactcaaataccctctgcctttttacagtccctgtcattccttagaaatataaaacattctaaaattgttttcctgaatgcgaggttcttcgtgaattgaaatctaacttgaaattacttccaaaaaaaccttgccatttttaattaactttttaattaacaaaccaattcctcctccttcccacatcacataaaattctgtaccactctaggagctccgggttacacctttcctttcccgcctgatcccacagccacgaccgttgcttgcaatacttttccttgagacttttctggaagcataatgccacctttggtcacagtttcagcggcactcctttcaaccaatactctgtcaaatagcggaagaaacttcctaaaagcttgtccagcctgtggagagaaatgtgttcaaacagacagtaattaagttcgaagtgtcaggagacgagttaattaaataccactgcaaaccttaacattaatagtcgaaagccttccaaaatgaacagaaaacttaagtgtatctttagaatatagcccttcaatgttcactccatatagccagttgattttcatttccttgtctgttgtgagtgtgtgggggccgggggtcttcattcgctcatcagcaatcgcaaccttggtctttctccaaggtcaaatatttttcctttctcagatttttttttcaaactcgagtaacaggggagtggtgtcaatttttaagcccgatcttactctttctccaacataggactcattcacctaggctgtgccagggcaggtgggcttctgagtatgtacccgggcgcccgccccctgctccagacgcctgccgcacacgtgcgtgcagaaaagccgtggtggagaaagggtcggataggcctcgcttctgtagagcaacggaggtcgctggacactgagtgacccctgtcctgtcctgctagtcccaaagcgcacatggatccgtcggcctgccagccacgagcactcaccatgacttacgccgccgcagctccggactctgcactcggactcctgctgcaaggagactcccgtgggccggctcaggacacgtgaaaagacagcgcagcgcgcaggcgcactcagccccttagcgtgagagaaggcggccactccagcgcgcgcgccgattggtggccaggactccgcgcaggcggccgatgcgggtagccggaggcggaagaaaaggggagcactttctaggcttttccaggtcggccgctgaggtgaaagaacaagcccctcccggaaatgacgccacttgacctttcacccacgaaaagcgcggggccttccggaaggttctagaaccgagcgcggcccaggaaccagtgtacggcggcgggagagtgctgaggccacggggctgaggccgctcaggtaaggagggcggggccgcgcgcgtcgcatgcagattgcagggccggggcgtgggagaagtggggcgcgcgcgcgcgcacgcggggcgcggggcggggccggggagggaggggactcgggctcattgcggtgcgcgcccagtgctgggtccctcactcgccgcagacggcctgcctcgcctcgtgctcttccgccgccgccccgcaggtacgcggcctcggcgtgcacggcggcccggtgctcgtgggcctgcttgcagcgcggaccgagcacggagggctggggataagtctgtcagcgacgcgcaggctcggttcacttgttcaggcccagtagggccatactgctttcatcacgtgcggcgggcaccacgcgacctaggctaagcgcgggagcaagggcgggctagggtgggagcaacttgggccctgtggttccatctgcgcctggcgactgtagggctctatcggagggtggtcgcggtcctctagtcgctgtggccgcggtgatccggcgccttcactttgaccttgctcggggctcctggtcgagaagacacgtggggctcggcgcgtgcgctgagctagggcccttttctccggccttgcttgctgctgtgctactgtagctccgggtggatgctggcgggcacactctccttagagggttttgcaccgtcattagtacttctgtgattctctaggcacttgcatttagaacctgcctgcttacaccaactttttttttcagacacttttcggagtggatctgcttccaaggccgttttggcagtgaaagattaactcgagagggcaggagggggtggccatggggaggtggtttcgtgtgctttgtgctagtgctgtaggtcaggcatgggggcagcctccatgatcagttggttaacagattatgtcctgaatctgcagcgccgttagcagagaacagcagaactccaatctagccaccatattttgaagcaccgttggacaagtttgtagtgatactttttttctttccccagaaatgcttcgactacccacagtccttcgccagatgagaccagtgtctcgggcactggctcctcatctcactcgggcctatgccaaagatgtaaaatttggtgcggatgctcgagccttaatgcttcaaggtgtagaccttttagccgatgctgtagctgttacaatggggccaaaggtaccagtatacttatgtcgtgttaaagaatagtgttctgtagctgcaagacagcattttgtaatcgagttttgtgagtatctgatttgcatgtggtacaacttagtggtttggggggtgttatttaggtttgttagttggtcattctacgacggtgtccttactgctgcttcagtcgatttgggagacttctgtgcgttgtgatgtaatagtaacagctcaaggaagattttcaaaccagagtcatgactgtgtgcatgcttgcattaaattttggatcccatcccagtagttagagggtatatagaggggaaagtacaactccactctaataactcaagtgcatagctgtaatgtgagcgttcactgaacgctgaaatttccaacataaaaggcaaatgcactagtgtagaatcattactttaaaggtgtcgtatttttatatgcattttattctgcctgcatttatgtctctgccagggtgccaaggttctgggaactgacttccccctttggaagaggagcctgtactattaccaccaagcctgtctttacttaactttatgagctttgttgtttgggtcttttgtttgttttattcaagatgcatttctctggtagcctaggctgtcctggaactcaaagagatcatctacctgcttctgcaacacattgtcagactctttttacttgccctttgggaaaaactttgtggtctcccattcatctctacattgtacatacctcatgtttctgcaattatcacattgcaaagatttgtctagttttgggtttttgagtctcactagtttagtctggcttctaacgcccgtggcaaggctatcctcacatctccagcgtaggaattcagtattctactcacccagtgtgtttttattatgacaaggtctctaaccatagctggccaagtcagccttgaacttgagcactgctaagatcagaggctgggatcacacatttaagtggctgaatagggagctatagtactttgaggacatcattggatacagtgaggtcattttaaattgatactagactgaactgcataatcccagcattcaggaggctcaggcaggtggatctgaaagccatggatctaaagctataagagaaatcctgtcttgaaaaacaaaacaacaaaaagccctgcatctttaagtactgtttacatagctcaagacagaatagaagcttggttcaaatccaaaagttgccaataccgtcgttgccatatttgaagtttttattgagtgaaccagaagagcccatatttatcttactggctgatatttagtgaatgaattttaaagcaaaacatgtttttgataagcagggcattagtgagtggttcttgcctctggtcccagccttcaggaggcagaggcaagtagatctttgtgctttgtgagtttgaggacagccatggctgcacacagaagaaccctgtctcagaaaacaaagccagttcatagccaaactcaagtacaaacgatgtgaagaatgtcctgggatctgtgttttcttgttttataggtagcatctgttagttccagggaattcctgttgtgcctcagtcaaagttagactccagggcacatgagtagtgttcattttgtctatacacctaagatggttgattaacttggctttgaggttcgtgttgcaggattgttaacaatgacaacttcaaggattatctttaagggttgatattttttttttttgtcactatagggaagaacagtgattattgaacagagttggggaagtcccaaagtaacaaaagatggggtcactgttgcaaagtcaattgatttaaaggataaatacaaaaatatcggagctaagcttgttcaggatgttgccaataacacaaatgaagaggctggggatggcaccaccactgccactgttctggcaccgtctattgccaaggagggctttgagaagatcagcaaaggggctaatccagtggaaatccggagaggtaagagtttgtccttgatcctatgctgtaaagaattctacatcttcatctttgtcctttttgttgtagagtttgtgtatgttcttggtagagttgcccttccttacttatgtggatttccaagattgaactgaggccttcaggcttgtgggtccagtacttttactccctagacctatcttccacaccttgttttttaacttatttaatggaagtgaaaatacagggctttcggtatatccctggctgtcctggacacgcttggtaactttgtagacctggctagttagcttcaaatagatctgactgcttctcctttctgagtgctggggttaaatgtgggcactaccacccatgcccaaggccctgtagtattacttaacctttgatccatcccgtgagccctaagtagtgagaattctgaaactatcttttcttgttttgattaggtctcctttttagccttccctgacatggttccctatataatccatgcaggtctcaaatttttagccattctgtctcagtctcttgggtcctcggattacatgtgtgagccaccatgcaacatctaggtcaagcttttcaaaatgttggttttcagtctaaatgattgattgaatgcatactgttgtttggtgcagttgggagagtgctgacatgagaggttgcatgtgatcgttagaaggaatctgtaattcttagcggggaccatgataagcattgtagtaacatacattcttgaactaggtgtgatgttggctgttgatgctgtaattgctgaacttaagaaacaatctaaacctgtgacaacccctgaagaaattgctcaggtaaggattttatttcgtgttgaaaagaataattttgatcttttggttccaagaacaggatttgggtttgtctttgtagccatgactatcctggaattaaacgtatagatcaggctgaccttgaactcaaattcctctgcttccaaagtgcttgccccatcactgttagatcttactctttttagttttacggtgctgtaaataaaatttgtgttatttgtgaaaatattcttaggtgatatcaatgtaccctgtactatatgggttcaaacctagtccttgaagcatagttaacaagtgttttttatatgtatgtgcctgggtgttgtgtgggttgcaccatatgcatgcatgaacccataagaagaattaagagacagttgccagccactctggtgtaggtgctggcccgaacagtaagtcatcttaaccactgaggcatctctccacctctttagttttagtttattcttaatgtgtcagataatggaggaatgagggtgtagctccatttaaaactaacaactggccctcttgctctcttccttgctctgtccccttgctcctttccccttctctccagtcccctccccactccccacgtgctcatggtcggctctacctttcttctgcctttttctgtctttactacccatcctcatgccctaaataatcaattctattttaaaaaaaaaactattaactgtaaaataatcagtttagagtgtcaaaggagaagaaagttgaaaatattaatcttaccatttgattttgaagtaaattggttatttcaggttgctacaatttctgcaaacggagacaaagacattgggaacatcatttctgatgcaatgaagaaggttggaagaaagggtgtcatcacagtgaaggcaagcatgggatttgatatgttttgataatatcttcaatggggtgtctgtaacctattttccaaataaaaacttgaatctcttgtttgtgtcagtacaattcattcctttgtcttaacatctgtattgagtatatgctcactattagtctgaatatttgccccctacaatgagttcatctaacttaaataattagctctctgctagctgtaaatagaatggagcctctaatcctggctgtctgggaactctaggcttcaaccttagagagatggcatccctctgtcatctcttctttctgaagattaaaaaaggcatgggttcctgagctcaactttagttagtggcttgaatttttgtgggagtgcagttagaggacactgcagcatttccatgttgagtcccttatgcctgtgtcatctcttgctaatttggtatgtaatttcaaatgttggcttatgtttttgagacagggtctcattgtgtagtcatgtttttgagacagggtctcactgtatagatagtccaaattaggcttgtgtttcttttaagagattttttctatctatgagtgtttgtttgcacatgtatgtgcaccttggagtccagaagaaacagcagaatcctaggaactgagttgagaaccatcatgtaggtgcacaaaacccaattttattcaagaaaagcaaatggggctggaaagctggatggctcagtgattaagaacactggttgctcttccagagaccatgagttcaatctctagcaaccacatggtggctcacagcaacctaaaacgggatatagtgccctggtctggcacacaggtgtatatgctgataagagtatgtaaaatatataaaataagtatatctttagaaaaaaaagagaatagcaaatgttcttaacccttgagccatctttaggtttagctgaccaagttttgtttctttagtttaaataggatggaaaaaccctgaatgatgagctagaaattattgaaggcatgaagtttgatagaggatatatttccccatattttattaacacatcaaaaggtaagagcccatccacaagtgaaagtcgtcacaatatgctctaagctgctaacttactgtcagctgtgggtaatgggtatggctgatgcaataagtaaaaactgtgatgtttaaacattaatggtttggtaaatgaagaagaacatgagttactggtctcattgtggaagtaaattgttttactgctcattgtatttataggtcaaaaatgtgaattccaagatgcctatgttttgttgagtgaaaagaaaatttctagtgttcagtccattgtacctgctcttgaaattgccaatgctcaccggaagcccttggtcataattgctgaagatgttgatggagaagctcttagcacactggttttgaacaggtaatagataaattggattgggtttatatatttttagatagaaggtaatttctttcttttgcttttttgaaattccacattttgcttgtgtgtctcaaagctgtagtatatatgatgtagtgctctatgcattatgagtctatctctagctggtctcaaatgcacataattcttgagcctgtgcctcccacagcttcccagagaaaactatacatatgtcttttttttttttgtaagatttattatatataattacacaagggagcatcagatcttattacagatggttgtgagccaccatgtggttgctgggatttgaactcaggacctctggaagagcagtcagttttctcaaccaactgagccatctctccagctctacatatgtctttttttctttttttttctttctctccttttctctcctttttttcggagctggggattgaacccagggccttgcacttgctaggcaagtgctctaccactgagataaatccccaacccctcacacatgtctttttaacactggtgtgcttagcactaatgcccaactgtgtctggcaatgtaagagcagcatttctttaagaagggaatcaggttgaaacaaatttagatgagtagaggtccccatctcatcttttttaagaccagaagttgaaggaaaagagtagggtctgtacagtcatgtagacctagaacttaccagggactaaactagatgctttttcccaattccccctttggtttacatcttacgcagttaaatgtctttacaggctaaaagttggtcttcaggttgtagcagtcaaagctccagggtttggggacaacaggaagaaccagcttaaagatatggctatcgctactggtggtgcggtaagtaaaccttgtcatactgctttgctcagtgttgtttatgcttccagatcgtaaatacaatgtatacttcacaatagatgggctgtttctttctattggatatttggaacacgggttggattaaggtctcacttctaacttactgagcctggcctgagaatggacatgattaaaagttcttctcaaaatttaaaactaatttgtgtaagtgattttatttagactttgttctgatataccagtggaaaaatagcatttctttctctggatttttaagctttatgtatatgggtgtttgtctgcatgttttgtatgatgtatacataccagaaggcattttatccagttccatagcactacagttatagacagttgtaagctgccatatggatgctgggatttgaactcaggacacctgaaagagtagaatagctctccagtgcttgtgactgctgagacatctcactagccctgaaaagctgtttttcacaaaaatatttgtgactatagtaataaacctagtataatggaagccactaacagcacattgtttttataggtgtttggagaagagggtttgaatctaaatcttgaagatgttcaagctcatgatttaggaaaagttggagaggtcatcgtcaccaaagatgatgccatgcttttgaaaggaaaaggtgacaaagctcacattgaaaaacgtattcaagaaatcactgagcagctagacatcacaactagtgaatatgagaaggaaaagctgaacgagcgacttgctaaactctcagatggagtagctgtgttgaaggtaagactgacttgcaggtaaacattttaggctgagtctggtgatagtggttctttagtatttaccaatagtaactaagtgacctttccccaaatctttagtttttgttgctcgtttgttttggtttttgcatgtgctataaccaactttccatggggcacatgtaaagggacaactttcagcagttggtcatctacctttgcagtgatttttagaagcaagcaagccctttgacccacttgggtcatatccttaggccttctgagtcatcaataggcatctatcccctactggtattatgcatgagaccgaaaccattcttgtgctgtgtcatgcaaacagtctatcactgcccagtttcccagcttccttttctctttttctctgtgtagccctgactgtctcggaactcactctgttaactctgtagacaggattttcagtcctagaactcacttagtagaccaagctagctttgaactgaaaatcgctgcctttgcctcccaagtgctgggattaaaggggtgtgcacttctgcttggctagcatcctattctcacagggcagtacagcttgtgttgtaggaagttttgatagggggatacattataacctattactctagaattgcttccttctttgtttttgttttgaactctgctgtcacccaggcaggcctccgttggtataacccacctgccttaccctctcaagtgctggggtcgttactatgacactatacccagctcaggtctgccatccaggtggcttcaagtaatcattgactgggaagggtcggtactacctggaattttttatttaatctttaggttggagggacaagtgatgttgaagtgaatgagaagaaagacagagttacagatgctctcaatgctacaagagcagctgttgaagaaggcattgttctaggagggggctgtgctctacttcggtgcatcccagccttggattcattaaagcctgctaatgaagatcagaagataggtaaagattctttcaaatgagtttgtggccagagaggtaattagcaatgcaccacactttacaggggattgtttcacctatggtaggattggatgtctgattgcttactaaacttttatctttataattattttatgtgtgtgtgggagtgcattttgctctcatgtctcgtgtgctgtgtgtttgcagtattctgaggggctggaaagatggctcagtggttaagagcactgactgctcttccagaggtcctgagttcaattcccagcaaccacatggtggttcacagccatctgtgatgagatctgatgccctcttgtgtgtgtctgaagacagctgtagtgttgttatatataataagtaaatttgaaaaaaaaagaaatgcagtattctgagggccagatggggtcatcagatagcttggaactggagttacattggtgctaaggattaaaccaggtcctctgaaaaagaaaccattaaccattgagccatctttggttccccaaaaagggaaaacaaaagtaagttcatgaaaatgtgtttgctttgtaggtatagaaattattaaaagagcacttaaaattcctgcaatgacgattgctaagaatgcaggtgttgaaggatctttgatagttgaaaaaattctgcagagttcctcagaggttggctatgatgccatgcttggagattttgtgaacatggtggaaaagggaatcattgatccaacaaaggtaaataaatcagcatttctaaacaatgaatgacttgctctctggtgtatggttttctttaatttttttctttttttcggagctggggaccgaacccggggccttgcctagcaagcgctctaccactgagctaaatccccaacccctttctttaatttttaattgttttactaaatttttttctaggttgtaagaactgctttactggatgctgctggggtggcctccctgctaactacagccgaagctgtagtgacagaaattcctaaagaagagaaggaccctggaatgggtgcaatgggtggaatgggagggggtatgggaggtggcatgttctaactc

SEQ ID NO: 8844 - protein, 573 aa, Rattus norvegicus
  ref <308>: DATABASE ACCESSION NUMBER: SWISS-Prot / U68562
  ref <309>: DATABASE ENTRY DATE: 2003-02-01
MLRLPTVLRQMRPVSRALAPHLTRAYAKDVKFGADARALMLQGVDLLADAVAVTMGPKGRTVIIEQSWGSPKVTKDGVTVAKSIDLKDKYKNIGAKLVQDVANNTNEEAGDGTTTATVLARSIAKEGFEKISKGANPVEIRRGVMLAVDAVIAELKKQSKPVTTPEEIAQVATISANGDKDIGNIISDAMKKVGRKGVITVKDGKTLNDELEIIEGMKFDRGYISPYFINTSKGQKCEFQDAYVLLSEKKISSVQSIVPALEIANAHRKPLVIIAEDVDGEALSTLVLNRLKVGLQVVAVKAPGFGDNRKNQLKDMAIATGGAVFGEEGLNLNLEDVQAHDLGKVGEVIVTKDDAMLLKGKGDKAHIEKRIQEITEQLDITTSEYEKEKLNERLAKLSDGVAVLKVGGTSDVEVNEKKDRVTDALNATRAAVEEGIVLGGGCALLRCIPALDSLKPANEDQKIGIEIIKRALKIPAMTIAKNAGVEGSLIVEKILQSSSEVGYDAMLGDFVNMVEKGIIDPTKVVRTALLDAAGVASLLTTAEAVVTEIPKEEKDPGMGAMGGMGGGMGGGMF

SEQ ID NO: 8845 - DNA, 1854 bp, Rattus norvegicus
  ref <308>: DATABASE ACCESSION NUMBER: EMBL / U70211
  ref <309>: DATABASE ENTRY DATE: 2000-03-04
caagatggcaggggccggggcccagctgtcagtcgccgccgccgccgcgccgcgctgcctcgcagctagcggcccggacgcccgccggagaagatgagcccccgccgccgcctgcagcccagccagacgcggaccgccgcgcccggggccggctgccccgctagcgccccgtcgcgccgcgccttcatccccggccccgtgcccgcccggcagccacgatgagcgaacagagtatctgccaagcacgggcctccgtgatggtctacgatgacaccagtaagaaatgggtaccaatcaagcctggccagcagggattcagccggatcaacatctaccacaacactgccagcaacactttcagggttgtaggggtcaagctacaggatcagcaggttgtgatcaattattcaattgtgaaagggctgaagtacaatcaggcaacacccaccttccatcagtggcgagacgcccgtcaggtctatggcttaaactttgcgagtaagggagaagcaaccacattctccaacgcgatgctctttgccctgaacatcatgaactcccaagaaggaggcccctccacacagcgtcaggtgcagaatggcccctctcctgaggagatggacatccagagaagacaagtaatggagcagcagcaccgccaggagtctctggagagaagaatctccgccacagggcccattctcccccctgggcatccgtcatcggcagccagcgccaccttctcctgtagtggacctccacctccacctccacctccagttccacctccacccacagggtctactcccccgcccccgcccccgctgcctgctggaggagcccaggggaccaaccacgatgagagctctgcatcaggactggctgctgctctggcaggagccaagctaaggagggtgcagcggccagaggatgcatctggaggctccagtcctagcgggacttcaaagtccgatgccaaccgggcaagcagtgggggaggaggaggaggcctcatggaagaaatgaacaagctgctggctaagaggagaaaggcagcctcccagacagacaagcccgctgacagaaaggaagatgagaaccaaacggaagatcctagcacctccccatccccagggagccgagccaccagccagccacctaattcctcagaggctggccgaaagccctgggaacggagcaactcggtggagaaacctgtgtcctcgttgctgtccagggtgaagcctgctgggagtgtgaatgacgtgggcctggatgccttagatttggaccggatgaaacaggagattctggaggaggtggtccgagagctccacaaggtgaaggaggagatcatagatgccatcaggcaggaactaagtgggatcagcaccacataagatggcgccagccctggaggatcttgaggagctgtgctagccccagcgaacatcgagcctgcggaagctgggatatacttaagtctcaccctgtgatacaatattaaaatgaggaaacaaacttcaactcctggattttttagtgtatctgacacagaacaccgggtctattctttttggtattttatatttgcttatttaagtgtacattcctttggtttatagagaacacccccaaatcacctgctttattagatggcttccaagttttctcctaggtgacactgttggcacctcagctggcagggagcagctgggtgcagcgtgacctttccgtgccacagagctgtcaggatgcagcacagctccagcagccacagtgtcccagtttgtccacgcagtgcgtgttatgtccacagaataaactgttcactgtccaaaaaaaaaaaaaaaa

SEQ ID NO: 8846 - protein, 393 aa, Rattus norvegicus
  ref <308>: DATABASE ACCESSION NUMBER: SWISS-Prot / AAC53322
  ref <309>: DATABASE ENTRY DATE: 2002-06-15
MSEQSICQARASVMVYDDTSKKWVPIKPGQQGFSRINIYHNTASNTFRVVGVKLQDQQVVINYSIVKGLKYNQATPTFHQWRDARQVYGLNFASKGEATTFSNAMLFALNIMNSQEGGPSTQRQVQNGPSPEEMDIQRRQVMEQQHRQESLERRISATGPILPPGHPSSAASATFSCSGPPPPPPPPVPPPPTGSTPPPPPPLPAGGAQGTNHDESSASGLAAALAGAKLRRVQRPEDASGGSSPSGTSKSDANRASSGGGGGGLMEEMNKLLAKRRKAASQTDKPADRKEDENQTEDPSTSPSPGSRATSQPPNSSEAGRKPWERSNSVEKPVSSLLSRVKPAGSVNDVGLDALDLDRMKQEILEEVVRELHKVKEEIIDAIRQELSGISTT

SEQ ID NO: 8847 - DNA, 836 bp, Homo sapiens
  ref <308>: DATABASE ACCESSION NUMBER: EMBL / BI767712
  ref <309>: DATABASE ENTRY DATE: 2001-09-27
cgatcttccttccggagcctcgtcagcatatatatcaatcaagtccactccttctgacatggctccggaaggaagatcgcgagtccggaggatggacaaagtaaggaagatgccacgggaatatggcggcggcggcggcgagtccggactaggcccgaagcgcgcgaaccgcctgatcaacataggctggtgggagtacaggactcgcctcctcagggttccctgtgctgccacttttcagccatggccacaagtgaacagagtatctgccaagcccgggcttccgtgatggtctacgatgacaccagtaagaaatgggtaccaatcaaacctggccagcagggattcagccggatcaacatctaccacaacactgccagcaacaccttcagagtcgttggagtcaagttgcaggatcagcaggttgtgatcaattattcaatcgtgaaagggctgaagtacaatcaggccacgccaaccttccaccagtggcgagatgcccgccaggtctacggcttaaactttgcaagtaaagaagaggcaaccacgttctccaatgcaatgctgtttgccctgaacatcatgaattcccaagaaggaggtgcgtgcatcctctaatgacaaagcaaccttgtatttccttccacaaatgaatggaggcagcctaacgtcatgtggcccctccagccagcgtcaggtgcagaatggcccctctcctgatgagatggacatccagagaagacaagtgatggagcagcaccagcagcagcgtcggaatctctagaaagaagaacctcggcacagggcccatcctccaccaggacatccttcatctc

SEQ ID NO: 8848 - protein, 418 aa, Homo sapiens
  ref <308>: DATABASE ACCESSION NUMBER: Refseq / NP_057421
  ref <309>: DATABASE ENTRY DATE: 2001-12-10
MATSEQSICQARASVMVYDDTSKKWVPIKPGQQGFSRINIYHNTASNTFRVVGVKLQDQQVVINYSIVKGLKYNQATPTFHQWRDARQVYGLNFASKEEATTFSNAMLFALNIMNSQEGGPSSQRQVQNGPSPDEMDIQRRQVMEQHQQQRQESLERRTSATGPILPPGHPSSAASAPVSCSGPPPPPPPPVPPPPTGATPPPPPPLPAGGAQGSSHDESSMSGLAAAIAGAKLRRVQRPEDASGGSSPSGTSKSDANRASSGGGGGGLMEEMNKLLAKRRKAASQSDKPAEKKEDESQMEDPSTSPSPGTRAASQPPNSSEAGRKPWERSNSVEKPVSSILSRTPSVAKSPEAKSPLQSQPHSRMKPAGSVNDMALDAFDLDRMKQEILEEVVRELHKVKEEIIDAIRQELSGISTT

SEQ ID NO: 8849 - DNA, 206 bp, Rattus norvegicus
  ref <308>: DATABASE ACCESSION NUMBER: EMBL / U70270
  ref <309>: DATABASE ENTRY DATE: 2000-03-04
cccctccgctccagactccaagctcctgctcccagcctactgacctagctctccccagcctgctctgtgatattgtcacatatgctgacctcctctcttctgcagattcctacacacacaacaacgtgtgagggaggaagaagaaagatgttttggggagtgactttctttttagatactgtacagtaagttggtcagaataaaag

SEQ ID NO: 8850 - DNA, 1600 bp, Rattus norvegicus
  ref <308>: DATABASE ACCESSION NUMBER: EMBL / U70779
  ref <309>: DATABASE ENTRY DATE: 2000-03-04
gggaggggggcggggaccacggcgacgacgcgggggacggcggggccccgcggggagaggggagggcgggcccgggcggaaaggagggggtctccccggacgtgggaggggggcggcggcgcctcgtccagccgcggcgcgcgcccagccccgcctacagaccccagccggccactccagctctacacccgtctcccagccagaggtgctgcatgaggggccgcaggggcgatcgcatgaccatcaacatccaggagcacatggccatcaacgtgtgccctggacccatcaggcccatccgccagatctccgactacttccctcgcagggggccaggaccagagggtggcggcggcggcaggggcttcggggaagccccagctcatctggcccctctggctctggccccccctgcggctctccttggggccactacacccgacgatggagctgaggtagacagctacgactcggatgataccactgccctgggcacgctggaatttgaccttctctatgatcaggcttcctgcatgctgcactgtagaatcctcagggccaagggcctcaagcccatggatttcaacggcctggctgacccctatgtaaagctgcacctcctgccaggagcctgcaaggccaataagctaaaaaccaagacacagaggaacacactgaacccagtgtggaacgaggagctgacgtacagtggaatcacagatgacgacatcacccacaaggtgctcaggatctcggtctgtgatgaggacaagctgagtcacaatgaatttattggggagatccgagtgcccctccgccgcctcaagccttcacagaagaagcattttaacatctgccttgagcgtcaggtcccgcttccttcgccctcttcaatgtctgcggcgctgaggggcatatcctgttacctgaaggagctagagcaggcagagcagggacctgggctgttggaagagcgcgggcgcatcctgctgagcctcagctacagctctcggcggcatgggctgctggtgggcattgttcgctgtgctcacctggctgcaatggatgttaacggctactctgacccttatgtgaagacgtacttgagaccagacgtggataagaaatccaagcataagacgtgtgtaaagaagaagacgctgaacccggaatttaatgaggaattcttttatgagatggaactctccactctggctaccaagaccctggaagtcacagtctgggactacgacattggcaaatccaatgacttcataggtggtgtgtctctggggccaggagcccggggagaggcccagaaacactggagagactgtctacatcagccggacacagcagtggagcgctggcataccctgaccagcgagctgcccccagcagcaggggcgttgccgttggcctgaacagactgcagctgcccagcacaggccctctgcggccgggtccagtacccaaccttcgcacgagtgtgttgcacgtttacatgggtgggacgccctgccccacactacctgtcttatttttgtgagtttctgtgaccgtgggtctatcttcttgtgagggattgtggagagctata

SEQ ID NO: 8851 - protein, 403 aa, Rattus norvegicus
  ref <308>: DATABASE ACCESSION NUMBER: SWISS-Prot / AAB47748
  ref <309>: DATABASE ENTRY DATE: 2003-02-01
MRGRRGDRMTINIQEHMAINVCPGPIRPIRQISDYFPRRGPGPEGGGGGRGFGEAPAHLAPLALAPPAALLGATTPDDGAEVDSYDSDDTTALGTLEFDLLYDQASCMLHCRILRAKGLKPMDFNGLADPYVKLHLLPGACKANKLKTKTQRNTLNPVWNEELTYSGITDDDITHKVLRISVCDEDKLSHNEFIGEIRVPLRRLKPSQKKHFNICLERQVPLPSPSSMSAALRGISCYLKELEQAEQGPGLLEERGRILLSLSYSSRRHGLLVGIVRCAHLAAMDVNGYSDPYVKTYLRPDVDKKSKHKTCVKKKTLNPEFNEEFFYEMELSTLATKTLEVTVWDYDIGKSNDFIGGVSLGPGARGEAQKHWRDCLHQPDTAVERWHTLTSELPPAAGALPLA

SEQ ID NO: 8852 - DNA, 1621 bp, Homo sapiens; identical to SEQ ID NO: 5174
  ref <308>: DATABASE ACCESSION NUMBER: Refseq / NM_003586
  ref <309>: DATABASE ENTRY DATE: 2002-05-16

SEQ ID NO: 8853 - protein, 400 aa, Homo sapiens; identical to SEQ ID NO: 5175
  ref <308>: DATABASE ACCESSION NUMBER: Refseq / NP_003577
  ref <309>: DATABASE ENTRY DATE: 2002-05-16

SEQ ID NO: 8854 - DNA, 1742 bp, Rattus norvegicus
  ref <308>: DATABASE ACCESSION NUMBER: EMBL / U72350
  ref <309>: DATABASE ENTRY DATE: 2000-03-04
cacagagcagacccagtgagtgagcaggtgttttggacaatggactggttgagcccatctctattataaaaatgtctcagagcaaccgggagctggtggttgactttctctcctacaagctctcccagaaaggatacagctggagtcagtttagcgatgtcgaagagaacaggactgaagccccagaagaaactgaaccagaaagggagacccccagtgccatcaatggcaacccatcctggcacctggcggatagccccgcggtgaatggagccactggccacagcagcagtttggatgcgcgggaggtaatccccatggcagcagtgaagcaagcgctgagagaggctggcgatgagtttgaactgcggtaccggagagcattcagtgatctaacatcccagcttcatataaccccagggacagcatatcagagctttgaacaggtagtgaatgaactctttcgggatggggtaaactggggtcgcattgtggccttcttctcctttggcggggcactgtgcgtggaaagcgtagacaaggagatgcaggtattggtgagtcggattgcaagttggatggccacctacctgaatgaccacctagagccttggatccaggagaacggcggctgggacacttttgtggatctctacgggaacaatgcagcagccgagagccggaaaggccaggagcgtttcaaccgctggttcctgacgggcatgactgtggctggtgtagttctgctgggctcactcttcagtcggaagtgaccagacactgaccgtccactcacctctcacctcccaccttgcccccaccacaactctctcttcagccaccattgctaccaggagaaccactacatgcaactcacgccccttcccctattatagggttgggcctagacggagtcccctgcagttagctttctagaatctaccacgcttctgtgaaagccaccttccccccacatctcagttcccttggcctcaaaactcacaaggtttttcctcagatcagctccttggaggctggcaggagtgggaaggggtgtgctagagggagaagagcctgccttgttggtgggaccctgattacccctgagcctctcgggaatgcttttctggcagggagctggagagctctctaaacctcttcccccagagactagattgccttggttttgatgtgtgtggcctcagaattgatccatttcccattctgctgtgtccctggggcggctcctccttcccatctccacccccccccccccagagccattgagtgaggtgcttttagcccttttgactaactaaaaatgcaggctgcttgggataacgaggcaaggacctcctccccacctgtggcctggccaagcccccactcctggtctgaatgttctcctgaggcctctggctagagtccagccccacccaggaggagggacggagctgcggaaagtccaccctgcgagagcctgagcggctcttgcggcttagcaccaccccagatccttctccacccctcccctggctccatggtgaccatgactgagggaccaactgggcccacgctaggtgccccagagctgttaatgacttcagctgcctcacttcctgcaagatcagcctgtggcatctttgccttgggtgctggccacagggtccagggactctggccttagcccagaagtgagaggaagcttacagcgcagctatgggagccctgggggcttccct

SEQ ID NO: 8855 - protein, 233 aa, Rattus norvegicus; identical to SEQ ID NO: 8420
  ref <308>: DATABASE ACCESSION NUMBER: SWISS-Prot / P53563
  ref <309>: DATABASE ENTRY DATE: 2002-06-15

SEQ ID NO: 8856 - DNA, 2472 bp, Rattus norvegicus
  ref <308>: DATABASE ACCESSION NUMBER: EMBL / U72497
  ref <309>: DATABASE ENTRY DATE: 2000-03-04
ggtttgtgcgagccgagttctctcgggtggcggtcggctgcaggagatcatggtgctgagcgaagtgtggaccacgctgtctggggtctccggggtttgcctagcctgcagcttgttgtcggcggcggtggtcctgcgatggaccgggcgccagaaggcccggggcgcggcgaccagggcgcggcagaagcagcgagccagcctggagaccatggacaaggcggtgcagcgcttccggctgcagaatcctgacctggactcggaggccttgctgaccctgcccctactccaactggtacagaagttacagagtggagagctgtccccagaggctgtgttctttacttacctgggaaaggcctgggaagtgaacaaagggaccaactgcgtgacctcctatctgaccgactgtgagactcagctgtcccaggccccacggcagggcctgctctatggtgtccctgtgagcctcaaggaatgcttcagctacaagggccacgactccacactgggcttgagcctgaatgagggcatgccatcggaatctgactgtgtggtggtgcaagtgttgaagctgcagggagctgtgccctttgtgcataccaatgtcccccagtccatgttaagctttgactgcagtaaccctctctttggccagaccatgaacccatggaagtcctccaagagcccaggaggttcctcagggggtgagggggctctcattggatctggaggttcccctctgggtttaggcactgacattggcggcagcatccggttcccttctgccttctgcggcatctgtggcctcaagcctactggcaaccgcctcagcaagagtggcctgaagggctgtgtctatggacagacggcagtgcagctttctcttggccccatggcccgggatgtggagagcctggcgctatgcctgaaagctctactgtgtgagcacttgttcaccttggaccctaccgtgcctcccttgcccttcagagaggaggtctatagaagttctagacccctgcgtgtggggtactatgagactgacaactataccatgcccagcccagctatgaggagggctctgatagagaccaagcagagacttgaggctgctggccacacgctgattcccttcttacccaacaacataccctacgccctggaggtcctgtctgcgggcggcctgttcagtgacggtggccgcagttttctccaaaacttcaaaggtgactttgtggatccctgcttgggagacctgatcttaattctgaggctgcccagctggtttaaaagactgctgagcctcctgctgaagcctctgtttcctcggctggcagcctttctcaacagtatgcgtcctcggtcagctgaaaagctgtggaaactgcagcatgagattgagatgtatcgccagtctgtgattgcccagtggaaagcgatgaacttggatgtgctgctgacccccatgttgggccctgctctggatttgaacacaccgggcagagccacaggggctatcagctacaccgttctctacaactgcctggacttccctgcgggggtggtgcctgtcaccactgtgaccgccgaggacgatgcccagatggaactctacaaaggctactttggggatatctgggacatcatcctgaagaaggccatgaaaaatagtgtcggtctgcctgtggctgtgcagtgcgtggctctgccctggcaggaagagctgtgtctgaggttcatgcgggaggtggaacagctgatgacccctcaaaagcagccatcgtgagggtcgttcatccgccagctctggaggacctaaggcccatgcgctgtgcactgtagccccatgtattcaggagccaccacccacgagggaacgcccagcacagggaagaggtgtctacctgccctcccctggactcctgcagccacaaccaagtctggaccttcctccccgttatggtctactttccatcctgattccctgctttttatggcagccagcaggaatgacgtgggccaaggatcaccaacattcaaaaacaatgcgtttatctattttctgggtatctccattagggccctgggaaccagagtgctgggaaggctgtccagaccctccagagctggctgtaaccacatcactctcctgctccaaagcctccctagttctgtcacccacaagatagacacagggacatgtccttggcacttgactcctgtccttcctttcttattcagattgaccccagccttgatggaccctgcccctgcacttccttcctcagtccacctctctgccgacacgccctttttatggctcctctatttgttgtggagacaaggtttctctcagtagccctggctgtccaggacctcactctgtagatgaggctggctttcaactcacaaggctgcctgcctgggtgctgggattaaaggcgtatgccaccacaaagaaaaaaaaaa

SEQ ID NO: 8857 - protein, 579 aa, Rattus norvegicus
  ref <308>: DATABASE ACCESSION NUMBER: SWISS-Prot / P97612
  ref <309>: DATABASE ENTRY DATE: 2002-06-15
MVLSEVWTTLSGVSGVCLACSLLSAAVVLRWTGRQKARGAATRARQKQRASLETMDKAVQRFRLQNPDLDSEALLTLPLLQLVQKLQSGELSPEAVFFTYLGKAWEVNKGTNCVTSYLTDCETQLSQAPRQGLLYGVPVSLKECFSYKGHDSTLGLSLNEGMPSESDCVVVQVLKLQGAVPFVHTNVPQSMLSFDCSNPLFGQTMNPWKSSKSPGGSSGGEGALIGSGGSPLGLGTDIGGSIRFPSAFCGICGLKPTGNRLSKSGLKGCVYGQTAVQLSLGPMARDVESLALCLKALLCEHLFTLDPTVPPLPFREEVYRSSRPLRVGYYETDNYTMPSPAMRRALIETKQRLEAAGHTLIPFLPNNIPYALEVLSAGGLFSDGGRSFLQNFKGDFVDPCLGDLILILRLPSWFKRLLSLLLKPLFPRLAAFLNSMRPRSAEKLWKLQHEIEMYRQSVIAQWKAMNLDVLLTPMLGPALDLNTPGRATGAISYTVLYNCLDFPAGVVPVTTVTAEDDAQMELYKGYFGDIWDIILKKAMKNSVGLPVAVQCVALPWQEELCLRFMREVEQLMTPQKQPS

SEQ ID NO: 8858 - DNA, 1056 bp, Homo sapiens
  ref <308>: DATABASE ACCESSION NUMBER: EMBL / AL050372
  ref <309>: DATABASE ENTRY DATE: 2000-02-18
cggaggcagcatccgcttcccctcctccttctgcggcatctgcggcctcaagcccacagggaaccgcctcaggtctacaccagctctcagcccctgcgtgtggggtactatgagactgacaactataccatgccctccccggccatgaggcgggccgtgctggagaccaaacagagccttgaggctgcggggcacacgctggttcccttcttgccaagcaacataccccatgctctggagaccctgtcaacaggtgggctcttcagtgatggtggccacaccttcctacagaacttcaaaggtgatttcgtggacccctgcctgggggacctggtctcaattctgaagcttccccaatggcttaaaggactgctggccttcctggtgaagcctctgctgccaaggctgtcagctttcctcagcaacatgaagtctcggtgtaccgcaaaaccgtgattgcccagtggagggcgctggacctggatgtggtgctgacccccatgctggcccctgctctggacttgaatgccccaggcagggccacaggggtggtgcctgtcaccacggtgactgctgaggacgaggcccagatggaacattacaggggctactttggggatatctgggacaagatgctgcagaagggcatgaagaagagtgtggggctgccggtggccgtgcagtgtgtggctctgccctggcaagaagagttgtgtctgcggttcatgcgggaggtggagcgactgatgacccctgaaaagcagtcatcctgatggctctggctccagaggacctgagactcacactctctgcagcccagcctagtcagggcacagctgccctgctgccacagcaaggaaatgtcctgcatggggcagaggcttccgtgtcctctcccccaaccccctgcaagaagcgccgactccctgagtctggacctccatccctgctctggtcccctctcttcgtcctgatccctccacccccatgtggcagcccatgggtatgacataggccaaggcccaactaacagtcaagaaacagctaaaaaaaaaa

SEQ ID NO: 8859 - protein, 579 aa, Homo sapiens
  ref <308>: DATABASE ACCESSION NUMBER: SWISS-Prot / O00519
  ref <309>: DATABASE ENTRY DATE: 2002-06-15
MVQYELWAALPGASGVALACCFVAAAVALRWSGRRTARGAVVRARQKQRAGLENMDRAAQRFRLQNPDLDSEALLALPLPQLVQKLHSRELAPEAVLFTYVGKAWEVNKGTNCVTSYLADCETQLSQAPRQGLLYGVPVSLKECFTYKGQDSTLGLSLNEGVPAECDSVVVHVLKLQGAVPFVHTNVPQSMFSYDCSNPLFGQTVNPWKSSKSPGGSSGGEGALIGSGGSPLGLGTDIGGSIRFPSSFCGICGLKPTGNRLSKSGLKGCVYGQEAVRLSVGPMARDVESLALCLRALLCEDMFRLDPTVPPLPFREEVYTSSQPLRVGYYETDNYTMPSPAMRRAVLETKQSLEAAGHTLVPFLPSNIPHALETLSTGGLFSDGGHTFLQNFKGDFVDPCLGDLVSILKLPQWLKGLLAFLVKPLLPRLSAFLSNMKSRSAGKLWELQHEIEVYRKTVIAQWRALDLDVVLTPMLAPALDLNAPGRATGAVSYTMLYNCLDFPAGVVPVTTVTAEDEAQMEHYRGYFGDIWDKMLQKGMKKSVGLPVAVQCVALPWQEELCLRFMREVERLMTPEKQSS

SEQ ID NO: 8860 - DNA, 1070 bp, Rattus norvegicus
  ref <308>: DATABASE ACCESSION NUMBER: EMBL / U72741
  ref <309>: DATABASE ENTRY DATE: 1997-09-12
aagagatggctttcttcagcacccagcctccatacatgaacccagtcatcccctttactggaataatccaaggagggttgcagaacggacttcagatcaccctccaggggaccgtccacccttttccaaataggattgcggtgaactttcagactggcttcagtggaaatgacattgccttccacttcaatccccggtttgaggaaggaggatatgtggtttgcaacacaaagcagaatggaaagtgggggcctgaggagaggaagatgcagatgcccttccagaaggggatgccctttgagctttgcttcctggtacagaggtcggaattcaaggtgatggtgaacaagaacttctttgtacagtactcacaccgcgtgccctaccacctcgtggacaccatttcggtctcgggatgcttgcacctgtccttcatcaacttccagaactccactgcagcccctgtccagcctgtcttctccacaatgcaattctctcagccagtccagttcccacggatgcccaaggggcgcaaacagcgaactcagggctttcagcctgccctccaggcacccgtggctcaaactatcatccacacagttcacagcatccctggacagatgctctctactcctggaatccctcctatggcataccccaccccagcctatactatacctttcttcaccagcatcccaaatgggttttacccatccaagtccatcaacatatcaggcgtggtcttgccagatgctaagaggttccatatcaaccttcgctgtgggggtgacattgctttccacctgaacccccgtttcaatgagaaggttgtggtccgaaacactcagatcaacaactcctgggggcccgaggagcgaagcctgcctgggagaatgcccttcaatcgtggccagagtttctcagtgtggatcttatgtgaaggtcactgcttcaaggtggccgtggatggtcagcatatttgtgaatattaccaccgcctgaagaacttgccggatatcaacactctagaggtggccggtgatatccagctgacacacgtgcagacctag

SEQ ID NO: 8861 - protein, 354 aa, Rattus norvegicus
  ref <308>: DATABASE ACCESSION NUMBER: SWISS-Prot / P97840
  ref <309>: DATABASE ENTRY DATE: 2001-10-16
MAFFSTQPPYMNPVIPFTGIIQGGLQNGLQITLQGTVHPFPNRIAVNFQTGFSGNDIAFHFNPRFEEGGYVVCNTKQNGKWGPEERKMQMPFQKGMPFELCFLVQRSEFKVMVNKNFFVQYSHRVPYHLVDTISVSGCLHLSFINFQNSTAAPVQPVFSTMQFSQPVQFPRMPKGRKQRTQGFQPALQAPVAQTIIHTVHSIPGQMLSTPGIPPMAYPTPAYTIPFFTSIPNGFYPSKSINISGVVLPDAKRFHINLRCGGDIAFHLNPRFNEKVVVRNTQINNSWGPEERSLPGRMPFNRGQSFSVWILCEGHCFKVAVDGQHICEYYHRLKNLPDINTLEVAGDIQLTHVQT

SEQ ID NO: 8862 - DNA, 440 bp, Homo sapiens
  ref <308>: DATABASE ACCESSION NUMBER: EMBL / AA810306
  ref <309>: DATABASE ENTRY DATE: 2000-03-03
ttttttttttttgttaagtcgttccctctacaaaggacttcctagtgggtgtgaaaggcagcggtggccacagaggcggcggagagatggccttcagcggttcccaggctccctacctgagtccagctgtccccttttctgggactattcaaggaggtctccaggacggacttcagatcactgtcaatgggaccgttctcagctccagtggaaccaggtttgctgtgaactttcagactggcttcagtggaaatgacattgccttccacttcaaccctcggtttgaagatggagggtacgtggtgtgcaacacgaggcagaacggaagctgggggcccgaggagaggaagacacacatgcctttccagaaggggatgccctttgacctctgcttcctggtggcgagctcagatttcaaggtgatggtgaacgggatcctc

SEQ ID NO: 8863 - protein, 355 aa, Homo sapiens
  ref <308>: DATABASE ACCESSION NUMBER: SWISS-Prot / O00182
  ref <309>: DATABASE ENTRY DATE: 2002-06-15
MAFSGSQAPYLSPAVPFSGTIQGGLQDGLQITVNGTVLSSSGTRFAVNFQTGFSGNDIAFHFNPRFEDGGYVVCNTRQNGSWGPEERKTHMPFQKGMPFDLCFLVQSSDFKVMVNGILFVQYFHRVPFHRVDTISVNGSVQLSYISFQNPRTVPVQPAFSTVPFSQPVCFPPRPRGRRQKPPGVWPANPAPITQTVIHTVQSAPGQMFSTPAIPPMMYPHPAYPMPFITTILGGLYPSKSILLSGTVLPSAQRFHINLCSGNHIAFHLNPRFDENAVVRNTQIDNSWGSEERSLPRKMPFVRGQSFSVWILCEAHCLKVAVDGQHLFEYYHRLRNLPTINRLEVGGDIQLTHVQT

SEQ ID NO: 8864 - DNA, 5249 bp, Rattus norvegicus
  ref <308>: DATABASE ACCESSION NUMBER: EMBL / U72995
  ref <309>: DATABASE ENTRY DATE: 2000-03-04
gaattctcgcacgaggcgccggctcgccgcggcgctgggctaggaagcgacgggcgcttcgcggttcggagacgtccggcgggcctggcaggttcctcggagagtagattttatcaagattcctccctggaacgctggctccttgctcagtgccctgaagtctctctgcgatgaactgatacattggaaccatggtgcaaaagaagttctgccctcggttacttgactatctagtgatcgtaggggccaggcatccaagcagtgacagtgtggctcagactcctgaacttctgcggaggtacccactagaggaccacccggagtttcccctgcccccagatgtggtgttcttctgccagccagagggatgtctgagcgtgcggcaacggcgcatgagcctccgagatgatacctcttttgtcttcaccctaaccgataaggacactggagtcacccgttatggcatctgtgtcaacttctaccgttcctttcaaaagcgaatgccaaaggaaaaggcggaaggcggagcaggaccccgtgggaaggaaggagctcatgccccctgtgcctcagaagaggccgccaccgagagctcagagagtggctcaaccttgcagcctcctagtgctgactccactcctgacgtaaaccagtctcctcggggcaaacgtagggcaaaagcaggcaaccgctcccgaaacagtaccctgacatccctgtgtgtgcttagccactaccctttcttctctaccttcagagagtgtctgtatactctcaaacgtctggtagactgctgtagtgaacggctcctaggcaagaaaccgggcatccctcgaggtgtacaaagggacaccatgtggcgaatctttactggatcactgctagtggaggagaagtccagtgcccttctgcatgaccttcgagagatcgaggcctggatctatcggttgctacgctccccggtgcctgtctctgggcagaagcgagtggacattgaggtcctaccccaggaagtgcagcaggccctgacatttgctcttccagatccatcccggttcaccctagtagatttccctcttcaccttcccttggaacttctgggtgtagatgcttgtcttcaggtgctaacctgcatcctgttggagcacaaggtggtgctacagtctcgagactacaacgcactctccatgtctgtgatggcgtttgtggcaatgatctaccccctggagtacatgttccctgtcatcccgctgcttcccacctgcatggcttcggcagagcagctactcttggctccaaccccatatatcattggagtccctgccagctttttcctctataagctagacttcaaaatgcctgatgacgtgtggctggtggatctggacagcaacagggtgattgcccccaccaatgcagaagtgctacccatcctgccagaaccggaatcattagagctgaaaaaacacttaaagcaggctctagccagcatgagtctcaacacccagcccattcttaatctggagaaattccatgagggccaggagacaccacttctcttgggaaggttttctaatgaccttcagtctacaccttccactgaattcaacccactcatttatggcaatgatgtagattcagtcgatgttgcaacgagagtggccatggttcgtttcttcaactctgctaacgtgctgcagggctttcagatgcacacacgtaccctgcgactcttcccccggcccgtggttgccttccaagctggctcctttctggcctcacgcccccggcagaccccctttgctgagaaactggccaggactcaagccgtggagtactttggagaatggatcctgaacccttctaactatgccttccagcggattcacaacaatacgtttgatccagccctcattggtgacaagcctaagtggtacgctcaccagctgcagcccattcactatcgagtctatgacagcaattctcagctggctgaggccctgagtgtgccaccggagcgtgattctgagtctgaccccactgatgacagtggcagtgacagcatggactatgatgactcaagctcttcttactcctccctgggggacttcgtcagtgaaatgatgaagtgtgacatcaatggcgacactcccaatgtggatcctctgacgcatgcggccctgggagacgccagtgaagtggagattgatgagctgcagccccagaaggagggagaggagcctggcccagacagtgagaactctcaggagaaccttcccctgcgctccagctccagcaccactgccagcagtagccctagcaccatcgtccacggcgcccactctgaacctgctgattctacagaggtgggagataaggcagcaacaggcatctccaagcccctccctcctgtgcctcccagcatttgcaaatctactgtggacaggagacagacagagactggagaggggtcagtgtgccagcgaacctacgaccatccatattttgagccccaatatggctcccccgctgaggaagatgatgacgagcagggagagagctacacgccccggttcagccaacatgccagtggcagtcgggctcaaaagctgctgcggcccaacagcttgaagctggccagtgactcagacgcagagtcagactcccgagcaagctctcccaactccaccgtctctaacaacagcaccgagggcttcgggggcatcatgtcttttgctagcagcctgtatcggaaccatagtacaagcttcagcctttcaaacctcacactgcccaccaaaggtgcccgagagaagactacaccattccccagcctgaaaggaaacaggagggccttagtggaccagaaatcatctgtcattaaacacagcccaactgtgaaaagagaacctccatcaccgcagggccggtccagcaattctagcgagaaccaacagttcctgaaggaggtggtccacagtgtgctggatggccagggagtcggctggctcaacatgaaaaaggtgcgccggctgctggagagtgagcagctccgagtctttgtactgagcaagctgagtcgtgcagtgcagtcagaggatgatgcccgacaggatgtcatccaggatgtggagatcagtcggaaggtgtacaagggaatgctagacctcctcaagtgcacagtcctcagcctcgagcagtcctatgcccatgctggtctgggtggcatggccagcatctttgggcttttggagattgcccagacccattactatagtaaagaaccagacaaacgcaagagaagtccaacagagaatgtaaataccccagttggcaaggatcctggtctggctgggcggggggacccaaaggcaatggctcagctaagggtccctcagctgggtcctcgggcaccaagtgctacaggaaggggtcctaaagaactggacaccagaagtttaaaggaagagaattttgtagcgtctgtgggaccagaggtcatcaagcctgtctttgacctgggtgagactgaggagaaaaagtcccagatcagcgcagacagtggtgtgagcctggcatctgcttcccagaggactgatcaagactctgtcatcggtgtgagtccagctgttatgatccgaagctcaagtcaggattctgaagtgagtaacagttcaggagagaccctcggagcagacagtgacctgagcagcaatgcaggtgatgggccaggaggcgaaggcagtgcccacttggcaagttctcgggctactctgtctgacagtgaaattgaaaccaattctgctacaagcaccatctttggtaaagcccatagcttgaagccaaaggagaagccggctagtagtccagttcgctcttccgaagatgtaagccagcgagtctatctctatgagggactactaggaagggacaaaggatccatgtgggaccagttagaggatgctgctatggagaccttttctataagcaaagagcggtctactttatgggaccaaatgcagttctgggaagatgcgttcctagatgctgtgatgttggaaagagaaggaatgggtatggaccagggccctcaggaaatgatcgacaggtacctgtccctaggagagcatgaccggaagcgcctggaggatgatgaagatcgcttactggccacactcttacacaacctcatatcctatatgctcctgatgaaggtgaacaagaacgacatcaggaagaaagtacggcgcctaatgggaaagtcccacgttgggctggtgtacagtcaacaaatcaatgaggtgctcgatcagctgaccaacctgaatgggcgtgatctctccatccgatccagtggcagcaggcacatgaagaagcagacgttcgttgtgcacgcagggacggacacaaatggagatatctttttcatggaagtgtgtgacgactgtgtggtcttacgtagtaacatcgggacagtgtacgagcgctggtggtatgagaagcttatcaacatgacctactgtcccaagaccaaggtcctgtgcttatggcgtagaaatggctctgagacgcagctcaacaagttctataccaagaagtgtcgggagctgtactactgtgtgaaggacagcatggagcgtgcggctgcccggcaacaaagcatcaaacccgggcctgaactaggtggtgagttccctgtgcaggacatgaagactggagagggcggcttgcttcaggtcaccctggaagggatcaatctcaagttcatgcataaccaggttttcatagagctgaatcacattaaaaagtgcaatacagttcgaggcgtctttgtcctggaagaatttgttcctgaaattaaagaagtggtgagccacaagtacaagactccaatggcccacgagatctgctattctgtgttgtgtctcttctcgtatgtggccgcagttcgtagcagtgaagaagacctccgaaccccacctcggcctgtctctagctgatagagaggggttacacagctgggccagcccaggggtcacccctcacctcttgctgctcctaagcgctgaagctgcctcgactgagacagagactctgtgtgtgtgtgtgtgtgtgttctctgcaaggtgttctctgcaagctccttcctgcggttgagctggtttcgttttatgtctgagtgtgtccttgtgttcatctgtcatggggctaagctagtctcattaccttctcttcctacaatagcagac

SEQ ID NO: 8865 - protein, 1602 aa, Rattus norvegicus
  ref <308>: DATABASE ACCESSION NUMBER: SWISS-Prot / AAC53149
  ref <309>: DATABASE ENTRY DATE: 2002-06-01
MVQKKFCPRLLDYLVIVGARHPSSDSVAQTPELLRRYPLEDHPEFPLPPDVVFFCQPEGCLSVRQRRMSLRDDTSFVFTLTDKDTGVTRYGICVNFYRSFQKRMPKEKAEGGAGPRGKEGAHAPCASEEAATESSESGSTLQPPSADSTPDVNQSPRGKRRAKAGNRSRNSTLTSLCVLSHYPFFSTFRECLYTLKRLVDCCSERLLGKKPGIPRGVQRDTMWRIFTGSLLVEEKSSALLHDLREIEAWIYRLLRSPVPVSGQKRVDIEVLPQEVQQALTFALPDPSRFTLVDFPLHLPLELLGVDACLQVLTCILLEHKVVLQSRDYNALSMSVMAFVAMIYPLEYMFPVIPLLPTCMASAEQLLLAPTPYIIGVPASFFLYKLDFKMPDDVWLVDLDSNRVIAPTNAEVLPILPEPESLELKKHLKQALASMSLNTQPILNLEKFHEGQETPLLLGRFSNDLQSTPSTEFNPLIYGNDVDSVDVATRVAMVRFFNSANVLQGFQMHTRTLRLFPRPVVAFQAGSFLASRPRQTPFAEKLARTQAVEYFGEWILNPSNYAFQRIHNNTFDPALIGDKPKWYAHQLQPIHYRVYDSNSQLAEALSVPPERDSESDPTDDSGSDSMDYDDSSSSYSSLGDFVSEMMKCDINGDTPNVDPLTHAALGDASEVEIDELQPQKEGEEPGPDSENSQENLPLRSSSSTTASSSPSTIVHGAHSEPADSTEVGDKAATGISKPLPPVPPSICKSTVDRRQTETGEGSVCQRTYDHPYFEPQYGSPAEEDDDEQGESYTPRFSQHASGSRAQKLLRPNSLKLASDSDAESDSRASSPNSTVSNNSTEGFGGIMSFASSLYRNHSTSFSLSNLTLPTKGAREKTTPFPSLKGNRRALVDQKSSVIKHSPTVKREPPSPQGRSSNSSENQQFLKEVVHSVLDGQGVGWLNMKKVRRLLESEQLRVFVLSKLSRAVQSEDDARQDVIQDVEISRKVYKGMLDLLKCTVLSLEQSYAHAGLGGMASIFGLLEIAQTHYYSKEPDKRKRSPTENVNTPVGKDPGLAGRGDPKAMAQLRVPQLGPRAPSATGRGPKELDTRSLKEENFVASVGPEVIKPVFDLGETEEKKSQISADSGVSLASASQRTDQDSVIGVSPAVMIRSSSQDSEVSNSSGETLGADSDLSSNAGDGPGGEGSAHLASSRATLSDSEIETNSATSTIFGKAHSLKPKEKPASSPVRSSEDVSQRVYLYEGLLGRDKGSMWDQLEDAAMETFSISKERSTLWDQMQFWEDAFLDAVMLEREGMGMDQGPQEMIDRYLSLGEHDRKRLEDDEDRLLATLLHNLISYMLLMKVNKNDIRKKVRRLMGKSHVGLVYSQQINEVLDQLTNLNGRDLSIRSSGSRHMKKQTFVVHAGTDTNGDIFFMEVCDDCVVLRSNIGTVYERWWYEKLINMTYCPKTKVLCLWRRNGSETQLNKFYTKKCRELYYCVKDSMERAAARQQSIKPGPELGGEFPVQDMKTGEGGLLQVTLEGINLKFMHNQVFIELNHIKKCNTVRGVFVLEEFVPEIKEVVSHKYKTPMAHEICYSVLCLFSYVAAVRSSEEDLRTPPRPVSS

SEQ ID NO: 8866 - DNA, 5942 bp, Homo sapiens
  ref <308>: DATABASE ACCESSION NUMBER: EMBL / AB002356
  ref <309>: DATABASE ENTRY DATE: 2001-10-10
ctggcgcccgctcggagcggcgccgcgctggggagcgactgacgccccgctgccgggggacgtcgggctgggcctggccagtcccccagagcttgggagacttcgattttcagaattcctcctgggaatgctgactccttgcttggtgccctgatgcttctctgagataaactgatgaattggaaccatggtgcaaaagaagaagttctgtcctcggttacttgactatctagtgatcgtaggggccaggcacccgagcagtgatagcgtggcccagactcctgaattgctacggcgataccccttggaggatcacactgagtttcccctgcccccagatgtagtgttcttctgccagcccgagggctgcctgagcgtgcggcagcggcgcatgagccttcgggatgatacctcttttgtcttcaccctcactgacaaggacactggagtcacgcgatatggcatctgtgttaacttctaccgctccttccaaaagcgaatctctaaggagaagggggaaggtggggcagggtcccgtgggaaggaaggaacccatgccacctgtgcctcagaagagggtggcactgagagctcagagagtggctcatccctgcagcctctcagtgctgactctacccctgatgtgaaccagtctcctcggggcaaacgccgggccaaggcggggagccgctcccgcaacagtactctcacgtccctgtgcgtgctcagccactaccctttcttctccaccttccgagagtgtttgtatactctcaagcgcctggtggactgctgtagtgagcgccttctgggcaagaaactgggcatccctcgaggcgtacaaagggacaccatgtggcggatctttactggatcgctgctggtagaggagaagtcaagtgcccttctgcatgaccttcgagagattgaggcctggatctatcgattgctgcgctccccagtacccgtctctgggcagaagcgagtagacatcgaggtcctaccccaagagctccagccagctctgacctttgctcttccagacccatctcgattcaccctagtggatttcccactgcaccttcccttggaacttctaggtgtggacgcctgtctccaggtgctaacctgcattctgttagagcacaaggtggtgctacagtcccgagactacaatgcactctccatgtctgtgatggcattcgtggcaatgatctacccactggaatatatgtttcctgtcatcccgctgctacccacctgcatggcatcagcagagcagctgctgttggctccaaccccgtacatcattggggttcctgccagcttcttcctctacaaactggacttcaaaatgcctgatgatgtatggctagtggatctggacagcaatagggtgattgcccccaccaatgcagaagtgctgcctatcctgccagaaccagaatcactagagctgaaaaagcatttaaagcaggccttggccagcatgagtctcaacacccagcccatcctcaatctggagaaatttcatgagggccaggagatcccccttctcttgggaaggccttctaatgacctgcagtccacaccgtccactgaattcaacccactcatctatggcaacgatgtggattctgtggatgttgcaaccagggttgccatggtacggttcttcaattccgccaacgtgctgcagggatttcagatgcacacgcgtaccctgcgcctctttcctcggcctgtggtagcttttcaagctggctcctttctagcctcacgtccccggcagactccttttgccgagaaattggccaggactcaggctgtggagtactttggggaatggatccttaaccccaccaactatgcctttcagcgaattcacaacaatatgtttgatccagccctgattggtgacaagccaaagtggtatgctcatcagctgcagcctatccactatcgcgtctatgacagcaattcccagctggctgaggccctgagtgtaccaccagagcgggactctgactccgaacctactgatgatagtggcagtgatagtatggattatgacgattcaagctcttcttactcctcccttggtgactttgtcagtgaaatgatgaaatgtgacattaatggtgatactcccaatgtggaccctctgacacatgcagcactgggggatgccagcgaggtggagattgacgagctgcagaatcagaaggaagcagaagagcctggcccagacagtgagaactctcaggaaaaccccccactgcgctccagctctagcaccacagccagcagcagccccagcactgtcatccacggagccaactctgaacctgctgactctacggagatggatgataaggcagcagtaggcgtctccaagcccctcccttccgtgcctcccagcattggcaaatcgaacgtggacagacgtcaggcagaaattggagaggggtcagtgcgccggcgaatctatgacaatccatacttcgagccccaatatggctttccccctgaggaagatgaggatgagcagggggaaagttacactccccgattcagccaacatgtcagtggcaatcgggctcaaaagctgctgcggcccaacagcttgagactggcaagtgactcagatgcagagtcagactctcgggcaagctctcccaactccaccgtctccaacaccagcaccgagggcttcgggggcatcatgtcttttgccagcagcctctatcggaaccacagtaccagcttcagtctttcaaacctcacactgcccaccaaaggtgcccgagagaaggccacgcccttccccagtctgaaagtatttgggctaaatactctaatggagattgttactgaagccggccccgggagtggtgaaggaaacaggagggcgttagtggatcagaagtcatctgtcattaaacacagcccaacagtgaaaagagaacctccatcaccccagggtcgatccagcaattctagtgagaaccagcagttcctgaaggaggtggtgcacagcgtgctggacggccagggagttggctggctcaacatgaaaaaggtgcgccggctgctggagagcgagcagctgcgagtctttgtcctgagcaagctgaaccgcatggtgcagtcagaggacgatgcccggcaggacatcatcccggatgtggagatcagtcggaaggtgtacaagggaatgttagacctcctcaagtgtacagtcctcagcttggagcagtcctatgcccacgcgggtctgggtggcatggccagcatctttgggcttttggagattgcccagacccactactatagtaaagaaccagacaagcggaagagaagtccaacagaaagtgtaaataccccagttggcaaggatcctggcctagctgggcggggggacccaaaggctatggcacaactgagagttccacaactgggacctcgggcaccaagtgccacaggaaagggtcctaaggaactggacaccagaagtttaaaggaagaaaattttatagcatctattgaattgtggaacaagcaccaggaagtgaaaaagcaaaaagctttggaaaaacagaggcctgaagtaatcaaacctgtctttgaccttggtgagacagaggagaaaaagtcccagatcagcgcagacagtggtgtgagcctgacgtctagttcccagaggactgatcaagactctgtcatcggcgtgagtccagctgttatgatccgcagctcaagtcaggattctgaagttagcaccgtggtgagtaatagctctggagagacccttggagctgacagtgacttgagcagcaatgcaggtgatggaccaggtggcgagggcagtgttcacctggcaagctctcggggcactttgtctgatagtgaaattgagaccaactctgccacaagcaccatctttggtaaagcccacagcttgaagccaagcataaaggagaagctggcaggcagccccattcgtacttctgaagatgtgagccagcgagtctatctctatgagggactcctaggaagggacaaaggatccatgtgggaccagttagaggatgcagctatggagaccttttctataagcaaagagcgttctactttatgggaccaaatgcaattctgggaagatgccttcttagatgctgtgatgttggagagagaagggatgggtatggaccagggtccccaggaaatgatcgacaggtacctgtcccttggagaacatgaccggaagcgcctggaagatgatgaagatcgcttgctggccacacttctgcacaacctcatctcctacatgctgctgatgaaggtaaataagaatgacatccgcaagaaggtgaggcgcctaatgggaaagtcgcacattgggcttgtgtacagccagcaaatcaatgaggtgcttgatcagctggcgaacctgaatggacgcgatctctctatctggtccagtggcagccggcacatgaagaagcagacatttgtggtacatgcagggacagatacaaacggagatatctttttcatggaggtgtgcgatgactgtgtggtgttgcgtagtaacatcggaacagtgtatgagcgctggtggtacgagaagctcatcaacatgacctactgtcccaagacgaaggtgttgtgcttgtggcgtagaaatggctctgagacccagctcaacaagttctatactaaaaagtgtcgggagctgtactactgtgtgaaggacagcatggagcgcgctgccgcccgacagcaaagcatcaaacccggacctgaattgggtggcgagttccctgtgcaggacctgaagactggtgagggtggcctgctgcaggtgaccctggaagggatcaacctcaaattcatgcacaatcagttcctgaaattaaagaagtggtgagccacaagtacaagacaccaatggcccacgaaatctgctactccgtattatgtctcttctcgtacgtggctgcagttcatagcagtgaggaagatctcagaaccccgccccggcctgtctctagctgatggagaggggctacgcagctgccccagcccagggcacgcccctggccccttgctgttcccaagtgcacgatgctgctgtgactgaggagtggatgatgctcgtgtgtcctctgcaagccccctgctgtggcttggttggttaccggttatgtgtccctctgagtgtgtcttgagcgtgtccaccttctccctctccactcccagaagaccaaactgccttcccctcagggctcaagaatgtgtacagtctgtggggccggtgtgaacccactattttgtgtccttgagacatttgtgttgtggttccttgtccttgtccctggcgttataactgtccactgcaagagtctggctctcccttctctgtgacccggcatgactgggcgcctggagcagtttcactctgtgaggagtgagggaaccctggggctcaccctctcagaggaagggcacagagaggaagggaagaattggggggcagccggagtgagtggcagcctccctgcttccttctgcattcccaagccggcagctactgcccagggcccgcagtgttggctgctgcctgccacagcctctgtgactgcagtggagcggcgaattccctgtggcctgccacgccttcggcatcagaggatggagtggtcgaggctagtggagtcccagggaccgctggctgctctgcctgagcatcagggagggggcaggaaagaccaagctgggtttgcacatctgtctgcaggctgtctctccaggcacggggtgtcaggagggagagacagcctgggtatgggcaagaaatgactgtaaatatttcagccccacattatttatagaaaatgtacagttgtgtgaatgtgaaataaatgtcctcaactccc

SEQ ID NO: 8867 - protein, 1582 aa, Homo sapiens
  misc_feature (1)..(1582): Xaa=Unknown amino acid
MVQKKKFCPRLLDYLVIVGARHPSSDSVAQTPELLRRYPLEDHTEFPLPPDVVFFCQPEGCLSVRQRRMSLRDDTSFVFTLTDKDTGVTRYGICVNFYRSFQKRISKEKGEGGAGSRGKEGTHATCASEEGGTESSESGSSLQPLSADSTPDVNQSPRGKRRAKAGSRSRNSTLTSLCVLSHYPFFSTFRECLYTLKRLVDCCSERLLGKKLGIPRGVQRDTMWRIFTGSLLVEEKSSALLHDLREIEAWIYRLLRSPVPVSGQKRVDIEVLPQELQPALTFALPDPSRFTLVDFPLHLPLELLGVDACLQVLTCILLEHKVVLQSRDYNALSMSVMAFVAMIYPLEYMFPVIPLLPTCMASAEQLLLAPTPYIIGVPASFFLYKLDFKMPDDVWLVDLDSNRVIAPTNAEVLPILPEPESLELKKHLKQALASMSLNTQPILNLEKFHEGQEIPLLLGRPSNDLQSTPSTEFNPLIYGNDVDSVDVATRVAMVRFFNSANVLQGFQMHTRTLRLFPRPVVAFQAGSFLASRPRQTPFAEKLARTQAVEYFGEWILNPTNYAFQRIHNNMFDPALIGDKPKWYAHQLQPIHYRVYDSNSQLAEALSVPPERDSDSEPTDDSGSDSMDYDDSSSSYSSLGDFVSEMMKCDINGDTPNVDPLTHAALGDASEVEIDELQNQKEAEEPGPDSENSQENPPLRSSSSTTASSSPSTVIHGANSEPADSTEMDDKAAVGVSKPLPSVPPSIGKSNVDRRQAEIGEGSVRRRIYDNPYFEPQYGFPPEEDEDEQGESYTPRFSQHVSGNRAQKLLRPNSLRLASDSDAESDSRASSPNSTVSNTSTEGFGGIMSFASSLYRNHSTSFSLSNLTLPTKGAREKATPFPSLKVFGLNTLMEIVTEAGPGSGEGNRRALVDQKSSVIKHSPTVKREPPSPQGRSSNSSENQQFLKEVVHSVLDGQGVGWLNMKKVRRLLESEQLRVFVLSKLNRMVQSEDDARQDIIPDVEISRKVYKGMLDLLKCTVLSLEQSYAHAGLGGMASIFGLLEIAQTHYYSKEPDKRKRSPTESVNTPVGKDPGLAGRGDPKAMAQLRVPQLGPRAPSATGKGPKELDTRSLKEENFIASIELWNKHQEVKKQKALEKQRPEVIKPVFDLGETEEKKSQISADSGVSLTSSSQRTDQDSVIGVSPAVMIRSSSQDSEVSTVVSNSSGETLGADSDLSSNAGDGPGGEGSVHLASSRGTLSDSEIETNSATSTIFGKAHSLKPSIKEKLAGSPIRTSEDVSQRVYLYEGLLGRDKGSMWDQLEDAAMETFSISKERSTLWDQMQFWEDAFLDAVMLEREGMGMDQGPQEMIDRYLSLGEHDRKRLEDDEDRLLATLLHNLISYMLLMKVNKNDIRKKVRRLMGKSHIGLVYSQQINEVLDQLANLNGRDLSIWSSGSRHMKKQTFVVHAGTDTNGDIFFMEVCDDCVVLRSNIGTVYERWWYEKLINMTYCPKTKVLCLWRRNGSETQLNKFYTKKCRELYYCVKDSMERAAARQQSIKPGPELGGEFPVQDLKTGEGGLLQVTLEGINLKFMHNQFLKLKKWX

SEQ ID NO: 8868 - DNA, 3132 bp, Rattus norvegicus
  ref <308>: DATABASE ACCESSION NUMBER: EMBL / U73142
  ref <309>: DATABASE ENTRY DATE: 1998-11-10
gccgctggaaaatgtcgcaggaaaggcccacgttctaccggcaggagctgaacaagaccgtctgggaggtgcccgagcgataccagaacctgtccccggtgggctcgggagcctacggctcggtgtgtgctgcttttgatacaaagacgggacatcgtgtggcagtgaagaagctgtcgagaccgtttcagtccatcattcacgccaaaaggacctacagggagctgcggctgctgaagcacatgaagcacgagaatgtgattggtctgttggatgtgtttacacctgcaaggtccctggaagaattcaacgatgtgtacctggtgacccatctcatgggggcagacctgaacaacatcgtgaagtgtcagaagcttaccgatgaccacgttcagtttcttatctaccagatcctgcgagggctgaagtatatacactcggctgacataatccacagggacctaaagcccagcaacctcgctgtgaatgaagactgtgagctgaagattctggattttgggctggctcggcacactgatgacgaaatgaccggctacgtggctacccggtggtacagagcccccgagattatgctgaattggatgcactacaaccagacagtggatatttggtccgtgggctgcatcatggctgagctgttgaccggaagaacgttgtttcctggtacagaccatattgatcagttgaagctcattttaagactcgttggaaccccaggggctgagcttctgaagaaaatctcctcagagtctgcaagaaactacattcagtctctggcccagatgccgaagatgaacttcgcaaatgtatttattggtgccaatcccctggctgtcgacctgctggaaaagatgctggttttggactcggataagaggatcacagcagcccaagctcttgcgcatgcctactttgctcagtaccacgaccctgatgatgagccagtggctgaaccttatgaccagtcctttgaaagcagggacttccttatagacgaatggaagagcctgacctacgatgaagtcattagctttgtgccaccgccccttgaccaagaagaaatggagtcctgagcaccttgcttctgttctgtccatcccacttcactgtgaggggaaggcctgttcatgggaactctccaaataccattcaagtgcctcttgttgaaagattccttcatggtggaagggggtgcatgtatgtgcgtagtgtttgtgtgtgtctgtctgtctgtccgtttgtccatgtatctttgtggaagtcattgtgatggcagtgacttcatgagtggtagatgctccttggcagtctgcctgctctctcagagtccgggcaggccgatgggaactgccgtctccttagggatgtgtgtgtgtatgttaagtgcaaagtaagaatattaaaatatccctgttcctagttaccttgccacttcggcttctcctgtggccctgcctttaccatatcacagtgacagagagaggctgcttcaggtctgaggctatccctcagccatgcataaagcccaagagaaccaactggctcctgggctctagcctgtgatcggcttgctcatgtcctcagaacctgtcagtctgtttgtgccttaaaaggagagaagggcgcgttgtggtagttacagaatctcagttgctggcgttctgagccaggcaaggcacagggctgttggatggccagtggggagctggacaaaacaaggcagccttcaaggaggccatgggtgcatgtttgcatgagtgtatgtgcaaccgccctccctcacctccaggagcaagctgttttctatgcttacctaagttcacctcagtgcagaggtctccagtgccaggcacaggctcctgccatcagtagcttcctatgtcatcttcacgtcatgcgggtgtttgcatgctgtgctctggagcttgtcctgtcttctggaagccctgggccgggcgtgtgaagacttcccagcagtcctatccacgcacctcagctgaggccacgggcacactgctgcttcctcactccagctacgttgtgttgaacacaactgatcctccaggtgcttgtggtgcaggaaacgggacgaacagagcacctgaacccttgccatctgacatcaccgacacaggagaacagtcctctcctctcctctcctctcctctcctaggacagtccccggctctggaatcatgttcttctcactcatggtagccagctaagaaagctgcaaaccgaacaaagggagaaccgagctcctgaagccaggagctccttttactgtccttctcaaaatagggtcattagacacagccaagtcgtcaaaggcccctttccttgtacggggcccccccgcccccggcagcttgacactgatttcagtgtctatttggggagaaagcaattttgtcttggaattttgtatgttgtaggaatccttagagagtgtggttccttctgatggggagaaagggcaaattattttaatattttgtatttcacctttataaacatgaatcctcaggggtgaagaacagtttgcataattttctgaatttcaggcactttgtgctatatgaggacccatatatttaagctttttgtgcagtaagaaagtgtaaagccaattccagtgttggacgaaacaggtctcgtatttaggtcaaggtgtctccattctctatcagtgcagggacatgcagtttctgtggggcagggtaggaccctgcatcatttggagcccagaaggaggccgactggccaggcctcaccgcctcagtatgcagtccagctccacgtcatcccctcacaatggttagtagcaacgtctgggtttgaacgccaggcgtggttatattattgaggatgcctttgcacatgtggccatgctgtgttaggactgtgccccagggcccggacttgaagctagagctggcagaagagctcctggcatccatggtgcgatgctgccgccacccagtttctccattggaagacaagggaatgagaagactgctgtgtatgtgtatttgtgaacttggttgtgatctggtatgccataggatgtcagacaatatcactggttaaagtaaagcctatttttcagat

SEQ ID NO: 8869 - protein, 360 aa, Rattus norvegicus; identical to SEQ ID NO: 6961
  ref <308>: DATABASE ACCESSION NUMBER: SWISS-Prot / P70618
  ref <309>: DATABASE ENTRY DATE: 2000-05-30

SEQ ID NO: 8870 - DNA, 3757 bp, Homo sapiens; identical to SEQ ID NO: 6962
  ref <308>: DATABASE ACCESSION NUMBER: EMBL / L35263
  ref <309>: DATABASE ENTRY DATE: 1999-07-02

SEQ ID NO: 8871 - protein, 360 aa, Homo sapiens; identical to SEQ ID NO: 6963
  ref <308>: DATABASE ACCESSION NUMBER: SWISS-Prot / Q16539
  ref <309>: DATABASE ENTRY DATE: 2002-06-15

SEQ ID NO: 8872 - DNA, 3132 bp, Rattus norvegicus; identical to SEQ ID NO: 8868
  ref <308>: DATABASE ACCESSION NUMBER: EMBL / U73142
  ref <309>: DATABASE ENTRY DATE: 1998-11-10

SEQ ID NO: 8873 - protein, 360 aa, Rattus norvegicus; identical to SEQ ID NO: 6961
  ref <308>: DATABASE ACCESSION NUMBER: SWISS-Prot / P70618
  ref <309>: DATABASE ENTRY DATE: 2000-05-30

SEQ ID NO: 8874 - DNA, 3757 bp, Homo sapiens; identical to SEQ ID NO: 6962
  ref <308>: DATABASE ACCESSION NUMBER: EMBL / L35263
  ref <309>: DATABASE ENTRY DATE: 1999-07-02

SEQ ID NO: 8875 - protein, 360 aa, Homo sapiens; identical to SEQ ID NO: 6963
  ref <308>: DATABASE ACCESSION NUMBER: SWISS-Prot / Q16539
  ref <309>: DATABASE ENTRY DATE: 2002-06-15

SEQ ID NO: 8876 - DNA, 1428 bp, Rattus norvegicus
  ref <308>: DATABASE ACCESSION NUMBER: EMBL / U73174
  ref <309>: DATABASE ENTRY DATE: 1996-11-04
ctgtttctgctacttgctctttgtttcaaactgccttggagagtttctcacagtaccgtgtgcttcttgctaacttccggtttaagctttagtcgttctctagtctcttcagttttcaccctgagcctcgacactggactactgaaatcgtgtagtgaacgttggatgtgtcccaaaaaggtaatgtggaacacagccgtgcactcggaattcatacatgatcacgtggattacggctttcaaaactgcaagagtaaattcaattggcatgtcatcaaggagaagcgggatgcttacgtgagccgcctgaacaacatctaccaaaacaatttaaccaagtcccacatcgaagtcatccacggctacgcaacatttcgagatggtccccagcccacagcggaagtcaacgggaagaagttcactgctccgcacatcctgatcgccacgggtggtgtgcccacggttcctcatgagaaccagatcccaggtgccagcctggggataaccagtgatgggttctttcagctggaagacttgcccagccgcagcgttattgtgggtgccggttacattgccgtggagattgcgggcatcctctccgccctgggctccaagacgtctcttatgatcaggcatgataaggtgcttagaagctttgattcactcatcagttccaactgcaccgaggagctggagaacgctggcggtgttgaggttctcacagttaagaagttctcacaggttaaggaagtaaagaagacctcatcgggcttggaactccatgtggttactgcacttcccggtaggaaacccaccgtgaccacgattccagatgtcgattgcctgctctgggccattggacgggacccaaactctaagggcctgaatctaaataaactggggatacagactgatgacaaaggccatatcctagtggacgagttccagaataccaatgtcaaaggcgtctatgccgtgggcgatgtctgtgggaaagcacttctcaccccagttgcgatcgctgctggccggaaactcgcccatagactttttgagggcaaagaagattccaggttggactatgacaacatccctaccgtggtcttcagccacccgcctatcgggacagtggggctcactgaagatgaagccgtccataagtatggcaaagacaatgtgaaaatctactcgaccgccttcaccccgatgtatcacgctgtgaccacgaggaagacgaaatgcgtgatgaagatggtttgtgccaacaaagaggagaaggtggttggcatccatatgcaggggattggctgcgatgagatgcttcagggcttcgctgtagcagtgaaaatgggggccaccaaggccgacttcgacaatagggtcgccattcatcctacctcttcagaggagctggtcacacttcgttga

SEQ ID NO: 8877 - protein, 420 aa, Rattus norvegicus
  ref <308>: DATABASE ACCESSION NUMBER: SWISS-Prot / AAB18132
  ref <309>: DATABASE ENTRY DATE: 2003-02-01
MCPKKVMWNTAVHSEFIHDHVDYGFQNCKSKFNWHVIKEKRDAYVSRLNNIYQNNLTKSHIEVIHGYATFRDGPQPTAEVNGKKFTAPHILIATGGVPTVPHENQIPGASLGITSDGFFQLEDLPSRSVIVGAGYIAVEIAGILSALGSKTSLMIRHDKVLRSFDSLISSNCTEELENAGGVEVLTVKKFSQVKEVKKTSSGLELHVVTALPGRKPTVTTIPDVDCLLWAIGRDPNSKGLNLNKLGIQTDDKGHILVDEFQNTNVKGVYAVGDVCGKALLTPVAIAAGRKLAHRLFEGKEDSRLDYDNIPTVVFSHPPIGTVGLTEDEAVHKYGKDNVKIYSTAFTPMYHAVTTRKTKCVMKMVCANKEEKVVGIHMQGIGCDEMLQGFAVAVKMGATKADFDNRVAIHPTSSEELVTLR

SEQ ID NO: 8878 - protein, 522 aa, Homo sapiens
  ref <308>: DATABASE ACCESSION NUMBER: SWISS-Prot / 1GRT
  ref <309>: DATABASE ENTRY DATE: 2003-02-01
MALLPRALSAGAGPSWRRAARAFRGFLLLLPEPAALTRALSRAMACRQEPQPQGPPPAAGAVASYDYLVIGGGSGGLASARRAAELGARAAVVESHKLGGTCVNVGCVPKKVMWNTAVHSEFMHDHADYGFPSCEGKFNWRVIKEKRDAYVSRLNAIYQNNLTKSHIEIIRGHAAFTSDPKPTIEVSGKKYTAPHILIATGGMPSTPHESQIPGASLGITSDGFFQLEELPGRSVIVGAGYIAVEMAGILSALGSKTSLMIRHDKVLRSFDSMISTNCTEELENAGVEVLKFSQVKEVKKTLSGLEVSMVTAVPGRLPVMTMIPDVDCLLWAIGRVPNTKDLSLNKLGIQTDDKGHIIVDEFQNTNVKGIYAVGDVCGKALLTPVAIAAGRKLAHRLFEYKEDSKLDYNNIPTVVFSHPPIGTVGLTEDEAIHKYGIENVKTYSTSFTPMYHAVTKRKTKCVMKMVCANKEEKVVGIHMQGLGCDEMLQGFAVAVKMGATKADFDNTVAIHPTSSEELVTLR

SEQ ID NO: 8879 - DNA, 1428 bp, Rattus norvegicus; identical to SEQ ID NO: 8876
  ref <308>: DATABASE ACCESSION NUMBER: EMBL / U73174
  ref <309>: DATABASE ENTRY DATE: 1996-11-04

SEQ ID NO: 8880 - protein, 420 aa, Rattus norvegicus; identical to SEQ ID NO: 8877
  ref <308>: DATABASE ACCESSION NUMBER: SWISS-Prot / AAB18132
  ref <309>: DATABASE ENTRY DATE: 2003-02-01

SEQ ID NO: 8881 - protein, 522 aa, Homo sapiens; identical to SEQ ID NO: 8878
  ref <308>: DATABASE ACCESSION NUMBER: SWISS-Prot / 1GRT
  ref <309>: DATABASE ENTRY DATE: 2003-02-01

SEQ ID NO: 8882 - DNA, 1428 bp, Rattus norvegicus; identical to SEQ ID NO: 8876
  ref <308>: DATABASE ACCESSION NUMBER: EMBL / U73174
  ref <309>: DATABASE ENTRY DATE: 1996-11-04

SEQ ID NO: 8883 - protein, 420 aa, Rattus norvegicus; identical to SEQ ID NO: 8877
  ref <308>: DATABASE ACCESSION NUMBER: SWISS-Prot / AAB18132
  ref <309>: DATABASE ENTRY DATE: 2003-02-01

SEQ ID NO: 8884 - protein, 522 aa, Homo sapiens; identical to SEQ ID NO: 8878
  ref <308>: DATABASE ACCESSION NUMBER: SWISS-Prot / 1GRT
  ref <309>: DATABASE ENTRY DATE: 2003-02-01

SEQ ID NO: 8885 - DNA, 1281 bp, Rattus norvegicus
  ref <308>: DATABASE ACCESSION NUMBER: EMBL / U73525
  ref <309>: DATABASE ENTRY DATE: 2000-03-04
cccttgacgggcaggccggctgggctctgcatccctctgctcacactgccgggagatggctcagcggcttctcctgaggaggttcctgacctcagtcatctccaggaagcctcctcagggtgtgtgggcttccctcacctctacgagcctgcagacccctccgtacaatgctggtggtctaactggaacacccagccctgcccggacatttcacaccaccagagtctgttcaacaacctttaacgtccaggatggacctgactttcaagacagagttgtcaacagtgagacaccagttgtcgtggactttcatgcacagtggtgtggcccctgcaagatcctaggacctcggttagagaagatggtagccaaacagcacgggaaggtggtgatggccaaagtggacattgacgatcacacagaccttgccattgagtacgaggtgtctgctgtgcctaccgtgctggccatcaagaacggggacgtggtggacaagtttgtggggatcaaggacgaagaccagctggaagccttcctgaagaagctaattggctgacaagcagggaagaggccagactgcccttgcctgctggaaacccatttggggaggaacctagtagaactcccagccctcagctgtcatccttcgtgccctgcccctgttttgtccttgtgggtcttgcctttgggcagcagacttccaaacctagaagccaccagcacttcagagccagccctcagccaggatggccaggagaggggcaatgctgccgatggtgtggaggaggggcatcctgagcacctcctactgtgtgcttctcctgtgcacctactgtgtgcttcttctagggcttgttgctattcccctagatgctagacaaagcctgggccagcctgtattcaccgcccaggcaatggcccagtcctcgtctctgaggtcctctgatctgaagcctcagccccacacacacacatgtggctctggtgtatttcctctcctgcctctgcttgaaaaggaaacaagaagctgaacaagtgagagtaatggataattctctcatcttttgtaggtctgtaataaagaactttatgtgatcccttctacctcttgctgtgaagaacagagcccaccccattccctatctctgtcccttctcttccttgtcacctccctgggttagctgggccttggttctggttccctgagcaggaggaggagctgtgaacaagcagaccaataaaaccaggtttgcattgccccaaaaaaaaaaaaaaaaaaaa

SEQ ID NO: 8886 - protein, 166 aa, Rattus norvegicus
  ref <308>: DATABASE ACCESSION NUMBER: SWISS-Prot / P97615
  ref <309>: DATABASE ENTRY DATE: 2002-06-15
MAQRLLLRRFLTSVISRKPPQGVWASLTSTSLQTPPYNAGGLTGTPSPARTFHTTRVCSTTFNVQDGPDFQDRVVNSETPVVVDFHAQWCGPCKILGPRLEKMVAKQHGKVVMAKVDIDDHTDLAIEYEVSAVPTVLAIKNGDVVDKFVGIKDEDQLEAFLKKLIG

SEQ ID NO: 8887 - DNA, 370 bp, Rattus norvegicus
  misc_feature (1)..(370): n=a, c, g or t
  ref <308>: DATABASE ACCESSION NUMBER: EMBL / U75392
  ref <309>: DATABASE ENTRY DATE: 2000-07-30
acagntgacaaccttgtgctgaatttgcaggatgaaagtttaattcggggaagngacagcttcattaagggtaagaagtgagtgtggacatcaagaaccccaccaccagagaagttggcacacttttccagtttggaggggccagctagggggtcaagcataccccaccctgacccaagcatcatgtgatggattcttctgtatctgctctcttggattaaggaagactgaagaccaaccctttcagaggggttttcctccttcttgtattggctgggaagggggggggacaggagacagtgtgatttctcagtgatttcctgtagtgttgtccctctccctgaatggggggagataaccaccatgccag

SEQ ID NO: 8888 - protein, 26 aa, Rattus norvegicus
  misc_feature (1)..(26): Xaa=Unknown amino acid
  ref <308>: DATABASE ACCESSION NUMBER: SWISS-Prot / AAB18747
  ref <309>: DATABASE ENTRY DATE: 2001-12-01
TXDNLVLNLQDESLIRGXDSFIKGKK

SEQ ID NO: 8889 - DNA, 1342 bp, Homo sapiens
  ref <308>: DATABASE ACCESSION NUMBER: Refseq / NM_007273
  ref <309>: DATABASE ENTRY DATE: 2002-04-15
gcagtacctaagccggagcggggtagaggcgggccggcacccccttctgacctccagtgccgccggcctcaagatcagacatggcccagaacttgaaggacttggcgggacggctgcccgccgggccccggggcatgggcacggccctgaagctgttgctgggggccggcgccgtggcctacggtgtgcgcgaatctgtgttcaccgtggaaggcgggcacagagccatcttcttcaatcggatcggtggagtgcagcaggacactatcctggccgagggccttcacttcaggatcccttggttccagtaccccattatctatgacattcgggccagacctcgaaaaatctcctcccctacaggctccaaagacctacagatggtgaatatctccctgcgagtgttgtctcgacccaatgctcaggagcttcctagcatgtaccagcgcctagggctggactacgaggaacgagtgttgccgtccattgtcaacgaggtgctcaagagtgtggtggccaagttcaatgcctcacagctgatcacccagcgggcccaggtatccctgttgatccgccgggagctgacagagagggccaaggacttcagcctcatcctggatgatgtggccatcacagagctgagctttagccgagagtacacagctgctgtagaagccaaacaagtggcccagcaggaggcccagcgggcccaattcttggtagaaaaagcaaagcaggaacagcggcagaaaattgtgcaggccgagggtgaggccgaggctgccaagatgcttggagaagcactgagcaagaaccctggctacatcaaacttcgcaagattcgagcagcccagaatatctccaagacgatcgccacatcacagaatcgtatctatctcacagctgacaaccttgtgctgaacctacaggatgaaagtttcaccaggggaagtgacagcctcatcaagggtaagaaatgagcctagtcaccaagaactccacccccagaggaagtggatctgcttctccagtttttgaggagccagccaggggtccagcacagccctaccccgccccagtatcatgcgatggtcccccacaccggttccctgaacccctcttggattaaggaagactgaagactagccccttttctggggaattactttcctcctccctgtgttaactggggctgttggggacagtgcgtgatttctcagtgatttcctacagtgttgttccctccctcaaggctgggaggagataaacaccaacccaggaattctcaataaatttttattacttaacctgaaaaaaaaaaaaaaaaaaaaaaaaaaaaaaa

SEQ ID NO: 8890 - protein, 299 aa, Homo sapiens
  ref <308>: DATABASE ACCESSION NUMBER: Refseq / NP_009204
  ref <309>: DATABASE ENTRY DATE: 2002-04-15
MAQNLKDLAGRLPAGPRGMGTALKLLLGAGAVAYGVRESVFTVEGGHRAIFFNRIGGVQQDTILAEGLHFRIPWFQYPIIYDIRARPRKISSPTGSKDLQMVNISLRVLSRPNAQELPSMYQRLGLDYEERVLPSIVNEVLKSVVAKFNASQLITQRAQVSLLIRRELTERAKDFSLILDDVAITELSFSREYTAAVEAKQVAQQEAQRAQFLVEKAKQEQRQKIVQAEGEAEAAKMLGEALSKNPGYIKLRKIRAAQNISKTIATSQNRIYLTADNLVLNLQDESFTRGSDSLIKGKK

SEQ ID NO: 8891 - DNA, 3348 bp, Rattus norvegicus
  misc_feature (1)..(3348): n=a, c, g or t
  ref <308>: DATABASE ACCESSION NUMBER: EMBL / U75916
  ref <309>: DATABASE ENTRY DATE: 2000-07-30
ctcgaggaaaactgcagctggtggtgttgagagacagcaagcagaccctcatcaacatcccatctctgaatgacagcgactcggaagtggaggatatctcggaaatcgagtccaaccgatctttttctccagaggagaggcgccagcagtattctgatcaggagtatcattcctccactgagaagctgaaggagaggccaagctcaagagaggagacctcaggcagaatgtccaggatgggtgccacacccacgccgttcaagtccacgggggacatcacagctgcaggtgtcacagaagccaacaaggaacccaggtcccaggaagaatccccagttcctcaacccagaacagcatcaagagtctttcttcgtcctagtcccgaaaatgaagcaatatatggccctaacaccaaaatggtgaagttcaagaagggagacagcgtgggcctccggttggctggtggaaatgatgttggcatatttgtggctggcattcaggagggcacctctgcagagcaggagggcctacaagaaggggaccagattctgaaggtgaacacacaagatttcagagggctggtccgggaagatgccgtcctctacctgttagaaatccctaaaggtgaaaccgtgaccattttggctcagagccgagcagacgtgtatagagacatcctggcctgtggcaggggagactcgttcttcataaggagccactttgaatgtgagaaggagactccgcagagcttggccttcaccaggggagaagtcttccgagtggtagacacgctgtacgatggcaaactgggccactggctggctgtgaggattggaaatgagctggagaagggcttaatccctaacaaaagcagagctgagcagatggccagtgtccagaatgcccagcgagagaatgctggggacagagcagacttctggcggatgcgtggccagagatccggggtcaagaagaacattcgcaagagccgggaagacctggcagctgctgtgtcggttagcaccaagttccccgcctacgaaaaggttctgcttcgggaagctggcttcaagaaacccgtggttctgtttggccccatagcagatatagcaatggaaaggctgactactgagctacccgacctgtttcaaactgcaaaaacagaacccaaagatgcgggatctgagaaatccagtggagtggttcggttgaatactgtgaagcaaattattgagcaggacaagcatgccctgctcgacgttacccccaaagctgtggacctgctccattatactcagtggttcccaatcgtgattttcttcaccccggattccagacaaggcattaaaaccataaggcagaagttgaacccaacatccaataaaatttctcgcaagttattcgatcaagcnaacaagtccaaaaaaacctgttctcatcttttaacagctaccatcaacgtgaattcagccaatgatggctggtttggcagcctgaaggacagcattcagcagcagcaacacgaagcagtgtgggtttctgaaggaaagatggaggggatggatgatgacgctgaagaccgcatgtcctacttaaccgccatgggtgcggactatctgagttgtgacagccgtctcatcagtgactttgaagatacggacggcgagggaggcgcctacactgacaatgagctggatgagccagctgaggagccgctggtgtcttccatcacccgctcctcagagccggtgcagcatgaggagagcataaggaagcccagcccagagccacgcgctcagatgaggagggcagctagcagagaccagcttagggatggtagcccgcccccagcattcaagccagagccgcccaaggtcagaaaccaaaacagagaggactctttcaactactccaagtcaaacttttctgccatggctggcagtgaaatcccggggggatccaccaaagggtgtcctccccctattgcggtgaaacctgcctttgggcgatccatcctgaagccttctactccagtccccatgcctgagagtgaggaggttggggagagcaccgaggagcaggaagaggctcccaaatcagtcctgggcagagtgaaaatcttcgagaagatggaccacaaggcgaaattacagaggatgcaggagctccaagaagcacagaatgcgaggattgaaatagctcagaagcatcctgacatctatgcggttccaatcaaagcccccaagccagatgctggcctgccccagcacatgagttctagacccccagagccacagaaagctccttctaggctttaccaggacaccagaggaagctacggcagtgatcccgaggaagaggaggagtaccgccaacagttggcagcacactcgaagcgtggttactacagccagccctcccggtaccgagacaccgaattatagagggccacttgtggactcctgcgagactccctggaggtcttctccagttaaaatgcactgcagagatacggtggggatccaggcaacagacagctcgaattatcaaccgaaggctctgttcgtgggactggagtaaagttggttatgactttttgaatgaagagaaacactatagcctgataatggttacttgctttggtgtggaccaaaaatctgtattaatctctctgtatttgtaatatgtatattgagcaataactccttctcctcgttcagagctgccttccagagctgcttcgatgtgaagcaaatgtgaacagggagtaaaaaaaaaaaaagtactccatctcaaactaaatccagaagtaatttatcacgactccctaagtgcctttgacaagatgtgtcttagtttgcttccctgaagctttatgcaaagctataatggactaaaacttttattttgactaaatttttataccagtttagcagctgtaactgccctcagcaccatgccaccttttcagggcattatcttgggagtgtggctattagttctacatagctcggaggccaagttttattagagtgtttgtccttgtttgtctgaaaccacgtgctccacaaagtcagaggcttgagaaaagggtattttatttccttcctatcagcatatgtactgacatcaggtggttttataatttaataaaaaggagtaccttgtggtcaagaatgagctttgtgctgaatntntacacaccttccttttgggctgtgtggggtggaatccaagatcctcatgcattcagagtgctgctccaccgctgaactataccccagacttcctgatttattttattttaattaaaaaaattaaaaagacttaaaaaaaaaaaaaaaaaaa

SEQ ID NO: 8892 - DNA, 1811 bp, Homo sapiens
  ref <308>: DATABASE ACCESSION NUMBER: EMBL / AK025185
  ref <309>: DATABASE ENTRY DATE: 2000-09-29
aaaagctaatggagttagaattacttagaaaataagattggttgagaatgtgccatcgttctgggagtttgaatgggtgatatgagaacgttagggaatttgtctaggcctctagaattggatcgcttctccctcggggagatagctcatacacagctgtgctgcagggaggagagagggagattctattacctgtggccgcttttattttagaagcttttggtgttagtatcctgttcaccagctgaactgaggtagttttgtgagacttgacagtgactattttgttgcagaattgactaagttttgctctttgagaactagatgtgtagtcaaagtatctggcatctatggagtgcttccagtttggaagggggatgcaagcttccctggggaggacaggttgaacaggacatagcttctgcctttgagggtctgagaatcttgtagaggcatggatgtgagtgtagcacaaggcagcgtgcaatgtgttgatattactaggagagtggtaccaggagaacaggctgcagaggagctggattcagaagaaaagcaagacagactgagaaagtgtggcttagccgcggtatggaggatggatggtagcacagataggctgcagggcccctaatttgagttcctgcacaaaaacgaccataatatcaacattgtaccaaagccaagtgatctcagggagaaaaataaaagatgccttccctggcgagcacatcaaggtttcagtcgcttggctgtgtccttgggaattttcttgagtccccactcccaggagccacatcagaccccactgaccgtccaacacaaattcctctagatggaagggatggatgatgaccccgaagaccgcatgtcctacttaactgccatgggcgcagactatctgagttgcgacagccgcctcatcagtgactttgaagacacggacggtgaaggaggcgcctacactgacaatgagctggatgagccagccgaggagccgctggtgtcgtccatcacccgctcctcggagccggtgcagcacgaggaggtgaggcgaggcaggccacgggcaggaacaggagagcctggtgttttccttgcactctcgtggacagctgtgtgttcagggtgctgtggaaggcattcctaagggttggagcagatgacttccagggagtctctcgctttgagtccacgctggcatggttgcagtctgtgggaaagtggggcaggcaggtggacttcagaagagcttgaggggtcagcactccgcacacccatgccctcaggtgcgatggataaacagaatggctttaggtgccgtctgtccaaattaccagcggaaccttccttcccatgcagtattgttgtatgtacttgtaacctttgattaggtttctctctgtactcttagatgtccttgcttttcttccccatcctgcctttaacctttctaatcttgccaaagctcttgagtgtttccccatcagtttccttctctcttatatttcagttttttaattgagttcatgatcaaaccttcatctgatcacatcacatgtactgtgcatccactgtgattagatagcttatgggatccttgaaatcacattgacaggcactgtaagtcacagccaagttagcaattattagttgcacctcagagaatgttggaataatgatctttgaagatgggattgttcatatatttggataattattgctgtggatttctctctagcattttagctcattccagtaaatgatttttttctttatgaaatagaactaccaaaaaaaaaaaaaaaaaa

SEQ ID NO: 8893 - DNA, 464 bp, Rattus norvegicus
  misc_feature (1)..(464): n=a, c, g or t
  ref <308>: DATABASE ACCESSION NUMBER: EMBL / U75920
  ref <309>: DATABASE ENTRY DATE: 2000-07-30
cggagccgggcgcgcggactgcggacgcgggtcctgtgagagccgaagatggcagtgaatgtgtactcgacgtcagtcaccagtgataacctcagtcgacatgacatgctggcttggatcaatgaatctctgcagttgaatctgacaaagatagaacagctatgttcaggggctgcatactgtcagttcatggacatgctcttccccggctccattgccttgaagaaagtgaaattccnggctaagctagaacatgaatatatccagaacttcaaaatactacaagccggcttcaagaagatgggcttgacaaaataattcctgtggataaattagtaaaangaaaattcaggacattttgaattccntncatggttcngaantttttgatgcnnttttgattggaaanattttatcctntcccgccaanaagncaaaacgnatggncctccttgtcccccccc

SEQ ID NO: 8894 - protein, 89 aa, Rattus norvegicus
  misc_feature (1)..(89): Xaa=Unknown amino acid
  ref <308>: DATABASE ACCESSION NUMBER: SWISS-Prot / AAB81885
  ref <309>: DATABASE ENTRY DATE: 2002-10-01
MAVNVYSTSVTSDNLSRHDMLAWINESLQLNLTKIEQLCSGAAYCQFMDMLFPGSIALKKVKFXAKLEHEYIQNFKILQAGFKKMGLTK

SEQ ID NO: 8895 - DNA, 2540 bp, Homo sapiens
  ref <308>: DATABASE ACCESSION NUMBER: Refseq / NM_012325
  ref <309>: DATABASE ENTRY DATE: 2002-11-05
acgagacgaagacggaaccggagccggttgcgggcagtggacgcggttctgccgagagccgaagatggcagtgaacgtatactcaacgtcagtgaccagtgataacctaagtcgacatgacatgctggcctggatcaatgagtctctgcagttgaatctgacaaagatcgaacagttgtgctcaggggctgcgtattgtcagtttatggacatgctgttccctggctccattgccttgaagaaagtgaaattccaagctaagctagaacacgagtacatccagaacttcaaaatactacaagcaggttttaagagaatgggtgttgacaaaataattcctgtggacaaattagtaaaaggaaagtttcaggacaattttgaattcgttcagtggttcaagaagtttttcgatgcaaactatgatggaaaagactatgaccctgtggctgccagacaaggtcaagaaactgcagtggctccttcccttgttgctccagctctgaataaaccgaagaaacctctcacttctagcagtgcagctccccagaggcccatctcaacacagagaaccgctgcggctcctaaggctggccctggtgtggtgcgaaagaaccctggtgtgggcaacggagacgacgaggcagctgagttgatgcagcaggtcaacgtattgaaacttactgttgaagacttggagaaagagagggatttctacttcggaaagctacggaacattgaattgatttgccaggagaacgagggggaaaacgaccctgtattgcagaggattgtagacattctgtatgccacagatgaaggctttgtgatacctgatgaagggggcccacaggaggagcaagaagagtattaacagcctggaccagcagagcaacatcggaattcttcactccaaatcatgtgcttaactgtaaaatactcccttttgttatccttagaggactcactggtttcttttcataagcaaaaagtacctcttcttaaagtgcactttgcagacgtttcactccttttccaataagtttgagttaggagcttttaccttgtagcagagcagtattaacatctagttggttcacctggaaaacagagaggctgaccgtggggctcaccatgcggatgcgggtcacactgaatgctggagagatgtatgtaatatgctgaggtggcgacctcagtggagaaatgtaaagactgaattgaattttaagctaatgtgaaatcagagaatgttgtaataagtaaatgccttaagagtatttaaaatatgcttccacatttcaaaatataaaatgtaacatgacaagagattttgcgtttgacattgtgtctgggaaggaagggccagaccttggaacctttggaacctgctgtcaacaggtcttacagggctgcttgaaccctcataggcctaggctttggtctaaaaggaacatttaaaaagttgccctgtaaagttatttggtgtcattgaccaattgcatcccagctaaaaagcaagaggcatcgttgcctggataatagaggatgtgtttcagccctgagatgttacagttgaagagcttggtttcattgagcatttctctatttttccagttatcccgaaatttctatgtattattttttggggaagtgaggtgtgcccagttttttaatctaacaactacttttggggacttgcccacatctctgggatttgaatggggattgtatcccattttactgtcttttaggtttacatttaccacgtttctcttctctgctccccttgcccactgggactcctctttggctccttgaagtttgctgcttagagttggaagtgcagcaggcaggtgatcatgctgcaagttctttctggacctctggcaaagggagtggtcagtgaaggccatcgttaccttgggatctgccaggctggggtgttttcggtatctgctgttcacagctctccactgtaatccgaatactttgccagtgcactaatctctttggagataaaattcattagtgtgttactaaatgttaattttcttttgcggaaaatacagtaccgtgtctgaattaattattaatatttaaaatacttcattccttaactctccctcatttgctttgcccacagcctattcagttcctttgtttggcaggattctgcaaaatgtgtctcacccactactgagattgttcagcccctgatgtatttgtattgatttgtttctggtggtagcttgtcctgaaatgtgtgtagaaagcaagtattttatgataaaaatgttgtgtagtgcatgctctgtgtggaattcagaggaaaacccagattcagtgattaacaatgccaaaaaatgcaagtaactagccattgttcaaatgacagtggtgctatttctcttttgtggccttttagacttttgttgccctaaaattccattttattgggaacccattttccacctggtctttcttgacagggtttttttctactttaaacagtttctaaataaaattctgtatttcaaaaa

SEQ ID NO: 8896 - protein, 268 aa, Homo sapiens
  ref <308>: DATABASE ACCESSION NUMBER: SWISS-Prot / Q15691
  ref <309>: DATABASE ENTRY DATE: 2002-06-15
MAVNVYSTSVTSDNLSRHDMLAWINESLQLNLTKIEQLCSGAAYCQFMDMLFPGSIALKKVKFQAKLEHEYIQNFKILQAGFKRMGVDKIIPVDKLVKGKFQDNFEFVQWFKKFFDANYDGKDYDPVAARQGQETAVAPSLVAPALNKPKKPLTSSSAAPQRPISTQRTAAAPKAGPGVVRKNPGVGNGDDEAAELMQQVNVLKLTVEDLEKERDFYFGKLRNIELICQENEGENDPVLQRIVDILYATDEGFVIPDEGGPQEEQEEY

SEQ ID NO: 8897 - DNA, 219 bp, Rattus norvegicus
  misc_feature (1)..(219): n=a, c, g or t
  ref <308>: DATABASE ACCESSION NUMBER: EMBL / U75923
  ref <309>: DATABASE ENTRY DATE: 2000-07-30
gagagagtgtttactttgatttaatcaaacttaaaatatttcatcaaattacccaggaaaatccaggtagcagaaatatataacatatccatttcttacaaggtcacaaatcagttttacaaggctatatatatatgtatgtatatgtactatgccatttaaaccacttccgctttctgtactgaagaactcgagnnngaaataagctttgtggtgcta

SEQ ID NO: 8898 - protein, 50 aa, Rattus norvegicus
  ref <308>: DATABASE ACCESSION NUMBER: SWISS-Prot / AAB81886
  ref <309>: DATABASE ENTRY DATE: 2001-12-01
MQTSLGNFVTTTGISSTRTPRPRRESVYFDLIKLKIFHQITQENPGSRNI

SEQ ID NO: 8899 - DNA, 234 bp, Rattus norvegicus
  ref <308>: DATABASE ACCESSION NUMBER: EMBL / U75927
  ref <309>: DATABASE ENTRY DATE: 2000-07-30
aatggttaaggactgctttattggtggcagttaatacacatcaataaatattgatccccatagaagagttcagttattcatcaggttcctggtccatcgcgcagtgaatgaaactgaaccatgtggagactgggatgacgacgtcagttctgcttcttggggaatgcagccatagctaacatatagatggcatacgctgttccaccaactgtcagaagcattgtggctctgtaa

SEQ ID NO: 8900 - protein, 83 aa, Rattus norvegicus
  ref <308>: DATABASE ACCESSION NUMBER: Refseq / NP_071948
  ref <309>: DATABASE ENTRY DATE: 2002-11-05
MLRNVLALRQIAQRTISTTSRRHFENKVPEKQKLFQEDNGMPVHLKGGTSDALLYRATMLLTVGGTAYAIYMLAMAAFPKKQN

SEQ ID NO: 8901 - DNA, 470 bp, Homo sapiens
  ref <308>: DATABASE ACCESSION NUMBER: Refseq / NM_001865
  ref <309>: DATABASE ENTRY DATE: 2002-11-05
gtagttccggttccggcgtggccattttcgttggtggtgttcagttgtggcggttgctggtcagtaacagccaagatgctgcggaatctgctggctcttcgtcagattgggcagaggacgataagcactgcttcccgcaggcattttaaaaataaagttccggagaagcaaaaactgttccaggaggatgatgaaattccactgtatctaaagggtggggtagctgatgccctcctgtatagagccaccatgattcttacagttggtggaacagcatatgccatatatgagctggctgtggcttcatttcccaagaagcaggagtgacttcagtcatcccagcaatcgcttggttcagtttcattcagctctctatggaccagtaatctgataaataaccgagctcttctttggggatcaatatttattgacttgtagtaactgccaccaataaagcagtctttaccatg

SEQ ID NO: 8902 - protein, 83 aa, Homo sapiens
  ref <308>: DATABASE ACCESSION NUMBER: SWISS-Prot / P14406
  ref <309>: DATABASE ENTRY DATE: 2002-06-15
MLRNLLALRQIGQRTISTASRRHFKNKVPEKQKLFQEDDEIPLYLKGGVADALLYRATMILTVGGTAYAIYELAVASFPKKQE

SEQ ID NO: 8903 - DNA, 2899 bp, Rattus norvegicus
  ref <308>: DATABASE ACCESSION NUMBER: EMBL / U75973
  ref <309>: DATABASE ENTRY DATE: 2000-03-04
agaaagaccaaagttgccagagatgtggaacgctcagcaggacagcgactccgcggaggccctgggacgccgccaacgctggttctgtgctggaacactggtgctggctttcactggaaccttcatcattggcttcctctttgggtggtttataaaaccctccaatgattctactagcagtgtttcctatcctggcatgaagaaggcatttttgcaagaattgaaggctgagaacatcaaaaaatttttatacaatttcacacggacaccacatttggcagggacacaacacaattttgagcttgcaaagcaaattcatgcccagtggaaagaatttggcctggatttggttgagttatctgattatgatgtcctgttgtcctacccaaataagacccatcccaactatatctcaataattaatgaagatggaaatgagattttcaaaacatcattagctgaactgtcacccccgggatatgagaacatatcagatgtagtgccaccatacagtgccttctctccacaagggacaccagagggggatctagtatatgttaactatgcacgaactgaagacttctttaaactggaacgggtcatgaagatcaattgttctgggaagattgtcatcgccagatatgggcaagtgttcagaggaaataaggttaaaaatgctcagctggcaggtgcaaaaggaatcattctgtactcagaccctgctgattactttgttcctggggtgaagtcctatccagatggttggaacctccctggaggtggtgttcagcgtggaaatgtcttaaatcttaatggtgcaggtgatcccctcacaccaggttatccagcaaatgaatatgcctacaggcatgaattcacagaagctgtcggtcttccaagtattcctgtccatccaattggatatgatgatgcacagaaactattagaacatatgggtggctccgcaccccctgacagcagctggaagggaggactaaaagtgccttacaacgtgggacctggctttgctggaaacttttcaaaacaaaaggtcaagctgcatattcactcctacaataaagtgacaagaatctacaatgttattggtaccctcaaaggagctgtggaaccagacagatatgttattcttggagggcacagagatgcttgggtgtttggtggcattgaccctcagagtggagcagctgttgttcatgaaattgtcaggacctttggaactctgaagaagaaaggttggaggcctagaagaactattttgtttgcaagctgggatgctgaagaatttggccttcttggttctactgagtgggcagaggaacattcaagactcttacaagaacgtggtgtggcttatatcaacgctgattcttccatagaaggaaactacactctcagagttgattgcacaccactgatgcacagcttagtatacaacctaacaaaagagctgccaagcccggatgaaggctttgaaggcaaatctctttatgacagctggaaagaaaaaagtccttcaactgagttcattggaatgccaaggattagcaagctggggtctggcaatgattttgaagtgtttttccaaagacttggaattgcttcaggcagagcccggtatactaaaaattggaaaaacaacaaagtcagcagctatcctctctatcacagtgtctatgaaacatacgaattggtagaaaaattctatgatccgacatttaaatatcacctcactgtggcccaggttcgaggagcaatggtatttgaattggccaattctatagtgcttccctttgactgccaaagttatgctgtagctctgaagaaacatgctgagactatctacaacatttcaatgaatcatccacaggagatgaaggcgtacatgatatcatttgattcgctgttttctgcagtaaataattttacagatgttgcatccaagttcaatcagagactgcaagacttagacaagagcaaccccatattactgagaattttgaatgatcagctaatgtatctggaacgtgcattcattgatcctttaggattaccaggaaggcctttctacaggcatatcatctatgctccaagcagccacaacaagtatgcaggagaatcattcccagggatttatgatgccctttttgatattaataacaaagtcgacacttctaaggcctggagagaagtgaagagacagatttctattgcagccttcacagtgcaagctgcagcagagactctgagagaagtagactaagcagtctttacagaattcataaaaaactgatttgtggatcaaaagacaaaagtgaataatttcataatgacttataattttggcatgtattactaaaatttaaaattcaataggtattaaaactaatgtaaacagcctaataaaatgacacatttgacagtattagataattatccgaaatctaatacacccttcccaaatctaccctgtagttttacttcattatggaatacatcttggatagttcacaattctgctctacctgggggcctatatgctctctggtcaccaaaggctgggaggatcattatagtcaccctagcagacgagttctaatttattctctcttcttgtaaacctaattcctctttattgaaaagtttaagtatataggccaaggtcttgtctgtggctccctatggaggatcctgataaaaagcggcagtccatggttttaaggtatttatgatctaaaactctataaattgtaaaagtacaactactaattaacatctatagtctcagtaactgaacttctgaacaaatgcattatttatatgaaatataatcatggtcttgaattttatgtttataatgtctctttttatatagaattac

SEQ ID NO: 8904 - protein, 752 aa, Rattus norvegicus
  ref <308>: DATABASE ACCESSION NUMBER: SWISS-Prot / P70627
  ref <309>: DATABASE ENTRY DATE: 2002-06-15
MWNAQQDSDSAEALGRRQRWFCAGTLVLAFTGTFIIGFLFGWFIKPSNDSTSSVSYPGMKKAFLQELKAENIKKFLYNFTRTPHLAGTQHNFELAKQIHAQWKEFGLDLVELSDYDVLLSYPNKTHPNYISIINEDGNEIFKTSLAELSPPGYENISDVVPPYSAFSPQGTPEGDLVYVNYARTEDFFKLERVMKINCSGKIVIARYGQVFRGNKVKNAQLAGAKGIILYSDPADYFVPGVKSYPDGWNLPGGGVQRGNVLNLNGAGDPLTPGYPANEYAYRHEFTEAVGLPSIPVHPIGYDDAQKLLEHMGGSAPPDSSWKGGLKVPYNVGPGFAGNFSKQKVKLHIHSYNKVTRIYNVIGTLKGAVEPDRYVILGGHRDAWVFGGIDPQSGAAVVHEIVRTFGTLKKKGWRPRRTILFASWDAEEFGLLGSTEWAEEHSRLLQERGVAYINADSSIEGNYTLRVDCTPLMHSLVYNLTKELPSPDEGFEGKSLYDSWKEKSPSTEFIGMPRISKLGSGNDFEVFFQRLGIASGRARYTKNWKNNKVSSYPLYHSVYETYELVEKFYDPTFKYHLTVAQVRGAMVFELANSIVLPFDCQSYAVALKKHAETIYNISMNHPQEMKAYMISFDSLFSAVNNFTDVASKFNQRLQDLDKSNPILLRILNDQLMYLERAFIDPLGLPGRPFYRHIIYAPSSHNKYAGESFPGIYDALFDINNKVDTSKAWREVKRQISIAAFTVQAAAETLREVD

SEQ ID NO: 8905 - DNA, 573 bp, Homo sapiens
  ref <308>: DATABASE ACCESSION NUMBER: EMBL / AF254357
  ref <309>: DATABASE ENTRY DATE: 2000-05-24
cctttcagtgctttctctcctcaaggaatgccagagggcgatctagtgtatgttaactatgcacgaactgaagacttctttaaattggaacgggacatgaaaatcaattgctctgggaaaattgtaattgccagatatgggaaagttttcagaggaaataagaatatgcttataggcgtggaattgcagaggctgttggtcttccaagtattcctgttcatccaattggatactatgatgcacagaagctcctagaaaaaatgggtggctcagcaccaccagatagcagctggagaggaagtctcaaagtgccctacaatgttggacctggctttactggaaacttttctacacaaaaagtcaagatgcacatccactctaccaatgaagtgacaagaatttacaatgtgataggtactctcagaggagcagtggaaccagacagatatgtcattctgggaggtcaccgggactcatgggtgtttggtggtattgaccctcagagtggagcagctgttgttcatgaaattgtgaggagctttggaacactgaaaaaggaagggtggagaccta

SEQ ID NO: 8906 - protein, 750 aa, Homo sapiens
  ref <308>: DATABASE ACCESSION NUMBER: SWISS-Prot / Q04609
  ref <309>: DATABASE ENTRY DATE: 2002-06-15
MWNLLHETDSAVATARRPRWLCAGALVLAGGFFLLGFLFGWFIKSSNEATNITPKHNMKAFLDELKAENIKKFLYNFTQIPHLAGTEQNFQLAKQIQSQWKEFGLDSVELAHYDVLLSYPNKTHPNYISIINEDGNEIFNTSLFEPPPPGYENVSDIVPPFSAFSPQGMPEGDLVYVNYARTEDFFKLERDMKINCSGKIVIARYGKVFRGNKVKNAQLAGAKGVILYSDPADYFAPGVKSYPDGWNLPGGGVQRGNILNLNGAGDPLTPGYPANEYAYRRGIAEAVGLPSIPVHPIGYYDAQKLLEKMGGSAPPDSSWRGSLKVPYNVGPGFTGNFSTQKVKMHIHSTNEVTRIYNVIGTLRGAVEPDRYVILGGHRDSWVFGGIDPQSGAAVVHEIVRSFGTLKKEGWRPRRTILFASWDAEEFGLLGSTEWAEENSRLLQERGVAYINADSSIEGNYTLRVDCTPLMYSLVHNLTKELKSPDEGFEGKSLYESWTKKSPSPEFSGMPRISKLGSGNDFEVFFQRLGIASGRARYTKNWETNKFSGYPLYHSVYETYELVEKFYDPMFKYHLTVAQVRGGMVFELANSIVLPFDCRDYAVVLRKYADKIYSISMKHPQEMKTYSVSFDSLFSAVKNFTEIASKFSERLQDFDKSNPIVLRMMNDQLMFLERAFIDPLGLPDRPFYRHVIYAPSSHNKYAGESFPGIYDALFDIESKVDPSKAWGEVKRQIYVAAFTVQAAAETLSEVA

SEQ ID NO: 8907 - DNA, 1690 bp, Rattus norvegicus
  ref <308>: DATABASE ACCESSION NUMBER: EMBL / U76206
  ref <309>: DATABASE ENTRY DATE: 2001-11-16
aattctctcttccgcaccctgggttctgtggatgaaacttgcctctgagaatcctgaacatggagaaatagagataaataccccagaagagggggagtaagtgttcacaaccttggtgggtttcgcctcatgtctgtccctccactttaagagatgccggtcacctgagggccacaaactgcgctctaagtaaccagcctgcctttctacccagatctttgtctccagaagtgagaagatggacaacacaacaaccacagaacctccaaagcagccctgcacccggaacaccctgatcacacagcagatcatccccatgttgtactgtgtggtcttcatcacaggggtcctcctcaacggaatatcgggatggatattcttttacgtgcccagctctaagagttttatcatctatctcaagaacatagttgtggctgactttctcatgggcctcactttccctttcaaagtcctcagcgactcaggcctcggtccctggcagctgaatgtgtttgtattcagggtgtctgccgtgatcttctacgtcaacatgtacgtcagcatcgcgttcttcgggctcatcagctttgacaggtactataaaatcgtgaagccccttctggtgtctatcgtccagtcagtgaactacagcaaagtgctgtccgtgcttgtgtgggtgctcatgcttctcctcgctgtccccaacatcattctgacaaaccagagtgtcaaggatgtcactaacatacagtgcatggaactcaaaaacgagctggggcggaagtggcacaaggcgtctaactatgtcttcgtgagcattttctggatcgtgttccttctgctgaccgtcttctacatggccataacgaggaagatcttcaagtctcacctcaagtccagaaagaattccatctccgtcaaaaggaagtccagccgcaatatattcagcattgtgctcgcatttgtcgcctgtttcgcgccttaccacgttgccaggatcccctacaccaagagccagacggaaggacactacagctgccaggccaaggagaccctgctctatacgaaagaattcaccctgctgctctcggctgccaatgtgtgtctggaccccatatctatttcttcttatgccagccgtttagagaagtcttgaataagaagttaagaatgtcactaacagtccagaatgacctagagacttccaaaaccagaaggggaaatatgattcaggaaagcacagatactttgcaattctcaccctttccaagtattatggaccttgttacacggtaattaagatgtatgaagtgaaaagcagaaaagtataataaaaatgaaaggtaagttcccatgtaaagtgaaagtctacagcacgcagaaaagtataataaaaatgaaaggtaagttcccatgtaaagtgaaagtctacagcacgtcacatctttttagaaatcgaatggagaagtggcatgtgggtgctagtctgcgagttaccccaaaactaaactctctcttctattaacgggcttcttagaagacacccaccctttcagaagttcctcctgagtatccttctaagtaatgctcacctctgtttcatgctttgttctgtgtatgcgccaataaacaagttgtctttaaaaccccaaaaaaaaaaaaaaaaaaaagtactagtcgacgcgtggcc

SEQ ID NO: 8908 - protein, 305 aa, Rattus norvegicus
  ref <308>: DATABASE ACCESSION NUMBER: SWISS-Prot / O35881
  ref <309>: DATABASE ENTRY DATE: 2002-06-15
MDNTTTTEPPKQPCTRNTLITQQIIPMLYCVVFITGVLLNGISGWIFFYVPSSKSFIIYLKNIVVADFLMGLTFPFKVLSDSGLGPWQLNVFVFRVSAVIFYVNMYVSIAFFGLISFDRYYKIVKPLLVSIVQSVNYSKVLSVLVWVLMLLLAVPNIILTNQSVKDVTNIQCMELKNELGRKWHKASNYVFVSIFWIVFLLLTVFYMAITRKIFKSHLKSRKNSISVKRKSSRNIFSIVLAFVACFAPYHVARIPYTKSQTEGHYSCQAKETLLYTKEFTLLLSAANVCLDPISISSYASRLEKS

SEQ ID NO: 8909 - DNA, 2416 bp, Homo sapiens
  ref <308>: DATABASE ACCESSION NUMBER: EMBL / D13626
  ref <309>: DATABASE ENTRY DATE: 2002-09-02
gaacagtgttaccttggagcctacaatgagaggtatttcaaaatgagtgaagcatgactctcacagatgaaggcctagacgcaggatctttaatggaaaaacacttgggccacttcaagacgacaaacgctcactgggcaaaacaccttcactgaaaagagacctcatattatgcaaaaaaaatcttaagaggcctctgccttcagaagttacaagatgatcaattcaacctccacacagcctccagatgaatcctgctctcagaacctcctgatcactcagcagatcattcctgtgctgtactgtatggtcttcattgcgggaatcctactcaatggagtgtcaggatggatattcttttacgtgcccagctctaagagtttcatcatctatctcaagaacattgttattgctgactttgtgatgagcctgacttttcctttcaagatccttggtgactcaggccttggtccctggcagctgaacgtgtttgtgtgcagggtctctgccgtgctcttctacgtcaacatgtacgtcagcattgtgttctttgggctcatcagctttgacaggtattataaaattgtaaagcctctttggacttctttcatccagtcagtgagttacagcaaacttctgtcagtgatagtatggatgctcatgctcctccttgctgttccaaatattattctcaccaaccagagtgttagggaggttacacaaataaaatgtatagaactgaaaagtgaactgggacggaagtggcacaaagcatcaaactacatcttcgtggccatcttctggattgtgtttcttttgttaatcgttttctatactgctatcacaaagaaaatctttaagtcccaccttaagtcaagtcggaattccacttcggtcaaaaagaaatctagccgcaacatattcagcatcgtgtttgtgttttttgtctgttttgtaccttaccatattgccagaatcccctacacaaagagtcagaccgaagctcattacagctgccagtcaaaagaaatcttgcggtatatgaaagaattcactctgctactatctgctgcaaatgtatgcttggaccctattatttatttctttctatgccagccgtttagggaaatcttatgtaagaaattgcacattccattaaaagctcagaatgacctagacatttccagaatcaaaagaggaaatacaacacttgaaagcacagatactttgtgagttcctaccctcttccaaagaaagaccacgtgtgcatgttgtcatcttcaattacataacagaaatcaataagatatgtgccctcatcataaatatcatctctagcactgccatccaatttagttcaataaaattcaaatataagtttccatgcttttttgtaacatcaaagaaaacatacccatcagtaatttctctaatactgacctttctattctctattaataaaaaattaatacatacaattattcaattctattatattaaaataagttaaagtttataaccactagtctggtcagttaatgtagaaatttaaatagtaaataaaacacaacataatcaaagacaactcactcaggcatcttctttctctaaataccagaatctagtatgtaattgttttcaacactgtccttaaagactaacttgaaagcaggcacagtttgatgaagggctagagagctgtttgcaataaaaagtcaggtttttttcctgatttgaagaagcaggaaaagctgacacccagacaatcacttaagaaaccccttattgatgtatttcatggcactgcaaaggaagaggaatattaattgtatacttagcaagaaaattttttttttctgatagcactttgaggatattagatacatgctaaatatgttttctacaaagacttacgtcatttaatgagcctggggttctggtgttagaatatttttaagtaggctttactgagagaaactaaatattggcatacgttatcagcaacttcccctgttcaatagtatgggaaaaataagatgactgggaaaaagacacacccacaccgtagaacatatattaatctactggcgaatgggaaaggagaccattttcttagaaagcaaataaacttgatttttttaaatctaaaatttacattaatgagtgcaaaataacacataaaatgaaaattcacacatcacatttttctggaaaacagacggattttacttctggagacatggcatacggttactgacttatgagctaccaaaactaaattctttctctgctattaactggctagaagacattcatctatttttcaaatgttctttcaaaacatttttataagtaatgtttgtatctatttcatgctttactgtctatatactaataaagaaatgttttaatactg

SEQ ID NO: 8910 - protein, 338 aa, Homo sapiens
  ref <308>: DATABASE ACCESSION NUMBER: SWISS-Prot / Q15391
  ref <309>: DATABASE ENTRY DATE: 2002-06-15
MINSTSTQPPDESCSQNLLITQQIIPVLYCMVFIAGILLNGVSGWIFFYVPSSKSFIIYLKNIVIADFVMSLTFPFKILGDSGLGPWQLNVFVCRVSAVLFYVNMYVSIVFFGLISFDRYYKIVKPLWTSFIQSVSYSKLLSVIVWMLMLLLAVPNIILTNQSVREVTQIKCIELKSELGRKWHKASNYIFVAIFWIVFLLLIVFYTAITKKIFKSHLKSSRNSTSVKKKSSRNIFSIVFVFFVCFVPYHIARIPYTKSQTEAHYSCQSKEILRYMKEFTLLLSAANVCLDPIIYFFLCQPFREILCKKLHIPLKAQNDLDISRIKRGNTTLESTDTL

SEQ ID NO: 8911 - DNA, 1719 bp, Rattus norvegicus
  ref <308>: DATABASE ACCESSION NUMBER: EMBL / U76252
  ref <309>: DATABASE ENTRY DATE: 2000-03-04
atggcatggggccataggaccacagtctgcctggtcctgctgggtgtgagtctgggtctggccatcattgtgctggctgtggtccttcctcatcaccaagcctcttgccgtcccgatgccttcactcgtgctgccgtagctgctgactctaagatctgctcagatattggacgagtcatcctccagcagcagggctcacctgtggacgccgccattgctgccctcatctgtaccggtgttgttaaccctcagagcatgggcctgggcggaggggtcgtcttcaccatctacaatgcatctacagggaaggtggaggtcatcaatgctcgggagacagtgccagccagccatgaccagagactgctagaccagtgtacaaatgccctgccactgtgcacaggggcccagtggatcggggttcctggtgagctccgcggctatgctgaggcgcaccgccgatacggccgcctgccttgggctcagcttttccagcccaccattgccctgctccgagagggtttccgtgtgccccctatcctcagtcagttcctcaacaccagcttcctgcagccctgcttgaattcatcaaccctgagacatctcttcttcaatgggacagaaaccttgagatctcaggacccactcccatggcctgcgctggccaacaccttggagactgtggctaaggagggtgcagaggtcttatacaccggaaagctgggacaaacgctggtggaagacattgcctggcaaggaagccagctgacggttcaggacttggctgccttccggccgaaagtggtggaacccctggagatggccctaggaaactataccctgtactctccaccgccgcctgcagggggcgctattcttagcttcattctcaacgtgctgaaagggttcaacttttctgcagagacggtggccgggcctgaagggaaggtgaacatgtaccaccaccttgtagagacgctcaagttcgcagtagggcagaggtggcggctatgggacccctacagccacccagggatacagaacatctcccaggaccttctccgggagactctagcccagcacatccgccagcagattgatggccgtggtgaccaccagctcagccattacaacctgtccggggtcaggggcaacagcatgggcacgtctcatgtgtctgtgttgggagaagacggcagcgctgtggcagccaccagcaccatcaacacaccctttggagcgatggtgtactccccacggacaggcatcctcctcaacaacgagctactagacttatgctggagacacaagccaggttcaacggtcacccctccccctgttccaggtgagcagccaccatcatccatggtaccctccatcttgatcaacgaagtccaggggtcgaagctggtgatcggtggggctggtggggagcttatcatctctgctgtgacccaggctatcgtgaataagctgtggcttggctttagcctgacagacgccatcgcagcgcccatcctacatgtgaatagcaagggccacgtggaatatgagcccaagtttaaccaggaggttcggaaggggctacaggaccgaggccagagccagagccagagccagaggccggttttcctgaattcggtccaggctgtgtttcaggaagggccctgtgtctatgcagcatctgacctgaggaaggctggaaaggcttcaggatactaa

SEQ ID NO: 8912 - protein, 568 aa, Rattus norvegicus
  ref <308>: DATABASE ACCESSION NUMBER: SWISS-Prot / P07314
  ref <309>: DATABASE ENTRY DATE: 2002-06-15
MKNRFLVLGLVAVVLVFVIIGLCIWLPTTSGKPDHVYSKAAVATDAKRCSEIGRDMLQEGGSVVDAAIASLLCMGLINAHSMGIGGGLFFTIYNSTTRKAEVINAREMAPRLANTSMFNNSKDSEEGGLSVAVPGEIRGYELAHQRHGRLPWARLFQPSIQLARHGFPVGKGLARALDKKRDIIEKTPALCEVFCRQGKVLQEGETVTMPKLADTLQILAQEGARAFYNGSLTAQIVKDIQEAGGIMTVEDLNNYRAEVIEHPMSIGLGDSTLYVPSAPLSGPVLILILNILKGYNFSPKSVATPEQKALTYHRIVEAFRFAYAKRTMLGDPKFVDVSQVIRNMSSEFYATQLRARITDETTHPTAYYEAEFYLPDDGGTAHLSVVSEDGSAVAATSTINLYFGSKVLSRVSGILFNDEMDDFSSPNFTNQFGVAPSPANFIKPGKQPLSSMCPSIIVDKDGKVRMVVGASGGTQITTSVALAIINSLWFGYDVKRAVEEPRLHNQLLPNTTTVEKNIDQVVTAGLKTRHHHTEVTPDFIAVVQAVVRTSGGWAAASDSRKGGEPAGY

SEQ ID NO: 8913 - DNA, 2444 bp, Homo sapiens
  ref <308>: DATABASE ACCESSION NUMBER: EMBL / AL117414
  ref <309>: DATABASE ENTRY DATE: 2000-02-18
gggccactccgtagtgtgcacttggtgagggcagcagctcgccacagctgccagccatctgtccattcacccatctgtccgtctggcagcccgctgttcagacctgtctgtctgtccgcccatctgtaagcccatctctgtcccattgtctatctgaccatctttctcttactgtcctctttgtctagctatctggcctatctgtcgatccatcttcgtgtctgtcttcagcccccacctgtttgtccatctgtccaattacctgtgactctgtgcatcttcttgtccattcatctgcccacccatccgtccctccgtctgcccaccagccgcccctctcctcctgggctgcagagccatggcccggggctacggggccacggtcagcctagtcctgctgggtctggggctggcgctggctgtcattgtgctggctgtggtcctctctcgacaccaggccccatgtggcccccaggcctttgcccacgctgctgttgccgccgactccaaggtctgctcggatattggacgagccatcctccagcagcagggctcacccgtggatgccaccatcgcggctctggtctgcaccagcgtcgtcaaccctcagagcatgggcctgggcggaggggtcatcttcaccatctacaatgtgacaacaggggcccagtggatcggggtgcccggggagctccgtggctatgccgaggcccaccgccgccatggccgcctgccctgggcgcagctgttccagcccaccatcgcgctgctccgaggggggcatgtggtggcccctgtcctcagccgtttcctgcacaacagcatcctgcggccttccttgcaggcgtcaaccctgcgccagctcttcttcaacgggacagaacccctgaggcctcaggacccactcccatggcctgcactggccaccaccctggagaccgtggccacagagggcgtggaggtcttctacacggggaggctgggccagatgctggtggaggacattgccaaggaagggagccagctgacgctgcaggacctggccaagttccagcccgaggtggtggatgccctggaggtgcccctgggggactataccctgtactcaccaccgccgcctgcagggggtgccattctcagctttatcctcaacgtgctaagagggttcaacttctcaacagagtctatggccaggcctgaagggagggtgaacgtgtaccaccaccttgtagagacgctcaagtttgccaaggggcagaggtggaggctgggggaccctcgaagccacccgaagctccagaatgcctcccgggacctgctgggggagaccctggcccagctcatccgccaacagatcgatggccggggggaccaccagctcagccactacagcttggccgaggcctggggccacgggacaggcacgtcccatgtgtcagtgctgggggaggatggcagcgccgtggctgccaccagcaccatctacacaccctttggagcgatggtgtattcaccacggacaggcatcatcctcaacaacgagctcctggacttatgcgagcgatgcccccggggttccggcaccaccccctcacctgtgagggagacagggtgggtggagctcccggaaggtgctggcccccagttccaggcgagcgttccccatcctccatggtgccctccatcttgatcaacaaagcccaggggtcgaagctagtgattggcggggctggcggggagctcatcatctctgctgtggcccaggccatcatgagcaagctgtggcttggctttgacctgagagcggccattgcagcccccatcctgcatgtcaacagcaagggctgtgtggagtacgagcccaacttcagccagagacggtgtcttgctttgttgccctggctgttctcaaactcctggcctcaagtgatcctgccaccttggctcccaagtggctaagactgtaggaggtgcagaggggactccaagaccgtggccagaaccagacccagaggcccttcttcctgaacgtggtccaggctgtgtcccaggagggggcctgtgtgtacgccgtctcggacctgaggaagagtggggaggccgcaggctactaagacactgctctgcccagagctgaagtctggccccaccatgagtcctgtgtccaggccggacatggctgggggaccaactactctggcaggatctggacccctggcaggggagtccagctgagagtggaagaggtggcggggaccagctgggcagatgagaggctgagcctcatccctaaccccctttcccagagcccctggtggtcctgaaccggcccctctatccctccgcaggcctcttgcctggggccactctcccaccctctcgatctgtatatcctccagtccaagattaaagaggcggactatgaaaaaaaaaaaaaaaaaaac

SEQ ID NO: 8914 - protein, 586 aa, Homo sapiens
  ref <308>: DATABASE ACCESSION NUMBER: SWISS-Prot / P36269
  ref <309>: DATABASE ENTRY DATE: 2002-06-15
MARGYGATVSLVLLGLGLALAVIVLAVVLSRHQAPCGPQAFAHAAVAADSKVCSDIGRAILQQQGSPVDATIAALVCTSVVNPQSMGLGGGVIFTIYNVTTGKVEVINARETVPASHAPSLLDQCAQALPLGTGAQWIGVPGELRGYAEAHRRHGRLPWAQLFQPTIALLRGGHVVAPVLSRFLHNSILRPSLQASTLRQLFFNGTEPLRPQDPLPWPALATTLETVATEGVEVFYTGRLGQMLVEDIAKEGSQLTLQDLAKFQPEVVDALEVPLGDYTLYSPPPPAGGAILSFILNVLRGFNFSTESMARPEGRVNVYHHLVETLKFARGQRWRLGDPRSHPKLQNASRDLLGETLAQLIRQQIDGRGDHQLSHYSLAEAWGHGTGTSHVSVLGEDGSAVAATSTINTPFGAMVYSPRTGIILNNELLDLCERCPWGSGTTPSPVSGDRVGGAPGRCWPPVPGERSPSSMVPSILINKAQGSKLVIGGAGGELIISAVAQAIMSKLWLGFDLRAAIAAPILHVNSKGCVEYEPNFSQEVQRGLQDRGQNQTQRPFFLNVVQAVSQEGACVYAVSDLRKSGEAAGY

SEQ ID NO: 8915 - DNA, 4039 bp, Rattus norvegicus
  misc_feature (1)..(4039): n=a, c, g or t
  ref <308>: DATABASE ACCESSION NUMBER: EMBL / U76557
  ref <309>: DATABASE ENTRY DATE: 2000-03-04
agcatacactgctgtgcatctacttcaacttgctttctataagaatcttctatcgtaggatcatatttttcaacaaaaattccttgaacaaactgtacagtcagagccgacttcccaacacctcctgagccaagaacgactagcttatattcacgcatgatgcacacttgttacacttagtacctctcgcgctgtgttgtttcggtcgaggagccgtcgccgccatttcaagacagtgcgagaaacattcttgttagtagtggcggcagtagaagtcaattatccccttgttctatctcaagaagctccagatggcgtcttccgtgggcaacgtggccgacagcacagggttagctgagttggcacatcgggaatatcaggcaggagactttgaggcagctgagagacactgcatgcagctctggagacaagagcctgacaatactggtgttcttttattactttcatctatacatttccagtgtcgaaggctggacagatctgctcactttagcaccttggcaattaaacagaatccccttctagcagaagcctattcgaatttgggaaatgtatacaaggaaagagggcaattacaggaagcaattgagcattatcgacatgctttgcggctcaagcctgatttcattgatggttatattaacctggcagcagccttggtagcagcaggtgacatggagggagcagtgcaagcatacgtctctgctcttcagtacaatcctgatttgtactgtgttcgcagtgacctggggaacctgctcaaagccctgggtcgcttggaagaagccaaggcatgttatttgaaagcaattgagacgcaaccaaactttgctgtagcctggagtaatctcggctgtgttttcaatgcacaaggggagatttggctggcaattcatcactttgaaaaggctgtcacccttgacccaaattttctggatgcttatatcaatttaggaaatgttttgaaagaggcacggatttttgacagagctgtggcagcttatcttcgtgccttaagtttgagcccaaatcatgcggtggtacacggcaacctggcttgtgtgtactatgagcaaggccttatagacctggccattgatacctacaggcgagctatagaactgcagcctcatttccctgatgcatactgcaacctagcaaatgctctcaaagagaagggcagtgttgctgaagcagaagattgttataacacagctcttcgtctgtgtcctacccatgcagactctttgaataaccttgccaacatcaaacgggaacagggcaatattgaagaggcagttcgcctgtatcgcaaagcattagaggtcttcccagagtttgctgctgcacattccaatttagcaagtgtactgcaacagcagggcaagctgcaggaagcactgatgcactataaggaagccataagaatcagtcctacatttgctgatgcttattccaatatgggaaacactttaaaggagatgcaggatgttcagggagctttgcagtgttatactcgtgccatccagattaatcctgccttcgcagatgcacacagcaatctggcttccattcacaaggattcagggaatattccagaagcaatagcttcttaccgcacagctctgaaacttaagcctgactttcctgatgcttattgtaacttggctcattgcctacagattgtctgtgattggacagactatgatgagcggatgaagaaattggttagtattgtagctgagcagctagagaagaataggctgccttctgtccatcctcatcacagcatgctgtaccctctttcccatggcttcaggaaggccattgcagagaggcatgggaatctctgcttggataagattaatgtccttcataaaccaccatatgagcatccaaaagacttgaagctcagtgatggccgattgcgtgtaggctatgtgagttctgactttgggaatcatcctacttcacaccttatgcagtctattccaggcatgcacaaccctgataagtttgaggtattctgctatgccttgagcccggatgacggtacaaacttccgagtgaaggtgatggcggaagccaatcacttcattgatctttctcagattccgtgcaatggaaaagcagctgaccgcatccaccaagatggaattcacatccttgtcaatatgaatgggtacaccaagggtgcccgaaatgagctctttgctctcaggccagctcctattcaggctatgtggctgggctaccctgggactagtggcgcactgttcatggattacatcatcactgatcaggaaacttccccagctgaagttgcagagcagtattctgaaaaactggcttatatgccccatacgttctttattggtgatcatgctaatatgttcccacacctgaagaaaaaagcagtcatcgattttaaatctaatgggcacatttatgacaatcgaatagttttgaatggcatcgatctcaaagcatttctcgatagtctacccgatgtgaagattgtcaagatgaaatgtcctgatggaggtgacaatgcagacaccactaacacagctcttaacatgcccgttattcccatgaatacgattgcagaagcagtaattgaaatgattaacagagggcagattcagataacaattaatggattcagtattagcaatggactggctactacacagatcaataacaaggctgcaactggagaggaagttccccgtaccattattgtaaccacccgttcccagtacgggctaccagaagatgccattgtgtactgtaactttaatcagttatataaaattgacccttctaccctgcagatgggggcaaatattctgaaacgtgtgcctaatagcgtgctttggctgttgcgttttccagcagtaggagagcccaatattcaacaatatgcacaaaatatgggccttccccagaaccgtatcattttctcacctgtggctcctaaagaggagcatgtcaggagaggtcagctggctgatgtctgcctggatactcctttgtgtaatggacataccacagggatggatgttctctgggcaggaacacccatggtgactatgccaggagagactcttgcctctcgagttgcagcttctcagctcacttgtctaggatgtcttgagctcattgctaaaagcagacaggaatatgaagacatagccgtgaaactggggaccgatctagaatacctgaagaaaattcgtggcaaagtatggaaacagagaatatctagccctctgttcaacaccaaacaatacacaatggaattagagcggctgtatctgcagatgtgggagcattatgcagctggcaacaaacccgaccacatgattaagcctgttgaagtcactgagtcagcctgaataaagactgcgcacaggagaattgcccctatacctgagcctcaaccttctgggggaaagggaactagataacatgctttatgcttatctgtatagtactgtgttgcagatgggtgatatataatgataatagaatagcacagccagacttgcttcctgcatgatagggagagacaagaaataagaaactactattccacaaggaatctctagagttttgcagcaaacaggtdgtgcacaggdctggaatgtttgctctcctttngtcttccatggatgcttaatgtggagggagatagagattaaccagccattttgtgattccgtggattgatcaaatcttctgatcctttatttttttctttatgttatggggtttgaagcttttaaaaatgtttgctttcaggtatttttttttcatgtgaagtgatcttgattcttctgagatgaggttttaaactaaaatgttgcttcctgttttagtgtctgaactctgacagggtgacagggaccttgctggtgtaatctttttataggttttataaaccacatgagcctatatcagtcattttagtgtctgacctaatgcttggcactgtcagtgctttgtgtaaatg

SEQ ID NO: 8916 - protein, 1036 aa, Rattus norvegicus
  ref <308>: DATABASE ACCESSION NUMBER: SWISS-Prot / P56558
  ref <309>: DATABASE ENTRY DATE: 2002-06-15
MASSVGNVADSTGLAELAHREYQAGDFEAAERHCMQLWRQEPDNTGVLLLLSSIHFQCRRLDRSAHFSTLAIKQNPLLAEAYSNLGNVYKERGQLQEAIEHYRHALRLKPDFIDGYINLAAALVAAGDMEGAVQAYVSALQYNPDLYCVRSDLGNLLKALGRLEEAKACYLKAIETQPNFAVAWSNLGCVFNAQGEIWLAIHHFEKAVTLDPNFLDAYINLGNVLKEARIFDRAVAAYLRALSLSPNHAVVHGNLACVYYEQGLIDLAIDTYRRAIELQPHFPDAYCNLANALKEKGSVAEAEDCYNTALRLCPTHADSLNNLANIKREQGNIEEAVRLYRKALEVFPEFAAAHSNLASVLQQQGKLQEALMHYKEAIRISPTFADAYSNMGNTLKEMQDVQGALQCYTRAIQINPAFADAHSNLASIHKDSGNIPEAIASYRTALKLKPDFPDAYCNLAHCLQIVCDWTDYDERMKKLVSIVAEQLEKNRLPSVHPHHSMLYPLSHGFRKAIAERHGNLCLDKINVLHKPPYEHPKDLKLSDGRLRVGYVSSDFGNHPTSHLMQSIPGMHNPDKFEVFCYALSPDDGTNFRVKVMAEANHFIDLSQIPCNGKAADRIHQDGIHILVNMNGYTKGARNELFALRPAPIQAMWLGYPGTSGALFMDYIITDQETSPAEVAEQYSEKLAYMPHTFFIGDHANMFPHLKKKAVIDFKSNGHIYDNRIVLNGIDLKAFLDSLPDVKIVKMKCPDGGDNADTTNTALNMPVIPMNTIAEAVIEMINRGQIQITINGFSISNGLATTQINNKAATGEEVPRTIIVTTRSQYGLPEDAIVYCNFNQLYKIDPSTLQMGANILKRVPNSVLWLLRFPAVGEPNIQQYAQNMGLPQNRIIFSPVAPKEEHVRRGQLADVCLDTPLCNGHTTGMDVLWAGTPMVTMPGETLASRVAASQLTCLGCLELIAKSRQEYEDIAVKLGTDLEYLKKIRGKVWKQRISSPLFNTKQYTMELERLYLQMWEHYAAGNKPDHMIKPVEVTESA
